United States Patent Application Publication US 2012/0159672 A1 - sequence listing, part 15

SEQ ID NO: 33685 - protein, 386 aa, Zea mays subsp. mays
  peptide (1)..(386): Ceres Seq. ID no. 12341278
  misc_feature (11)..(385): NCBI GI NO: 34907072 NR Description: OSJNBa0093F16.25
  misc_feature (72)..(356): NCBI GI NO: 37531434 NR Description: hypothetical protein
  misc_feature (68)..(386): NCBI GI NO: 34902348 NR Description: Hypothetical protein
  misc_feature (11)..(206): NCBI GI NO: 38345446 NR Description: OSJNBa0042L16.1
  misc_feature (231)..(359): NCBI GI NO: 38345446 NR Description: OSJNBa0042L16.1
  misc_feature (131)..(382): NCBI GI NO: 38344193 NR Description: OSJNBa0064G10.9
  misc_feature (11)..(103): NCBI GI NO: 38344193 NR Description: OSJNBa0064G10.9
  misc_feature (91)..(374): NCBI GI NO: 15451604 NR Description: Hypothetical protein [Oryza sativa]
  misc_feature (10)..(386): NCBI GI NO: 34902338 NR Description: Unknown protein
  misc_feature (95)..(330): NCBI GI NO: 32487803 NR Description: OSJNBa0035I04.14
MSRTFKSTTGLSRRFLNLIAANHSPGVKSLHRIGLGRIFNSTPGPIPNGDRLESAAGQEDYMVRPRALDIIRLPTPVMSFRSSASFESKEWKLDCFPLSDCKVFCMDQSGRGFLFDANSCGVSTVAHLHTPKVKPISLSIPQPNVDEDDHNDEWGSKLFILESMPEEPEVNCQFEAFIYRMRDVYPRVLKHWNRHLVPPPPPFIRETVNQNSRRLEVTSYAVIEDGSHICISIEGAGTYCMHTVSHTWNRVGEWTLPFRGKIEYVPELKLWFGTSAESGHLAAADLSAMDSQPQLVGTWKELDPPEGWKECKDSQVVNLGSGRFCIARFFKKNPVDVRSGDELPGQSFAVLTGVEVVNRGCDAEVELRMVTHKSRRVNSTTIETLF

SEQ ID NO: 33686 - protein, 325 aa, Zea mays subsp. mays
  peptide (1)..(325): Ceres Seq. ID no. 12341279
  misc_feature (1)..(324): NCBI GI NO: 34907072 NR Description: OSJNBa0093F16.25
  misc_feature (11)..(295): NCBI GI NO: 37531434 NR Description: hypothetical protein
  misc_feature (7)..(325): NCBI GI NO: 34902348 NR Description: Hypothetical protein
  misc_feature (1)..(145): NCBI GI NO: 38345446 NR Description: OSJNBa0042L16.1
  misc_feature (170)..(298): NCBI GI NO: 38345446 NR Description: OSJNBa0042L16.1
  misc_feature (70)..(321): NCBI GI NO: 38344193 NR Description: OSJNBa0064G10.9
  misc_feature (1)..(42): NCBI GI NO: 38344193 NR Description: OSJNBa0064G10.9
  misc_feature (30)..(313): NCBI GI NO: 15451604 NR Description: Hypothetical protein [Oryza sativa]
  misc_feature (1)..(325): NCBI GI NO: 34902338 NR Description: Unknown protein
  misc_feature (34)..(269): NCBI GI NO: 32487803 NR Description: OSJNBa0035I04.14
MVRPRALDIIRLPTPVMSFRSSASFESKEWKLDCFPLSDCKVFCMDQSGRGFLFDANSCGVSTVAHLHTPKVKPISLSIPQPNVDEDDHNDEWGSKLFILESMPEEPEVNCQFEAFIYRMRDVYPRVLKHWNRHLVPPPPPFIRETVNQNSRRLEVTSYAVIEDGSHICISIEGAGTYCMHTVSHTWNRVGEWTLPFRGKIEYVPELKLWFGTSAESGHLAAADLSAMDSQPQLVGTWKELDPPEGWKECKDSQVVNLGSGRFCIARFFKKNPVDVRSGDELPGQSFAVLTGVEVVNRGCDAEVELRMVTHKSRRVNSTTIETLF

SEQ ID NO: 33687 - protein, 309 aa, Zea mays subsp. mays
  peptide (1)..(309): Ceres Seq. ID no. 12341280
  misc_feature (1)..(308): NCBI GI NO: 34907072 NR Description: OSJNBa0093F16.25
  misc_feature (1)..(279): NCBI GI NO: 37531434 NR Description: hypothetical protein
  misc_feature (1)..(309): NCBI GI NO: 34902348 NR Description: Hypothetical protein
  misc_feature (1)..(129): NCBI GI NO: 38345446 NR Description: OSJNBa0042L16.1
  misc_feature (154)..(282): NCBI GI NO: 38345446 NR Description: OSJNBa0042L16.1
  misc_feature (54)..(305): NCBI GI NO: 38344193 NR Description: OSJNBa0064G10.9
  misc_feature (1)..(26): NCBI GI NO: 38344193 NR Description: OSJNBa0064G10.9
  misc_feature (14)..(297): NCBI GI NO: 15451604 NR Description: Hypothetical protein [Oryza sativa]
  misc_feature (1)..(309): NCBI GI NO: 34902338 NR Description: Unknown protein
  misc_feature (18)..(253): NCBI GI NO: 32487803 NR Description: OSJNBa0035I04.14
MSFRSSASFESKEWKLDCFPLSDCKVFCMDQSGRGFLFDANSCGVSTVAHLHTPKVKPISLSIPQPNVDEDDHNDEWGSKLFILESMPEEPEVNCQFEAFIYRMRDVYPRVLKHWNRHLVPPPPPFIRETVNQNSRRLEVTSYAVIEDGSHICISIEGAGTYCMHTVSHTWNRVGEWTLPFRGKIEYVPELKLWFGTSAESGHLAAADLSAMDSQPQLVGTWKELDPPEGWKECKDSQVVNLGSGRFCIARFFKKNPVDVRSGDELPGQSFAVLTGVEVVNRGCDAEVELRMVTHKSRRVNSTTIETLF

SEQ ID NO: 33688 - DNA, 1831 bp, Zea mays subsp. mays
  misc_feature (1)..(1831): Ceres Seq. ID no. 12413529
gcacgagaccattacctagaacatcctaatcgaaaaactccgcctccgctccccgctcgccgccgagattgctggattggctgccgccagcgccccggtgctagctcccgttcctcgcggtggtcgctggactagcctggacgccgcggcccgccgcctggtcgaagagatggactcggtcatggccgcccccgactcgccgccgcagactgtcgtgctcgtctctgccggcgccagccactccgtcgcgctcctcacgggcaatgtcctgtgctcgtggggcaggggcgaggacgggcagctcggccacggcgacgcggaggaccggctcgtgcccacggtgcttagcggcttcgacgcgcccgcgatcacgtcagtcatctgcggtgccgaccacaccaccgcctactccgaggacgagctgcaggtctacagctggggctggggagacttcgggaggctggggcatggcaactccagcgacgtcttcacgccccagcctgtcaaggcgctgcaggggctcaagatcaaacagattgcctgcggggacagccattgtcttgccgtcaccatggccggagaagtgcagagttggggccgtaaccaaaacggacagctaggccttggaaccactgaagactcgctgctcccacagaagattcaggcttttgagagtgtttgcgtgaaaatgattgctgccggtgccgaacatactgctgcagtaactgaagacggtgacctctacggatggggttggggtcgatatggaaacttaggtcttggtgaccgtaatgaccgtttgcttcctgaaaaagtatcttctgtggagggtgagaagatggtgcttgtggcatgtggatggcgccatacaattactgtttctgactctggtaatctgtacacttatggttggagcaaatacggtcaactagggcatggtgattttgaagatcatttagttccacataaagtagaagctttgaaagatagcactatatcccagatttcaggcggctggaggcatacgatggcacttacatcagagggaaagctttacggatggggatggaacaagttcggacaagtcggagtcggcaacaacgacgaccacagctcccccggacaagtcagttttccaggatcagaaaatctcccaggttgcatgcggatggaggcacactctggccctctccgagaagaaaaatgtcttctcctgggggaggggcactagcggacagctcggcaacggtgaaatagtcgacaggaacacacctgtgctgatcgatgccctgagctcagatggttctgcctgcaagaagctagagtcatccacggcagccccgttcgcagccaaagtttgggtgtcgccgtcagaacgatacgccattgtccctgacgagaacgtccgtaaagcaggcggaggcacggcacgaggcaacggcgccgacgcgaacgtgccggagaacgacgtgaagaggatgcgcgtgcagtcgtcgtagtaggtcttctactaccgtccactccaccccacccccgttaaccctactactagtagtaagtactacgaagaaccggtgccccatctagcggcgcccgatttttgtgcgttacgttctgcctaaaagtgctttccgtcgacggacggacctcctggtgttgagatggtagcggtagcactgcctcgcgggcgatggtgtgtgtgtgttgtgacgtgattcacctcttagagtagagaggtggctagcccagtcgacctgtgtgtgttgttaagatgtgtcctggatcttttgtgacattgcatgggagggtacaaataagcgcttcgtttctg

SEQ ID NO: 33689 - protein, 353 aa, Zea mays subsp. mays
  peptide (1)..(353): Ceres Seq. ID no. 12413530
  misc_feature (188)..(237): Pfam Name: RCC1 Pfam Description: Regulator of chromosome condensation
  misc_feature (5)..(328): NCBI GI NO: 11358913 NR Description: UVB-resistance protein UVR8
  misc_feature (5)..(328): NCBI GI NO: 15237540 NR Description: UVB-resistance protein UVR8 (gb|AAD43920
  misc_feature (1)..(220): NCBI GI NO: 21741206 NR Description: OSJNBb0086G13.1
  misc_feature (15)..(317): NCBI GI NO: 15237540 NR Description: UVB-resistance protein UVR8 (gb|AAD43920
  misc_feature (15)..(317): NCBI GI NO: 11358913 NR Description: UVB-resistance protein UVR8
  misc_feature (18)..(326): NCBI GI NO: 11358913 NR Description: UVB-resistance protein UVR8
  misc_feature (18)..(326): NCBI GI NO: 15237540 NR Description: UVB-resistance protein UVR8 (gb|AAD43920
  misc_feature (18)..(317): NCBI GI NO: 34852488 NR Description: similar to HECT domain and RCC1-like domain protein3
  misc_feature (18)..(317): NCBI GI NO: 37620181 NR Description: DKFZP564G092 protein [Homo sapiens]
  misc_feature (16)..(288): NCBI GI NO: 24643485 NR Description: CG11734-PB [Drosophila melanogaster]
MDSVMAAPDSPPQTVVLVSAGASHSVALLTGNVLCSWGRGEDGQLGHGDAEDRLVPTVLSGFDAPAITSVICGADHTTAYSEDELQVYSWGWGDFGRLGHGNSSDVFTPQPVKALQGLKIKQIACGDSHCLAVTMAGEVQSWGRNQNGQLGLGTTEDSLLPQKIQAFESVCVKMIAAGAEHTAAVTEDGDLYGWGWGRYGNLGLGDRNDRLLPEKVSSVEGEKMVLVACGWRHTITVSDSGNLYTYGWSKYGQLGHGDFEDHLVPHKVEALKDSTISQISGGWRHTMALTSEGKLYGWGWNKFGQVGVGNNDDHSSPGQVSFPGSENLPGCMRMEAHSGPLREEKCLLLGEGH

SEQ ID NO: 33690 - protein, 349 aa, Zea mays subsp. mays
  peptide (1)..(349): Ceres Seq. ID no. 12413531
  misc_feature (184)..(233): Pfam Name: RCC1 Pfam Description: Regulator of chromosome condensation
  misc_feature (1)..(324): NCBI GI NO: 11358913 NR Description: UVB-resistance protein UVR8
  misc_feature (1)..(324): NCBI GI NO: 15237540 NR Description: UVB-resistance protein UVR8 (gb|AAD43920
  misc_feature (1)..(216): NCBI GI NO: 21741206 NR Description: OSJNBb0086G13.1
  misc_feature (11)..(313): NCBI GI NO: 15237540 NR Description: UVB-resistance protein UVR8 (gb|AAD43920
  misc_feature (11)..(313): NCBI GI NO: 11358913 NR Description: UVB-resistance protein UVR8
  misc_feature (14)..(322): NCBI GI NO: 11358913 NR Description: UVB-resistance protein UVR8
  misc_feature (14)..(322): NCBI GI NO: 15237540 NR Description: UVB-resistance protein UVR8 (gb|AAD43920
  misc_feature (14)..(313): NCBI GI NO: 34852488 NR Description: similar to HECT domain and RCC1-like domain protein3
  misc_feature (14)..(313): NCBI GI NO: 37620181 NR Description: DKFZP564G092 protein [Homo sapiens]
  misc_feature (12)..(284): NCBI GI NO: 24643485 NR Description: CG11734-PB [Drosophila melanogaster]
MAAPDSPPQTVVLVSAGASHSVALLTGNVLCSWGRGEDGQLGHGDAEDRLVPTVLSGFDAPAITSVICGADHTTAYSEDELQVYSWGWGDFGRLGHGNSSDVFTPQPVKALQGLKIKQIACGDSHCLAVTMAGEVQSWGRNQNGQLGLGTTEDSLLPQKIQAFESVCVKMIAAGAEHTAAVTEDGDLYGWGWGRYGNLGLGDRNDRLLPEKVSSVEGEKMVLVACGWRHTITVSDSGNLYTYGWSKYGQLGHGDFEDHLVPHKVEALKDSTISQISGGWRHTMALTSEGKLYGWGWNKFGQVGVGNNDDHSSPGQVSFPGSENLPGCMRMEAHSGPLREEKCLLLGEGH

SEQ ID NO: 33691 - protein, 219 aa, Zea mays subsp. mays
  peptide (1)..(219): Ceres Seq. ID no. 12413532
  misc_feature (54)..(103): Pfam Name: RCC1 Pfam Description: Regulator of chromosome condensation
  misc_feature (1)..(194): NCBI GI NO: 11358913 NR Description: UVB-resistance protein UVR8
  misc_feature (1)..(194): NCBI GI NO: 15237540 NR Description: UVB-resistance protein UVR8 (gb|AAD43920
  misc_feature (1)..(86): NCBI GI NO: 21741206 NR Description: OSJNBb0086G13.1
  misc_feature (1)..(183): NCBI GI NO: 15237540 NR Description: UVB-resistance protein UVR8 (gb|AAD43920
  misc_feature (1)..(183): NCBI GI NO: 11358913 NR Description: UVB-resistance protein UVR8
  misc_feature (1)..(192): NCBI GI NO: 11358913 NR Description: UVB-resistance protein UVR8
  misc_feature (1)..(192): NCBI GI NO: 15237540 NR Description: UVB-resistance protein UVR8 (gb|AAD43920
  misc_feature (1)..(183): NCBI GI NO: 34852488 NR Description: similar to HECT domain and RCC1-like domain protein3
  misc_feature (1)..(183): NCBI GI NO: 37620181 NR Description: DKFZP564G092 protein [Homo sapiens]
  misc_feature (1)..(154): NCBI GI NO: 24643485 NR Description: CG11734-PB [Drosophila melanogaster]
MAGEVQSWGRNQNGQLGLGTTEDSLLPQKIQAFESVCVKMIAAGAEHTAAVTEDGDLYGWGWGRYGNLGLGDRNDRLLPEKVSSVEGEKMVLVACGWRHTITVSDSGNLYTYGWSKYGQLGHGDFEDHLVPHKVEALKDSTISQISGGWRHTMALTSEGKLYGWGWNKFGQVGVGNNDDHSSPGQVSFPGSENLPGCMRMEAHSGPLREEKCLLLGEGH

SEQ ID NO: 33692 - DNA, 1859 bp, Zea mays subsp. mays
  misc_feature (1)..(1859): Ceres Seq. ID no. 12343907
  misc_feature (878)..(878): n is a, c, t, g, unknown, or other
acacaccccatgccttgcctcctcctcctgcctgcctgcctgcctttccctcgccgctcgcggcaagatccacatgcagtagtaggagtaggagcagcaagcaacaagggagggagggagcgaggtcttgggctctcgctctcttgttagttcctgcgtgcttgccctgccctggatcggctttcaaatcgggaacaacgacagatccgaggctttctcgaatcgggcaggtccatcaaatcgcaagtttagccagccccagccccagccccaggcacagccagctagccgtcaaatcactcacactcatcaaatcaaaggggaccaaaaggatatctcctggctcctgcccctctcccctctcctctcctagcgagctactcgtataaaattcccctttcgactctccccccacccacatacctgactctcctccgatctctcagcacgctcctcttctgctaccttgctttccctgctgcgatccgttccttgctctattagtattagctagccggccggccggatcgatcgagcaaggagaggcgccccagcagtcctcgtcggatcgatccatctcgtcgacagcgtcagcgcctcaggtggatcggagcggaggtggtggaccggagctagtagctgccagccacacatttcggtcgtcggaaccacatatcatgatgtcgtcctcgtcctcgtcctcgtcgtcggccgcctgctgcttcccgctggaccacctcgcgccgtcccccaccgagcagctctgctacgtgcactgcaactgctgcgacaccatcctcgccgtcggcgtgccctgcagcagcctgttcaagacggtgacggtgcgctgcggccactgcgccaacctactctccgtnaacctccgcggcctcctgctcccgcccgccgcgccggcgccgcccaaccatctcaacttcgctcactccttgctgtcacccacatccccgcatggcctcttggacgagttggctctccagcaggcgccgagcttcctgatggagcaggcgagtgccaacctgagcagcaccatgacgggccgcagcagcaacagcagctgcgccagcaacctgccgccgccggcgccgatgcctgcagctcagcctgtgcagcaggaagccgaactgcccaagaccgccccgtcggtaaacaggcctccggagaagcggcagagagtcccgtcggcatacaaccggttcatcaaggacgagatccagcgcatcaaggccggcaacccggacatcacccaccgggaggcgttcagcgcagccgcaaagaattgggcccatttcccacacatccacttcggcctcatgccggaccagggcctcaagaagaccttcaagactcatcaggatggcgctgaagacatgctactcaaagacgatctctacgccgcagcggctgcagctgcagcagccaacatgggcatcactccattctaataactctggttaggcatgtgttctgaatcagctggcacgtcgtagtggctatcgccctttgtgctgcattctagggtttcgtctcagatcttgatctcaacatcgatcgtgtgtcgtttaattagagtactttccagtgtggggatagaaatggagaataatcaagttagagcgcgcatcaagtaggccactgatgatccgtaggtacagacttgattgtctcctctatatatcccttttcatttcatgttctctctctttttcctattttttgttcctggaccccttcaactcgccagtagagagctcgttgtgcctctccaatcccatgtttgcgtatgtctgctcaacaacatgtttttaccatggagaacaagttgaacatctgttagatct

SEQ ID NO: 33693 - protein, 261 aa, Zea mays subsp. mays
  peptide (1)..(261): Ceres Seq. ID no. 12343908
  misc_feature (19)..(218): Pfam Name: Pfam Description:  YABBY protein
  misc_feature (15)..(261): NCBI GI NO: 32330677 NR Description: yabby15 protein [Zea mays]
  misc_feature (10)..(261): NCBI GI NO: 38605890 NR Description: OSJNBb0020O11.2
  misc_feature (23)..(261): NCBI GI NO: 32330675 NR Description: yabby14 protein [Zea mays]
  misc_feature (75)..(261): NCBI GI NO: 32330681 NR Description: yabby10 protein [Zea mays]
  misc_feature (17)..(80): NCBI GI NO: 32330681 NR Description: yabby10 protein [Zea mays]
  misc_feature (138)..(261): NCBI GI NO: 27804377 NR Description: MADS-box transcription factor CDM51
  misc_feature (7)..(120): NCBI GI NO: 27804377 NR Description: MADS-box transcription factor CDM51
  misc_feature (2)..(255): NCBI GI NO: 18411242 NR Description: putative YABBY3 axial regulator
  misc_feature (75)..(261): NCBI GI NO: 37535908 NR Description: hypothetical protein
  misc_feature (162)..(232): NCBI GI NO: 7486543 NR Description: hypothetical protein F6N15
  misc_feature (67)..(67): Xaa is any aa, unknown or other
MMSSSSSSSSSAACCFPLDHLAPSPTEQLCYVHCNCCDTILAVGVPCSSLFKTVTVRCGHCANLLSXNLRGLLLPPAAPAPPNHLNFAHSLLSPTSPHGLLDELALQQAPSFLMEQASANLSSTMTGRSSNSSCASNLPPPAPMPAAQPVQQEAELPKTAPSVNRPPEKRQRVPSAYNRFIKDEIQRIKAGNPDITHREAFSAAAKNWAHFPHIHFGLMPDQGLKKTFKTHQDGAEDMLLKDDLYAAAAAAAAANMGITPF

SEQ ID NO: 33694 - protein, 260 aa, Zea mays subsp. mays
  peptide (1)..(260): Ceres Seq. ID no. 12343909
  misc_feature (18)..(217): Pfam Name: Pfam Description:  YABBY protein
  misc_feature (14)..(260): NCBI GI NO: 32330677 NR Description: yabby15 protein [Zea mays]
  misc_feature (9)..(260): NCBI GI NO: 38605890 NR Description: OSJNBb0020O11.2
  misc_feature (22)..(260): NCBI GI NO: 32330675 NR Description: yabby14 protein [Zea mays]
  misc_feature (74)..(260): NCBI GI NO: 32330681 NR Description: yabby10 protein [Zea mays]
  misc_feature (16)..(79): NCBI GI NO: 32330681 NR Description: yabby10 protein [Zea mays]
  misc_feature (137)..(260): NCBI GI NO: 27804377 NR Description: MADS-box transcription factor CDM51
  misc_feature (6)..(119): NCBI GI NO: 27804377 NR Description: MADS-box transcription factor CDM51
  misc_feature (1)..(254): NCBI GI NO: 18411242 NR Description: putative YABBY3 axial regulator
  misc_feature (74)..(260): NCBI GI NO: 37535908 NR Description: hypothetical protein
  misc_feature (161)..(231): NCBI GI NO: 7486543 NR Description: hypothetical protein F6N15
  misc_feature (66)..(66): Xaa is any aa, unknown or other
MSSSSSSSSSAACCFPLDHLAPSPTEQLCYVHCNCCDTILAVGVPCSSLFKTVTVRCGHCANLLSXNLRGLLLPPAAPAPPNHLNFAHSLLSPTSPHGLLDELALQQAPSFLMEQASANLSSTMTGRSSNSSCASNLPPPAPMPAAQPVQQEAELPKTAPSVNRPPEKRQRVPSAYNRFIKDEIQRIKAGNPDITHREAFSAAAKNWAHFPHIHFGLMPDQGLKKTFKTHQDGAEDMLLKDDLYAAAAAAAAANMGITPF

SEQ ID NO: 33695 - protein, 148 aa, Zea mays subsp. mays
  peptide (1)..(148): Ceres Seq. ID no. 12343910
  misc_feature (1)..(105): Pfam Name: Pfam Description:  YABBY protein
  misc_feature (1)..(148): NCBI GI NO: 32330677 NR Description: yabby15 protein [Zea mays]
  misc_feature (1)..(148): NCBI GI NO: 38605890 NR Description: OSJNBb0020O11.2
  misc_feature (1)..(148): NCBI GI NO: 32330675 NR Description: yabby14 protein [Zea mays]
  misc_feature (1)..(148): NCBI GI NO: 32330681 NR Description: yabby10 protein [Zea mays]
  misc_feature (25)..(148): NCBI GI NO: 27804377 NR Description: MADS-box transcription factor CDM51
  misc_feature (1)..(142): NCBI GI NO: 18411242 NR Description: putative YABBY3 axial regulator
  misc_feature (1)..(148): NCBI GI NO: 37535908 NR Description: hypothetical protein
  misc_feature (49)..(119): NCBI GI NO: 7486543 NR Description: hypothetical protein F6N15
  misc_feature (1)..(148): NCBI GI NO: 32330679 NR Description: yabby9 protein [Zea mays]
  misc_feature (1)..(148): NCBI GI NO: 37551421 NR Description: FIL-like protein [Triticum aestivum]
MEQASANLSSTMTGRSSNSSCASNLPPPAPMPAAQPVQQEAELPKTAPSVNRPPEKRQRVPSAYNRFIKDEIQRIKAGNPDITHREAFSAAAKNWAHFPHIHFGLMPDQGLKKTFKTHQDGAEDMLLKDDLYAAAAAAAAANMGITPF

SEQ ID NO: 33696 - DNA, 1312 bp, Zea mays subsp. mays
  misc_feature (1)..(1312): Ceres Seq. ID no. 12374092
gactctcgagagatagagcgaggcaccaagaaggggaaaaagagggacaggaaaaaaaaatcattctcgtttcgcgctgtccgctagaccccgcccgaatcaatggagattagggctccgccgacgagcctgaggctcgcgccgccgcccgcctccgccagcttccgccgaaccccgcttaggacctccttccttcgcggcagcgtgtcacttaaagttgtgcaagtacggcagtcaaatgtcaacagatttaagtgcaatagcatacgaagtaacctctttgataggctaacaagggttgtcaggtcctacgcaaatgcagttctaagttcgtttgaagaccctgagaagattctagaccaggcagttctggagatgaatgatgacttgacaaagatgcggcaggccactgcacaggtcttggcatctcaaaagcggcttgagaataaatctaaagctgcagaacaagcttctgctgattggtatcggagggctcaacttgctcttcaaaagggtgacgaggatcttgctcgtgaagcccttaagcggcgtaaatcatatgctgacaatgcaagctccttaagatcccagcttgatcagcagaagggtgtagttgaaaatctgatttcaaatacccggcttcttgagagcaagatatcagaggccaagcagaaaaaggataccctaaaagctcgtgctcaatcagcaaagactgctacaaaagtgagtgaaatgttgggcaacgtgaatacaagtagcgccctttctgcatttgagaaaatggaggaaaaagttatggcgatggaatcccaagcagaggcactcggccagttagcaactgatgatttagaaggaaagtttgcactgcttgagacttcatctgttgatgatgatctttcacaactgaaaaaggaattgtctggaagctctttgaaaggagagcttcctccaggcagaacagcggtcagcaactcaggtgctgggcgccctttccccgacctagagattgaaagcgagctaaacgagctgcggaggaaagccaaggaatattaggctcattccttgtcgattcagcaggcctgacggaatctcacttccaagaaaatatagtgcagctgcagattgctccattgcgcgtttcgaaagttgaaacacaagtgcgcattgactgtttgttaaagagtatggaatcggctaatttctcggcattttcccccctcgagtgacatttgtacagctatccataaaattgttgtaaatcactactctctctacagcctttttttgcatatatatatatagtcaaagttcg

SEQ ID NO: 33697 - protein, 316 aa, Zea mays subsp. mays
  peptide (1)..(316): Ceres Seq. ID no. 12374093
  misc_feature (58)..(274): Pfam Name: Pfam Description:  PspA/IM30 family
  misc_feature (1)..(316): NCBI GI NO: 34907594 NR Description: putative chloroplast membrane-associated 30 kDprotein
  misc_feature (8)..(315): NCBI GI NO: 729842 NR Description: Membrane-associated 30 kDa protein
  misc_feature (20)..(316): NCBI GI NO: 18408237 NR Description: expressed protein; protein id: At1g65260
  misc_feature (60)..(311): NCBI GI NO: 33866411 NR Description: similar to chloroplast membrane-associated 30 kDprotein
  misc_feature (60)..(311): NCBI GI NO: 33863628 NR Description: similar to chloroplast membrane-associated 30 kDprotein
  misc_feature (59)..(312): NCBI GI NO: 23126177 NR Description: hypothetical protein [Nostoc punctiforme]
  misc_feature (59)..(312): NCBI GI NO: 17229834 NR Description: similar to chloroplast membrane-associated 30 kDprotein
  misc_feature (59)..(312): NCBI GI NO: 16331547 NR Description: chloroplast membrane-associated 30 kD protein
  misc_feature (59)..(309): NCBI GI NO: 23040390 NR Description: hypothetical protein
  misc_feature (59)..(272): NCBI GI NO: 23126176 NR Description: hypothetical protein [Nostoc punctiforme]
MEIRAPPTSLRLAPPPASASFRRTPLRTSFLRGSVSLKVVQVRQSNVNRFKCNSIRSNLFDRLTRVVRSYANAVLSSFEDPEKILDQAVLEMNDDLTKMRQATAQVLASQKRLENKSKAAEQASADWYRRAQLALQKGDEDLAREALKRRKSYADNASSLRSQLDQQKGVVENLISNTRLLESKISEAKQKKDTLKARAQSAKTATKVSEMLGNVNTSSALSAFEKMEEKVMAMESQAEALGQLATDDLEGKFALLETSSVDDDLSQLKKELSGSSLKGELPPGRTAVSNSGAGRPFPDLEIESELNELRRKAKEY

SEQ ID NO: 33698 - protein, 225 aa, Zea mays subsp. mays
  peptide (1)..(225): Ceres Seq. ID no. 12374094
  misc_feature (1)..(183): Pfam Name: Pfam Description:  PspA/IM30 family
  misc_feature (1)..(225): NCBI GI NO: 34907594 NR Description: putative chloroplast membrane-associated 30 kDprotein
  misc_feature (1)..(224): NCBI GI NO: 729842 NR Description: Membrane-associated 30 kDa protein
  misc_feature (1)..(225): NCBI GI NO: 18408237 NR Description: expressed protein; protein id: At1g65260
  misc_feature (1)..(220): NCBI GI NO: 33866411 NR Description: similar to chloroplast membrane-associated 30 kDprotein
  misc_feature (1)..(220): NCBI GI NO: 33863628 NR Description: similar to chloroplast membrane-associated 30 kDprotein
  misc_feature (1)..(221): NCBI GI NO: 23126177 NR Description: hypothetical protein [Nostoc punctiforme]
  misc_feature (1)..(221): NCBI GI NO: 17229834 NR Description: similar to chloroplast membrane-associated 30 kDprotein
  misc_feature (1)..(221): NCBI GI NO: 16331547 NR Description: chloroplast membrane-associated 30 kD protein
  misc_feature (1)..(218): NCBI GI NO: 23040390 NR Description: hypothetical protein
  misc_feature (1)..(181): NCBI GI NO: 23126176 NR Description: hypothetical protein [Nostoc punctiforme]
MNDDLTKMRQATAQVLASQKRLENKSKAAEQASADWYRRAQLALQKGDEDLAREALKRRKSYADNASSLRSQLDQQKGVVENLISNTRLLESKISEAKQKKDTLKARAQSAKTATKVSEMLGNVNTSSALSAFEKMEEKVMAMESQAEALGQLATDDLEGKFALLETSSVDDDLSQLKKELSGSSLKGELPPGRTAVSNSGAGRPFPDLEIESELNELRRKAKEY

SEQ ID NO: 33699 - protein, 218 aa, Zea mays subsp. mays
  peptide (1)..(218): Ceres Seq. ID no. 12374095
  misc_feature (1)..(176): Pfam Name: Pfam Description:  PspA/IM30 family
  misc_feature (1)..(218): NCBI GI NO: 34907594 NR Description: putative chloroplast membrane-associated 30 kDprotein
  misc_feature (1)..(217): NCBI GI NO: 729842 NR Description: Membrane-associated 30 kDa protein
  misc_feature (1)..(218): NCBI GI NO: 18408237 NR Description: expressed protein; protein id: At1g65260
  misc_feature (1)..(213): NCBI GI NO: 33866411 NR Description: similar to chloroplast membrane-associated 30 kDprotein
  misc_feature (1)..(213): NCBI GI NO: 33863628 NR Description: similar to chloroplast membrane-associated 30 kDprotein
  misc_feature (1)..(214): NCBI GI NO: 23126177 NR Description: hypothetical protein [Nostoc punctiforme]
  misc_feature (1)..(214): NCBI GI NO: 17229834 NR Description: similar to chloroplast membrane-associated 30 kDprotein
  misc_feature (1)..(214): NCBI GI NO: 16331547 NR Description: chloroplast membrane-associated 30 kD protein
  misc_feature (1)..(211): NCBI GI NO: 23040390 NR Description: hypothetical protein
  misc_feature (1)..(174): NCBI GI NO: 23126176 NR Description: hypothetical protein [Nostoc punctiforme]
MRQATAQVLASQKRLENKSKAAEQASADWYRRAQLALQKGDEDLAREALKRRKSYADNASSLRSQLDQQKGVVENLISNTRLLESKISEAKQKKDTLKARAQSAKTATKVSEMLGNVNTSSALSAFEKMEEKVMAMESQAEALGQLATDDLEGKFALLETSSVDDDLSQLKKELSGSSLKGELPPGRTAVSNSGAGRPFPDLEIESELNELRRKAKEY

SEQ ID NO: 33700 - DNA, 1005 bp, Zea mays subsp. mays
  misc_feature (1)..(1005): Ceres Seq. ID no. 12365007
ggagagcatcaaagcaagccatgtggaggagggctttagcgatggtcctgttcatggctggcgccgcgctgctcgccggggctgccggcgccggcgcgcagcaggggcgtgtggagcatcatcacccggcccatgttccagagcatgctgagccaccgcggcgacagcgggtgccagggcgccttctacacctacgacgccttcatcgaggccgccagcaagttccccggcttcggcaccaccggcgacgagcagacgcgcaggcgggagctcgccgccttcttcggccagacgtcccacgaaaccaccggtggatgggcgactgctccggatggaccgtttgcctggggatactgccgggtgaaggaacagaaacagacggacccaccctactatggacgaggacccatacagctaactcataagtacaactacaggctcgccgggcaagcgctgaacctgaacctggtgggcgacccggacctggtggcgagagaccccgtggtagccttcaagacggccatctggttctggatgacgccgcagtcgcccaagccgtcgtgccacgccgtgatgaccggcgactggaggccctccgccaccgaccgcgccgcggggaggctccccggatacggcctgaccacgaacatcatcaacggcggcctagagtgcggcgaggaccgctccaccgacggcgccaaagccgccaaggaccgggtcggctactacaagaggtactgcggtatgctccgagtggggtacggggacaacatggcatgcaggaaccagaagccttacggaggatgatgacactagtagctgatctatggttgctgcaatgcaagccttcacgtgtgtttgcctctctacctaaagaataaatcaagctagcagcgaacctaccttcggcgtgtgtctacttgcttatcatagtgtgtgtctgtgtatgagagatgatgtactgtcacgtgtgtatgagagaggatatatggtaagactatcact

SEQ ID NO: 33701 - protein, 224 aa, Zea mays subsp. mays
  peptide (1)..(224): Ceres Seq. ID no. 12365008
  misc_feature (1)..(224): NCBI GI NO: 7435348 NR Description: probable chitinase (EC 3.2.1.14) - rice (fragment)
  misc_feature (1)..(223): NCBI GI NO: 1705813 NR Description: BASIC ENDOCHITINASE PRECURSOR
  misc_feature (1)..(223): NCBI GI NO: 1781042 NR Description: chitinase [Medicago truncatula]
  misc_feature (1)..(223): NCBI GI NO: 33414052 NR Description: class Ia chitinase [Galega orientalis]
  misc_feature (1)..(222): NCBI GI NO: 7435357 NR Description: chitinase (EC 3.2.1.14) - cucurbit
  misc_feature (1)..(222): NCBI GI NO: 2506281 NR Description: 26 kDa endochitinase 1 precursor
  misc_feature (1)..(222): NCBI GI NO: 11344587 NR Description: seed chitinase-a [Secale cereale]
  misc_feature (1)..(223): NCBI GI NO: 7435366 NR Description: chitinase (EC 3.2.1.14) class I - alfalfa
  misc_feature (1)..(223): NCBI GI NO: 116321 NR Description: ENDOCHITINASE B PRECURSOR (CHN-B)
  misc_feature (1)..(223): NCBI GI NO: 11558417 NR Description: endochitinase [Nicotiana sylvestris]
MFQSMLSHRGDSGCQGAFYTYDAFIEAASKFPGFGTTGDEQTRRRELAAFFGQTSHETTGGWATAPDGPFAWGYCRVKEQKQTDPPYYGRGPIQLTHKYNYRLAGQALNLNLVGDPDLVARDPVVAFKTAIWFWMTPQSPKPSCHAVMTGDWRPSATDRAAGRLPGYGLTTNIINGGLECGEDRSTDGAKAAKDRVGYYKRYCGMLRVGYGDNMACRNQKPYGG

SEQ ID NO: 33702 - protein, 220 aa, Zea mays subsp. mays
  peptide (1)..(220): Ceres Seq. ID no. 12365009
  misc_feature (1)..(220): NCBI GI NO: 7435348 NR Description: probable chitinase (EC 3.2.1.14) - rice (fragment)
  misc_feature (1)..(219): NCBI GI NO: 1705813 NR Description: BASIC ENDOCHITINASE PRECURSOR
  misc_feature (1)..(219): NCBI GI NO: 1781042 NR Description: chitinase [Medicago truncatula]
  misc_feature (1)..(219): NCBI GI NO: 33414052 NR Description: class Ia chitinase [Galega orientalis]
  misc_feature (1)..(218): NCBI GI NO: 7435357 NR Description: chitinase (EC 3.2.1.14) - cucurbit
  misc_feature (1)..(218): NCBI GI NO: 2506281 NR Description: 26 kDa endochitinase 1 precursor
  misc_feature (1)..(218): NCBI GI NO: 11344587 NR Description: seed chitinase-a [Secale cereale]
  misc_feature (1)..(219): NCBI GI NO: 7435366 NR Description: chitinase (EC 3.2.1.14) class I - alfalfa
  misc_feature (1)..(219): NCBI GI NO: 116321 NR Description: ENDOCHITINASE B PRECURSOR (CHN-B)
  misc_feature (1)..(219): NCBI GI NO: 11558417 NR Description: endochitinase [Nicotiana sylvestris]
MLSHRGDSGCQGAFYTYDAFIEAASKFPGFGTTGDEQTRRRELAAFFGQTSHETTGGWATAPDGPFAWGYCRVKEQKQTDPPYYGRGPIQLTHKYNYRLAGQALNLNLVGDPDLVARDPVVAFKTAIWFWMTPQSPKPSCHAVMTGDWRPSATDRAAGRLPGYGLTTNIINGGLECGEDRSTDGAKAAKDRVGYYKRYCGMLRVGYGDNMACRNQKPYGG

SEQ ID NO: 33703 - protein, 140 aa, Zea mays subsp. mays
  peptide (1)..(140): Ceres Seq. ID no. 12365010
RASKQAMWRRALAMVLFMAGAALLAGAAGAGAQQGRVEHHHPAHVPEHAEPPRRQRVPGRLLHLRRLHRGRQQVPRLRHHRRRADAQAGARRLLRPDVPRNHRWMGDCSGWTVCLGILPGEGTETDGPTLLWTRTHTANS

SEQ ID NO: 33704 - DNA, 744 bp, Zea mays subsp. mays
  misc_feature (1)..(744): Ceres Seq. ID no. 12341175
accattcagtcatgcccctcgctgcgcagatcctctctgttccggcgtgctctgctaggcaggaagagatctttcatttctgccagcagttctgaggatgccgaatccggcactcccccgccgcttggtggcgacaaacaccagcaggaggttcttgcacagatcgccatgcttcagacgcagaaggtgcgcatcacagacttcttggacgagcgctctgcttacctgaccaagttcgccaaggacgccgactcggagttcgacctgattgggcagaacgccatgaaagaacttgatgccgttggtgaccagatactggagaggctcgacagcaagatgcaagccttcgaggagacggctgaggtacaacggcaagagatagaaatgaacgataaggtgttagaggacttcgaagactggattgagaaggagaaaaacgaaggaatgttcttcaaaagccttggcaaggtcaaacctcggaacaagatggaaataaaggtgaaagccaaggtggaagcacagaaggtcaaagagattgcagaggagagtgcaggatcaaaaactcgtatgaacatttacctggggctgatggggatactcgggattacaattgcgaatgccatctttgcaacaccagaggtggagtggaggaaggttgctgctctgggtctgattttcattggtctggttgctcaggtcatctacgagcaggatatctcaccgccggaagctgagaagacagag

SEQ ID NO: 33705 - protein, 248 aa, Zea mays subsp. mays
  peptide (1)..(248): Ceres Seq. ID no. 12341176
  misc_feature (57)..(246): NCBI GI NO: 34908370 NR Description: P0529E05.11
  misc_feature (10)..(246): NCBI GI NO: 15232007 NR Description: unknown protein; protein id: At3g09050.1
TIQSCPSLRRSSLFRRALLGRKRSFISASSSEDAESGTPPPLGGDKHQQEVLAQIAMLQTQKVRITDFLDERSAYLTKFAKDADSEFDLIGQNAMKELDAVGDQILERLDSKMQAFEETAEVQRQEIEMNDKVLEDFEDWIEKEKNEGMFFKSLGKVKPRNKMEIKVKAKVEAQKVKEIAEESAGSKTRMNIYLGLMGILGITIANAIFATPEVEWRKVAALGLIFIGLVAQVIYEQDISPPEAEKTE

SEQ ID NO: 33706 - protein, 192 aa, Zea mays subsp. mays
  peptide (1)..(192): Ceres Seq. ID no. 12341177
  misc_feature (1)..(190): NCBI GI NO: 34908370 NR Description: P0529E05.11
  misc_feature (1)..(190): NCBI GI NO: 15232007 NR Description: unknown protein; protein id: At3g09050.1
MLQTQKVRITDFLDERSAYLTKFAKDADSEFDLIGQNAMKELDAVGDQILERLDSKMQAFEETAEVQRQEIEMNDKVLEDFEDWIEKEKNEGMFFKSLGKVKPRNKMEIKVKAKVEAQKVKEIAEESAGSKTRMNIYLGLMGILGITIANAIFATPEVEWRKVAALGLIFIGLVAQVIYEQDISPPEAEKTE

SEQ ID NO: 33707 - protein, 154 aa, Zea mays subsp. mays
  peptide (1)..(154): Ceres Seq. ID no. 12341178
  misc_feature (1)..(152): NCBI GI NO: 34908370 NR Description: P0529E05.11
  misc_feature (1)..(152): NCBI GI NO: 15232007 NR Description: unknown protein; protein id: At3g09050.1
MKELDAVGDQILERLDSKMQAFEETAEVQRQEIEMNDKVLEDFEDWIEKEKNEGMFFKSLGKVKPRNKMEIKVKAKVEAQKVKEIAEESAGSKTRMNIYLGLMGILGITIANAIFATPEVEWRKVAALGLIFIGLVAQVIYEQDISPPEAEKTE

SEQ ID NO: 33708 - DNA, 460 bp, Zea mays subsp. mays
  misc_feature (1)..(460): Ceres Seq. ID no. 13573968
ctcaagaaaatgactggcttcaatgccttttggtttactcaccacttatttgttattgtgtatgcactgctcattgtccatgggacctgtttatatctaagcaggaaatggtacaagaaaacgacatggatgtaccttgctgtccctgtgctcttgtatgtaagtgagcgcattcttcggctatttaggagccatgatgctgttaggattcagaaggttgcagtatatccagggaatgttttggctctctatatgtccaagccacctggattcaggtatcggagtgggcagtatatcttcataaaatgcagtgatgtctctccatacgaatggcacccattttcgattacatcagcaccaggagatgattatcttagtgtccacattcgcacaaggggtgattggacttcacgtcttaggactgtcttctctgaggcatgccgccctccatctgatggag

SEQ ID NO: 33709 - protein, 153 aa, Zea mays subsp. mays
  peptide (1)..(153): Ceres Seq. ID no. 13573969
  misc_feature (1)..(152): Pfam Name: Pfam Description:  Ferric reductase like transmembrane component
  misc_feature (1)..(152): NCBI GI NO: 11358758 NR Description: respiratory burst oxidase protein D
  misc_feature (1)..(152): NCBI GI NO: 15238842 NR Description: respiratory burst oxidase protein D
  misc_feature (1)..(151): NCBI GI NO: 16549089 NR Description: respiratory burst oxidase homolog
  misc_feature (3)..(152): NCBI GI NO: 20805911 NR Description: NADPH oxidase [Nicotiana tabacum]
  misc_feature (3)..(152): NCBI GI NO: 28268680 NR Description: respiratory burst oxidase homolog
  misc_feature (3)..(152): NCBI GI NO: 8131846 NR Description: whitefly-induced gp91-phox
  misc_feature (1)..(151): NCBI GI NO: 25354665 NR Description: hypothetical protein
  misc_feature (1)..(151): NCBI GI NO: 30680952 NR Description: respiratory burst oxidase protein B
  misc_feature (3)..(152): NCBI GI NO: 7489460 NR Description: cytochrome b245 beta chain homolog rbohA - rice
  misc_feature (3)..(152): NCBI GI NO: 7489461 NR Description: cytochrome b245 beta chain homolog rbohA - rice
LKKMTGFNAFWFTHHLFVIVYALLIVHGTCLYLSRKWYKKTTWMYLAVPVLLYVSERILRLFRSHDAVRIQKVAVYPGNVLALYMSKPPGFRYRSGQYIFIKCSDVSPYEWHPFSITSAPGDDYLSVHIRTRGDWTSRLRTVFSEACRPPSDG

SEQ ID NO: 33710 - protein, 150 aa, Zea mays subsp. mays
  peptide (1)..(150): Ceres Seq. ID no. 13573970
  misc_feature (1)..(149): Pfam Name: Pfam Description:  Ferric reductase like transmembrane component
  misc_feature (1)..(149): NCBI GI NO: 11358758 NR Description: respiratory burst oxidase protein D
  misc_feature (1)..(149): NCBI GI NO: 15238842 NR Description: respiratory burst oxidase protein D
  misc_feature (1)..(148): NCBI GI NO: 16549089 NR Description: respiratory burst oxidase homolog
  misc_feature (1)..(149): NCBI GI NO: 20805911 NR Description: NADPH oxidase [Nicotiana tabacum]
  misc_feature (1)..(149): NCBI GI NO: 28268680 NR Description: respiratory burst oxidase homolog
  misc_feature (1)..(149): NCBI GI NO: 8131846 NR Description: whitefly-induced gp91-phox
  misc_feature (1)..(148): NCBI GI NO: 25354665 NR Description: hypothetical protein
  misc_feature (1)..(148): NCBI GI NO: 30680952 NR Description: respiratory burst oxidase protein B
  misc_feature (1)..(149): NCBI GI NO: 7489460 NR Description: cytochrome b245 beta chain homolog rbohA - rice
  misc_feature (1)..(149): NCBI GI NO: 7489461 NR Description: cytochrome b245 beta chain homolog rbohA - rice
MTGFNAFWFTHHLFVIVYALLIVHGTCLYLSRKWYKKTTWMYLAVPVLLYVSERILRLFRSHDAVRIQKVAVYPGNVLALYMSKPPGFRYRSGQYIFIKCSDVSPYEWHPFSITSAPGDDYLSVHIRTRGDWTSRLRTVFSEACRPPSDG

SEQ ID NO: 33711 - protein, 110 aa, Zea mays subsp. mays
  peptide (1)..(110): Ceres Seq. ID no. 13573971
  misc_feature (1)..(109): Pfam Name: Pfam Description:  Ferric reductase like transmembrane component
  misc_feature (1)..(109): NCBI GI NO: 11358758 NR Description: respiratory burst oxidase protein D
  misc_feature (1)..(109): NCBI GI NO: 15238842 NR Description: respiratory burst oxidase protein D
  misc_feature (1)..(108): NCBI GI NO: 16549089 NR Description: respiratory burst oxidase homolog
  misc_feature (1)..(109): NCBI GI NO: 20805911 NR Description: NADPH oxidase [Nicotiana tabacum]
  misc_feature (1)..(109): NCBI GI NO: 28268680 NR Description: respiratory burst oxidase homolog
  misc_feature (1)..(109): NCBI GI NO: 8131846 NR Description: whitefly-induced gp91-phox
  misc_feature (1)..(108): NCBI GI NO: 25354665 NR Description: hypothetical protein
  misc_feature (1)..(108): NCBI GI NO: 30680952 NR Description: respiratory burst oxidase protein B
  misc_feature (1)..(109): NCBI GI NO: 7489460 NR Description: cytochrome b245 beta chain homolog rbohA - rice
  misc_feature (1)..(109): NCBI GI NO: 7489461 NR Description: cytochrome b245 beta chain homolog rbohA - rice
MYLAVPVLLYVSERILRLFRSHDAVRIQKVAVYPGNVLALYMSKPPGFRYRSGQYIFIKCSDVSPYEWHPFSITSAPGDDYLSVHIRTRGDWTSRLRTVFSEACRPPSDG

SEQ ID NO: 33712 - DNA, 1193 bp, Zea mays subsp. mays
  misc_feature (1)..(1193): Ceres Seq. ID no. 12408082
cacacacacacacatcctccaccaccattcatcagaaagcgaagcacaagcctctgatgccaagccaaagcacacacacctcctccagcctttcttcctctacagccccaattcttccctgcagctctgctgctgccttgtttcgatcggtcatggcggcggtggccacagagactccgttccatgtcctggcggtggacgacagcctcccggacaggaagctcatcgagaggctcctcaagacctcttccttccaagtgaccactgtcgactccgggagcaaggcgctgcagttcctgggcctccatgaccaggacagcacggttcctcctgtccacacgcaccagctggatgtggctgccaatcaggatgtggctgtgaacctgatcatcacagactactgcatgcctggcatgacaggatatgacctgctcaagaagatcaaggagtcgtcgtctctcagagatatcccggtggtgatcatgtcctctgagaacattccttcaaggatcaataggtgcctggaggaaggagctgacgagttcttcctaaaacctgtgcggctatcagacatgaacaagctcaagccccacatactgaaaagcagatgcaaccaggaacagcaccagcaaagtgacagtcacagtggcgaacgcaggaaccccacaatcggcagcagcagcgatagcataaacaaccgcaagagaaagggtgcaggcaccgaagaaatcttgccccagctggcaaacagatcaaggcacagttaactgagaactgactagtacagctaaaaccttttctttttcactttactttggcctactgatttgtaacgtagatgttagccctggatttgcaaaacggaacggaatctgtaaactgatactgcttgagtcgaatcgatcgaagtgattctgcaccagatctccctatttcatttatcagaatcgaaagccagctgacagagtcacagtaacagcccgttggacatagcagcaggtgccgaagccaagaacatctgaaactgaccgtcggataacctacgatgggagtagccttttactgcttctaagctttagcctggatacaagttgtcactacagtagtcagtagggcagtaacttggtgcatctccaagagttttcaaaacacactgtcaatctagaaatttttggtgatgtagcttctcccac

SEQ ID NO: 33713 - protein, 254 aa, Zea mays subsp. mays
  peptide (1)..(254): Ceres Seq. ID no. 12408083
  misc_feature (60)..(191): Pfam Name: Pfam Description:  Response regulator receiver domain
  misc_feature (19)..(254): NCBI GI NO: 12060388 NR Description: response regulator 6 [Zea mays]
  misc_feature (54)..(222): NCBI GI NO: 15230202 NR Description: responce reactor 4; protein id: At3g57040
  misc_feature (51)..(202): NCBI GI NO: 34906626 NR Description: putative response regulator
  misc_feature (51)..(213): NCBI GI NO: 12060386 NR Description: response regulator 5 [Zea mays]
  misc_feature (56)..(209): NCBI GI NO: 15227325 NR Description: putative two-component response regulator 3protein
  misc_feature (51)..(235): NCBI GI NO: 33330868 NR Description: type-A response regulator [Catharanthus roseus]
  misc_feature (51)..(242): NCBI GI NO: 12060384 NR Description: response regulator 4 [Zea mays]
  misc_feature (61)..(252): NCBI GI NO: 13173408 NR Description: response regulator protein [Dianthus caryophyllus]
  misc_feature (57)..(202): NCBI GI NO: 18410485 NR Description: response regulator-like protein
  misc_feature (58)..(228): NCBI GI NO: 15221927 NR Description: response regulator 5, putative
HTHTSSTTIHQKAKHKPLMPSQSTHTSSSLSSSTAPILPCSSAAALFRSVMAAVATETPFHVLAVDDSLPDRKLIERLLKTSSFQVTTVDSGSKALQFLGLHDQDSTVPPVHTHQLDVAANQDVAVNLIITDYCMPGMTGYDLLKKIKESSSLRDIPVVIMSSENIPSRINRCLEEGADEFFLKPVRLSDMNKLKPHILKSRCNQEQHQQSDSHSGERRNPTIGSSSDSINNRKRKGAGTEEILPQLANRSRHS

SEQ ID NO: 33714 - protein, 236 aa, Zea mays subsp. mays
  peptide (1)..(236): Ceres Seq. ID no. 12408084
  misc_feature (42)..(173): Pfam Name: Pfam Description:  Response regulator receiver domain
  misc_feature (1)..(236): NCBI GI NO: 12060388 NR Description: response regulator 6 [Zea mays]
  misc_feature (36)..(204): NCBI GI NO: 15230202 NR Description: responce reactor 4; protein id: At3g57040
  misc_feature (33)..(184): NCBI GI NO: 34906626 NR Description: putative response regulator
  misc_feature (33)..(195): NCBI GI NO: 12060386 NR Description: response regulator 5 [Zea mays]
  misc_feature (38)..(191): NCBI GI NO: 15227325 NR Description: putative two-component response regulator 3protein
  misc_feature (33)..(217): NCBI GI NO: 33330868 NR Description: type-A response regulator [Catharanthus roseus]
  misc_feature (33)..(224): NCBI GI NO: 12060384 NR Description: response regulator 4 [Zea mays]
  misc_feature (43)..(234): NCBI GI NO: 13173408 NR Description: response regulator protein [Dianthus caryophyllus]
  misc_feature (39)..(184): NCBI GI NO: 18410485 NR Description: response regulator-like protein
  misc_feature (40)..(210): NCBI GI NO: 15221927 NR Description: response regulator 5, putative
MPSQSTHTSSSLSSSTAPILPCSSAAALFRSVMAAVATETPFHVLAVDDSLPDRKLIERLLKTSSFQVTTVDSGSKALQFLGLHDQDSTVPPVHTHQLDVAANQDVAVNLIITDYCMPGMTGYDLLKKIKESSSLRDIPVVIMSSENIPSRINRCLEEGADEFFLKPVRLSDMNKLKPHILKSRCNQEQHQQSDSHSGERRNPTIGSSSDSINNRKRKGAGTEEILPQLANRSRHS

SEQ ID NO: 33715 - protein, 204 aa, Zea mays subsp. mays
  peptide (1)..(204): Ceres Seq. ID no. 12408085
  misc_feature (10)..(141): Pfam Name: Pfam Description:  Response regulator receiver domain
  misc_feature (1)..(204): NCBI GI NO: 12060388 NR Description: response regulator 6 [Zea mays]
  misc_feature (4)..(172): NCBI GI NO: 15230202 NR Description: responce reactor 4; protein id: At3g57040
  misc_feature (1)..(152): NCBI GI NO: 34906626 NR Description: putative response regulator
  misc_feature (1)..(163): NCBI GI NO: 12060386 NR Description: response regulator 5 [Zea mays]
  misc_feature (6)..(159): NCBI GI NO: 15227325 NR Description: putative two-component response regulator 3protein
  misc_feature (1)..(185): NCBI GI NO: 33330868 NR Description: type-A response regulator [Catharanthus roseus]
  misc_feature (1)..(192): NCBI GI NO: 12060384 NR Description: response regulator 4 [Zea mays]
  misc_feature (11)..(202): NCBI GI NO: 13173408 NR Description: response regulator protein [Dianthus caryophyllus]
  misc_feature (7)..(152): NCBI GI NO: 18410485 NR Description: response regulator-like protein
  misc_feature (8)..(178): NCBI GI NO: 15221927 NR Description: response regulator 5, putative
MAAVATETPFHVLAVDDSLPDRKLIERLLKTSSFQVTTVDSGSKALQFLGLHDQDSTVPPVHTHQLDVAANQDVAVNLIITDYCMPGMTGYDLLKKIKESSSLRDIPVVIMSSENIPSRINRCLEEGADEFFLKPVRLSDMNKLKPHILKSRCNQEQHQQSDSHSGERRNPTIGSSSDSINNRKRKGAGTEEILPQLANRSRHS

SEQ ID NO: 33716 - DNA, 1807 bp, Zea mays subsp. mays
  misc_feature (1)..(1807): Ceres Seq. ID no. 12374088
gagccgcggaggagcagcggcgcatcgcaacactaaccaaagtcctcctctccaggtgccgagccagggtgactgttccgaggagcgtggcgtggacccatgggggaagaagggcaagtggttcggtgccgtcaagaaggtcttcagccccgaatccaaggagaagaaagaggagaggctaaggaggaaatcagcagctagcaacccagcaccggtagatctgaccccatctacctccctggaagtcaatgtttcggtgccaccccctccggctcctcctccagttcctcgccagaccgacgaggtcagggtccccgaagccgagcaggagcagagcaagcatgtcaccctggaggaggcccctgctgctgctgctgccccagcacaggcgtcggtgctgccacctggtgcgccaaccgaagagctcgccgcaatcaagatccagaccgccttccgaggttacctggcaaggagggcactaagagcactacgaggccttgtacgattgaagtcattggttgagggtaattcagttaagcgtcaatctgcaagcactctgcgctgtatgcaaactctatcgcgggtgcagtcacaaatacgatctaggagagcaaagatgtccgaggagaaccaggccctccaacgccagctcctacttaaacaggaactggagaatttcagaatgggtgagaactgggacgacagcactcaatccaaggagcaaatcgaggcaagcctaataagcaggcaagaggcagcgataagaagagaaagagctcttgcatatgcattttcacatcagtggaagagcacatcaagatctgcgaacccaatgtttgtagacccaaataacttgcagtggggctggagctggttggagcgctggatggcagcaaaaccttgggagggacgcaatgggaccgacaaggagagcaacattgatcgcggctccgtcaagaatatgagcttgaaccttggagttggagagggtgagatcacaaaagctttcaaccgccgggactcaaagccagagaagccatcaccaccgactccaaaaccggcccgtccagcttccaggcaatccccttcgacgccctctgctagagtggccccaatacctgcgaggaggaaatccagcacgccaaagaatgggctttcacaggtggacgatgacgtgaggagcgtgctcagtgtgcagtctgagcgaccaaggaggcacagcatagccacgacgtcgaccatgcgggacgatgagagcctcgcgagctccccgtcgctcccgagctacatggttcccacagaatctgcgagggccaaatctcgcacagcaacggccaatggcgcagagacgcctgagaaaggaggctctgctggaccagtcaagaagaggttgtctttccaaggtggagctgcggctgcctcaccgatgcgacggcattctggccctcccaaggtggagagcgctgtgaaggacattgctgcgccaccacagcctgaggccttggtagccaatggtggtggaagcaagtgacttgtattgacaagttccaggatgggggagcgggttatggtcttatggagggacatgtttcatccgtgaacagaagttaagagtggtgccggatctacgaatggtttgaattgttttcccgttacaaccacattgtttgctgtataagattcactgtacctgccagttggttccatttgttgttttctgtaaaacaaacatcaatttgtcactagaatctgtgatgcttgtatgtaaacaggtcctctatttatgtgagccatatatttcattttc

SEQ ID NO: 33717 - protein, 509 aa, Zea mays subsp. mays
  peptide (1)..(509): Ceres Seq. ID no. 12374089
  misc_feature (35)..(487): NCBI GI NO: 15982840 NR Description: AT5g03040/F15A17_70 [Arabidopsis thaliana]
  misc_feature (36)..(489): NCBI GI NO: 15232741 NR Description: putative SF16 protein; protein id: At3g09710.1
  misc_feature (35)..(310): NCBI GI NO: 18414094 NR Description: putative protein; protein id: At5g03040
  misc_feature (38)..(391): NCBI GI NO: 15231175 NR Description: unknown protein; protein id: At3g52290.1
  misc_feature (35)..(455): NCBI GI NO: 11292162 NR Description: hypothetical protein F15A17
  misc_feature (33)..(458): NCBI GI NO: 15225299 NR Description: putative SF16 protein {Helianthus annuus}
  misc_feature (140)..(428): NCBI GI NO: 15233296 NR Description: unknown protein; protein id: At3g22190.1
  misc_feature (35)..(302): NCBI GI NO: 7489344 NR Description: SF16 protein, pollen specific - common sunflower
  misc_feature (140)..(465): NCBI GI NO: 11994738 NR Description: contains similarity to SF16protein~gene_id:MKA23
  misc_feature (117)..(304): NCBI GI NO: 15225258 NR Description: putative SF16 protein {Helianthus annuus}
SRGGAAAHRNTNQSPPLQVPSQGDCSEERGVDPWGKKGKWFGAVKKVFSPESKEKKEERLRRKSAASNPAPVDLTPSTSLEVNVSVPPPPAPPPVPRQTDEVRVPEAEQEQSKHVTLEEAPAAAAAPAQASVLPPGAPTEELAAIKIQTAFRGYLARRALRALRGLVRLKSLVEGNSVKRQSASTLRCMQTLSRVQSQIRSRRAKMSEENQALQRQLLLKQELENFRMGENWDDSTQSKEQIEASLISRQEAAIRRERALAYAFSHQWKSTSRSANPMFVDPNNLQWGWSWLERWMAAKPWEGRNGTDKESNIDRGSVKNMSLNLGVGEGEITKAFNRRDSKPEKPSPPTPKPARPASRQSPSTPSARVAPIPARRKSSTPKNGLSQVDDDVRSVLSVQSERPRRHSIATTSTMRDDESLASSPSLPSYMVPTESARAKSRTATANGAETPEKGGSAGPVKKRLSFQGGAAAASPMRRHSGPPKVESAVKDIAAPPQPEALVANGGGSK

SEQ ID NO: 33718 - protein, 321 aa, Zea mays subsp. mays
  peptide (1)..(321): Ceres Seq. ID no. 12374090
  misc_feature (1)..(299): NCBI GI NO: 15982840 NR Description: AT5g03040/F15A17_70 [Arabidopsis thaliana]
  misc_feature (1)..(301): NCBI GI NO: 15232741 NR Description: putative SF16 protein; protein id: At3g09710.1
  misc_feature (1)..(122): NCBI GI NO: 18414094 NR Description: putative protein; protein id: At5g03040
  misc_feature (1)..(203): NCBI GI NO: 15231175 NR Description: unknown protein; protein id: At3g52290.1
  misc_feature (1)..(267): NCBI GI NO: 11292162 NR Description: hypothetical protein F15A17
  misc_feature (1)..(270): NCBI GI NO: 15225299 NR Description: putative SF16 protein {Helianthus annuus}
  misc_feature (1)..(240): NCBI GI NO: 15233296 NR Description: unknown protein; protein id: At3g22190.1
  misc_feature (1)..(114): NCBI GI NO: 7489344 NR Description: SF16 protein, pollen specific - common sunflower
  misc_feature (1)..(277): NCBI GI NO: 11994738 NR Description: contains similarity to SF16protein~gene_id:MKA23
  misc_feature (1)..(116): NCBI GI NO: 15225258 NR Description: putative SF16 protein {Helianthus annuus}
MQTLSRVQSQIRSRRAKMSEENQALQRQLLLKQELENFRMGENWDDSTQSKEQIEASLISRQEAAIRRERALAYAFSHQWKSTSRSANPMFVDPNNLQWGWSWLERWMAAKPWEGRNGTDKESNIDRGSVKNMSLNLGVGEGEITKAFNRRDSKPEKPSPPTPKPARPASRQSPSTPSARVAPIPARRKSSTPKNGLSQVDDDVRSVLSVQSERPRRHSIATTSTMRDDESLASSPSLPSYMVPTESARAKSRTATANGAETPEKGGSAGPVKKRLSFQGGAAAASPMRRHSGPPKVESAVKDIAAPPQPEALVANGGGSK

SEQ ID NO: 33719 - protein, 304 aa, Zea mays subsp. mays
  peptide (1)..(304): Ceres Seq. ID no. 12374091
  misc_feature (1)..(282): NCBI GI NO: 15982840 NR Description: AT5g03040/F15A17_70 [Arabidopsis thaliana]
  misc_feature (1)..(284): NCBI GI NO: 15232741 NR Description: putative SF16 protein; protein id: At3g09710.1
  misc_feature (1)..(105): NCBI GI NO: 18414094 NR Description: putative protein; protein id: At5g03040
  misc_feature (1)..(186): NCBI GI NO: 15231175 NR Description: unknown protein; protein id: At3g52290.1
  misc_feature (1)..(250): NCBI GI NO: 11292162 NR Description: hypothetical protein F15A17
  misc_feature (1)..(253): NCBI GI NO: 15225299 NR Description: putative SF16 protein {Helianthus annuus}
  misc_feature (1)..(223): NCBI GI NO: 15233296 NR Description: unknown protein; protein id: At3g22190.1
  misc_feature (1)..(97): NCBI GI NO: 7489344 NR Description: SF16 protein, pollen specific - common sunflower
  misc_feature (1)..(260): NCBI GI NO: 11994738 NR Description: contains similarity to SF16protein~gene_id:MKA23
  misc_feature (1)..(99): NCBI GI NO: 15225258 NR Description: putative SF16 protein {Helianthus annuus}
MSEENQALQRQLLLKQELENFRMGENWDDSTQSKEQIEASLISRQEAAIRRERALAYAFSHQWKSTSRSANPMFVDPNNLQWGWSWLERWMAAKPWEGRNGTDKESNIDRGSVKNMSLNLGVGEGEITKAFNRRDSKPEKPSPPTPKPARPASRQSPSTPSARVAPIPARRKSSTPKNGLSQVDDDVRSVLSVQSERPRRHSIATTSTMRDDESLASSPSLPSYMVPTESARAKSRTATANGAETPEKGGSAGPVKKRLSFQGGAAAASPMRRHSGPPKVESAVKDIAAPPQPEALVANGGGSK

SEQ ID NO: 33720 - DNA, 1746 bp, Zea mays subsp. mays
  misc_feature (1)..(1746): Ceres Seq. ID no. 12411690
gcagtctcgctcgcctctcgcaaaccctatccccgaccccgattcccctctcgcctctcgatctctggcggcggcgccgtcgttttcccccatcggctcagcgactctcgagtcccgacctcgacgctaccggctcagcggctctggtgctccgtcctccactcctcctcctccttcatccattcctccggtgcaaggtttgttactttctttatctcggcgcctcacgacctcgacaataccggctctggttctccgactttgaaaggtccgtctctggtgtaccgcgccgtcctgttcggcggcctcagcaacgacgtcatctcggccggagccctggggatcacgaccgcacagctggtgcgcatcaacgacctccacagccggacggtgcaccaggagaacgccctgtcgaaccgactcgccaccctgcaggaagacatcgccaaccgcccgctcctgcccatcgtgcggcagcgcgagctcgccaccgcgacacgactgggagctgctgcgagcggaagctgcgacggcgcggcacgacggtggcttagggcggcacggctaggagaaccagagccggtattgtcgaggcggtggacaacctgacgctgcgtcggttcctgcgcgcgcgcgaccacgacgtggacaaggcctccgccatgttcctcaagttcctcaagtggcggagggaggcggcgcccggcggctccgtgccggaggagcaggtgaggagggagctgtcgcaggacaagctgtgcatgggcggcgtcgacagggccggtcgccccatcctcgtcgccttcgcggccaggcacttctccgccggccgtgacatggcagagttcaagagttttgttgtctacttcttcgacaagatctgtgccagaatccccagagggcaggagaaattcctctgcatcgttgatctcaagggctgggggtactcaaactgtgacgtccgggcatacattgccgctatagagatcttgcagtatttctacaggttaacaaggtacatacaaagaaggcggctgctcccaagattgctaaacaagagtccagtgatgatgacactagcgacgagacctttgaatctgatgagttttcagagtttttagatgccaattcatcttctcattaaggaacctacaaagaagcctgctgctaaacccttggctgcagttgcaaaaaatggttcgaagacggtcaagcaagagagcagcagcgatgaggacagttctgaagatgagtcggatgacgacagtgatgatgtgagttgaagtttcctcggcgtccctgcatcgcttccaccagccctccccacacgcggcgacagggtcgtcgtcgtcccggctccgcgtcggccacacccgaacgaccgtctccatgtcgtgccgtctccagttatgcgagcgaggctggataaggtcgtggggttccaacaaggtggtgcagctccattcgtccctccacctcacccgccggccatctctcgatttctttttgtgtgctcagttttttctttgtgtgtcatgagtttcagaacttgattgggatggtttttgtgccatgagaattagggtttgatagggatgatttgggtatcagttcttacggtcactggaatttgcatattgtcatagtctaatgccattaaattttgagggtagcgatattgttttcaacctattgaatagggtatatgatgatgttggcaagcgctggagcaggtaatattttgtc

SEQ ID NO: 33721 - protein, 202 aa, Zea mays subsp. mays
  peptide (1)..(202): Ceres Seq. ID no. 12411691
AVSLASRKPYPRPRFPSRLSISGGGAVVFPHRLSDSRVPTSTLPAQRLWCSVLHSSSSFIHSSGARFVTFFISAPHDLDNTGSGSPTLKGPSLVYRAVLFGGLSNDVISAGALGITTAQLVRINDLHSRTVHQENALSNRLATLQEDIANRPLLPIVRQRELATATRLGAAASGSCDGAARRWLRAARLGEPEPVLSRRWTT

SEQ ID NO: 33722 - protein, 183 aa, Zea mays subsp. mays
  peptide (1)..(183): Ceres Seq. ID no. 12411692
SLARLSQTLSPTPIPLSPLDLWRRRRRFPPSAQRLSSPDLDATGSAALVLRPPLLLLLHPFLRCKVCYFLYLGASRPRQYRLWFSDFERSVSGVPRRPVRRPQQRRHLGRSPGDHDRTAGAHQRPPQPDGAPGERPVEPTRHPAGRHRQPPAPAHRAAARARHRDTTGSCCERKLRRRGTTVA

SEQ ID NO: 33723 - protein, 152 aa, Zea mays subsp. mays
  peptide (1)..(152): Ceres Seq. ID no. 12411693
  misc_feature (31)..(114): Pfam Name: Pfam Description:  CRAL/TRIO domain
  misc_feature (1)..(114): NCBI GI NO: 34907052 NR Description: sec14 like protein
  misc_feature (1)..(114): NCBI GI NO: 2286121 NR Description: sec14 like protein [Oryza sativa]
  misc_feature (1)..(118): NCBI GI NO: 27573358 NR Description: putative phosphatidylinositol/phosphatidylcholinetransfer protein
  misc_feature (1)..(114): NCBI GI NO: 15223439 NR Description: SEC14 cytosolic factor, putative
  misc_feature (1)..(114): NCBI GI NO: 17226662 NR Description: polyphosphoinositide binding protein
  misc_feature (1)..(114): NCBI GI NO: 7488696 NR Description: polyphosphoinositide binding protein Ssh2
  misc_feature (1)..(114): NCBI GI NO: 19347976 NR Description: putative polyphosphoinositide binding protein
  misc_feature (1)..(120): NCBI GI NO: 30684014 NR Description: SEC14 cytosolic factor, putative
  misc_feature (1)..(120): NCBI GI NO: 25402783 NR Description: protein F10B6.22 [imported] - Arabidopsis thaliana
  misc_feature (1)..(114): NCBI GI NO: 28829093 NR Description: similar to hypothetical protein
MFLKFLKWRREAAPGGSVPEEQVRRELSQDKLCMGGVDRAGRPILVAFAARHFSAGRDMAEFKSFVVYFFDKICARIPRGQEKFLCIVDLKGWGYSNCDVRAYIAAIEILQYFYRLTRYIQRRRLLPRLLNKSPVMMTLATRPLNLMSFQSF

SEQ ID NO: 33724 - DNA, 1575 bp, Zea mays subsp. mays
  misc_feature (1)..(1575): Ceres Seq. ID no. 12411686
aacatacttggctgggccttccccagcggcgagggcgtggcccgttgtacaagtataacaacaattggcccagcgtagcatgcccgtggtggtggcgtcatcgtgtctcctcgatcccctctcgttcctccctcgtcgcctcatcaattcaagatccaatctttgctgctgccactcggcgatccgatcgttctcgagcaaggtcggtggccatggcacgctgccgccatcacctcctcctcctttccgtcttacttgccttggctgctgctgctgcgcggcaggcgcagagtcatggaaaagcctccgccgtcttcatcgatgcctcgtcgcaccgctaccttcgggaccagcaagccgaccaccaggacgcttcaatgtcgttaaatgaagtttctgcggttgtttctgtcttgcttggtttcgcaccgtcaacatccctaccagctatttcttcttcgaagttgaacaaagttcttcttcctaatccatttgatagaccgcgtgctgttttcctcgtgcaaattgatgggttcaatgttcctagcttcgtatctgaaggcagcaacattttcaagaccaggattgaaggtgcaaacatcgctgatacagggcttacagataaggatgacttaattgtcattcattcagatgaatctctagatctctctcgatcagattatcttgataatgaactttccagcttggcaaactggttggagggatcttatcagaagtctaccggcaaactagtcattcccttggagaatggaaacagtcttactttgcaacttgataaggaagcagacaaggaattcatgtccagcttggcttcccttcttaagactattgaaagggcgatccaggttcatgaagatttctcaggtgtcgtgaaccctgcagagttattagaatgtcacttcacagggttgaaggctctggagaatgaatatggttctggtgaaattgttaagcagggaacagaaatagttcagagagctgtcaccaaatcattccagtccctacatgaagcatacaaagggaaaattgttgggctggtaatatccacaaatgaggctccatcatccttaggatccataattgacgcaccatcttcactgcacatttcaagacggctagaagaagcaagcaagactacagacatagcctctgtcgtacttgttcgaaagagcttggcatggattacagggatcatcctgcttgtttcaactctcataggggtttgcttgcttatgaacatgccacttaccagggacaccctcctgtactcgaatgtcaagatcgattagtttgaaggggtgttcgcggcagctactcttggggttcaactttggccttgtgtatttatgggatggatttcagatggtagagacgtatgcttgtgctgttcacaaaaccagtgtacaatgtgatactaggtgctacgtgcctttctttttttaatctgtgcttccatcttgcctgtatgggctgttttgttgttgggttcccggtaaataatccagagcagtggcacaaacgattagttgttgcagaatgctactgccttttctg

SEQ ID NO: 33725 - protein, 435 aa, Zea mays subsp. mays
  peptide (1)..(435): Ceres Seq. ID no. 12411687
  misc_feature (96)..(435): NCBI GI NO: 15230073 NR Description: type 1 membrane protein, putative
  misc_feature (326)..(435): NCBI GI NO: 40716478 NR Description: putative membrane protein type I [Musa acuminata]
HTWLGLPQRRGRGPLYKYNNNWPSVACPWWWRHRVSSIPSRSSLVASSIQDPIFAAATRRSDRSRARSVAMARCRHHLLLLSVLLALAAAAARQAQSHGKASAVFIDASSHRYLRDQQADHQDASMSLNEVSAVVSVLLGFAPSTSLPAISSSKLNKVLLPNPFDRPRAVFLVQIDGFNVPSFVSEGSNIFKTRIEGANIADTGLTDKDDLIVIHSDESLDLSRSDYLDNELSSLANWLEGSYQKSTGKLVIPLENGNSLTLQLDKEADKEFMSSLASLLKTIERAIQVHEDFSGVVNPAELLECHFTGLKALENEYGSGEIVKQGTEIVQRAVTKSFQSLHEAYKGKIVGLVISTNEAPSSLGSIIDAPSSLHISRRLEEASKTTDIASVVLVRKSLAWITGIILLVSTLIGVCLLMNMPLTRDTLLYSNVKID

SEQ ID NO: 33726 - protein, 365 aa, Zea mays subsp. mays
  peptide (1)..(365): Ceres Seq. ID no. 12411688
  misc_feature (26)..(365): NCBI GI NO: 15230073 NR Description: type 1 membrane protein, putative
  misc_feature (256)..(365): NCBI GI NO: 40716478 NR Description: putative membrane protein type I [Musa acuminata]
MARCRHHLLLLSVLLALAAAAARQAQSHGKASAVFIDASSHRYLRDQQADHQDASMSLNEVSAVVSVLLGFAPSTSLPAISSSKLNKVLLPNPFDRPRAVFLVQIDGFNVPSFVSEGSNIFKTRIEGANIADTGLTDKDDLIVIHSDESLDLSRSDYLDNELSSLANWLEGSYQKSTGKLVIPLENGNSLTLQLDKEADKEFMSSLASLLKTIERAIQVHEDFSGVVNPAELLECHFTGLKALENEYGSGEIVKQGTEIVQRAVTKSFQSLHEAYKGKIVGLVISTNEAPSSLGSIIDAPSSLHISRRLEEASKTTDIASVVLVRKSLAWITGIILLVSTLIGVCLLMNMPLTRDTLLYSNVKID

SEQ ID NO: 33727 - protein, 310 aa, Zea mays subsp. mays
  peptide (1)..(310): Ceres Seq. ID no. 12411689
  misc_feature (1)..(310): NCBI GI NO: 15230073 NR Description: type 1 membrane protein, putative
  misc_feature (201)..(310): NCBI GI NO: 40716478 NR Description: putative membrane protein type I [Musa acuminata]
MSLNEVSAVVSVLLGFAPSTSLPAISSSKLNKVLLPNPFDRPRAVFLVQIDGFNVPSFVSEGSNIFKTRIEGANIADTGLTDKDDLIVIHSDESLDLSRSDYLDNELSSLANWLEGSYQKSTGKLVIPLENGNSLTLQLDKEADKEFMSSLASLLKTIERAIQVHEDFSGVVNPAELLECHFTGLKALENEYGSGEIVKQGTEIVQRAVTKSFQSLHEAYKGKIVGLVISTNEAPSSLGSIIDAPSSLHISRRLEEASKTTDIASVVLVRKSLAWITGIILLVSTLIGVCLLMNMPLTRDTLLYSNVKID

SEQ ID NO: 33728 - DNA, 1790 bp, Zea mays subsp. mays
  misc_feature (1)..(1790): Ceres Seq. ID no. 12345156
acaatcacaggcctcccggcctcccgtgcgctattctctatcagcttacccagcacacagtacacactctaatctccacacgacccaatagatatacggggctgaaggatgaagcttagagcaaaagggatcggcctcctgcttctccttgtcttgcttgctctttgctccaccattgaagtcggcgaggcaagaagaggcaagcattggaggtcgtcgaggagctcaccgggctcatcccagctcaagaaagacaagggaaagaagagcagctcccgccggcagtacggcgccaaccggccaggtccgaagccaccggtcagctcgacaccaagctctggtgctgccaagggaaatcatcagaatccttaccaaccaagcccaagtccaagcccgaatgcccctgacatccctcctatgccaagccctgccaatggcagcaggcattccactcccgagccgccggctccaagctgtgggaagggtcaacagcagccatcacagccgccgccagcgacctcgcagggtgcagtattcaatgtggttgattttggagccaagggtgacggagttacagacgatactaaggcttttgaaggagcgtgggctgctgcctgcaaaaagggggcatgtacagttctcgtaccaccagaactagagttcctagttgggccaatctcgttctctgggccttactgcaaatcgaatattgtctttcagctggaaggaacaatcctagctccaaccagtgctaaatcctggggttcaggcttgctccagtggctcgagttcaccaaactaaatggaatggttattcaagggaacggcattataaatggcagagggcaacaatggtggacctactcagacacagaagacgaggatgatgatgacacgtacgatgtggagtttgaaagaatgccacagattaaacctacagcattgaggttttatggtagtttcaacgttgtagtggctggtatcactattgtcaacagctcacagtgtcatcttaagtttgacaactgtcaaggagtgatggtccatgacttgactatatcctcccctgagaacagtctcaacactgacggaatacacctgcagaactccaaagatgtcagcattcatcatacaaacctggcttgtggtgacgattgcatctccatccagacaggatgcagcaacataaatatacataacgtgaattgtggaccaggccatggaatcagcataggtggactaggccgagacaacacaaaagcatgcgtatcaaatgttacagtaagagatgtcaacatgttcagaaccatgaatggtgtcagaatcaagacctggcagggtggtgtaggattggttcaagacataaggttctcaaatatacaagtctcagaggttcaaacacccatcatcatagatcagttttattgtgacagaagcacttgcagaaatcaaacatcagcagtggcagtatcaggggttcaatatgagaatatcagaggaacatttacaatcaaacctgtccattttgcatgcagtgacagcttaccttgttcaggaatctctcttaccggtgtgcaactcagaccagtgcaagtaccccactaccacctgaataacccattctgctggcaagcttttggggagctctacactccaactgtccctcctatagcttgcttgcagattggaaaacctgctggcaataacttacagtcatatgatgacatatgctgaaacactcaaagtgcctttgtttgttgattggtgcttatccatgagtggtcgttgtg

SEQ ID NO: 33729 - protein, 541 aa, Zea mays subsp. mays
  peptide (1)..(541): Ceres Seq. ID no. 12345157
  misc_feature (177)..(506): Pfam Name: Pfam Description:  Glycosyl hydrolases family 28
  misc_feature (205)..(541): NCBI GI NO: 34911564 NR Description: putative polygalacturonase
  misc_feature (136)..(541): NCBI GI NO: 5669846 NR Description: polygalacturonase PG1 [Glycine max]
  misc_feature (143)..(528): NCBI GI NO: 27902550 NR Description: putative style polygalacturonase
  misc_feature (6)..(59): NCBI GI NO: 27902550 NR Description: putative style polygalacturonase
  misc_feature (177)..(541): NCBI GI NO: 30681834 NR Description: polygalacturonase, putative [Arabidopsis thaliana]
  misc_feature (138)..(541): NCBI GI NO: 15241460 NR Description: polygalacturonase, putative; protein id:At5g14650
  misc_feature (143)..(530): NCBI GI NO: 5669848 NR Description: polygalacturonase PG2 [Glycine max]
  misc_feature (204)..(541): NCBI GI NO: 13958032 NR Description: polygalacturonase [Pisum sativum]
  misc_feature (270)..(541): NCBI GI NO: 25404278 NR Description: probable polygalacturonase F8A5.12
  misc_feature (1)..(107): NCBI GI NO: 25404278 NR Description: probable polygalacturonase F8A5.12
MKLRAKGIGLLLLLVLLALCSTIEVGEARRGKHWRSSRSSPGSSQLKKDKGKKSSSRRQYGANRPGPKPPVSSTPSSGAAKGNHQNPYQPSPSPSPNAPDIPPMPSPANGSRHSTPEPPAPSCGKGQQQPSQPPPATSQGAVFNVVDFGAKGDGVTDDTKAFEGAWAAACKKGACTVLVPPELEFLVGPISFSGPYCKSNIVFQLEGTILAPTSAKSWGSGLLQWLEFTKLNGMVIQGNGIINGRGQQWWTYSDTEDEDDDDTYDVEFERMPQIKPTALRFYGSFNVVVAGITIVNSSQCHLKFDNCQGVMVHDLTISSPENSLNTDGIHLQNSKDVSIHHTNLACGDDCISIQTGCSNINIHNVNCGPGHGISIGGLGRDNTKACVSNVTVRDVNMFRTMNGVRIKTWQGGVGLVQDIRFSNIQVSEVQTPIIIDQFYCDRSTCRNQTSAVAVSGVQYENIRGTFTIKPVHFACSDSLPCSGISLTGVQLRPVQVPHYHLNNPFCWQAFGELYTPTVPPIACLQIGKPAGNNLQSYDDIC

SEQ ID NO: 33730 - protein, 438 aa, Zea mays subsp. mays
  peptide (1)..(438): Ceres Seq. ID no. 12345158
  misc_feature (74)..(403): Pfam Name: Pfam Description:  Glycosyl hydrolases family 28
  misc_feature (102)..(438): NCBI GI NO: 34911564 NR Description: putative polygalacturonase
  misc_feature (33)..(438): NCBI GI NO: 5669846 NR Description: polygalacturonase PG1 [Glycine max]
  misc_feature (40)..(425): NCBI GI NO: 27902550 NR Description: putative style polygalacturonase
  misc_feature (74)..(438): NCBI GI NO: 30681834 NR Description: polygalacturonase, putative [Arabidopsis thaliana]
  misc_feature (35)..(438): NCBI GI NO: 15241460 NR Description: polygalacturonase, putative; protein id:At5g14650
  misc_feature (40)..(427): NCBI GI NO: 5669848 NR Description: polygalacturonase PG2 [Glycine max]
  misc_feature (101)..(438): NCBI GI NO: 13958032 NR Description: polygalacturonase [Pisum sativum]
  misc_feature (167)..(438): NCBI GI NO: 25404278 NR Description: probable polygalacturonase F8A5.12
  misc_feature (23)..(438): NCBI GI NO: 15231579 NR Description: polygalacturonase, putative; protein id:At3g26610
  misc_feature (166)..(438): NCBI GI NO: 25402611 NR Description: protein F20B24.8 [imported] - Arabidopsis thaliana
MPSPANGSRHSTPEPPAPSCGKGQQQPSQPPPATSQGAVFNVVDFGAKGDGVTDDTKAFEGAWAAACKKGACTVLVPPELEFLVGPISFSGPYCKSNIVFQLEGTILAPTSAKSWGSGLLQWLEFTKLNGMVIQGNGIINGRGQQWWTYSDTEDEDDDDTYDVEFERMPQIKPTALRFYGSFNVVVAGITIVNSSQCHLKFDNCQGVMVHDLTISSPENSLNTDGIHLQNSKDVSIHHTNLACGDDCISIQTGCSNINIHNVNCGPGHGISIGGLGRDNTKACVSNVTVRDVNMFRTMNGVRIKTWQGGVGLVQDIRFSNIQVSEVQTPIIIDQFYCDRSTCRNQTSAVAVSGVQYENIRGTFTIKPVHFACSDSLPCSGISLTGVQLRPVQVPHYHLNNPFCWQAFGELYTPTVPPIACLQIGKPAGNNLQSYDDIC

SEQ ID NO: 33731 - protein, 308 aa, Zea mays subsp. mays
  peptide (1)..(308): Ceres Seq. ID no. 12345159
  misc_feature (1)..(273): Pfam Name: Pfam Description:  Glycosyl hydrolases family 28
  misc_feature (1)..(308): NCBI GI NO: 34911564 NR Description: putative polygalacturonase
  misc_feature (1)..(308): NCBI GI NO: 5669846 NR Description: polygalacturonase PG1 [Glycine max]
  misc_feature (1)..(295): NCBI GI NO: 27902550 NR Description: putative style polygalacturonase
  misc_feature (1)..(308): NCBI GI NO: 30681834 NR Description: polygalacturonase, putative [Arabidopsis thaliana]
  misc_feature (1)..(308): NCBI GI NO: 15241460 NR Description: polygalacturonase, putative; protein id:At5g14650
  misc_feature (1)..(297): NCBI GI NO: 5669848 NR Description: polygalacturonase PG2 [Glycine max]
  misc_feature (1)..(308): NCBI GI NO: 13958032 NR Description: polygalacturonase [Pisum sativum]
  misc_feature (37)..(308): NCBI GI NO: 25404278 NR Description: probable polygalacturonase F8A5.12
  misc_feature (1)..(308): NCBI GI NO: 15231579 NR Description: polygalacturonase, putative; protein id:At3g26610
  misc_feature (36)..(308): NCBI GI NO: 25402611 NR Description: protein F20B24.8 [imported] - Arabidopsis thaliana
MVIQGNGIINGRGQQWWTYSDTEDEDDDDTYDVEFERMPQIKPTALRFYGSFNVVVAGITIVNSSQCHLKFDNCQGVMVHDLTISSPENSLNTDGIHLQNSKDVSIHHTNLACGDDCISIQTGCSNINIHNVNCGPGHGISIGGLGRDNTKACVSNVTVRDVNMFRTMNGVRIKTWQGGVGLVQDIRFSNIQVSEVQTPIIIDQFYCDRSTCRNQTSAVAVSGVQYENIRGTFTIKPVHFACSDSLPCSGISLTGVQLRPVQVPHYHLNNPFCWQAFGELYTPTVPPIACLQIGKPAGNNLQSYDDIC

SEQ ID NO: 33732 - DNA, 1775 bp, Zea mays subsp. mays
  misc_feature (1)..(1775): Ceres Seq. ID no. 12342268
ctcggtgctctcgagtctcgagagtcgagactcaggggacctgatttcctcgtccggccatggcgaccggtggcaagtccgctgcccctcagccacctcccgccgcgtcctcctcctccgaacgcgcgctggagtcagtccacttctcttccggaaaccctcgcatcgaggagacccgcggcgtcgtcgtcctccaccccgacccgcccgcggccgcctcctggtctcatgtcccgttggggagtaagccgcgggtgtgcgtgctcgccgtgcccaaccacatgacctacgccgacttctgccgtttctgcggcgccttcgtccctcacacactcgagatgcgcatcgtcagaactgatggagcagaggaccagtacagcgttcttataaattttgacactcagagctccacagacagcttctataagcacttcaacgggaagcagttctcttcgctggaggggggtgtctgccatgtccgttttgtggaagaggtgcactacactgaattgattgagcatgcacatacctcagttacaaacttggctgagcaacctacatgcccagtatgtcttgaacgacttgaccaagatcctggaggtattctcacaacaatctgcaaccattctttccactgctcgtgcatatcaaaatggacagactcctcatgcccggtctgtagatattgtcagcagcaaccagagaaatccatgtgttctatttgcggaacttcggagaatctttggatatgtctaatctgtggccatgttggctgtggaaggtacaagggtggacatgctattgaacactggaaggaaactcaacattgttattcacttgagttagagacacaaaaagtgtgggactatgctggggacaactatgtacatcggcttattcagtcaaaaacagatggaaagctagttgagtacaatttccatggtgatcacacagcagagagcacgtgttcactatgcagtggtgatgccgcaatggatgaagctctactgaacagtaaatttgaagctattgttgaagagtacaatgatctcgtcacatttcaacttgaaaagcaaagaaattactatgagtcacttctactagaagtcaaggaggaaactgagaaagaaatttctgctgctactgagaaagccatgagcacaaaactccaaaagttggaagtaaagtttgacaagtgtatggaagagaaaaaatttcttgatgaagtaaatggcaatcttgtcaagaatcaggagatgtggattgaaactatacgaaaagcacaagcaagggagcaagctgcgctcagattaaaagatgagaagatcgaaaaacttcaggaagagctaagaggtttgatagcccatttcgactgccaaagtgacactgcacaagcttcaaatgcgatctcgagcgatataccagggggcatgattcttccggtagcatcagaatcgtcctcgagcggcggcgttgttggtggcactggaaacggggagcaaaattgagtaaactgcgccctgtataaagcacgtttggatcttagggacctaggtatattcttgcttccaaacccccaccgttgtaggttcagttagggtaatacacacttgttagctgtcacctcactgcccctcgattctactgtcactagccgctagtagtgtggtactagggatgaaaacgatttcatttttttttggtttttcgaaattcgtttccgatttttcgaccgtatttaatggttatggtatttttcgaaaacataattggtc

SEQ ID NO: 33733 - protein, 482 aa, Zea mays subsp. mays
  peptide (1)..(482): Ceres Seq. ID no. 12342269
  misc_feature (219)..(290): Pfam Name: Pfam Description:  Zn-finger in ubiquitin-hydrolases and other protein
  misc_feature (15)..(473): NCBI GI NO: 15225236 NR Description: hypothetical protein; protein id: At2g26000.1
  misc_feature (47)..(470): NCBI GI NO: 38345493 NR Description: OSJNBa0010D21.6
  misc_feature (1)..(475): NCBI GI NO: 13492093 NR Description: BRAP2 variant 1 [Mus musculus]
  misc_feature (1)..(475): NCBI GI NO: 13492095 NR Description: BRAP2 variant 2 [Mus musculus]
  misc_feature (19)..(432): NCBI GI NO: 15227893 NR Description: hypothetical protein; protein id: At2g42160.1
  misc_feature (15)..(477): NCBI GI NO: 10800417 NR Description: BRCA1 associated protein [Homo sapiens]
  misc_feature (66)..(475): NCBI GI NO: 17998683 NR Description: BRCA1 associated protein
  misc_feature (15)..(440): NCBI GI NO: 3252872 NR Description: BRCA1-associated protein 2 [Homo sapiens]
  misc_feature (6)..(482): NCBI GI NO: 24637027 NR Description: BRAP2 [Squalus acanthias]
  misc_feature (12)..(479): NCBI GI NO: 31240987 NR Description: ENSANGP00000017603 [Anopheles gambiae]
MATGGKSAAPQPPPAASSSSERALESVHFSSGNPRIEETRGVVVLHPDPPAAASWSHVPLGSKPRVCVLAVPNHMTYADFCRFCGAFVPHTLEMRIVRTDGAEDQYSVLINFDTQSSTDSFYKHFNGKQFSSLEGGVCHVRFVEEVHYTELIEHAHTSVTNLAEQPTCPVCLERLDQDPGGILTTICNHSFHCSCISKWTDSSCPVCRYCQQQPEKSMCSICGTSENLWICLICGHVGCGRYKGGHAIEHWKETQHCYSLELETQKVWDYAGDNYVHRLIQSKTDGKLVEYNFHGDHTAESTCSLCSGDAAMDEALLNSKFEAIVEEYNDLVTFQLEKQRNYYESLLLEVKEETEKEISAATEKAMSTKLQKLEVKFDKCMEEKKFLDEVNGNLVKNQEMWIETIRKAQAREQAALRLKDEKIEKLQEELRGLIAHFDCQSDTAQASNAISSDIPGGMILPVASESSSSGGVVGGTGNGEQN

SEQ ID NO: 33734 - protein, 408 aa, Zea mays subsp. mays
  peptide (1)..(408): Ceres Seq. ID no. 12342270
  misc_feature (145)..(216): Pfam Name: Pfam Description:  Zn-finger in ubiquitin-hydrolases and other protein
  misc_feature (1)..(399): NCBI GI NO: 15225236 NR Description: hypothetical protein; protein id: At2g26000.1
  misc_feature (1)..(396): NCBI GI NO: 38345493 NR Description: OSJNBa0010D21.6
  misc_feature (1)..(401): NCBI GI NO: 13492093 NR Description: BRAP2 variant 1 [Mus musculus]
  misc_feature (1)..(401): NCBI GI NO: 13492095 NR Description: BRAP2 variant 2 [Mus musculus]
  misc_feature (1)..(358): NCBI GI NO: 15227893 NR Description: hypothetical protein; protein id: At2g42160.1
  misc_feature (1)..(403): NCBI GI NO: 10800417 NR Description: BRCA1 associated protein [Homo sapiens]
  misc_feature (1)..(401): NCBI GI NO: 17998683 NR Description: BRCA1 associated protein
  misc_feature (1)..(366): NCBI GI NO: 3252872 NR Description: BRCA1-associated protein 2 [Homo sapiens]
  misc_feature (1)..(408): NCBI GI NO: 24637027 NR Description: BRAP2 [Squalus acanthias]
  misc_feature (1)..(405): NCBI GI NO: 31240987 NR Description: ENSANGP00000017603 [Anopheles gambiae]
MTYADFCRFCGAFVPHTLEMRIVRTDGAEDQYSVLINFDTQSSTDSFYKHFNGKQFSSLEGGVCHVRFVEEVHYTELIEHAHTSVTNLAEQPTCPVCLERLDQDPGGILTTICNHSFHCSCISKWTDSSCPVCRYCQQQPEKSMCSICGTSENLWICLICGHVGCGRYKGGHAIEHWKETQHCYSLELETQKVWDYAGDNYVHRLIQSKTDGKLVEYNFHGDHTAESTCSLCSGDAAMDEALLNSKFEAIVEEYNDLVTFQLEKQRNYYESLLLEVKEETEKEISAATEKAMSTKLQKLEVKFDKCMEEKKFLDEVNGNLVKNQEMWIETIRKAQAREQAALRLKDEKIEKLQEELRGLIAHFDCQSDTAQASNAISSDIPGGMILPVASESSSSGGVVGGTGNGEQN

SEQ ID NO: 33735 - protein, 389 aa, Zea mays subsp. mays
  peptide (1)..(389): Ceres Seq. ID no. 12342271
  misc_feature (126)..(197): Pfam Name: Pfam Description:  Zn-finger in ubiquitin-hydrolases and other protein
  misc_feature (1)..(380): NCBI GI NO: 15225236 NR Description: hypothetical protein; protein id: At2g26000.1
  misc_feature (1)..(377): NCBI GI NO: 38345493 NR Description: OSJNBa0010D21.6
  misc_feature (1)..(382): NCBI GI NO: 13492093 NR Description: BRAP2 variant 1 [Mus musculus]
  misc_feature (1)..(382): NCBI GI NO: 13492095 NR Description: BRAP2 variant 2 [Mus musculus]
  misc_feature (1)..(339): NCBI GI NO: 15227893 NR Description: hypothetical protein; protein id: At2g42160.1
  misc_feature (1)..(384): NCBI GI NO: 10800417 NR Description: BRCA1 associated protein [Homo sapiens]
  misc_feature (1)..(382): NCBI GI NO: 17998683 NR Description: BRCA1 associated protein
  misc_feature (1)..(347): NCBI GI NO: 3252872 NR Description: BRCA1-associated protein 2 [Homo sapiens]
  misc_feature (1)..(389): NCBI GI NO: 24637027 NR Description: BRAP2 [Squalus acanthias]
  misc_feature (1)..(386): NCBI GI NO: 31240987 NR Description: ENSANGP00000017603 [Anopheles gambiae]
MRIVRTDGAEDQYSVLINFDTQSSTDSFYKHFNGKQFSSLEGGVCHVRFVEEVHYTELIEHAHTSVTNLAEQPTCPVCLERLDQDPGGILTTICNHSFHCSCISKWTDSSCPVCRYCQQQPEKSMCSICGTSENLWICLICGHVGCGRYKGGHAIEHWKETQHCYSLELETQKVWDYAGDNYVHRLIQSKTDGKLVEYNFHGDHTAESTCSLCSGDAAMDEALLNSKFEAIVEEYNDLVTFQLEKQRNYYESLLLEVKEETEKEISAATEKAMSTKLQKLEVKFDKCMEEKKFLDEVNGNLVKNQEMWIETIRKAQAREQAALRLKDEKIEKLQEELRGLIAHFDCQSDTAQASNAISSDIPGGMILPVASESSSSGGVVGGTGNGEQN

SEQ ID NO: 33736 - DNA, 1508 bp, Zea mays subsp. mays
  misc_feature (1)..(1508): Ceres Seq. ID no. 12348820
cactgatcggattcttcggtgccgcgtttgggagcgtcggcggagttggtggcggcgggatcttcgtgccgatgctgacgctcatcattgggtttgacccgaaatcatctactgcgatatcaaagtgtatgattatgggagcctctgtttcaactgtttactacaatctcaagctaaagcatccgactttggacatgccagtgatcgattatgacctggctgtgctcatgcagcctatgctaatgcttgggatcagcattggtgttatttttaatgttatattccctgactggctggtcacagttctgctgataattcttttcctaggcacatccacaaaagcctttctgaagggcattgagacatggaagaaagagacagtaatccaaagggaggctgcgaaacttttggagcaaactgcaggtgaggaagcagagtatgcagcacttcctactggaccagatgttgcagcaaacaaaaaagccctcacatcagatgaggcgccatcgcttataaagaacatacactggaagaaggttggtcttctttcatttgtatgggtggcattccttgttcttcaggtcacaaagaattacactgctacttgctccccatggtactgggtcttgaaccttctccaggttccagtgtcactaggagtgacactgtatgaaggatttgggctgatgagtgcgaagagggtgttatcatcaaagggaagtggacaaactaccatgaaatttcatcaggtagtcgtatacggtctattcggtatagccgcaggactagttggtggactccttggtctcggaggtggcttcattatggggccactgttcttggagcttggcatccctccccaagtttcaagtgctactgctacctttgcaatgatgttctcatcttccatgtcggttgtcgaatactacctcttgaaccggtttccagtgccttatgctgtttatttcatcgttgttgcatttgttgctgccatcattggccagcatgtggtgaggaagttgatcaactggctagggcgagcatcacttatcatcttcatactggctttcatgatctttgtcagcgcgatttctctcggtggggttggcgtctctaacatggttcacaagattgagcgacatgagtacatggggtttgaggacctttgcaagtacgatgcataagaagcagggaagctgaagatgtgagctatgtggtgtgcagttctccgcaagcagaagtgggataattcaaggatagaagggttccatgatgcaatttggtgcgtaggaccgaagaggttctagcagcgacagttcctcgaagggaggctagctgcatggattggcttaagatgaattttgggcactgaattttcaaaacaaatgtagagatgattttctgccacggcagaatgtcgtcagtgcatttcgttgtaggaaatgtacactgcacatcttcagataaccatcctatagtactacgcgatatgaaatatcacatgatag

SEQ ID NO: 33737 - protein, 393 aa, Zea mays subsp. mays
  peptide (1)..(393): Ceres Seq. ID no. 12348821
  misc_feature (1)..(392): NCBI GI NO: 40253412 NR Description: membrane protein-like
  misc_feature (2)..(393): NCBI GI NO: 40253486 NR Description: unknown protein
  misc_feature (1)..(391): NCBI GI NO: 30682879 NR Description: expressed protein [Arabidopsis thaliana]
  misc_feature (1)..(389): NCBI GI NO: 30686851 NR Description: expressed protein [Arabidopsis thaliana]
  misc_feature (189)..(384): NCBI GI NO: 16660290 NR Description: hypothetical protein [Musa acuminata]
  misc_feature (206)..(391): NCBI GI NO: 25412342 NR Description: hypothetical protein At2g25740
  misc_feature (1)..(389): NCBI GI NO: 6554197 NR Description: T23J18.20 [Arabidopsis thaliana]
  misc_feature (1)..(389): NCBI GI NO: 15220419 NR Description: hypothetical protein; protein id: At1g11540.1
  misc_feature (1)..(389): NCBI GI NO: 34908754 NR Description: P0415A04.10
  misc_feature (1)..(389): NCBI GI NO: 15220600 NR Description: unknown protein; protein id: At1g61740
LIGFFGAAFGSVGGVGGGGIFVPMLTLIIGFDPKSSTAISKCMIMGASVSTVYYNLKLKHPTLDMPVIDYDLAVLMQPMLMLGISIGVIFNVIFPDWLVTVLLIILFLGTSTKAFLKGIETWKKETVIQREAAKLLEQTAGEEAEYAALPTGPDVAANKKALTSDEAPSLIKNIHWKKVGLLSFVWVAFLVLQVTKNYTATCSPWYWVLNLLQVPVSLGVTLYEGFGLMSAKRVLSSKGSGQTTMKFHQVVVYGLFGIAAGLVGGLLGLGGGFIMGPLFLELGIPPQVSSATATFAMMFSSSMSVVEYYLLNRFPVPYAVYFIVVAFVAAIIGQHVVRKLINWLGRASLIIFILAFMIFVSAISLGGVGVSNMVHKIERHEYMGFEDLCKYDA

SEQ ID NO: 33738 - protein, 370 aa, Zea mays subsp. mays
  peptide (1)..(370): Ceres Seq. ID no. 12348822
  misc_feature (1)..(369): NCBI GI NO: 40253412 NR Description: membrane protein-like
  misc_feature (1)..(370): NCBI GI NO: 40253486 NR Description: unknown protein
  misc_feature (1)..(368): NCBI GI NO: 30682879 NR Description: expressed protein [Arabidopsis thaliana]
  misc_feature (1)..(366): NCBI GI NO: 30686851 NR Description: expressed protein [Arabidopsis thaliana]
  misc_feature (166)..(361): NCBI GI NO: 16660290 NR Description: hypothetical protein [Musa acuminata]
  misc_feature (183)..(368): NCBI GI NO: 25412342 NR Description: hypothetical protein At2g25740
  misc_feature (1)..(366): NCBI GI NO: 6554197 NR Description: T23J18.20 [Arabidopsis thaliana]
  misc_feature (1)..(366): NCBI GI NO: 15220419 NR Description: hypothetical protein; protein id: At1g11540.1
  misc_feature (1)..(366): NCBI GI NO: 34908754 NR Description: P0415A04.10
  misc_feature (1)..(366): NCBI GI NO: 15220600 NR Description: unknown protein; protein id: At1g61740
MLTLIIGFDPKSSTAISKCMIMGASVSTVYYNLKLKHPTLDMPVIDYDLAVLMQPMLMLGISIGVIFNVIFPDWLVTVLLIILFLGTSTKAFLKGIETWKKETVIQREAAKLLEQTAGEEAEYAALPTGPDVAANKKALTSDEAPSLIKNIHWKKVGLLSFVWVAFLVLQVTKNYTATCSPWYWVLNLLQVPVSLGVTLYEGFGLMSAKRVLSSKGSGQTTMKFHQVVVYGLFGIAAGLVGGLLGLGGGFIMGPLFLELGIPPQVSSATATFAMMFSSSMSVVEYYLLNRFPVPYAVYFIVVAFVAAIIGQHVVRKLINWLGRASLIIFILAFMIFVSAISLGGVGVSNMVHKIERHEYMGFEDLCKYDA

SEQ ID NO: 33739 - protein, 351 aa, Zea mays subsp. mays
  peptide (1)..(351): Ceres Seq. ID no. 12348823
  misc_feature (1)..(350): NCBI GI NO: 40253412 NR Description: membrane protein-like
  misc_feature (1)..(351): NCBI GI NO: 40253486 NR Description: unknown protein
  misc_feature (1)..(349): NCBI GI NO: 30682879 NR Description: expressed protein [Arabidopsis thaliana]
  misc_feature (1)..(347): NCBI GI NO: 30686851 NR Description: expressed protein [Arabidopsis thaliana]
  misc_feature (147)..(342): NCBI GI NO: 16660290 NR Description: hypothetical protein [Musa acuminata]
  misc_feature (164)..(349): NCBI GI NO: 25412342 NR Description: hypothetical protein At2g25740
  misc_feature (1)..(347): NCBI GI NO: 6554197 NR Description: T23J18.20 [Arabidopsis thaliana]
  misc_feature (1)..(347): NCBI GI NO: 15220419 NR Description: hypothetical protein; protein id: At1g11540.1
  misc_feature (1)..(347): NCBI GI NO: 34908754 NR Description: P0415A04.10
  misc_feature (1)..(347): NCBI GI NO: 15220600 NR Description: unknown protein; protein id: At1g61740
MIMGASVSTVYYNLKLKHPTLDMPVIDYDLAVLMQPMLMLGISIGVIFNVIFPDWLVTVLLIILFLGTSTKAFLKGIETWKKETVIQREAAKLLEQTAGEEAEYAALPTGPDVAANKKALTSDEAPSLIKNIHWKKVGLLSFVWVAFLVLQVTKNYTATCSPWYWVLNLLQVPVSLGVTLYEGFGLMSAKRVLSSKGSGQTTMKFHQVVVYGLFGIAAGLVGGLLGLGGGFIMGPLFLELGIPPQVSSATATFAMMFSSSMSVVEYYLLNRFPVPYAVYFIVVAFVAAIIGQHVVRKLINWLGRASLIIFILAFMIFVSAISLGGVGVSNMVHKIERHEYMGFEDLCKYDA

SEQ ID NO: 33740 - DNA, 1433 bp, Zea mays subsp. mays; identical to SEQ ID NO: 26544
  misc_feature (1)..(1433): Ceres Seq. ID no. 13492071

SEQ ID NO: 33741 - protein, 374 aa, Zea mays subsp. mays; identical to SEQ ID NO: 26545
  peptide (1)..(374): Ceres Seq. ID no. 13492072
  misc_feature (223)..(325): Pfam Name: II Pfam Description: 2OG-Fe
  misc_feature (1)..(374): NCBI GI NO: 29123084 NR Description: 2-oxoglutarate-dependent oxygenase [Zea mays]
  misc_feature (14)..(374): NCBI GI NO: 40253423 NR Description: putative 2-oxoglutarate-dependent oxygenase
  misc_feature (14)..(374): NCBI GI NO: 40253419 NR Description: putative 2-oxoglutarate-dependent oxygenase
  misc_feature (16)..(374): NCBI GI NO: 13878119 NR Description: putative oxidoreductase [Arabidopsis thaliana]
  misc_feature (16)..(374): NCBI GI NO: 15221545 NR Description: 2-oxoglutarate-dependent dioxygenase, putative
  misc_feature (16)..(374): NCBI GI NO: 15221544 NR Description: 2-oxoglutarate-dependent dioxygenase, putative
  misc_feature (14)..(374): NCBI GI NO: 40253431 NR Description: putative 2-oxoglutarate-dependent oxygenase
  misc_feature (16)..(300): NCBI GI NO: 25406927 NR Description: protein F12K11.6 [imported] - Arabidopsis thaliana
  misc_feature (291)..(374): NCBI GI NO: 25406927 NR Description: protein F12K11.6 [imported] - Arabidopsis thaliana
  misc_feature (16)..(305): NCBI GI NO: 25406927 NR Description: protein F12K11.6 [imported] - Arabidopsis thaliana

SEQ ID NO: 33742 - protein, 264 aa, Zea mays subsp. mays; identical to SEQ ID NO: 26546
  peptide (1)..(264): Ceres Seq. ID no. 13492073
  misc_feature (113)..(215): Pfam Name: II Pfam Description: 2OG-Fe
  misc_feature (1)..(264): NCBI GI NO: 29123084 NR Description: 2-oxoglutarate-dependent oxygenase [Zea mays]
  misc_feature (1)..(264): NCBI GI NO: 40253423 NR Description: putative 2-oxoglutarate-dependent oxygenase
  misc_feature (1)..(264): NCBI GI NO: 40253419 NR Description: putative 2-oxoglutarate-dependent oxygenase
  misc_feature (1)..(264): NCBI GI NO: 13878119 NR Description: putative oxidoreductase [Arabidopsis thaliana]
  misc_feature (1)..(264): NCBI GI NO: 15221545 NR Description: 2-oxoglutarate-dependent dioxygenase, putative
  misc_feature (1)..(264): NCBI GI NO: 15221544 NR Description: 2-oxoglutarate-dependent dioxygenase, putative
  misc_feature (1)..(264): NCBI GI NO: 40253431 NR Description: putative 2-oxoglutarate-dependent oxygenase
  misc_feature (1)..(190): NCBI GI NO: 25406927 NR Description: protein F12K11.6 [imported] - Arabidopsis thaliana
  misc_feature (181)..(264): NCBI GI NO: 25406927 NR Description: protein F12K11.6 [imported] - Arabidopsis thaliana
  misc_feature (1)..(195): NCBI GI NO: 25406927 NR Description: protein F12K11.6 [imported] - Arabidopsis thaliana

SEQ ID NO: 33743 - protein, 261 aa, Zea mays subsp. mays; identical to SEQ ID NO: 26547
  peptide (1)..(261): Ceres Seq. ID no. 13492074
  misc_feature (110)..(212): Pfam Name: II Pfam Description: 2OG-Fe
  misc_feature (1)..(261): NCBI GI NO: 29123084 NR Description: 2-oxoglutarate-dependent oxygenase [Zea mays]
  misc_feature (1)..(261): NCBI GI NO: 40253423 NR Description: putative 2-oxoglutarate-dependent oxygenase
  misc_feature (1)..(261): NCBI GI NO: 40253419 NR Description: putative 2-oxoglutarate-dependent oxygenase
  misc_feature (1)..(261): NCBI GI NO: 13878119 NR Description: putative oxidoreductase [Arabidopsis thaliana]
  misc_feature (1)..(261): NCBI GI NO: 15221545 NR Description: 2-oxoglutarate-dependent dioxygenase, putative
  misc_feature (1)..(261): NCBI GI NO: 15221544 NR Description: 2-oxoglutarate-dependent dioxygenase, putative
  misc_feature (1)..(261): NCBI GI NO: 40253431 NR Description: putative 2-oxoglutarate-dependent oxygenase
  misc_feature (1)..(187): NCBI GI NO: 25406927 NR Description: protein F12K11.6 [imported] - Arabidopsis thaliana
  misc_feature (178)..(261): NCBI GI NO: 25406927 NR Description: protein F12K11.6 [imported] - Arabidopsis thaliana
  misc_feature (1)..(192): NCBI GI NO: 25406927 NR Description: protein F12K11.6 [imported] - Arabidopsis thaliana

SEQ ID NO: 33744 - DNA, 1464 bp, Zea mays subsp. mays
  misc_feature (1)..(1464): Ceres Seq. ID no. 12411682
atccacccaccccctacagttcagttcagttcagttggtctaggccatggccatgtccgcttcctcctcctcgcgcgccctcctccgccggatcggcggcgcgctcctccgccgctccttctcctcctcatccgccgcctccgcagggtaccacgtcgcgggcgggcccagctacatgcgcggcgccgtcttctgggagcccggccgcccgctcacgctcgaggagttccgcatgccgcggcccaaggccggcgagctcctcatcaagaccaaagcctgcggggtctgtcactccgatctccatgtcctcaaaggcgagctccctttctccacgccctgtgtcgtgggccatgagatcactggagaggtggttgaccatggcacgcacactcctgttgagatcatcaacaggttcccagtcggaagtcacgtcgtcggcgccttcataatgccatgtgggaactgcttctactgcgttaagggccaagaagatctgtgtgagtctttcttcgcgtataatcgtgccaaggggacactctatgatggcgagacacggctgtttctaaggggcaatgggaaaccggtgtacatgtatagtatgggagggcttgcagagtattgtgttgtcccagccaatgcgctagcagttctccctgactcactgccatacacagaatcagcaattttaggatgtgcagtgtttaccgcgtatggtgccctgaggcatgctgctgaaatgcggcctggtgattcagtagctgtgatcggagttggaggggttgggtcaagctgtttacagatagcaaaagcctttggagcttcccaagtcattgcagtggatgtccttgatgagaagcttcagaacgctacaacacttggagcaacccacactgtaaatgcagcaaaagatgatgcagttgaaaggataaaggaaattactgatggtaggggtgtagatgtggctatagaggcacttggtaaggcgttaacattttcccagtgcgccaagagcgtgcgtgatggaggcaaagctgttatgatcgggcttgctgcaacgaacgtaatgggagaggttgatataacccgtcttgtccgacgacaggtgaaaatcattggctcatatggcgcaagggctaggcaagaccttcctcagatagtgaagctcgcggagagtggtgccttcaatctccaaaacaccatatcaaggaaatgcaaatttgaggaggcgaatggcgcctatgaggatctcaatcagggcaagatcgtaggacgagctgtggttgagatcatggagtgatgacggacaaggtaatcaatcctgtggttccaagtctgggtcacacaacaataaagttttgcgtgctctttcacagcattgtcaaaatctgtagatgaccaaactgcattgtgtgtgtgtgtgtgtgtgtgtgtgacagtgtgttgttggaattaacatttgccctt

SEQ ID NO: 33745 - protein, 416 aa, Zea mays subsp. mays
  peptide (1)..(416): Ceres Seq. ID no. 12411683
  misc_feature (4)..(415): NCBI GI NO: 30697873 NR Description: oxidoreductase, zinc-binding dehydrogenase family
  misc_feature (4)..(415): NCBI GI NO: 21554156 NR Description: alcohol dehydrogenase-like protein
  misc_feature (4)..(415): NCBI GI NO: 30697875 NR Description: oxidoreductase, zinc-binding dehydrogenase family
  misc_feature (34)..(415): NCBI GI NO: 10177043 NR Description: alcohol dehydrogenase-like protein
  misc_feature (44)..(412): NCBI GI NO: 15897400 NR Description: Alcohol dehydrogenase (Zn containing) (adh-1)
  misc_feature (44)..(412): NCBI GI NO: 15922376 NR Description: 361aa long hypothetical alcohol dehydrogenase
  misc_feature (186)..(412): NCBI GI NO: 18313695 NR Description: alcohol dehydrogenase (Zinc)
  misc_feature (41)..(151): NCBI GI NO: 18313695 NR Description: alcohol dehydrogenase (Zinc)
  misc_feature (186)..(412): NCBI GI NO: 15899240 NR Description: Alcohol dehydrogenase (Zn containing) (adh-9)
  misc_feature (44)..(152): NCBI GI NO: 15899240 NR Description: Alcohol dehydrogenase (Zn containing) (adh-9)
MAMSASSSSRALLRRIGGALLRRSFSSSSAASAGYHVAGGPSYMRGAVFWEPGRPLTLEEFRMPRPKAGELLIKTKACGVCHSDLHVLKGELPFSTPCVVGHEITGEVVDHGTHTPVEIINRFPVGSHVVGAFIMPCGNCFYCVKGQEDLCESFFAYNRAKGTLYDGETRLFLRGNGKPVYMYSMGGLAEYCVVPANALAVLPDSLPYTESAILGCAVFTAYGALRHAAEMRPGDSVAVIGVGGVGSSCLQIAKAFGASQVIAVDVLDEKLQNATTLGATHTVNAAKDDAVERIKEITDGRGVDVAIEALGKALTFSQCAKSVRDGGKAVMIGLAATNVMGEVDITRLVRRQVKIIGSYGARARQDLPQIVKLAESGAFNLQNTISRKCKFEEANGAYEDLNQGKIVGRAVVEIME

SEQ ID NO: 33746 - protein, 414 aa, Zea mays subsp. mays
  peptide (1)..(414): Ceres Seq. ID no. 12411684
  misc_feature (2)..(413): NCBI GI NO: 30697873 NR Description: oxidoreductase, zinc-binding dehydrogenase family
  misc_feature (2)..(413): NCBI GI NO: 21554156 NR Description: alcohol dehydrogenase-like protein
  misc_feature (2)..(413): NCBI GI NO: 30697875 NR Description: oxidoreductase, zinc-binding dehydrogenase family
  misc_feature (32)..(413): NCBI GI NO: 10177043 NR Description: alcohol dehydrogenase-like protein
  misc_feature (42)..(410): NCBI GI NO: 15897400 NR Description: Alcohol dehydrogenase (Zn containing) (adh-1)
  misc_feature (42)..(410): NCBI GI NO: 15922376 NR Description: 361aa long hypothetical alcohol dehydrogenase
  misc_feature (184)..(410): NCBI GI NO: 18313695 NR Description: alcohol dehydrogenase (Zinc)
  misc_feature (39)..(149): NCBI GI NO: 18313695 NR Description: alcohol dehydrogenase (Zinc)
  misc_feature (184)..(410): NCBI GI NO: 15899240 NR Description: Alcohol dehydrogenase (Zn containing) (adh-9)
  misc_feature (42)..(150): NCBI GI NO: 15899240 NR Description: Alcohol dehydrogenase (Zn containing) (adh-9)
MSASSSSRALLRRIGGALLRRSFSSSSAASAGYHVAGGPSYMRGAVFWEPGRPLTLEEFRMPRPKAGELLIKTKACGVCHSDLHVLKGELPFSTPCVVGHEITGEVVDHGTHTPVEIINRFPVGSHVVGAFIMPCGNCFYCVKGQEDLCESFFAYNRAKGTLYDGETRLFLRGNGKPVYMYSMGGLAEYCVVPANALAVLPDSLPYTESAILGCAVFTAYGALRHAAEMRPGDSVAVIGVGGVGSSCLQIAKAFGASQVIAVDVLDEKLQNATTLGATHTVNAAKDDAVERIKEITDGRGVDVAIEALGKALTFSQCAKSVRDGGKAVMIGLAATNVMGEVDITRLVRRQVKIIGSYGARARQDLPQIVKLAESGAFNLQNTISRKCKFEEANGAYEDLNQGKIVGRAVVEIME

SEQ ID NO: 33747 - protein, 373 aa, Zea mays subsp. mays
  peptide (1)..(373): Ceres Seq. ID no. 12411685
  misc_feature (1)..(372): NCBI GI NO: 30697873 NR Description: oxidoreductase, zinc-binding dehydrogenase family
  misc_feature (1)..(372): NCBI GI NO: 21554156 NR Description: alcohol dehydrogenase-like protein
  misc_feature (1)..(372): NCBI GI NO: 30697875 NR Description: oxidoreductase, zinc-binding dehydrogenase family
  misc_feature (1)..(372): NCBI GI NO: 10177043 NR Description: alcohol dehydrogenase-like protein
  misc_feature (1)..(369): NCBI GI NO: 15897400 NR Description: Alcohol dehydrogenase (Zn containing) (adh-1)
  misc_feature (1)..(369): NCBI GI NO: 15922376 NR Description: 361aa long hypothetical alcohol dehydrogenase
  misc_feature (143)..(369): NCBI GI NO: 18313695 NR Description: alcohol dehydrogenase (Zinc)
  misc_feature (1)..(108): NCBI GI NO: 18313695 NR Description: alcohol dehydrogenase (Zinc)
  misc_feature (143)..(369): NCBI GI NO: 15899240 NR Description: Alcohol dehydrogenase (Zn containing) (adh-9)
  misc_feature (1)..(109): NCBI GI NO: 15899240 NR Description: Alcohol dehydrogenase (Zn containing) (adh-9)
MRGAVFWEPGRPLTLEEFRMPRPKAGELLIKTKACGVCHSDLHVLKGELPFSTPCVVGHEITGEVVDHGTHTPVEIINRFPVGSHVVGAFIMPCGNCFYCVKGQEDLCESFFAYNRAKGTLYDGETRLFLRGNGKPVYMYSMGGLAEYCVVPANALAVLPDSLPYTESAILGCAVFTAYGALRHAAEMRPGDSVAVIGVGGVGSSCLQIAKAFGASQVIAVDVLDEKLQNATTLGATHTVNAAKDDAVERIKEITDGRGVDVAIEALGKALTFSQCAKSVRDGGKAVMIGLAATNVMGEVDITRLVRRQVKIIGSYGARARQDLPQIVKLAESGAFNLQNTISRKCKFEEANGAYEDLNQGKIVGRAVVEIME

SEQ ID NO: 33748 - DNA, 1587 bp, Zea mays subsp. mays
  misc_feature (1)..(1587): Ceres Seq. ID no. 12341285
ctggaaacaaaccacggagccgtgaccgaggggagcggcggcggcgcaaggtgtcttcctctccgtcgccggcaacgtcgacaccgctggcaagcttctctccggttgtccctgctccagtaagagtaggcgaggacgagcctcccccatcctgggtgttggtgcctgacccattttctcaagataagatgttcagaggttctcctaagatagtagctttatctaaagctgctcaaaagaaggcttctcctaaagctgcaacaacaaagaaatgtggcggtggtgttgagagagctacatggaatgttgaattggagaagagtcttgttgacttgttgttttaacacaacatgcctccatatagggctcaaaatgggtggagtccagatgcttggaataaaatagtttctgaattccacaagaagcatgaatatgttacattcaacaagatccaaattcaggaaaaggagagggaattgaaaagggaatacaagatattgaaggaggcaagaaaacaaagtggagtttcttggaatgaaaaaagatgcatgatcattgctgaaccaacgatatgggacaacattatcactacatttcctagagctaagaagttccgcaagaagtcttttcctctctttgatgccttgggtgaattatatgatggtcacatcgcacaagggacttggaacattacctctactcaaccagtacaaaattctaatgatggagagcaactaaaaaccatagaagtggaagatgaagatactaatgaaccagaagaagatgcaagaatagaacaagatgaagatatagtaattgttgaaagggttgaacagaggttacctaaaaggtcaggtgcaccaactgtcaatcaagagaaggagacaaaaagagtgaggaaagatgcactagaagggctgatagggaggtaccttgatgtgaaaacgaagcaagttgcagatgaggctgcacaatcagcaaaagtaaaggatgttgctcaagataatgatttttctatcaagaggtgtatttctgttcttaagactatggatatgacaagagatgagaaggtcaaagcagctgaggtgttcaacataccaaattacagggaaacatttatttgtttcaatgatgatgagccagaagtcgctctcctttggctaagagggaagatggataaactctaaaggcaggtctggtggaacacggacaggctctgacttcgttcgagaccatccatttgattcttgcaccggttcttttctcagttcagttgaaagctagcactagatgcctacacggaatagaaggtccaccacagtccacagtcgttcatccaagcagctgtgtagatgtcgcctccttttattttgtcccttttctggttgtcatgtccctttttctggttgtcacgttgagctcttggtttgcagtttcatgttggtgtgcattgtctgaatagaaaactgaaaggctgttgtttcagtttcatgttggtgtgcgtcctctgaatagaaaactgaaaagttgtttcagtttcatgttggtgtgcgtcctctgaatagaaaactgaaaggctgttgttcc

SEQ ID NO: 33749 - protein, 278 aa, Zea mays subsp. mays
  peptide (1)..(278): Ceres Seq. ID no. 12341286
  misc_feature (1)..(187): NCBI GI NO: 34907580 NR Description: B1078G07.31
  misc_feature (1)..(275): NCBI GI NO: 37535590 NR Description: hypothetical protein
  misc_feature (1)..(246): NCBI GI NO: 21741991 NR Description: OSJNBa0060P14.12
  misc_feature (1)..(275): NCBI GI NO: 38344751 NR Description: OSJNBa0089K21.9
  misc_feature (1)..(144): NCBI GI NO: 34394471 NR Description: unknown protein
  misc_feature (1)..(144): NCBI GI NO: 34915330 NR Description: hypothetical protein~similar to Oryza sativachromosome 10
  misc_feature (1)..(144): NCBI GI NO: 37535236 NR Description: hypothetical protein
  misc_feature (147)..(275): NCBI GI NO: 34913838 NR Description: OSJNBa0042P21.26
  misc_feature (32)..(247): NCBI GI NO: 38605913 NR Description: OSJNBb0088C09.7
  misc_feature (1)..(152): NCBI GI NO: 25371570 NR Description: hypothetical protein AT4g02210
MPPYRAQNGWSPDAWNKIVSEFHKKHEYVTFNKIQIQEKERELKREYKILKEARKQSGVSWNEKRCMIIAEPTIWDNIITTFPRAKKFRKKSFPLFDALGELYDGHIAQGTWNITSTQPVQNSNDGEQLKTIEVEDEDTNEPEEDARIEQDEDIVIVERVEQRLPKRSGAPTVNQEKETKRVRKDALEGLIGRYLDVKTKQVADEAAQSAKVKDVAQDNDFSIKRCISVLKTMDMTRDEKVKAAEVFNIPNYRETFICFNDDEPEVALLWLRGKMDKL

SEQ ID NO: 33750 - protein, 212 aa, Zea mays subsp. mays
  peptide (1)..(212): Ceres Seq. ID no. 12341287
  misc_feature (1)..(121): NCBI GI NO: 34907580 NR Description: B1078G07.31
  misc_feature (1)..(209): NCBI GI NO: 37535590 NR Description: hypothetical protein
  misc_feature (1)..(180): NCBI GI NO: 21741991 NR Description: OSJNBa0060P14.12
  misc_feature (1)..(209): NCBI GI NO: 38344751 NR Description: OSJNBa0089K21.9
  misc_feature (1)..(78): NCBI GI NO: 34394471 NR Description: unknown protein
  misc_feature (1)..(78): NCBI GI NO: 34915330 NR Description: hypothetical protein~similar to Oryza sativachromosome 10
  misc_feature (1)..(78): NCBI GI NO: 37535236 NR Description: hypothetical protein
  misc_feature (81)..(209): NCBI GI NO: 34913838 NR Description: OSJNBa0042P21.26
  misc_feature (1)..(181): NCBI GI NO: 38605913 NR Description: OSJNBb0088C09.7
  misc_feature (1)..(86): NCBI GI NO: 25371570 NR Description: hypothetical protein AT4g02210
MIIAEPTIWDNIITTFPRAKKFRKKSFPLFDALGELYDGHIAQGTWNITSTQPVQNSNDGEQLKTIEVEDEDTNEPEEDARIEQDEDIVIVERVEQRLPKRSGAPTVNQEKETKRVRKDALEGLIGRYLDVKTKQVADEAAQSAKVKDVAQDNDFSIKRCISVLKTMDMTRDEKVKAAEVFNIPNYRETFICFNDDEPEVALLWLRGKMDKL

SEQ ID NO: 33751 - DNA, 803 bp, Zea mays subsp. mays
  misc_feature (1)..(803): Ceres Seq. ID no. 12413597
  misc_feature (787)..(787): n is a, c, t, g, unknown, or other
  misc_feature (786)..(786): n is a, c, t, g, unknown, or other
gcacgagaccattacctagaacatcctaatcgaaaagtggtgctagaagcaactgaaaacagccgagcgatctcctctccctctccctctccgatccattctccagcgcagcgaagtaaacatgtctgaccgggcaaagatgtcgtggcaggcgtacgtggacgagcacctgatgtgcgagatcgagggccaccacctcgcggcggcggccatcgtcggccacgacggtgccgcctgggcgcagagcacggcgttccccgagttcaagaccgaggacatggccaacatcatgaaggacttcgacgagccagggcacctcgcgccgacaggcctgttcctcggacctaccaagtacatggtcatccaaggcgagcctggtgccgtcatccgtggcaagaagggatcaggaggcatcaccgtgaagaagacagggcaggcactcgtcgttggcatctacgacgagccgatgacgcctggccagtgcaacatggtggtggaaaggctgggcgactacctgcttgaacagggcatgtaactactacgtaccagctggaatgcatgtcgacgacgatggtttcgagtttcgacttccaataatagtaacaacaaagcaaaggccttcctcccggcgtatttgctttgtctcttctcctccacgccataagatatctagcaattggtgactcgccttaattagttcgctttgcttttgaggttgactcgaccattttgctgtagcgtgaattgcatgcatggacatgcaacgctccaatggcctttggaatnnggaattttttttttcc

SEQ ID NO: 33752 - protein, 137 aa, Zea mays subsp. mays
  peptide (1)..(137): Ceres Seq. ID no. 12413598
  misc_feature (8)..(132): Pfam Name: Pfam Description:  Profilin
  misc_feature (1)..(137): NCBI GI NO: 422032 NR Description: profilin 2 - maize
  misc_feature (7)..(137): NCBI GI NO: 548597 NR Description: PROFILIN 2 (ZMPRO2)
  misc_feature (7)..(137): NCBI GI NO: 464466 NR Description: Profilin 1 (ZmPRO1)
  misc_feature (7)..(137): NCBI GI NO: 37532730 NR Description: Profilin A
  misc_feature (7)..(137): NCBI GI NO: 464470 NR Description: Profilin 3 (ZmPRO3)
  misc_feature (7)..(137): NCBI GI NO: 3914422 NR Description: Profilin (Pollen allergen Cyn d 12)
  misc_feature (7)..(137): NCBI GI NO: 14423860 NR Description: Profilin 3 (Pollen allergen Hev b 8.0201)
  misc_feature (7)..(137): NCBI GI NO: 3914432 NR Description: PROFILIN 2/4 (POLLEN ALLERGEN PHL P 11) (PHL P XI)
  misc_feature (7)..(137): NCBI GI NO: 21322677 NR Description: profilin [Phoenix dactylifera]
  misc_feature (7)..(137): NCBI GI NO: 464471 NR Description: PROFILIN 1 (POLLEN ALLERGEN PHL P 11) (PHL P XI)
MSDRAKMSWQAYVDEHLMCEIEGHHLAAAAIVGHDGAAWAQSTAFPEFKTEDMANIMKDFDEPGHLAPTGLFLGPTKYMVIQGEPGAVIRGKKGSGGITVKKTGQALVVGIYDEPMTPGQCNMVVERLGDYLLEQGM

SEQ ID NO: 33753 - protein, 131 aa, Zea mays subsp. mays
  peptide (1)..(131): Ceres Seq. ID no. 12413599
  misc_feature (2)..(126): Pfam Name: Pfam Description:  Profilin
  misc_feature (1)..(131): NCBI GI NO: 422032 NR Description: profilin 2 - maize
  misc_feature (1)..(131): NCBI GI NO: 548597 NR Description: PROFILIN 2 (ZMPRO2)
  misc_feature (1)..(131): NCBI GI NO: 464466 NR Description: Profilin 1 (ZmPRO1)
  misc_feature (1)..(131): NCBI GI NO: 37532730 NR Description: Profilin A
  misc_feature (1)..(131): NCBI GI NO: 464470 NR Description: Profilin 3 (ZmPRO3)
  misc_feature (1)..(131): NCBI GI NO: 3914422 NR Description: Profilin (Pollen allergen Cyn d 12)
  misc_feature (1)..(131): NCBI GI NO: 14423860 NR Description: Profilin 3 (Pollen allergen Hev b 8.0201)
  misc_feature (1)..(131): NCBI GI NO: 3914432 NR Description: PROFILIN 2/4 (POLLEN ALLERGEN PHL P 11) (PHL P XI)
  misc_feature (1)..(131): NCBI GI NO: 21322677 NR Description: profilin [Phoenix dactylifera]
  misc_feature (1)..(131): NCBI GI NO: 464471 NR Description: PROFILIN 1 (POLLEN ALLERGEN PHL P 11) (PHL P XI)
MSWQAYVDEHLMCEIEGHHLAAAAIVGHDGAAWAQSTAFPEFKTEDMANIMKDFDEPGHLAPTGLFLGPTKYMVIQGEPGAVIRGKKGSGGITVKKTGQALVVGIYDEPMTPGQCNMVVERLGDYLLEQGM

SEQ ID NO: 33754 - protein, 120 aa, Zea mays subsp. mays
  peptide (1)..(120): Ceres Seq. ID no. 12413600
  misc_feature (1)..(115): Pfam Name: Pfam Description:  Profilin
  misc_feature (1)..(120): NCBI GI NO: 422032 NR Description: profilin 2 - maize
  misc_feature (1)..(120): NCBI GI NO: 548597 NR Description: PROFILIN 2 (ZMPRO2)
  misc_feature (1)..(120): NCBI GI NO: 464466 NR Description: Profilin 1 (ZmPRO1)
  misc_feature (1)..(120): NCBI GI NO: 37532730 NR Description: Profilin A
  misc_feature (1)..(120): NCBI GI NO: 464470 NR Description: Profilin 3 (ZmPRO3)
  misc_feature (1)..(120): NCBI GI NO: 3914422 NR Description: Profilin (Pollen allergen Cyn d 12)
  misc_feature (1)..(120): NCBI GI NO: 14423860 NR Description: Profilin 3 (Pollen allergen Hev b 8.0201)
  misc_feature (1)..(120): NCBI GI NO: 3914432 NR Description: PROFILIN 2/4 (POLLEN ALLERGEN PHL P 11) (PHL P XI)
  misc_feature (1)..(120): NCBI GI NO: 21322677 NR Description: profilin [Phoenix dactylifera]
  misc_feature (1)..(120): NCBI GI NO: 464471 NR Description: PROFILIN 1 (POLLEN ALLERGEN PHL P 11) (PHL P XI)
MCEIEGHHLAAAAIVGHDGAAWAQSTAFPEFKTEDMANIMKDFDEPGHLAPTGLFLGPTKYMVIQGEPGAVIRGKKGSGGITVKKTGQALVVGIYDEPMTPGQCNMVVERLGDYLLEQGM

SEQ ID NO: 33755 - DNA, 1471 bp, Zea mays subsp. mays
  misc_feature (1)..(1471): Ceres Seq. ID no. 12579274
  misc_feature (850)..(850): n is a, c, t, g, unknown, or other
  misc_feature (879)..(879): n is a, c, t, g, unknown, or other
gcacgagaccattacctagaacatcctaatcgaaaaactgccgcgccgccaccctctacagataaggaagaggaggagggcaggatgtcgcaccgtaagttcgagcacccgaggcacggctccctcggcttccttcccaggaagcgctcctcccgtcaccgcggcaaggtgaagtcattccctagggatgacgccaagaagccttgccatctcactgccttccttggctacaaggctggcatgactcacattgtccgtgaggttgagaagccaggatccaaactccataagaaggaaacttgtgaggctgttaccatcattgaaacccctcctcttgtcattgttgggctcgtggcatatgtgaagactcctcgtggcctccgcacactcaactctgtttgggcccaacatcttagcgaagaagtgaggagaaggttctacaagaactggtgcaagagcaagaagaaggctttcacaaagtatgctctcaaatatgaaaatgatgctggcaagaaggaaattcagctgcagcttgagaagatgaagaaatatgcttctgttatccgtgtcattgctcatacccagattaggaagatgaagggtttgaagcagaagaaggctcacctgatggagattcaggtcaatggtggtaccattgctgacaaggtggactatggctacaaattctttgagaaagaggtccctgttgatgctgtcttccagaaggatgagatgattgacatcattggtgtgaccaaggggaaaggttatgagggtgtggtcactcgttggggtgtcacccggcttccccgcaagacccacaggggtctccgcaaagttgcttgtatcngtgcatggcatccggctagggtctcctanacggttgctcgtgctggtcagaatggggtaccaccaccgcactgagatgaacaagaaggtttacaagatcggcaaggctggacaagagacccacgatgcctccacagagtttgacaggactgagaaggacatcactcccatgggtggcttcccccattatggtatcgtgaagggtgactacctgatgatcaagggctgctgtgtgggtccaaagaagagggtggtgaccctccgccagtccctcctgaagcagacttcccggctggcgctggaggagatcaagctcaagtttcatcgacacatcgtccaaatttgggcacggtcgcttccagactaccgatgagaagcagaggttctttggcaagctcaaggcgtaaggtgctgcggtgcagcgaagtcccatttctcaaaatcatcaaactgtgatacttttgtttgtaaccttgctgtaccaagttttgtagccatggtccagtcgtctatggattgttccatgcttcagaactgcactgtctatgttttgtgctattttggttgtttaatgccccaatcattgcatatagattctaattgttttggtgtttgatgatcg

SEQ ID NO: 33756 - protein, 307 aa, Zea mays subsp. mays
  peptide (1)..(307): Ceres Seq. ID no. 12579275
  misc_feature (78)..(302): Pfam Name: Pfam Description:  Ribosomal protein L3
  misc_feature (29)..(302): NCBI GI NO: 548770 NR Description: 60S RIBOSOMAL PROTEIN L3
  misc_feature (29)..(302): NCBI GI NO: 6688812 NR Description: L3 Ribosomal protein
  misc_feature (29)..(302): NCBI GI NO: 15218306 NR Description: ribosomal protein; protein id: At1g43170
  misc_feature (29)..(302): NCBI GI NO: 15220533 NR Description: ribosomal protein; protein id: At1g61580.1
  misc_feature (29)..(302): NCBI GI NO: 23397228 NR Description: putative ribosomal protein [Arabidopsis thaliana]
  misc_feature (29)..(302): NCBI GI NO: 81658 NR Description: ribosomal protein L3
  misc_feature (29)..(302): NCBI GI NO: 81657 NR Description: ribosomal protein L3
  misc_feature (29)..(302): NCBI GI NO: 7305441 NR Description: ribosomal protein L3; ribosomal protein L3 homolog
  misc_feature (29)..(302): NCBI GI NO: 16307136 NR Description: ribosomal protein L3 [Mus musculus]
  misc_feature (26)..(302): NCBI GI NO: 37550317 NR Description: similar to ribosomal protein L3
  misc_feature (284)..(284): Xaa is any aa, unknown or other
  misc_feature (293)..(293): Xaa is any aa, unknown or other
ARDHYLEHPNRKTAAPPPSTDKEEEEGRMSHRKFEHPRHGSLGFLPRKRSSRHRGKVKSFPRDDAKKPCHLTAFLGYKAGMTHIVREVEKPGSKLHKKETCEAVTIIETPPLVIVGLVAYVKTPRGLRTLNSVWAQHLSEEVRRRFYKNWCKSKKKAFTKYALKYENDAGKKEIQLQLEKMKKYASVIRVIAHTQIRKMKGLKQKKAHLMEIQVNGGTIADKVDYGYKFFEKEVPVDAVFQKDEMIDIIGVTKGKGYEGVVTRWGVTRLPRKTHRGLRKVACIXAWHPARVSXTVARAGQNGVPPPH

SEQ ID NO: 33757 - protein, 279 aa, Zea mays subsp. mays
  peptide (1)..(279): Ceres Seq. ID no. 12579276
  misc_feature (50)..(274): Pfam Name: Pfam Description:  Ribosomal protein L3
  misc_feature (1)..(274): NCBI GI NO: 548770 NR Description: 60S RIBOSOMAL PROTEIN L3
  misc_feature (1)..(274): NCBI GI NO: 6688812 NR Description: L3 Ribosomal protein
  misc_feature (1)..(274): NCBI GI NO: 15218306 NR Description: ribosomal protein; protein id: At1g43170
  misc_feature (1)..(274): NCBI GI NO: 15220533 NR Description: ribosomal protein; protein id: At1g61580.1
  misc_feature (1)..(274): NCBI GI NO: 23397228 NR Description: putative ribosomal protein [Arabidopsis thaliana]
  misc_feature (1)..(274): NCBI GI NO: 81658 NR Description: ribosomal protein L3
  misc_feature (1)..(274): NCBI GI NO: 81657 NR Description: ribosomal protein L3
  misc_feature (1)..(274): NCBI GI NO: 7305441 NR Description: ribosomal protein L3; ribosomal protein L3 homolog
  misc_feature (1)..(274): NCBI GI NO: 16307136 NR Description: ribosomal protein L3 [Mus musculus]
  misc_feature (1)..(274): NCBI GI NO: 37550317 NR Description: similar to ribosomal protein L3
  misc_feature (256)..(256): Xaa is any aa, unknown or other
  misc_feature (265)..(265): Xaa is any aa, unknown or other
MSHRKFEHPRHGSLGFLPRKRSSRHRGKVKSFPRDDAKKPCHLTAFLGYKAGMTHIVREVEKPGSKLHKKETCEAVTIIETPPLVIVGLVAYVKTPRGLRTLNSVWAQHLSEEVRRRFYKNWCKSKKKAFTKYALKYENDAGKKEIQLQLEKMKKYASVIRVIAHTQIRKMKGLKQKKAHLMEIQVNGGTIADKVDYGYKFFEKEVPVDAVFQKDEMIDIIGVTKGKGYEGVVTRWGVTRLPRKTHRGLRKVACIXAWHPARVSXTVARAGQNGVPPPH

SEQ ID NO: 33758 - protein, 227 aa, Zea mays subsp. mays
  peptide (1)..(227): Ceres Seq. ID no. 12579277
  misc_feature (1)..(222): Pfam Name: Pfam Description:  Ribosomal protein L3
  misc_feature (1)..(222): NCBI GI NO: 548770 NR Description: 60S RIBOSOMAL PROTEIN L3
  misc_feature (1)..(222): NCBI GI NO: 6688812 NR Description: L3 Ribosomal protein
  misc_feature (1)..(222): NCBI GI NO: 15218306 NR Description: ribosomal protein; protein id: At1g43170
  misc_feature (1)..(222): NCBI GI NO: 15220533 NR Description: ribosomal protein; protein id: At1g61580.1
  misc_feature (1)..(222): NCBI GI NO: 23397228 NR Description: putative ribosomal protein [Arabidopsis thaliana]
  misc_feature (1)..(222): NCBI GI NO: 81658 NR Description: ribosomal protein L3
  misc_feature (1)..(222): NCBI GI NO: 81657 NR Description: ribosomal protein L3
  misc_feature (1)..(222): NCBI GI NO: 7305441 NR Description: ribosomal protein L3; ribosomal protein L3 homolog
  misc_feature (1)..(222): NCBI GI NO: 16307136 NR Description: ribosomal protein L3 [Mus musculus]
  misc_feature (1)..(222): NCBI GI NO: 37550317 NR Description: similar to ribosomal protein L3
  misc_feature (204)..(204): Xaa is any aa, unknown or other
  misc_feature (213)..(213): Xaa is any aa, unknown or other
MTHIVREVEKPGSKLHKKETCEAVTIIETPPLVIVGLVAYVKTPRGLRTLNSVWAQHLSEEVRRRFYKNWCKSKKKAFTKYALKYENDAGKKEIQLQLEKMKKYASVIRVIAHTQIRKMKGLKQKKAHLMEIQVNGGTIADKVDYGYKFFEKEVPVDAVFQKDEMIDIIGVTKGKGYEGVVTRWGVTRLPRKTHRGLRKVACIXAWHPARVSXTVARAGQNGVPPPH

SEQ ID NO: 33759 - DNA, 1167 bp, Zea mays subsp. mays
  misc_feature (1)..(1167): Ceres Seq. ID no. 12556567
gatggatgaagtataatataaagtcggtaggggttacctaagtattttatcgttccaccccaaacctccgacgttttgcatctccaagcagcatcgtctcctccccagatccatcaattcgttcggaccgcccttctcgtgtccccgttccaaagcgcggcaggctgagcggttccgtcagatttgagtcgtcatgaatcccgagtatgattaccttttcaaacttctgcttatcggtgattctggtgttggaaaatcatgcttgcttctcagatttgcagatgattcatatctggacagctacatcagcacaattggagttgactttaaaattaggacagtagagcaagacgggaagaccataaagcttcaaatttgggatactgctggacaagagcgcttcaggacaatcactagcagctactaccgcggagctcacggaatcattattgtatatgacgtgacagaccaagaaagcttcaataatgtcaagcaatggttaaacgagattgaccgttatgcaagtgacaatgttaacaagctccttgtgggaacaagagcgatctaactgctaacaaagttgtggcaaccgagacagcaaaggcgtttgctgatgagatgggcatcccattcatggagacgagtgccaaaaacgccatcaatgtggagcaggccttcatggctatggctgcatccatcaaggacaggatggccagccaaccagctgcggctaacgcaaggccagcgaccgtgcagatccgcggtcaacccgtcaaccagaagacgtcttgctgctcatcctaaggttgcctgatttttttttgtactttgtgtaaactcaaacacacaactactaccttttgtgtgcgcttgcaaatgtatttgcattattttcagaagacgctgctgatagcatctattcattgatcggacgattagggctagcttgtcgaattccatttttccaagggatttctatttttctaagagaaattatttttattttttcttaaaaaaataagaatttttttggaaaaatggagttaccaaactagctattagggagctgcaaatatgtaagcaggtacttggtgcactctcgactttccattcctttctaccctatcatacagcttcaccgtttataagccacgaattgcatttgtg

SEQ ID NO: 33760 - protein, 124 aa, Zea mays subsp. mays
  peptide (1)..(124): Ceres Seq. ID no. 12556568
  misc_feature (10)..(123): Pfam Name: Pfam Description:  Ras family
  misc_feature (1)..(123): NCBI GI NO: 466172 NR Description: GTP-BINDING PROTEIN YPTM2
  misc_feature (1)..(123): NCBI GI NO: 14140133 NR Description: putative GTP-binding protein [Oryza sativa]
  misc_feature (1)..(122): NCBI GI NO: 1616614 NR Description: small GTP-binding protein
  misc_feature (1)..(123): NCBI GI NO: 303750 NR Description: GTP-binding protein [Pisum sativum]
  misc_feature (1)..(122): NCBI GI NO: 4586580 NR Description: rab-type small GTP-binding protein
  misc_feature (1)..(122): NCBI GI NO: 1053063 NR Description: small GTP-binding protein
  misc_feature (1)..(122): NCBI GI NO: 1370166 NR Description: RAB1C [Lotus japonicus]
  misc_feature (1)..(123): NCBI GI NO: 303732 NR Description: GTP-binding protein [Pisum sativum]
  misc_feature (1)..(123): NCBI GI NO: 7643790 NR Description: small GTP-binding protein [Capsicum annuum]
  misc_feature (1)..(123): NCBI GI NO: 1053067 NR Description: small GTP-binding protein
MNPEYDYLFKLLLIGDSGVGKSCLLLRFADDSYLDSYISTIGVDFKIRTVEQDGKTIKLQIWDTAGQERFRTITSSYYRGAHGIIIVYDVTDQESFNNVKQWLNEIDRYASDNVNKLLVGTRAI

SEQ ID NO: 33761 - protein, 66 aa, Zea mays subsp. mays
  peptide (1)..(66): Ceres Seq. ID no. 12556569
MRWASHSWRRVPKTPSMWSRPSWLWLHPSRTGWPANQLRLTQGQRPCRSAVNPSTRRRLAAHPKVA

SEQ ID NO: 33762 - DNA, 1805 bp, Zea mays subsp. mays
  misc_feature (1)..(1805): Ceres Seq. ID no. 12374215
atcgattgttgtccgctgttctccttcctcctcgtcctccttcaggccagcgggcaagaagaagaagaagaaaaatcaaggcttgcggcgagaggctgtgcccggccgaccggcgagcgaacttcgtacgcgcgtcatgggtggcggcagcaacagaggcggcgccggcgccggcgaggagagcggcagcgaccacgacggtgtgctgcggaggccgctgctcaacacggggagctggtaccggatgagctcgcggcagtccagctttgccccggggacctcctccatggccgtcctgcgcgagtcccacgtctccgccttcctctgcacgctcatcgtcgcgctcggccccatccagttcggcttcaccagcggcttctcctccccgacccaggacgccatggttcgggacctcaacctctctatctccgagttctcggcgttcggatcgctgtccaacgtcggcggcatggtcggggcgatcgccagcgggcagatggccgagtacattggccgtaaagggtcgttgatgattgctgcaatcccaaatatcatcggttggcttgcgatctcctttgcaaaagatgcctcatttctatatatgggacgattgcttgaagggtttggtgtcgggatcatatcctacacggtaccggtatacatagcagagatatctcctcagaacatgaggggagctcttggttctgtgaaccagttgtctgtgacctttggcatattcttggcctatttgctcggcatgtttattccttggagacttcttgctgtgattggagccttgccctgcacaatgttgattcctgggctattcttcattccagaatctcccagatggctggcaaagatgaatttgatggaagattgtgagacgtccctacaagtgctgagggggtttgagactgacatcacaacagaagtgaatgatataaagagggcagtggcatcatcaagtaagaggaccacaatcagttttcaagaattaaaccaaaagaaataccgcacgccactacttctagggattggcctacttgtactgcaaaatcttagtggaatcaacggtgtactgttttatgcaagtagcatcttcaaagctgcaggggttacaaacagcgacttggccacctgttcacttggtgctattcaggtccttgctactggagttacaacatggctgttagacagagctggacgacgcatccttctcattatttctacctctggcatgactctatgccttcttgctgtttctgttgtattttttctcaaggataacatttcacaggattctaactcgtactacatcttaacaatgatctcccttgttggtattgtgtctttcgtcattaccttctcgtttggtatgggtgccattccatggctcatgatgtctgagatcctcccggttagcatcaagagccttggcggaagcatcgcaacactggccaactggctgacatccttcgccataacaatgacgacgaacttgatgctcacgtggagtgttggaggcacttttctctcgtacatggttgtgagcgccttcaccatcgtttttgttgtcctttgggtgccggagacgaaggggagaactctagaggagatacaattttcgtttcgctgagcattcagcgttagctgcaatggttgcccgagtgtttatcttagggcctgtttagatctcatgagctaaagcaaaaaggagctaaaatttagtcactttataaactaaagttccaatcaagaggagctaaaagtgaataaaattgtaaaagaatatccttttagcc

SEQ ID NO: 33763 - protein, 545 aa, Zea mays subsp. mays
  peptide (1)..(545): Ceres Seq. ID no. 12374216
  misc_feature (109)..(544): Pfam Name: and other Pfam Description: Sugar
  misc_feature (50)..(545): NCBI GI NO: 5091611 NR Description: Similar to gb| U43629 integral membrane protein fromBeta vulgaris and is a member of
  misc_feature (67)..(545): NCBI GI NO: 7446725 NR Description: probable sugar transporter protein - beet
  misc_feature (69)..(545): NCBI GI NO: 15223557 NR Description: integral membrane protein, putative
  misc_feature (59)..(545): NCBI GI NO: 15222158 NR Description: integral membrane protein, putative
  misc_feature (277)..(545): NCBI GI NO: 8778437 NR Description: F18O14.22 [Arabidopsis thaliana]
  misc_feature (69)..(285): NCBI GI NO: 8778437 NR Description: F18O14.22 [Arabidopsis thaliana]
  misc_feature (100)..(541): NCBI GI NO: 23504385 NR Description: putative sugar transporter
  misc_feature (107)..(541): NCBI GI NO: 21536914 NR Description: putative sugar transporter [Arabidopsis thaliana]
  misc_feature (107)..(541): NCBI GI NO: 18407508 NR Description: putative sugar transporter; protein id:At2g48020
  misc_feature (101)..(545): NCBI GI NO: 18419741 NR Description: sugar transporter - like protein
SIVVRCSPSSSSSFRPAGKKKKKKNQGLRREAVPGRPASELRTRVMGGGSNRGGAGAGEESGSDHDGVLRRPLLNTGSWYRMSSRQSSFAPGTSSMAVLRESHVSAFLCTLIVALGPIQFGFTSGFSSPTQDAMVRDLNLSISEFSAFGSLSNVGGMVGAIASGQMAEYIGRKGSLMIAAIPNIIGWLAISFAKDASFLYMGRLLEGFGVGIISYTVPVYIAEISPQNMRGALGSVNQLSVTFGIFLAYLLGMFIPWRLLAVIGALPCTMLIPGLFFIPESPRWLAKMNLMEDCETSLQVLRGFETDITTEVNDIKRAVASSSKRTTISFQELNQKKYRTPLLLGIGLLVLQNLSGINGVLFYASSIFKAAGVTNSDLATCSLGAIQVLATGVTTWLLDRAGRRILLIISTSGMTLCLLAVSVVFFLKDNISQDSNSYYILTMISLVGIVSFVITFSFGMGAIPWLMMSEILPVSIKSLGGSIATLANWLTSFAITMTTNLMLTWSVGGTFLSYMVVSAFTIVFVVLWVPETKGRTLEEIQFSFR

SEQ ID NO: 33764 - protein, 500 aa, Zea mays subsp. mays
  peptide (1)..(500): Ceres Seq. ID no. 12374217
  misc_feature (64)..(499): Pfam Name: and other Pfam Description: Sugar
  misc_feature (5)..(500): NCBI GI NO: 5091611 NR Description: Similar to gb| U43629 integral membrane protein fromBeta vulgaris and is a member of
  misc_feature (22)..(500): NCBI GI NO: 7446725 NR Description: probable sugar transporter protein - beet
  misc_feature (24)..(500): NCBI GI NO: 15223557 NR Description: integral membrane protein, putative
  misc_feature (14)..(500): NCBI GI NO: 15222158 NR Description: integral membrane protein, putative
  misc_feature (232)..(500): NCBI GI NO: 8778437 NR Description: F18O14.22 [Arabidopsis thaliana]
  misc_feature (24)..(240): NCBI GI NO: 8778437 NR Description: F18O14.22 [Arabidopsis thaliana]
  misc_feature (55)..(496): NCBI GI NO: 23504385 NR Description: putative sugar transporter
  misc_feature (62)..(496): NCBI GI NO: 21536914 NR Description: putative sugar transporter [Arabidopsis thaliana]
  misc_feature (62)..(496): NCBI GI NO: 18407508 NR Description: putative sugar transporter; protein id:At2g48020
  misc_feature (56)..(500): NCBI GI NO: 18419741 NR Description: sugar transporter - like protein
MGGGSNRGGAGAGEESGSDHDGVLRRPLLNTGSWYRMSSRQSSFAPGTSSMAVLRESHVSAFLCTLIVALGPIQFGFTSGFSSPTQDAMVRDLNLSISEFSAFGSLSNVGGMVGAIASGQMAEYIGRKGSLMIAAIPNIIGWLAISFAKDASFLYMGRLLEGFGVGIISYTVPVYIAEISPQNMRGALGSVNQLSVTFGIFLAYLLGMFIPWRLLAVIGALPCTMLIPGLFFIPESPRWLAKMNLMEDCETSLQVLRGFETDITTEVNDIKRAVASSSKRTTISFQELNQKKYRTPLLLGIGLLVLQNLSGINGVLFYASSIFKAAGVTNSDLATCSLGAIQVLATGVTTWLLDRAGRRILLIISTSGMTLCLLAVSVVFFLKDNISQDSNSYYILTMISLVGIVSFVITFSFGMGAIPWLMMSEILPVSIKSLGGSIATLANWLTSFAITMTTNLMLTWSVGGTFLSYMVVSAFTIVFVVLWVPETKGRTLEEIQFSFR

SEQ ID NO: 33765 - protein, 464 aa, Zea mays subsp. mays
  peptide (1)..(464): Ceres Seq. ID no. 12374218
  misc_feature (28)..(463): Pfam Name: and other Pfam Description: Sugar
  misc_feature (1)..(464): NCBI GI NO: 5091611 NR Description: Similar to gb| U43629 integral membrane protein fromBeta vulgaris and is a member of
  misc_feature (1)..(464): NCBI GI NO: 7446725 NR Description: probable sugar transporter protein - beet
  misc_feature (1)..(464): NCBI GI NO: 15223557 NR Description: integral membrane protein, putative
  misc_feature (1)..(464): NCBI GI NO: 15222158 NR Description: integral membrane protein, putative
  misc_feature (196)..(464): NCBI GI NO: 8778437 NR Description: F18O14.22 [Arabidopsis thaliana]
  misc_feature (1)..(204): NCBI GI NO: 8778437 NR Description: F18O14.22 [Arabidopsis thaliana]
  misc_feature (19)..(460): NCBI GI NO: 23504385 NR Description: putative sugar transporter
  misc_feature (26)..(460): NCBI GI NO: 21536914 NR Description: putative sugar transporter [Arabidopsis thaliana]
  misc_feature (26)..(460): NCBI GI NO: 18407508 NR Description: putative sugar transporter; protein id:At2g48020
  misc_feature (20)..(464): NCBI GI NO: 18419741 NR Description: sugar transporter - like protein
MSSRQSSFAPGTSSMAVLRESHVSAFLCTLIVALGPIQFGFTSGFSSPTQDAMVRDLNLSISEFSAFGSLSNVGGMVGAIASGQMAEYIGRKGSLMIAAIPNIIGWLAISFAKDASFLYMGRLLEGFGVGIISYTVPVYIAEISPQNMRGALGSVNQLSVTFGIFLAYLLGMFIPWRLLAVIGALPCTMLIPGLFFIPESPRWLAKMNLMEDCETSLQVLRGFETDITTEVNDIKRAVASSSKRTTISFQELNQKKYRTPLLLGIGLLVLQNLSGINGVLFYASSIFKAAGVTNSDLATCSLGAIQVLATGVTTWLLDRAGRRILLIISTSGMTLCLLAVSVVFFLKDNISQDSNSYYILTMISLVGIVSFVITFSFGMGAIPWLMMSEILPVSIKSLGGSIATLANWLTSFAITMTTNLMLTWSVGGTFLSYMVVSAFTIVFVVLWVPETKGRTLEEIQFSFR

SEQ ID NO: 33766 - DNA, 1241 bp, Zea mays subsp. mays
  misc_feature (1)..(1241): Ceres Seq. ID no. 12387145
agtgatgttctcctacgtgtggtccttcacgctgcagatgtacctgcaggcgcagagcaagaacgcggtgatcacgtacctggccatgctgaacctcggcctccacctgctcctgtcctggctggccaccgccaggctccgcctcggcctcgccggcgtcatgggctccatggttgtcgccatgtggatccccgtgctcggccagctcgccttcgtcttcttcggcgggtgcccgcgcacctggaccggcttctcctccgccgccttcgccgacctcgccgccatcgtcaggctgtcgctgtcgtctggcgtcatgctctgtttggagctgtggtacaacaccatactggtgctgctcactgggtacatgaagaacgcagaggttgcgctggacgccctctcaatatgcctcaacatcaacggctgggagatgatgatttccatcggctttctggtggcaaccggagtacgggtggcgaacgagctgggagccgggagcgcgaggagggccaagttcgccatctacaacgtggtggccacctcctccatcatcgggtccgtgctgttcgtgctgttcctcctcttccgcggaggcctcgcctacatattcaccgacagccaggcggtggcggacgcagtcgccggcctctcgcccctgctggccttctccatactgctcaacagcgtccagccagtgctgtcaggcgtcgctgtcggcgcgggctggcagagcgtcgtcgcctacgttaacatcacttcgtactacctcatcggcatccctcttggagccgtgctgggctacgcgctggggcttcatgtgaagggcatctggatcggcatgctgctcggaacgctggtccagactgttgtgcttctcttcataacgttgaagaccgactgggaaaaacaggtggaggttgctcaagagaggctgaagagatggtacatggaagagaacagaagactccaggggtccagacgaaacccttaggccggccctcagctccactgtgtatctctagttttccactcaccacgagaacaaaacgagggagacgactgctccacgtacaggccgatcgaggctgaaggatcatctctgggctgtatggtattgtagacacaaataatcatctgggctgggctgggcatgcaggtaatagtggtgtgcactagttctgaggttatatctctgccttgttcatcttaattcgatctgccggtgtcttgttgatcagtgc

SEQ ID NO: 33767 - protein, 329 aa, Zea mays subsp. mays
  peptide (1)..(329): Ceres Seq. ID no. 12387146
  misc_feature (1)..(320): NCBI GI NO: 15223402 NR Description: unknown protein; protein id: At1g33110
  misc_feature (1)..(304): NCBI GI NO: 25518156 NR Description: T9L6.1 protein - Arabidopsis thaliana
  misc_feature (1)..(320): NCBI GI NO: 15223391 NR Description: hypothetical protein; protein id: At1g33090.1
  misc_feature (1)..(319): NCBI GI NO: 22329916 NR Description: hypothetical protein; protein id: At1g33080
  misc_feature (1)..(320): NCBI GI NO: 15223394 NR Description: unknown protein; protein id: At1g33100.1
  misc_feature (1)..(274): NCBI GI NO: 6910584 NR Description: CDS [Arabidopsis thaliana]
  misc_feature (3)..(314): NCBI GI NO: 15238439 NR Description: putative protein; protein id: At5g65380
  misc_feature (2)..(314): NCBI GI NO: 22326870 NR Description: putative protein; protein id: At5g17700
  misc_feature (2)..(304): NCBI GI NO: 15228595 NR Description: unknown protein; protein id: At3g03620.1
  misc_feature (2)..(304): NCBI GI NO: 9759047 NR Description: gb|AAF03470
VMFSYVWSFTLQMYLQAQSKNAVITYLAMLNLGLHLLLSWLATARLRLGLAGVMGSMVVAMWIPVLGQLAFVFFGGCPRTWTGFSSAAFADLAAIVRLSLSSGVMLCLELWYNTILVLLTGYMKNAEVALDALSICLNINGWEMMISIGFLVATGVRVANELGAGSARRAKFAIYNVVATSSIIGSVLFVLFLLFRGGLAYIFTDSQAVADAVAGLSPLLAFSILLNSVQPVLSGVAVGAGWQSVVAYVNITSYYLIGIPLGAVLGYALGLHVKGIWIGMLLGTLVQTVVLLFITLKTDWEKQVEVAQERLKRWYMEENRRLQGSRRNP

SEQ ID NO: 33768 - protein, 328 aa, Zea mays subsp. mays
  peptide (1)..(328): Ceres Seq. ID no. 12387147
  misc_feature (1)..(319): NCBI GI NO: 15223402 NR Description: unknown protein; protein id: At1g33110
  misc_feature (1)..(303): NCBI GI NO: 25518156 NR Description: T9L6.1 protein - Arabidopsis thaliana
  misc_feature (1)..(319): NCBI GI NO: 15223391 NR Description: hypothetical protein; protein id: At1g33090.1
  misc_feature (1)..(318): NCBI GI NO: 22329916 NR Description: hypothetical protein; protein id: At1g33080
  misc_feature (1)..(319): NCBI GI NO: 15223394 NR Description: unknown protein; protein id: At1g33100.1
  misc_feature (1)..(273): NCBI GI NO: 6910584 NR Description: CDS [Arabidopsis thaliana]
  misc_feature (2)..(313): NCBI GI NO: 15238439 NR Description: putative protein; protein id: At5g65380
  misc_feature (1)..(313): NCBI GI NO: 22326870 NR Description: putative protein; protein id: At5g17700
  misc_feature (1)..(303): NCBI GI NO: 15228595 NR Description: unknown protein; protein id: At3g03620.1
  misc_feature (1)..(303): NCBI GI NO: 9759047 NR Description: gb|AAF03470
MFSYVWSFTLQMYLQAQSKNAVITYLAMLNLGLHLLLSWLATARLRLGLAGVMGSMVVAMWIPVLGQLAFVFFGGCPRTWTGFSSAAFADLAAIVRLSLSSGVMLCLELWYNTILVLLTGYMKNAEVALDALSICLNINGWEMMISIGFLVATGVRVANELGAGSARRAKFAIYNVVATSSIIGSVLFVLFLLFRGGLAYIFTDSQAVADAVAGLSPLLAFSILLNSVQPVLSGVAVGAGWQSVVAYVNITSYYLIGIPLGAVLGYALGLHVKGIWIGMLLGTLVQTVVLLFITLKTDWEKQVEVAQERLKRWYMEENRRLQGSRRNP

SEQ ID NO: 33769 - protein, 317 aa, Zea mays subsp. mays
  peptide (1)..(317): Ceres Seq. ID no. 12387148
  misc_feature (1)..(308): NCBI GI NO: 15223402 NR Description: unknown protein; protein id: At1g33110
  misc_feature (1)..(292): NCBI GI NO: 25518156 NR Description: T9L6.1 protein - Arabidopsis thaliana
  misc_feature (1)..(308): NCBI GI NO: 15223391 NR Description: hypothetical protein; protein id: At1g33090.1
  misc_feature (1)..(307): NCBI GI NO: 22329916 NR Description: hypothetical protein; protein id: At1g33080
  misc_feature (1)..(308): NCBI GI NO: 15223394 NR Description: unknown protein; protein id: At1g33100.1
  misc_feature (1)..(262): NCBI GI NO: 6910584 NR Description: CDS [Arabidopsis thaliana]
  misc_feature (1)..(302): NCBI GI NO: 15238439 NR Description: putative protein; protein id: At5g65380
  misc_feature (1)..(302): NCBI GI NO: 22326870 NR Description: putative protein; protein id: At5g17700
  misc_feature (1)..(292): NCBI GI NO: 15228595 NR Description: unknown protein; protein id: At3g03620.1
  misc_feature (1)..(292): NCBI GI NO: 9759047 NR Description: gb|AAF03470
MYLQAQSKNAVITYLAMLNLGLHLLLSWLATARLRLGLAGVMGSMVVAMWIPVLGQLAFVFFGGCPRTWTGFSSAAFADLAAIVRLSLSSGVMLCLELWYNTILVLLTGYMKNAEVALDALSICLNINGWEMMISIGFLVATGVRVANELGAGSARRAKFAIYNVVATSSIIGSVLFVLFLLFRGGLAYIFTDSQAVADAVAGLSPLLAFSILLNSVQPVLSGVAVGAGWQSVVAYVNITSYYLIGIPLGAVLGYALGLHVKGIWIGMLLGTLVQTVVLLFITLKTDWEKQVEVAQERLKRWYMEENRRLQGSRRNP

SEQ ID NO: 33770 - DNA, 1467 bp, Zea mays subsp. mays
  misc_feature (1)..(1467): Ceres Seq. ID no. 12411666
acatacctgactctcctccgatctctcagcacgctcctcttctgctaccttgctttccctgctgcgatccgttccttgccctattagtattagctagccggccggccggatcgacgatcgagcaaggagaggcgccccagcagtcctcgtcggatctatccatctcgtcgacagcgtcagcgcctcaggtggatcggagcggaggtggtggaccgggagctagtagctgccacacatttcggtcttcgaaaccacatatcatgatgtcgtcctcgtcctcgtcgtcggccgcctgctgcttcccgctggaccacctcgcgccgtcccccaccgagcagctctgctacgtgcactgcaactgctgcgacaccatcctcgccgtcggcgtgccctgcagcagcctgttcaagacggtgacggtgcgctgcggccactgcgccaacctactctccgtcaacctccgcggcctcctgctcccgcccgccgcgccggcgccgcccaaccatctcaacttcgctcactccttgctgtcacccacatccccgcatggcctcttggacgagttggctctccagcaggcgccgagcttcctgatggagcaggcgagtgccaacctgagcagcaccatgacgggccgcagcagcaacagcagctgcgccagcaacctgccgccgccggcgccgatgccggcagctcagcctgtgcagcaggaagccgaactgcccaagaccgccccgtcggtaaacaggcctccggagaagcggcagagagtcccgtcggcatacaaccggttcatcaaggacgagatccagcgcatcaaggccggcaacccggacatcacccaccgggaggcgttcagcgcagccgcaaagaattgggcccatttcccccacatccacttcggcctcatgccggaccagggcctcaagaagaccttcaagactcaggatggcgctgaagacatgctactcaaagacgatctctacgccgcagcggctgcagctgcagcagccaacatgggcatcactccattctaataactctggttaggcatgtgttctgaatcagctggcacgtcgtagtggctatcgccctttgtgctgcattctagggtttcgtctcagatcttgatctcaacatcgatcgtgtgtcgtttaattagagtactttccagtgtggggatagaaatggagaataatcaagttagagcgcgcacctagtaggccactgatgatccggtaggtacagacttgattgtctcctctaaatatcccttttcatttcatgttctctctgtttttcctattttttttgttcctggaccccttcaactcgccagtagagagctcgttgtgcctctctgatcccatgtttgcgtatgtctgctcaacaacatgtttttaccatggagaacaagttgaacatctgttagatctatcaacagtgtcatatatatgttccatcgtc

SEQ ID NO: 33771 - protein, 344 aa, Zea mays subsp. mays
  peptide (1)..(344): Ceres Seq. ID no. 12411667
  misc_feature (103)..(302): Pfam Name: Pfam Description:  YABBY protein
  misc_feature (94)..(344): NCBI GI NO: 38605890 NR Description: OSJNBb0020O11.2
  misc_feature (222)..(344): NCBI GI NO: 27804377 NR Description: MADS-box transcription factor CDM51
  misc_feature (91)..(204): NCBI GI NO: 27804377 NR Description: MADS-box transcription factor CDM51
  misc_feature (87)..(338): NCBI GI NO: 18411242 NR Description: putative YABBY3 axial regulator
  misc_feature (159)..(344): NCBI GI NO: 37535908 NR Description: hypothetical protein
  misc_feature (87)..(153): NCBI GI NO: 7486543 NR Description: hypothetical protein F6N15
  misc_feature (246)..(305): NCBI GI NO: 7486543 NR Description: hypothetical protein F6N15
  misc_feature (116)..(344): NCBI GI NO: 37551421 NR Description: FIL-like protein [Triticum aestivum]
  misc_feature (247)..(303): NCBI GI NO: 30683176 NR Description: expressed protein [Arabidopsis thaliana]
  misc_feature (110)..(163): NCBI GI NO: 30683176 NR Description: expressed protein [Arabidopsis thaliana]
IPDSPPISQHAPLLLPCFPCCDPFLALLVLASRPAGSTIEQGEAPQQSSSDLSISSTASAPQVDRSGGGGPGASSCHTFRSSKPHIMMSSSSSSSAACCFPLDHLAPSPTEQLCYVHCNCCDTILAVGVPCSSLFKTVTVRCGHCANLLSVNLRGLLLPPAAPAPPNHLNFAHSLLSPTSPHGLLDELALQQAPSFLMEQASANLSSTMTGRSSNSSCASNLPPPAPMPAAQPVQQEAELPKTAPSVNRPPEKRQRVPSAYNRFIKDEIQRIKAGNPDITHREAFSAAAKNWAHFPHIHFGLMPDQGLKKTFKTQDGAEDMLLKDDLYAAAAAAAAANMGITPF

SEQ ID NO: 33772 - protein, 258 aa, Zea mays subsp. mays
  peptide (1)..(258): Ceres Seq. ID no. 12411668
  misc_feature (17)..(216): Pfam Name: Pfam Description:  YABBY protein
  misc_feature (8)..(258): NCBI GI NO: 38605890 NR Description: OSJNBb0020O11.2
  misc_feature (136)..(258): NCBI GI NO: 27804377 NR Description: MADS-box transcription factor CDM51
  misc_feature (5)..(118): NCBI GI NO: 27804377 NR Description: MADS-box transcription factor CDM51
  misc_feature (1)..(252): NCBI GI NO: 18411242 NR Description: putative YABBY3 axial regulator
  misc_feature (73)..(258): NCBI GI NO: 37535908 NR Description: hypothetical protein
  misc_feature (1)..(67): NCBI GI NO: 7486543 NR Description: hypothetical protein F6N15
  misc_feature (160)..(219): NCBI GI NO: 7486543 NR Description: hypothetical protein F6N15
  misc_feature (30)..(258): NCBI GI NO: 37551421 NR Description: FIL-like protein [Triticum aestivum]
  misc_feature (161)..(217): NCBI GI NO: 30683176 NR Description: expressed protein [Arabidopsis thaliana]
  misc_feature (24)..(77): NCBI GI NO: 30683176 NR Description: expressed protein [Arabidopsis thaliana]
MMSSSSSSSAACCFPLDHLAPSPTEQLCYVHCNCCDTILAVGVPCSSLFKTVTVRCGHCANLLSVNLRGLLLPPAAPAPPNHLNFAHSLLSPTSPHGLLDELALQQAPSFLMEQASANLSSTMTGRSSNSSCASNLPPPAPMPAAQPVQQEAELPKTAPSVNRPPEKRQRVPSAYNRFIKDEIQRIKAGNPDITHREAFSAAAKNWAHFPHIHFGLMPDQGLKKTFKTQDGAEDMLLKDDLYAAAAAAAAANMGITPF

SEQ ID NO: 33773 - protein, 257 aa, Zea mays subsp. mays
  peptide (1)..(257): Ceres Seq. ID no. 12411669
  misc_feature (16)..(215): Pfam Name: Pfam Description:  YABBY protein
  misc_feature (7)..(257): NCBI GI NO: 38605890 NR Description: OSJNBb0020O11.2
  misc_feature (135)..(257): NCBI GI NO: 27804377 NR Description: MADS-box transcription factor CDM51
  misc_feature (4)..(117): NCBI GI NO: 27804377 NR Description: MADS-box transcription factor CDM51
  misc_feature (1)..(251): NCBI GI NO: 18411242 NR Description: putative YABBY3 axial regulator
  misc_feature (72)..(257): NCBI GI NO: 37535908 NR Description: hypothetical protein
  misc_feature (1)..(66): NCBI GI NO: 7486543 NR Description: hypothetical protein F6N15
  misc_feature (159)..(218): NCBI GI NO: 7486543 NR Description: hypothetical protein F6N15
  misc_feature (29)..(257): NCBI GI NO: 37551421 NR Description: FIL-like protein [Triticum aestivum]
  misc_feature (160)..(216): NCBI GI NO: 30683176 NR Description: expressed protein [Arabidopsis thaliana]
  misc_feature (23)..(76): NCBI GI NO: 30683176 NR Description: expressed protein [Arabidopsis thaliana]
MSSSSSSSAACCFPLDHLAPSPTEQLCYVHCNCCDTILAVGVPCSSLFKTVTVRCGHCANLLSVNLRGLLLPPAAPAPPNHLNFAHSLLSPTSPHGLLDELALQQAPSFLMEQASANLSSTMTGRSSNSSCASNLPPPAPMPAAQPVQQEAELPKTAPSVNRPPEKRQRVPSAYNRFIKDEIQRIKAGNPDITHREAFSAAAKNWAHFPHIHFGLMPDQGLKKTFKTQDGAEDMLLKDDLYAAAAAAAAANMGITPF

SEQ ID NO: 33774 - DNA, 1224 bp, Zea mays subsp. mays
  misc_feature (1)..(1224): Ceres Seq. ID no. 12425143
  misc_feature (1171)..(1171): n is a, c, t, g, unknown, or other
gcacgagaccattacctagaacatcctaatcgaaaaattttttggtgagtgccccctttcccttccctagaccagatcctcgccccgttttccacttttgcctccaccgccggcccaattcggataacaagctccctccgcctcgccgcgtctcctcccagccgcaggagccgccgccatccgatccggaagagggaggaggggggagggaggaggatctgtgtcccgattcgattggagctctcgtccccggcggtccaggatggtgcggggcaagacgcagatgaagcggatagagaacccggccagtcgccaggtcaccttctccaagcgccgcaacggcctgctcaagaaggcgttcgagctctccgtcctctgcgacgccgaggtcgcgctcgtcgtcttctccccgcgcggcaagctctacgaattcgccagcggaagtgcccagaaaacaattgaacgttatagaacgtacacaaaggataatgtcagcaacaagacagcacatcaggacattgagcaagtaaaagctgatgctgagggcctggcaaagaaactggaagcacttgaagcttacaaaagaaaacttttgggtgagaggttggaagaatgctcctttgaagaactgcacagtttggaagtgaaactcgaaaagagccttcattgcatcaggggaagaaagactcagctgctggaggagcaactccataagctgaaggagaaggagatgaatctgcgcaagagcaacgaagatttacgtgaaaagtgcaagaagcagccgccgccgccgccgcctatgctgatggctcctccgccgcctccagcgccggcagccatcgatcacacggggccgaaggatgtcgggatggacgtggagacggagctgtacataggattgcccggcagagattaccgctcaaacaacaaagacatgactgcacagtagctgtcaggtcaggtcaggtcaggctagccagcagtgcagagaataatcttagatctgtggtgcggagaactggagatgcaagccaagcccaagccaatcaacatgataaggatcatgagtgtcgcgtcgtgttttacaaacctgtccaccgtccgtcaaaggcacatgcgccagaacgtccgtcagagaacacttaccccctcatctccctctattagctanctgctccggcctgctcatgtcgaaaccttctgttcaagtatgttctcctcctg

SEQ ID NO: 33775 - protein, 228 aa, Zea mays subsp. mays
  peptide (1)..(228): Ceres Seq. ID no. 12425144
  misc_feature (74)..(172): Pfam Name: Pfam Description:  K-box region
  misc_feature (1)..(228): NCBI GI NO: 12002139 NR Description: MADS box protein 1 [Zea mays]
  misc_feature (1)..(220): NCBI GI NO: 5295990 NR Description: MADS box-like protein
  misc_feature (1)..(226): NCBI GI NO: 33621123 NR Description: transcription factor MADS56
  misc_feature (1)..(226): NCBI GI NO: 5051933 NR Description: MADS-box protein FDRMADS8 [Oryza sativa]
  misc_feature (1)..(226): NCBI GI NO: 37536442 NR Description: putative transcription factor
  misc_feature (1)..(221): NCBI GI NO: 6635740 NR Description: agamous-like MADS box protein OPMADS1
  misc_feature (1)..(214): NCBI GI NO: 7446552 NR Description: MADS box protein A - white mustard
  misc_feature (1)..(214): NCBI GI NO: 15225534 NR Description: MADS-box protein (AGL20); protein id: At2g45660
  misc_feature (1)..(214): NCBI GI NO: 30171309 NR Description: MADS-box protein [Cardamine flexuosa]
  misc_feature (1)..(219): NCBI GI NO: 3493647 NR Description: transcription activator [Pimpinella brachycarpa]
MVRGKTQMKRIENPASRQVTFSKRRNGLLKKAFELSVLCDAEVALVVFSPRGKLYEFASGSAQKTIERYRTYTKDNVSNKTAHQDIEQVKADAEGLAKKLEALEAYKRKLLGERLEECSFEELHSLEVKLEKSLHCIRGRKTQLLEEQLHKLKEKEMNLRKSNEDLREKCKKQPPPPPPMLMAPPPPPAPAAIDHTGPKDVGMDVETELYIGLPGRDYRSNNKDMTAQ

SEQ ID NO: 33776 - protein, 221 aa, Zea mays subsp. mays
  peptide (1)..(221): Ceres Seq. ID no. 12425145
  misc_feature (67)..(165): Pfam Name: Pfam Description:  K-box region
  misc_feature (1)..(221): NCBI GI NO: 12002139 NR Description: MADS box protein 1 [Zea mays]
  misc_feature (1)..(213): NCBI GI NO: 5295990 NR Description: MADS box-like protein
  misc_feature (1)..(219): NCBI GI NO: 33621123 NR Description: transcription factor MADS56
  misc_feature (1)..(219): NCBI GI NO: 5051933 NR Description: MADS-box protein FDRMADS8 [Oryza sativa]
  misc_feature (1)..(219): NCBI GI NO: 37536442 NR Description: putative transcription factor
  misc_feature (1)..(214): NCBI GI NO: 6635740 NR Description: agamous-like MADS box protein OPMADS1
  misc_feature (1)..(207): NCBI GI NO: 7446552 NR Description: MADS box protein A - white mustard
  misc_feature (1)..(207): NCBI GI NO: 15225534 NR Description: MADS-box protein (AGL20); protein id: At2g45660
  misc_feature (1)..(207): NCBI GI NO: 30171309 NR Description: MADS-box protein [Cardamine flexuosa]
  misc_feature (1)..(212): NCBI GI NO: 3493647 NR Description: transcription activator [Pimpinella brachycarpa]
MKRIENPASRQVTFSKRRNGLLKKAFELSVLCDAEVALVVFSPRGKLYEFASGSAQKTIERYRTYTKDNVSNKTAHQDIEQVKADAEGLAKKLEALEAYKRKLLGERLEECSFEELHSLEVKLEKSLHCIRGRKTQLLEEQLHKLKEKEMNLRKSNEDLREKCKKQPPPPPPMLMAPPPPPAPAAIDHTGPKDVGMDVETELYIGLPGRDYRSNNKDMTAQ

SEQ ID NO: 33777 - DNA, 1803 bp, Zea mays subsp. mays
  misc_feature (1)..(1803): Ceres Seq. ID no. 12342358
gcatcgccgccccccgtcccgacgaattggaatacggaaagcgaaagatgatggatctcgccgacccccagcagcagcagcggctcatcgccggcgcggcgctgctgctggcaaccgcggccttcctcaggctcctcctggagctcccgctcccggggcggcaagcgcctgccgcccaccatcccgggggcgccggtgatcggcggcctcgtcaagttcatgcgcgggcccatccccatgatccgggagcagtacgcccgcctcggcagcgtcttcaccgtccccatcatcacccgcaggatcacgttcctcgtcggccctgaggtgtccgcgcacttcttcaagggcaacgaggccgagatgagccagcaggaggtgtacaggttcaacgtgcccacgttcggcccccggggtcgtcttcgacgtcgactactccgtcaggcaggagcagttcaggttctttaccgaggcgctccgggcgaacaagctgcgcagctatgtcgaccagatggttgctgaggctgaggagtacttctcaaagtggggagaaagtggcactgttgatttgaagtatgagttggagcacctcatcatactgacagctagccggtgcttgctgggaagggaggtgcgagaaaagctgttcgacgatgtttctgctctcttccatgaccttgacaacgggatgcagccaatcagtgtactcttcccatacctcccaatccctgcacataagcgccgcgacagggcacgtgcacgtctggcagaaatctttgccaccatcatcaagtcccgcaaggcctctggacagtctgaagaagacatgctgcagtgcttcattgattccaagtacaagaatgggcgttccaccagtgagggcgaggtaaccgggctacttatcgcagcactcttcgctgggcagcacaccagctctatcacctcaacctggactggagcatacatgcttcggttcaagcagtacttcgcagaggctgtagaggagcagaaggatgtcatgaaacggcacggcgacaagattgatcatgacatcctcgcggagatggacgtcctctaccggtgcatcaaggaggccctccgtctccacccgccgctaatcatgttgcttcgtcaatcacacagcgacttcaccgtgacaacaaaggaaggcaaagtgtatgacatccccaagggccacatcgtcgcgacatcaccatccttcgccaacaggctgccccacatctacaagaaccctgactcatatgaccctgaccggttcggtcccggaagggaggaggacaaggctgcaggtgccttctcgtacatctccttcggtggtggcaggcatgggtgcctcggtgagcccttcgcctaccttcagatcaaggcgatctggacgcacctactgaggaactttgagttcgagctggtatcgccgttcccagagaacgactggaacgccatggtggttggcatcaagggcgaggtgatggttaactacaagaggcggaagcttgtcgtggacaactaagattgtggtcgccagtctctatctcttagatgcttgcttgcttctttttgattcgattgctttcacctgtctgtcagcatttgttcggtgcaagttctgctgcacacacgccagctttgtaggggtgtttctgttgtttaggattctgtaatttgcttcaccatgggggtctgccatgatgtgcaacatccgcttgttagctagcttcctagctcagcattccccttagtcaaatctgtaacctgtagcatctataagcgtgtggctttattgtc

SEQ ID NO: 33778 - protein, 339 aa, Zea mays subsp. mays
  peptide (1)..(339): Ceres Seq. ID no. 12342359
  misc_feature (1)..(339): NCBI GI NO: 27542762 NR Description: cytochrome P450-like protein [Sorghum bicolor]
  misc_feature (1)..(339): NCBI GI NO: 5921924 NR Description: Cytochrome P450 51
  misc_feature (1)..(339): NCBI GI NO: 6166036 NR Description: Cytochrome P450 51
  misc_feature (1)..(339): NCBI GI NO: 4586676 NR Description: sterol 14-demethylase
  misc_feature (1)..(335): NCBI GI NO: 15221075 NR Description: putative obtusifoliol 14-alpha demethylase
  misc_feature (1)..(335): NCBI GI NO: 18000074 NR Description: obtusifoliol-14-demethylase [Nicotiana tabacum]
  misc_feature (1)..(335): NCBI GI NO: 27461067 NR Description: obtusifoliol-14-demethylase [Nicotiana tabacum]
  misc_feature (1)..(333): NCBI GI NO: 15227817 NR Description: putative obtusifoliol 14-alpha demethylase
  misc_feature (27)..(339): NCBI GI NO: 7489685 NR Description: probable obtusifoliol 14-alpha-demethylase CYP51 -wheat
  misc_feature (1)..(334): NCBI GI NO: 40748287 NR Description: 14-alpha demethylase [Fundulus heteroclitus]
MVAEAEEYFSKWGESGTVDLKYELEHLIILTASRCLLGREVREKLFDDVSALFHDLDNGMQPISVLFPYLPIPAHKRRDRARARLAEIFATIIKSRKASGQSEEDMLQCFIDSKYKNGRSTSEGEVTGLLIAALFAGQHTSSITSTWTGAYMLRFKQYFAEAVEEQKDVMKRHGDKIDHDILAEMDVLYRCIKEALRLHPPLIMLLRQSHSDFTVTTKEGKVYDIPKGHIVATSPSFANRLPHIYKNPDSYDPDRFGPGREEDKAAGAFSYISFGGGRHGCLGEPFAYLQIKAIWTHLLRNFEFELVSPFPENDWNAMVVGIKGEVMVNYKRRKLVVDN

SEQ ID NO: 33779 - protein, 280 aa, Zea mays subsp. mays
  peptide (1)..(280): Ceres Seq. ID no. 12342360
  misc_feature (1)..(280): NCBI GI NO: 27542762 NR Description: cytochrome P450-like protein [Sorghum bicolor]
  misc_feature (1)..(280): NCBI GI NO: 5921924 NR Description: Cytochrome P450 51
  misc_feature (1)..(280): NCBI GI NO: 6166036 NR Description: Cytochrome P450 51
  misc_feature (1)..(280): NCBI GI NO: 4586676 NR Description: sterol 14-demethylase
  misc_feature (1)..(276): NCBI GI NO: 15221075 NR Description: putative obtusifoliol 14-alpha demethylase
  misc_feature (1)..(276): NCBI GI NO: 18000074 NR Description: obtusifoliol-14-demethylase [Nicotiana tabacum]
  misc_feature (1)..(276): NCBI GI NO: 27461067 NR Description: obtusifoliol-14-demethylase [Nicotiana tabacum]
  misc_feature (1)..(274): NCBI GI NO: 15227817 NR Description: putative obtusifoliol 14-alpha demethylase
  misc_feature (1)..(280): NCBI GI NO: 7489685 NR Description: probable obtusifoliol 14-alpha-demethylase CYP51 -wheat
  misc_feature (1)..(275): NCBI GI NO: 40748287 NR Description: 14-alpha demethylase [Fundulus heteroclitus]
MQPISVLFPYLPIPAHKRRDRARARLAEIFATIIKSRKASGQSEEDMLQCFIDSKYKNGRSTSEGEVTGLLIAALFAGQHTSSITSTWTGAYMLRFKQYFAEAVEEQKDVMKRHGDKIDHDILAEMDVLYRCIKEALRLHPPLIMLLRQSHSDFTVTTKEGKVYDIPKGHIVATSPSFANRLPHIYKNPDSYDPDRFGPGREEDKAAGAFSYISFGGGRHGCLGEPFAYLQIKAIWTHLLRNFEFELVSPFPENDWNAMVVGIKGEVMVNYKRRKLVVDN

SEQ ID NO: 33780 - protein, 234 aa, Zea mays subsp. mays
  peptide (1)..(234): Ceres Seq. ID no. 12342361
  misc_feature (1)..(234): NCBI GI NO: 27542762 NR Description: cytochrome P450-like protein [Sorghum bicolor]
  misc_feature (1)..(234): NCBI GI NO: 5921924 NR Description: Cytochrome P450 51
  misc_feature (1)..(234): NCBI GI NO: 6166036 NR Description: Cytochrome P450 51
  misc_feature (1)..(234): NCBI GI NO: 4586676 NR Description: sterol 14-demethylase
  misc_feature (1)..(230): NCBI GI NO: 15221075 NR Description: putative obtusifoliol 14-alpha demethylase
  misc_feature (1)..(230): NCBI GI NO: 18000074 NR Description: obtusifoliol-14-demethylase [Nicotiana tabacum]
  misc_feature (1)..(230): NCBI GI NO: 27461067 NR Description: obtusifoliol-14-demethylase [Nicotiana tabacum]
  misc_feature (1)..(228): NCBI GI NO: 15227817 NR Description: putative obtusifoliol 14-alpha demethylase
  misc_feature (1)..(234): NCBI GI NO: 7489685 NR Description: probable obtusifoliol 14-alpha-demethylase CYP51 -wheat
  misc_feature (1)..(229): NCBI GI NO: 40748287 NR Description: 14-alpha demethylase [Fundulus heteroclitus]
MLQCFIDSKYKNGRSTSEGEVTGLLIAALFAGQHTSSITSTWTGAYMLRFKQYFAEAVEEQKDVMKRHGDKIDHDILAEMDVLYRCIKEALRLHPPLIMLLRQSHSDFTVTTKEGKVYDIPKGHIVATSPSFANRLPHIYKNPDSYDPDRFGPGREEDKAAGAFSYISFGGGRHGCLGEPFAYLQIKAIWTHLLRNFEFELVSPFPENDWNAMVVGIKGEVMVNYKRRKLVVDN

SEQ ID NO: 33781 - DNA, 1968 bp, Zea mays subsp. mays
  misc_feature (1)..(1968): Ceres Seq. ID no. 12367168
gcacgagaccattacctagaacatcctaatcgaaaaagtcccgtactcccgtccaaggcagcagagaccagagagcgaaggaggccaaggccatcgctctcctagcctcggagacttgcctttgcatacacatccccccggagggcggtggccggagctgacccctgatcggacgcgcttagcgcctgagggcatggctgcaaccgtgaggagggctgcttcctccgtcctctctcgcttcctcctcacaaagccttcgccttcgcctgcttctgccgccggcaataattccgctctcctcggatcaggggctgctgctcttcacaggttcagcaccgcaccggcatccgcggccgcggccgcagaggagccgatccagcccgcggtggaggtgaagcacacccagctcctcatcaatggcaacttcgtcgacgctgcttctgggaagacgttcccgacgctggacccgcgcaccggcgaggtcatcgcgcgcgtcgccgagggcgacagcgaggacatcgaccgcgccgtggccgccgcccgcagggccttcgacgagggcccgtggccgaggatgaccgcctacgatcggtgccgcgtgctgctgcgcttcgcggacctgatcgagcggcacgcggaggaggtcgcggcgctggagacgtgggacaacggcaagacgctggcgcaggcggcgggggccgaggtgcccatggtggcgcggtgcgtccggtactacgccggctgggcggacaagatccacggcctggtggcgccggccgacggcgcgcaccacgtgcaggtgctgcacgagccggtcggcgtggccggccagatcatcccctggaacttcccgctgctcatgttcgcctggaaggtcggcccggcgctcgcctgcggcaacaccgtcgtcctcaagaccgccgagcagacgccgctctccgcgctctacgtggccaacctcctccacgaggctgggctccccgagggtgttctgaacgtggtgtccggcttcggcccgacggccggcgcagcgctctccagccacatgggtgtcgacaagcttgcgttcacgggatcgacgggcacggggcagatcgtgctcgagctggcggcgaggagcaaccttaagccggtgacgctggagctcggtggcaagtcccctttcatcgtcatggacgacgccgacgtcgaccaggccgtcgagctcgcgcaccaggcggtcttcttcaaccagggccaatgctgctgcgccgggtcgcggacgttcgtgcacgagcgcgtgtacgacgagttcgtggagaagtccaaggcccgcgccctgaagcgcgtcgtcggcgaccccttcagggacggggtcgaacaggggcctcagatcgacggcgagcaattcaacaagatcttgcggtacgtccagtccggcgtcgacagcggtgccaccctcgtcgccggcggcgacagggtaggcgacaggggcttctacatacagccgacggtgtttgccgacgccaaggacgaaatgaagatcgctcgggaggagatattcgggccggtgcaaaccattctcaagttcagcggcgtggaggaggtgatccggcgcgcgaacgcgacgccctacgggctggcggcgggggtgttcacgcggagcctggacgcggccaacaccctgtcgcgggcgctgcgggcgggcaccgtgtgggtgaactgctacgacgtgttcgacgccaccatcccgttcggcggctacaagatgagcggcgtcgggcgggagaagggcatctacgccctccgcaactacctccagacaaaggccgtcgtcacacccatcaagaaccccgcatggctgtaaatcacatcctccgtccttgcccgcacggcgctgcgccggttctcggagaacgtgacgaataaaacaaacggtttggttaaaaagacaaggacgacggaaaatgggtcatttttatctccccc

SEQ ID NO: 33782 - protein, 550 aa, Zea mays subsp. mays
  peptide (1)..(550): Ceres Seq. ID no. 12367169
  misc_feature (1)..(550): NCBI GI NO: 19850251 NR Description: mitochondrial aldehyde dehydrogenase RF2B
  misc_feature (1)..(550): NCBI GI NO: 20530129 NR Description: mitochondrial aldehyde dehydrogenase
  misc_feature (1)..(550): NCBI GI NO: 8574429 NR Description: mitochondrial aldehyde dehydrogenase ALDH2a
  misc_feature (6)..(550): NCBI GI NO: 20530131 NR Description: mitochondrial aldehyde dehydrogenase
  misc_feature (2)..(550): NCBI GI NO: 15128580 NR Description: mitochondrial aldehyde dehydrogenase ALDH2
  misc_feature (2)..(550): NCBI GI NO: 20530127 NR Description: mitochondrial aldehyde dehydrogenase
  misc_feature (6)..(550): NCBI GI NO: 7431451 NR Description: rf2 nuclear restorer protein - maize
  misc_feature (1)..(550): NCBI GI NO: 11691926 NR Description: aldehyde dehydrogenase ALDH2b
  misc_feature (1)..(550): NCBI GI NO: 8163730 NR Description: aldehyde dehydrogenase [Oryza sativa]
  misc_feature (6)..(550): NCBI GI NO: 14276718 NR Description: T-cytoplasm male sterility restorer factor 2
MAATVRRAASSVLSRFLLTKPSPSPASAAGNNSALLGSGAAALHRFSTAPASAAAAAEEPIQPAVEVKHTQLLINGNFVDAASGKTFPTLDPRTGEVIARVAEGDSEDIDRAVAAARRAFDEGPWPRMTAYDRCRVLLRFADLIERHAEEVAALETWDNGKTLAQAAGAEVPMVARCVRYYAGWADKIHGLVAPADGAHHVQVLHEPVGVAGQIIPWNFPLLMFAWKVGPALACGNTVVLKTAEQTPLSALYVANLLHEAGLPEGVLNVVSGFGPTAGAALSSHMGVDKLAFTGSTGTGQIVLELAARSNLKPVTLELGGKSPFIVMDDADVDQAVELAHQAVFFNQGQCCCAGSRTFVHERVYDEFVEKSKARALKRVVGDPFRDGVEQGPQIDGEQFNKILRYVQSGVDSGATLVAGGDRVGDRGFYIQPTVFADAKDEMKIAREEIFGPVQTILKFSGVEEVIRRANATPYGLAAGVFTRSLDAANTLSRALRAGTVWVNCYDVFDATIPFGGYKMSGVGREKGIYALRNYLQTKAVVTPIKNPAWL

SEQ ID NO: 33783 - protein, 423 aa, Zea mays subsp. mays
  peptide (1)..(423): Ceres Seq. ID no. 12367170
  misc_feature (1)..(423): NCBI GI NO: 19850251 NR Description: mitochondrial aldehyde dehydrogenase RF2B
  misc_feature (1)..(423): NCBI GI NO: 20530129 NR Description: mitochondrial aldehyde dehydrogenase
  misc_feature (1)..(423): NCBI GI NO: 8574429 NR Description: mitochondrial aldehyde dehydrogenase ALDH2a
  misc_feature (1)..(423): NCBI GI NO: 20530131 NR Description: mitochondrial aldehyde dehydrogenase
  misc_feature (1)..(423): NCBI GI NO: 15128580 NR Description: mitochondrial aldehyde dehydrogenase ALDH2
  misc_feature (1)..(423): NCBI GI NO: 20530127 NR Description: mitochondrial aldehyde dehydrogenase
  misc_feature (1)..(423): NCBI GI NO: 7431451 NR Description: rf2 nuclear restorer protein - maize
  misc_feature (1)..(423): NCBI GI NO: 11691926 NR Description: aldehyde dehydrogenase ALDH2b
  misc_feature (1)..(423): NCBI GI NO: 8163730 NR Description: aldehyde dehydrogenase [Oryza sativa]
  misc_feature (1)..(423): NCBI GI NO: 14276718 NR Description: T-cytoplasm male sterility restorer factor 2
MTAYDRCRVLLRFADLIERHAEEVAALETWDNGKTLAQAAGAEVPMVARCVRYYAGWADKIHGLVAPADGAHHVQVLHEPVGVAGQIIPWNFPLLMFAWKVGPALACGNTVVLKTAEQTPLSALYVANLLHEAGLPEGVLNVVSGFGPTAGAALSSHMGVDKLAFTGSTGTGQIVLELAARSNLKPVTLELGGKSPFIVMDDADVDQAVELAHQAVFFNQGQCCCAGSRTFVHERVYDEFVEKSKARALKRVVGDPFRDGVEQGPQIDGEQFNKILRYVQSGVDSGATLVAGGDRVGDRGFYIQPTVFADAKDEMKIAREEIFGPVQTILKFSGVEEVIRRANATPYGLAAGVFTRSLDAANTLSRALRAGTVWVNCYDVFDATIPFGGYKMSGVGREKGIYALRNYLQTKAVVTPIKNPAWL

SEQ ID NO: 33784 - protein, 378 aa, Zea mays subsp. mays
  peptide (1)..(378): Ceres Seq. ID no. 12367171
  misc_feature (1)..(378): NCBI GI NO: 19850251 NR Description: mitochondrial aldehyde dehydrogenase RF2B
  misc_feature (1)..(378): NCBI GI NO: 20530129 NR Description: mitochondrial aldehyde dehydrogenase
  misc_feature (1)..(378): NCBI GI NO: 8574429 NR Description: mitochondrial aldehyde dehydrogenase ALDH2a
  misc_feature (1)..(378): NCBI GI NO: 20530131 NR Description: mitochondrial aldehyde dehydrogenase
  misc_feature (1)..(378): NCBI GI NO: 15128580 NR Description: mitochondrial aldehyde dehydrogenase ALDH2
  misc_feature (1)..(378): NCBI GI NO: 20530127 NR Description: mitochondrial aldehyde dehydrogenase
  misc_feature (1)..(378): NCBI GI NO: 7431451 NR Description: rf2 nuclear restorer protein - maize
  misc_feature (1)..(378): NCBI GI NO: 11691926 NR Description: aldehyde dehydrogenase ALDH2b
  misc_feature (1)..(378): NCBI GI NO: 8163730 NR Description: aldehyde dehydrogenase [Oryza sativa]
  misc_feature (1)..(378): NCBI GI NO: 14276718 NR Description: T-cytoplasm male sterility restorer factor 2
MVARCVRYYAGWADKIHGLVAPADGAHHVQVLHEPVGVAGQIIPWNFPLLMFAWKVGPALACGNTVVLKTAEQTPLSALYVANLLHEAGLPEGVLNVVSGFGPTAGAALSSHMGVDKLAFTGSTGTGQIVLELAARSNLKPVTLELGGKSPFIVMDDADVDQAVELAHQAVFFNQGQCCCAGSRTFVHERVYDEFVEKSKARALKRVVGDPFRDGVEQGPQIDGEQFNKILRYVQSGVDSGATLVAGGDRVGDRGFYIQPTVFADAKDEMKIAREEIFGPVQTILKFSGVEEVIRRANATPYGLAAGVFTRSLDAANTLSRALRAGTVWVNCYDVFDATIPFGGYKMSGVGREKGIYALRNYLQTKAVVTPIKNPAWL

SEQ ID NO: 33785 - DNA, 1624 bp, Zea mays subsp. mays
  misc_feature (1)..(1624): Ceres Seq. ID no. 13493048
cattacctagaacatcctaatcgaaaacaacagaagctagaaacagccagtactgaagaaaaggacatggttttttcagaaataatgcctcaagctctcacattgatgactgatgtatttggaaattatgttgtccaaaagttttttgagcatggaagcactacccagataaaggaattggctggtcagcttattggacgtgtccttgctcttagtcttcagatgtatgggtgccgggttatacagaaggctatagaagttgttgatttggatctgcagactaaaatggttgcggagctggagggccatgtcatgcgctgtgtacgtgatcaaaatgggaaccatgttatacagaaatgcatagagtgcattcctcagcatgctatcgagttcattgtctcgacattctatggccaagttgtaatgttatccactcatccatatggttgccgagttattcagagggttctagagcattgtgatgatcctaagacacagcaaataatgatggatgagattctccagtctgtttgcttgctagctcaggatcagtatggcaactatgtggttcagcatgttctggaacatggcaaaccccatgagagatcagccattattgagaagctaattggccaagttgtgcaaatgagccagcaaaagtttgcctcaaatgtcattgagaagtgcttagcctttggaaatcctgtagaacgtcaggttctgattggtgagatgcttggatccactagcgaaagcgaacctcttgaggtaatgatgaaagaccagtttgcaaactatgtggtgcagaaggtgctagaaacttgtgacgatcagcagagggagatgatcctaacaaggataaagacacacctgaacacactcaagaagtacacatacgggaagcacatagtagcgcgtgtagagaagcttgttgctgctggagagaagcgccttgggcttcaaccagcatgcaccgccgcctgaagggcaaactctctaagttgtacagctaacagttgctaggtttgcgctcatgtttttttctctactaaaaaccttatatgaaggccccttttggcctcgccaggaaaaaaaatactgtatgtttgcggggaagagtgtacattaattctttagcagaaagaccccccctacccatgcggcggaatcaagggaggagtgatgcgtgagtccgatcgatctgaaggctgctgtaaagaggaagatggaaggaaggagtgagaagcatgtcagttactctgctgctgtacaaattaaacttagctcttagagtgaggagaaagtaagctgttagctgtctgcctaaaggaaagaaaggaaaaaaaagaagctggaggccattggcaccctgtttcatgtgttggtatagctgctgtggctctcctgttgtctgtctggcctttgttgtaacataaagctgaggcgcactagcctgccttcgttttcacagttaagctgaagttattagtatcagctttcctgaactgcttggtatgtaatgtgactgtgttttcttccttgtactaatgcttgtctcatgtaatccattcccctaatgtctgaatgttttaatctcaattttcacctctgaaacgttttttct

SEQ ID NO: 33786 - protein, 327 aa, Zea mays subsp. mays
  peptide (1)..(327): Ceres Seq. ID no. 13493049
  misc_feature (135)..(169): Pfam Name: Pfam Description:  Pumilio-family RNA binding repeat
  misc_feature (10)..(327): NCBI GI NO: 14719326 NR Description: putative pumilio/Mpt5 family RNA-binding protein
  misc_feature (10)..(327): NCBI GI NO: 20513851 NR Description: BPM [Hordeum vulgare]
  misc_feature (10)..(327): NCBI GI NO: 34906006 NR Description: P0518C01.14
  misc_feature (10)..(321): NCBI GI NO: 34908236 NR Description: putative pumilio/Mpt5 family RNA-binding protein
  misc_feature (10)..(321): NCBI GI NO: 15227052 NR Description: pumilio-family RNA-binding protein, putative
  misc_feature (10)..(321): NCBI GI NO: 15227038 NR Description: pumilio-family RNA-binding protein, putative
  misc_feature (10)..(321): NCBI GI NO: 20465637 NR Description: putative pumilio/Mpt5 family RNA-binding protein
  misc_feature (10)..(321): NCBI GI NO: 15227051 NR Description: pumilio-family RNA-binding protein, putative
  misc_feature (10)..(326): NCBI GI NO: 22330960 NR Description: pumilio-family RNA-binding protein, putative
  misc_feature (10)..(326): NCBI GI NO: 26450884 NR Description: putative RNA binding protein
HYLEHPNRKQQKLETASTEEKDMVFSEIMPQALTLMTDVFGNYVVQKFFEHGSTTQIKELAGQLIGRVLALSLQMYGCRVIQKAIEVVDLDLQTKMVAELEGHVMRCVRDQNGNHVIQKCIECIPQHAIEFIVSTFYGQVVMLSTHPYGCRVIQRVLEHCDDPKTQQIMMDEILQSVCLLAQDQYGNYVVQHVLEHGKPHERSAIIEKLIGQVVQMSQQKFASNVIEKCLAFGNPVERQVLIGEMLGSTSESEPLEVMMKDQFANYVVQKVLETCDDQQREMILTRIKTHLNTLKKYTYGKHIVARVEKLVAAGEKRLGLQPACTAA

SEQ ID NO: 33787 - protein, 305 aa, Zea mays subsp. mays
  peptide (1)..(305): Ceres Seq. ID no. 13493050
  misc_feature (113)..(147): Pfam Name: Pfam Description:  Pumilio-family RNA binding repeat
  misc_feature (1)..(305): NCBI GI NO: 14719326 NR Description: putative pumilio/Mpt5 family RNA-binding protein
  misc_feature (1)..(305): NCBI GI NO: 20513851 NR Description: BPM [Hordeum vulgare]
  misc_feature (1)..(305): NCBI GI NO: 34906006 NR Description: P0518C01.14
  misc_feature (1)..(299): NCBI GI NO: 34908236 NR Description: putative pumilio/Mpt5 family RNA-binding protein
  misc_feature (1)..(299): NCBI GI NO: 15227052 NR Description: pumilio-family RNA-binding protein, putative
  misc_feature (1)..(299): NCBI GI NO: 15227038 NR Description: pumilio-family RNA-binding protein, putative
  misc_feature (1)..(299): NCBI GI NO: 20465637 NR Description: putative pumilio/Mpt5 family RNA-binding protein
  misc_feature (1)..(299): NCBI GI NO: 15227051 NR Description: pumilio-family RNA-binding protein, putative
  misc_feature (1)..(304): NCBI GI NO: 22330960 NR Description: pumilio-family RNA-binding protein, putative
  misc_feature (1)..(304): NCBI GI NO: 26450884 NR Description: putative RNA binding protein
MVFSEIMPQALTLMTDVFGNYVVQKFFEHGSTTQIKELAGQLIGRVLALSLQMYGCRVIQKAIEVVDLDLQTKMVAELEGHVMRCVRDQNGNHVIQKCIECIPQHAIEFIVSTFYGQVVMLSTHPYGCRVIQRVLEHCDDPKTQQIMMDEILQSVCLLAQDQYGNYVVQHVLEHGKPHERSAIIEKLIGQVVQMSQQKFASNVIEKCLAFGNPVERQVLIGEMLGSTSESEPLEVMMKDQFANYVVQKVLETCDDQQREMILTRIKTHLNTLKKYTYGKHIVARVEKLVAAGEKRLGLQPACTAA

SEQ ID NO: 33788 - protein, 299 aa, Zea mays subsp. mays
  peptide (1)..(299): Ceres Seq. ID no. 13493051
  misc_feature (107)..(141): Pfam Name: Pfam Description:  Pumilio-family RNA binding repeat
  misc_feature (1)..(299): NCBI GI NO: 14719326 NR Description: putative pumilio/Mpt5 family RNA-binding protein
  misc_feature (1)..(299): NCBI GI NO: 20513851 NR Description: BPM [Hordeum vulgare]
  misc_feature (1)..(299): NCBI GI NO: 34906006 NR Description: P0518C01.14
  misc_feature (1)..(293): NCBI GI NO: 34908236 NR Description: putative pumilio/Mpt5 family RNA-binding protein
  misc_feature (1)..(293): NCBI GI NO: 15227052 NR Description: pumilio-family RNA-binding protein, putative
  misc_feature (1)..(293): NCBI GI NO: 15227038 NR Description: pumilio-family RNA-binding protein, putative
  misc_feature (1)..(293): NCBI GI NO: 20465637 NR Description: putative pumilio/Mpt5 family RNA-binding protein
  misc_feature (1)..(293): NCBI GI NO: 15227051 NR Description: pumilio-family RNA-binding protein, putative
  misc_feature (1)..(298): NCBI GI NO: 22330960 NR Description: pumilio-family RNA-binding protein, putative
  misc_feature (1)..(298): NCBI GI NO: 26450884 NR Description: putative RNA binding protein
MPQALTLMTDVFGNYVVQKFFEHGSTTQIKELAGQLIGRVLALSLQMYGCRVIQKAIEVVDLDLQTKMVAELEGHVMRCVRDQNGNHVIQKCIECIPQHAIEFIVSTFYGQVVMLSTHPYGCRVIQRVLEHCDDPKTQQIMMDEILQSVCLLAQDQYGNYVVQHVLEHGKPHERSAIIEKLIGQVVQMSQQKFASNVIEKCLAFGNPVERQVLIGEMLGSTSESEPLEVMMKDQFANYVVQKVLETCDDQQREMILTRIKTHLNTLKKYTYGKHIVARVEKLVAAGEKRLGLQPACTAA

SEQ ID NO: 33789 - DNA, 1296 bp, Zea mays subsp. mays
  misc_feature (1)..(1296): Ceres Seq. ID no. 12360769
gcacgagaccattacctagaacatcctaatcgaaaaagtcctctaatcctctctcgctcgctctctagtctcttttcttctctggtctcgcgttctccctcctctgttcgccgctttataccgcccgcccgcccaccagaacgacatacatcctcctcccccgtcccctccaatggggaacccgccggagctgtaccacaagatcctcaacatccccaaggacacctctccgcaggaactccgcgccgcgtacaagagcctcgtcaagaaatggcaccccgacaagcacccgccgtcgtccaggccggaggccgaggcgcgcttcaaggccatcagcgaggcctacgaggcgctcctggaccagcaagagaacagggccgtgttcgggccgtgcaacggcgaccgggcgggtggaggcgccggggcgcgcgtggagaggacgcgcagtgacggtttctgcgcgaggagcgcgcccggcaccccggccagggagttgaagaaggtgtacagcgccggcaaccccggcgggcgccccgccttcgccgagttctccagttccatcgtgcgcaaggcgccgccgctggagcgcaggctcgagtgcaccctcgaggagctctgccgcggatgcagcaaggaggtcacgttcacccgcgacgtcgtcaccaggaacgggtcgatcgtgaagaaggaggtgacgcagacggtgcaggtgaagccagggtggaggaaagggaagcaggtggtgctggaaggcatgggggacgagcggccggggtgcctgccgggcgacgccgtcctgacggtgtccgagaggaggcacccggcgttcaagcgggtgggcgacgacctggtgctcagggcggaggtgccgctggcgggcgcgctcaccggctggtccctctcgttccggctcctcggcggccggaaggtgacctgctcgttcgaggacgaggtcatccgccccgggcacgagagggtgatccgcggcgagggcatgccggtccccgggcggaaggacggcgcgcgcggcgacctcagggtgaagctcgaggtcgtgttccccacggagctctccgacgagcagcgcgccggcctcgccgagatcctcagagggtcctgctgatcggtcggtgtcgccgtcggtccaattaagtcctatcgtatcaagttttcttgggcgtgtgaccgtgtccgatgagtaactgagtacataaagagagatggtcgacgttcgttgtacatacgggttgtctatgtatatgtcgatatatatgaaacgtgaggcaagccttgtgc

SEQ ID NO: 33790 - protein, 316 aa, Zea mays subsp. mays
  peptide (1)..(316): Ceres Seq. ID no. 12360770
  misc_feature (189)..(312): Pfam Name: Pfam Description:  DnaJ C terminal region
  misc_feature (81)..(314): NCBI GI NO: 34907316 NR Description: putative heat shock protein
  misc_feature (1)..(167): NCBI GI NO: 34907316 NR Description: putative heat shock protein
  misc_feature (8)..(315): NCBI GI NO: 15231987 NR Description: putative heat shock protein; protein id:At3g08910
  misc_feature (8)..(315): NCBI GI NO: 21618097 NR Description: putative heat shock protein [Arabidopsis thaliana]
  misc_feature (111)..(315): NCBI GI NO: 6179940 NR Description: DnaJ-like protein [Nicotiana tabacum]
  misc_feature (8)..(82): NCBI GI NO: 6179940 NR Description: DnaJ-like protein [Nicotiana tabacum]
  misc_feature (132)..(312): NCBI GI NO: 15240968 NR Description: heat shock protein 40-like; protein id:At5g01390
  misc_feature (8)..(71): NCBI GI NO: 15240968 NR Description: heat shock protein 40-like; protein id:At5g01390
  misc_feature (80)..(315): NCBI GI NO: 11863723 NR Description: DnaJ like protein [Lycopersicon esculentum]
  misc_feature (8)..(82): NCBI GI NO: 11863723 NR Description: DnaJ like protein [Lycopersicon esculentum]
MGNPPELYHKILNIPKDTSPQELRAAYKSLVKKWHPDKHPPSSRPEAEARFKAISEAYEALLDQQENRAVFGPCNGDRAGGGAGARVERTRSDGFCARSAPGTPARELKKVYSAGNPGGRPAFAEFSSSIVRKAPPLERRLECTLEELCRGCSKEVTFTRDVVTRNGSIVKKEVTQTVQVKPGWRKGKQVVLEGMGDERPGCLPGDAVLTVSERRHPAFKRVGDDLVLRAEVPLAGALTGWSLSFRLLGGRKVTCSFEDEVIRPGHERVIRGEGMPVPGRKDGARGDLRVKLEVVFPTELSDEQRAGLAEILRGSC

SEQ ID NO: 33791 - protein, 175 aa, Zea mays subsp. mays
  peptide (1)..(175): Ceres Seq. ID no. 12360771
MQQGGHVHPRRRHQERVDREEGGDADGAGEARVEEREAGGAGRHGGRAAGVPAGRRRPDGVREEAPGVQAGGRRPGAQGGGAAGGRAHRLVPLVPAPRRPEGDLLVRGRGHPPRAREGDPRRGHAGPRAEGRRARRPQGEARGRVPHGALRRAARRPRRDPQRVLLIGRCRRRSN

SEQ ID NO: 33792 - DNA, 1101 bp, Zea mays subsp. mays
  misc_feature (1)..(1101): Ceres Seq. ID no. 12413114
attttcaatcccagaacagggcccgagcgagagcccacgaacgaagggctccttctctctcctctcgttgctgcagttgcagacttgcagtgttgcagataattttggatgccattcaagcgttctacggctccaatttctctgacttctccctgagcctttgcggccggctggagctggacggtccccgggcagcgcaggcagccggactgcgggagtcacctccatggcctcggctgctactgcaaccctccccaaggttcagttgaggccaagatgcaacagctactttcaggtgaccggtcaagtccatgcccacaccaaaacatgcgttgcctgcaagtgtccgacccatatccacgggttgcttgtttcagctggaggaaggaggacattcctgccggtgtctgcagttggatcaggtcagggctcatcggtcactgaggccgacaggaagagcgatttgtcgctggagaacgtcaagacgtccgttgtatcccgcgacgatgaaaagattaatgtacgagtgcagttgcctggaaaggcgacgcaaaaggtgtttgatgaggctctgacgttcttggcccgtgatgcgccaccggttcctggttttaggaagtccaaaggagggaaaacatcaaatatacccagcagcatcctgctgcagatgcttggcaagagccgggtcaccaaattcgttcttcaggaaatactgagcatcaccattgaagaatttgtcaagaaggaaaacctgaaggtgaaacctgagatccagacaacccagtccgaaggcgagatggagtccgcgttcgcgccgggatcagcatttgggttcaatgttgtccttcagctcgagacacctgactctgatgatccagaggagaaacctggctctgatgacgatttacaggaggaatctggttcctcagagtagaaagaaatgcatatcgcctgcatgcatctatcaaccttcttcatgtgccattccttatgaatgaatgtactgaatggaaagccgttgcaaccgttttgagttgagagttgcaactgaaacatttctgaagatatgagtggccgactcgcctctcttaacatgttggc

SEQ ID NO: 33793 - protein, 235 aa, Zea mays subsp. mays
  peptide (1)..(235): Ceres Seq. ID no. 12413115
  misc_feature (96)..(210): Pfam Name: TF Pfam Description: Bacterial trigger factor protein
  misc_feature (99)..(231): NCBI GI NO: 34907590 NR Description: B1078G07.36
  misc_feature (41)..(210): NCBI GI NO: 18402430 NR Description: Expressed protein; protein id: At2g30695
MASAATATLPKVQLRPRCNSYFQVTGQVHAHTKTCVACKCPTHIHGLLVSAGGRRTFLPVSAVGSGQGSSVTEADRKSDLSLENVKTSVVSRDDEKINVRVQLPGKATQKVFDEALTFLARDAPPVPGFRKSKGGKTSNIPSSILLQMLGKSRVTKFVLQEILSITIEEFVKKENLKVKPEIQTTQSEGEMESAFAPGSAFGFNVVLQLETPDSDDPEEKPGSDDDLQEESGSSE

SEQ ID NO: 33794 - DNA, 1426 bp, Zea mays subsp. mays
  misc_feature (1)..(1426): Ceres Seq. ID no. 12411646
gaaagggaagagaatgaatctattaactagttctcaacactccttcgtggggcgtgctcgctcctagaatcctagggtcctcttctgcgtcaccgatcggtagtaagcacagagtcaccgcaccgccgcgtctaggtcaccgccatggccggggactggcaggagctgggccaagcggcggccatcggcctcctcttcgccttcctggtcgccaagctcatctccaccgtgatcgccttcaaggaggacaacctccgcatcacgcgctcccctccgacctcccccactgccgccgccgcagccgcgcctcccgtcccctcccactacggctccaccgacggaggcagcggcagcgacagcgactgggagggcgtggagagcaccgagctcgatgaggagttcagcgccgcctccgccttcatcgcggcctccgccgcctccggcaccagcgtccccgaggaagcgcagctgcgcctctacggcctctacaagatcgccaccgaggggccctgcaccgcgccccagccgtccgcgctcaagctcaaggcccgtgccaaatggaatgcttggcataagctgggtgctatgcctacagaagaagctatgcaagggtacatcacaattgttcaggacctattccctaactgggatgcaggtgcaagtgcgaaaaggaaagatgaagatagcattgcttccgcatcagcttcaaaggggcccatgggacctgtgtttagcagtttaatgtatgaggaagacgaaggaaatgaatcagaacttggtgacatccatgtttcagcaagggaaggggcgactgatgacatagtgaagcttctggcagctggtgttgaggtcaacgtgagagataccgaaggtagaagtccgttgcactgggctgttgatcgtggccatcttagtgctgtcgaggttcttgcaaatgcaaatgcagatctgaatgctaaggacaatgaagggcaaacggcactccactatgctgctgtttgtgaaagagaagacattgcagagttgcttgtcaagcatcatgctgatcttcggatcaaggacgaggacgggaacacggcacatgacttgtgcccttcgagctggtcttttatgaaccaggcaaactgataacacgaatatacggatatgcttgaaggtgtcatctgccaagaaacatgctagctgtatcctaaagcccatacggcacatatggtgtatcttagtgtcatgtgtgacgtgtgggaaatcaggcaggttgtttgcgtacgtggtgccctctctgaaatcagatgagttgttttatcgtcctcatcgaaccagttgtcaaaggatagtattagtgttgggaagatacatgtattgctttaatcaaaagaatcatgctggacaccaatgcaagcccaaatgggaagaaaaggatgtgcgg

SEQ ID NO: 33795 - protein, 327 aa, Zea mays subsp. mays
  peptide (1)..(327): Ceres Seq. ID no. 12411647
  misc_feature (82)..(166): Pfam Name: Pfam Description:  Acyl CoA binding protein
  misc_feature (68)..(326): NCBI GI NO: 15234270 NR Description: putative acyl-CoA binding protein
  misc_feature (3)..(73): NCBI GI NO: 15234270 NR Description: putative acyl-CoA binding protein
  misc_feature (4)..(325): NCBI GI NO: 15238757 NR Description: putative protein; protein id: At5g53470
  misc_feature (4)..(325): NCBI GI NO: 21284389 NR Description: acyl-CoA binding protein [Arabidopsis thaliana]
  misc_feature (4)..(325): NCBI GI NO: 21593070 NR Description: putative acyl-CoA binding protein
  misc_feature (68)..(250): NCBI GI NO: 12039034 NR Description: acyl-CoA binding protein 2 [Arabidopsis thaliana]
  misc_feature (3)..(73): NCBI GI NO: 12039034 NR Description: acyl-CoA binding protein 2 [Arabidopsis thaliana]
  misc_feature (51)..(309): NCBI GI NO: 14150169 NR Description: hypothetical protein MGC2404 [Homo sapiens]
  misc_feature (53)..(309): NCBI GI NO: 34880749 NR Description: similar to RIKEN cDNA 2610100E10
  misc_feature (53)..(309): NCBI GI NO: 21312284 NR Description: RIKEN cDNA 2610100E10 [Mus musculus]
MAGDWQELGQAAAIGLLFAFLVAKLISTVIAFKEDNLRITRSPPTSPTAAAAAAPPVPSHYGSTDGGSGSDSDWEGVESTELDEEFSAASAFIAASAASGTSVPEEAQLRLYGLYKIATEGPCTAPQPSALKLKARAKWNAWHKLGAMPTEEAMQGYITIVQDLFPNWDAGASAKRKDEDSIASASASKGPMGPVFSSLMYEEDEGNESELGDIHVSAREGATDDIVKLLAAGVEVNVRDTEGRSPLHWAVDRGHLSAVEVLANANADLNAKDNEGQTALHYAAVCEREDIAELLVKHHADLRIKDEDGNTAHDLCPSSWSFMNQAN

SEQ ID NO: 33796 - protein, 180 aa, Zea mays subsp. mays
  peptide (1)..(180): Ceres Seq. ID no. 12411648
  misc_feature (95)..(127): Pfam Name: Pfam Description:  Ankyrin repeat
  misc_feature (1)..(179): NCBI GI NO: 15234270 NR Description: putative acyl-CoA binding protein
  misc_feature (1)..(178): NCBI GI NO: 15238757 NR Description: putative protein; protein id: At5g53470
  misc_feature (1)..(178): NCBI GI NO: 21284389 NR Description: acyl-CoA binding protein [Arabidopsis thaliana]
  misc_feature (1)..(178): NCBI GI NO: 21593070 NR Description: putative acyl-CoA binding protein
  misc_feature (1)..(103): NCBI GI NO: 12039034 NR Description: acyl-CoA binding protein 2 [Arabidopsis thaliana]
  misc_feature (1)..(162): NCBI GI NO: 14150169 NR Description: hypothetical protein MGC2404 [Homo sapiens]
  misc_feature (1)..(162): NCBI GI NO: 34880749 NR Description: similar to RIKEN cDNA 2610100E10
  misc_feature (1)..(162): NCBI GI NO: 21312284 NR Description: RIKEN cDNA 2610100E10 [Mus musculus]
  misc_feature (1)..(148): NCBI GI NO: 28571300 NR Description: CG33071-PA [Drosophila melanogaster]
  misc_feature (1)..(66): NCBI GI NO: 30686450 NR Description: expressed protein [Arabidopsis thaliana]
MPTEEAMQGYITIVQDLFPNWDAGASAKRKDEDSIASASASKGPMGPVFSSLMYEEDEGNESELGDIHVSAREGATDDIVKLLAAGVEVNVRDTEGRSPLHWAVDRGHLSAVEVLANANADLNAKDNEGQTALHYAAVCEREDIAELLVKHHADLRIKDEDGNTAHDLCPSSWSFMNQAN

SEQ ID NO: 33797 - protein, 174 aa, Zea mays subsp. mays
  peptide (1)..(174): Ceres Seq. ID no. 12411649
  misc_feature (89)..(121): Pfam Name: Pfam Description:  Ankyrin repeat
  misc_feature (1)..(173): NCBI GI NO: 15234270 NR Description: putative acyl-CoA binding protein
  misc_feature (1)..(172): NCBI GI NO: 15238757 NR Description: putative protein; protein id: At5g53470
  misc_feature (1)..(172): NCBI GI NO: 21284389 NR Description: acyl-CoA binding protein [Arabidopsis thaliana]
  misc_feature (1)..(172): NCBI GI NO: 21593070 NR Description: putative acyl-CoA binding protein
  misc_feature (1)..(97): NCBI GI NO: 12039034 NR Description: acyl-CoA binding protein 2 [Arabidopsis thaliana]
  misc_feature (1)..(156): NCBI GI NO: 14150169 NR Description: hypothetical protein MGC2404 [Homo sapiens]
  misc_feature (1)..(156): NCBI GI NO: 34880749 NR Description: similar to RIKEN cDNA 2610100E10
  misc_feature (1)..(156): NCBI GI NO: 21312284 NR Description: RIKEN cDNA 2610100E10 [Mus musculus]
  misc_feature (1)..(142): NCBI GI NO: 28571300 NR Description: CG33071-PA [Drosophila melanogaster]
  misc_feature (1)..(60): NCBI GI NO: 30686450 NR Description: expressed protein [Arabidopsis thaliana]
MQGYITIVQDLFPNWDAGASAKRKDEDSIASASASKGPMGPVFSSLMYEEDEGNESELGDIHVSAREGATDDIVKLLAAGVEVNVRDTEGRSPLHWAVDRGHLSAVEVLANANADLNAKDNEGQTALHYAAVCEREDIAELLVKHHADLRIKDEDGNTAHDLCPSSWSFMNQAN

SEQ ID NO: 33798 - DNA, 1791 bp, Zea mays subsp. mays
  misc_feature (1)..(1791): Ceres Seq. ID no. 12368040
agatatatgcaagaaaagaaaagagaagagcctctgtggatagtggtgggtgctggatcactgggcggagcagcttctcatatcggatcgatcgattaattaatatatactataaacatacaatcaattacatacatatacgccaagagaagaggaacgccggcccgtttcacttgtctccttcctccgatccctcccggcggccggccgggctcgggcgtttttccccttttgtttcccatggaggacgccaagatggggaacggcgccaccatccgcgcggtgctcgccatcctccagtggtggggattcaacgtcaccgtcatcatcatcaacaagtggatcttccaggtcccgtccctcgcgcttgctcttgtttaaatcctggtcttctttttttgtttcaattcaatttccagagatggccatgtatgtagttatatatatattcattcaaggggatttaggggtggatccgtcaggacaaccaagagatttcgtctctttttagttcttgccttcatccaatcgttcgataggtgcagattaatcgcccccatgatgttgtcgtctttttcttcagtgatttggtaggaacataaaggaatcatccttttttttttgtccgactgaaaagaaaattacttacttgaaccggtggtggttcgtagattggatttccagatttaattgtaatcatggtaagaagagcctgttcttatcctgtgacgctgactctgtgtggggttgtcagaaactggagttcaagttcccccctgacggtgtcgtgcgtccacttcatatgttcctccatcggagcctacatcgcgatcaaagtcctgagaacgaagccgctgatcgaggtggcctcggaggaccggtggaggaggatattccccatgtcgttggtgttctgcgtcaacatcgtgctggggaacgtgagcctgaggtacataccagtgtcattcatgcagacgatcaagtcgttcactccggcaacgacagtggttcttcagtggctggtttggaggaaatactttgagtggcgcatctgggcgtccttggtgcccatcgttggaggaatccttgtcacctccgtgacggagctgagcttcaacacggctggcttctgcgccgcgctggtggggtgcctggccacgtccaccaagaccatcctggcagagtcgctgctccacggctacaagttcgacagcatcaacacggtgtactacatggctccgctggccacgctgatcctgtcggtgccggccgtggcgctggagggcggcgccgtgctggggtggctgcggacgcacgagtccgtgggaccggcgctggcggtcgtcgtcacctccggggtgctggccttctgcctcaacttctccatcttctacgtcatccactccacgacggcagtcaccttcaacgtggccggcaacctcaaggtggccgtggcggtgctggcgtcctggatggtgttccggaaccccatctccgccatgaacgcactcggctgcggcgtcacgctcgtcggatgcaccttctacggctacgtcaggcaccgactctcgcagaaccaggcgcccagagcccgcttggagatgctgccgctcaccgccgtcgacaagcaaggcgacaagatataaaaagtcttttcgaataaaccatctgattctttctgatccacctagcctaaccgccgatcgagaatgcatccaccatcagagatgacaggaaattattttttgttggcagccagattttgataatgagtcagttcagttgttgctt

SEQ ID NO: 33799 - protein, 315 aa, Zea mays subsp. mays
  peptide (1)..(315): Ceres Seq. ID no. 12368041
  misc_feature (26)..(134): Pfam Name: Pfam Description:  Integral membrane protein DUF6
  misc_feature (26)..(315): NCBI GI NO: 18411611 NR Description: expressed protein; protein id: At1g77610
  misc_feature (26)..(315): NCBI GI NO: 15219121 NR Description: glucose 6 phosphate/phosphate translocator
  misc_feature (1)..(315): NCBI GI NO: 38567832 NR Description: OSJNBb0020J19.10
  misc_feature (17)..(289): NCBI GI NO: 9759107 NR Description: phosphate/phosphoenolpyruvate translocator protein-like
  misc_feature (17)..(289): NCBI GI NO: 30681126 NR Description: phosphate translocator-related
  misc_feature (17)..(289): NCBI GI NO: 27476065 NR Description: Putative phosphate/phosphoenolpyruvate translocatorprotein
  misc_feature (17)..(289): NCBI GI NO: 15237644 NR Description: phosphate/phosphoenolpyruvate translocator
  misc_feature (17)..(289): NCBI GI NO: 17064798 NR Description: phosphate/phosphoenolpyruvate translocator-like
  misc_feature (17)..(289): NCBI GI NO: 15228248 NR Description: unknown protein; protein id: At3g10290.1
  misc_feature (26)..(289): NCBI GI NO: 15221371 NR Description: hypothetical protein; protein id: At1g12500.1
MVRRACSYPVTLTLCGVVRNWSSSSPLTVSCVHFICSSIGAYIAIKVLRTKPLIEVASEDRWRRIFPMSLVFCVNIVLGNVSLRYIPVSFMQTIKSFTPATTVVLQWLVWRKYFEWRIWASLVPIVGGILVTSVTELSFNTAGFCAALVGCLATSTKTILAESLLHGYKFDSINTVYYMAPLATLILSVPAVALEGGAVLGWLRTHESVGPALAVVVTSGVLAFCLNFSIFYVIHSTTAVTFNVAGNLKVAVAVLASWMVFRNPISAMNALGCGVTLVGCTFYGYVRHRLSQNQAPRARLEMLPLTAVDKQGDKI

SEQ ID NO: 33800 - protein, 248 aa, Zea mays subsp. mays; identical to SEQ ID NO: 26627
  peptide (1)..(248): Ceres Seq. ID no. 12368042
  misc_feature (1)..(67): Pfam Name: Pfam Description:  Integral membrane protein DUF6
  misc_feature (1)..(248): NCBI GI NO: 18411611 NR Description: expressed protein; protein id: At1g77610
  misc_feature (1)..(248): NCBI GI NO: 15219121 NR Description: glucose 6 phosphate/phosphate translocator
  misc_feature (1)..(248): NCBI GI NO: 38567832 NR Description: OSJNBb0020J19.10
  misc_feature (1)..(222): NCBI GI NO: 9759107 NR Description: phosphate/phosphoenolpyruvate translocator protein-like
  misc_feature (1)..(222): NCBI GI NO: 30681126 NR Description: phosphate translocator-related
  misc_feature (1)..(222): NCBI GI NO: 27476065 NR Description: Putative phosphate/phosphoenolpyruvate translocatorprotein
  misc_feature (1)..(222): NCBI GI NO: 15237644 NR Description: phosphate/phosphoenolpyruvate translocator
  misc_feature (1)..(222): NCBI GI NO: 17064798 NR Description: phosphate/phosphoenolpyruvate translocator-like
  misc_feature (1)..(222): NCBI GI NO: 15228248 NR Description: unknown protein; protein id: At3g10290.1
  misc_feature (1)..(222): NCBI GI NO: 15221371 NR Description: hypothetical protein; protein id: At1g12500.1

SEQ ID NO: 33801 - protein, 225 aa, Zea mays subsp. mays
  peptide (1)..(225): Ceres Seq. ID no. 12368043
  misc_feature (1)..(225): NCBI GI NO: 18411611 NR Description: expressed protein; protein id: At1g77610
  misc_feature (1)..(225): NCBI GI NO: 15219121 NR Description: glucose 6 phosphate/phosphate translocator
  misc_feature (1)..(225): NCBI GI NO: 38567832 NR Description: OSJNBb0020J19.10
  misc_feature (1)..(199): NCBI GI NO: 9759107 NR Description: phosphate/phosphoenolpyruvate translocator protein-like
  misc_feature (1)..(199): NCBI GI NO: 30681126 NR Description: phosphate translocator-related
  misc_feature (1)..(199): NCBI GI NO: 27476065 NR Description: Putative phosphate/phosphoenolpyruvate translocatorprotein
  misc_feature (1)..(199): NCBI GI NO: 15237644 NR Description: phosphate/phosphoenolpyruvate translocator
  misc_feature (1)..(199): NCBI GI NO: 17064798 NR Description: phosphate/phosphoenolpyruvate translocator-like
  misc_feature (1)..(199): NCBI GI NO: 15228248 NR Description: unknown protein; protein id: At3g10290.1
  misc_feature (1)..(199): NCBI GI NO: 15221371 NR Description: hypothetical protein; protein id: At1g12500.1
MQTIKSFTPATTVVLQWLVWRKYFEWRIWASLVPIVGGILVTSVTELSFNTAGFCAALVGCLATSTKTILAESLLHGYKFDSINTVYYMAPLATLILSVPAVALEGGAVLGWLRTHESVGPALAVVVTSGVLAFCLNFSIFYVIHSTTAVTFNVAGNLKVAVAVLASWMVFRNPISAMNALGCGVTLVGCTFYGYVRHRLSQNQAPRARLEMLPLTAVDKQGDKI

SEQ ID NO: 33802 - DNA, 1352 bp, Zea mays subsp. mays
  misc_feature (1)..(1352): Ceres Seq. ID no. 12566161
aaaagaccaaaaaccctcacgaaattctgagatccatccagaaacgtcgctccatggcgattatctccgacttcaaggaggacgagaccccgcagcagccggcggcggtcggccccggcgtcgaggagaccctggtggcagcgctagagaggaccggcggtgcactcccctttctccaggcggccatcgatgtcgctcaccgcaggtctggcctgttccgcgacccttcggcggtgagcaaggttaccgcgatggcggcggccgtcagggcgcaggtggagaccgaggagagggcagccagagaggtcaagaggaaggcggaggaggccgagaggaaggctgcggccgaggcgcagaagcctgacatggaggcggcgacggcgacggcggaggagaagctggagaaggaccgtatggatgcggataaggcggaggaaggcaacgttagacaaccaaatgctggcaatggtcttgatttggagaagtactcatggactcaacagttgcctgaggttaacatcactattcctgttcctcaaggaacaaaatcaagatttgtggtcgttgatataaagaagaaccatctgaaggttgttctgaagggccagccacctatcattgatggtgagctctataagccagttaaggttgatgattgcttctggagcatagaggatggaaaaactctttccatattgcttacaaagcacaaccaaatggagtggtggaagtctgttataaagggtggccctgaagttgatacccaaaaggtggaacctgagaacagcaaactctctgatttggatcctgagactagacaaactgtggagaagatgatgtttgaccagcgccagaagcagatgggccttccgacaagtgatgaaatgcaaaagcaagaaattctcaagaagttcatgtctgagcacccggagatggacttctctagagcgaaaatgccttgaggatttgttcgggcagttatttctaccagtctgcttaggttgtctttgagtctggtatcggtgtcaaacaaatcttcatctgttttttttttgtaatgcgtcaggaatatcaggcttgttctttttcatctcaatccatatgcattggaaacgtttgggtgggtttaaatccatagtaggtcaaaagctttactaaattttccaatccaatccattccattggtcacgtggcttgaggatttgttcgggcagttatttctaccagtctgcttaggttgtctttgtgtgattgtgtctggtgttagtgtggaacagatgtctttgtgtgattgtgtctggtgttagtgtggaacagatcatctttttttagtagcgtcagaaatatcattt

SEQ ID NO: 33803 - protein, 319 aa, Zea mays subsp. mays
  peptide (1)..(319): Ceres Seq. ID no. 12566162
  misc_feature (152)..(303): Pfam Name: Pfam Description:  Nuclear movement protein
  misc_feature (18)..(317): NCBI GI NO: 30524691 NR Description: salt tolerance protein 5 [Beta vulgaris]
  misc_feature (18)..(317): NCBI GI NO: 21593329 NR Description: unknown [Arabidopsis thaliana]
  misc_feature (18)..(317): NCBI GI NO: 15238732 NR Description: putative protein; protein id: At5g53400
  misc_feature (18)..(317): NCBI GI NO: 15234308 NR Description: putative protein; protein id: At4g27890.1
  misc_feature (93)..(317): NCBI GI NO: 6754910 NR Description: nuclear distribution gene C homolog (Aspergillus)
  misc_feature (93)..(317): NCBI GI NO: 8394272 NR Description: nuclear distribution gene C homolog
  misc_feature (93)..(317): NCBI GI NO: 5729953 NR Description: nuclear distribution gene C homolog (A
  misc_feature (58)..(317): NCBI GI NO: 8101760 NR Description: putative nuclear movement protein PNUDC
  misc_feature (65)..(317): NCBI GI NO: 28279157 NR Description: Similar to nuclear distribution gene C homolog
  misc_feature (93)..(317): NCBI GI NO: 12052969 NR Description: hypothetical protein [Homo sapiens]
KTKNPHEILRSIQKRRSMAIISDFKEDETPQQPAAVGPGVEETLVAALERTGGALPFLQAAIDVAHRRSGLFRDPSAVSKVTAMAAAVRAQVETEERAAREVKRKAEEAERKAAAEAQKPDMEAATATAEEKLEKDRMDADKAEEGNVRQPNAGNGLDLEKYSWTQQLPEVNITIPVPQGTKSRFVVVDIKKNHLKVVLKGQPPIIDGELYKPVKVDDCFWSIEDGKTLSILLTKHNQMEWWKSVIKGGPEVDTQKVEPENSKLSDLDPETRQTVEKMMFDQRQKQMGLPTSDEMQKQEILKKFMSEHPEMDFSRAKMP

SEQ ID NO: 33804 - protein, 302 aa, Zea mays subsp. mays
  peptide (1)..(302): Ceres Seq. ID no. 12566163
  misc_feature (135)..(286): Pfam Name: Pfam Description:  Nuclear movement protein
  misc_feature (1)..(300): NCBI GI NO: 30524691 NR Description: salt tolerance protein 5 [Beta vulgaris]
  misc_feature (1)..(300): NCBI GI NO: 21593329 NR Description: unknown [Arabidopsis thaliana]
  misc_feature (1)..(300): NCBI GI NO: 15238732 NR Description: putative protein; protein id: At5g53400
  misc_feature (1)..(300): NCBI GI NO: 15234308 NR Description: putative protein; protein id: At4g27890.1
  misc_feature (76)..(300): NCBI GI NO: 6754910 NR Description: nuclear distribution gene C homolog (Aspergillus)
  misc_feature (76)..(300): NCBI GI NO: 8394272 NR Description: nuclear distribution gene C homolog
  misc_feature (76)..(300): NCBI GI NO: 5729953 NR Description: nuclear distribution gene C homolog (A
  misc_feature (41)..(300): NCBI GI NO: 8101760 NR Description: putative nuclear movement protein PNUDC
  misc_feature (48)..(300): NCBI GI NO: 28279157 NR Description: Similar to nuclear distribution gene C homolog
  misc_feature (76)..(300): NCBI GI NO: 12052969 NR Description: hypothetical protein [Homo sapiens]
MAIISDFKEDETPQQPAAVGPGVEETLVAALERTGGALPFLQAAIDVAHRRSGLFRDPSAVSKVTAMAAAVRAQVETEERAAREVKRKAEEAERKAAAEAQKPDMEAATATAEEKLEKDRMDADKAEEGNVRQPNAGNGLDLEKYSWTQQLPEVNITIPVPQGTKSRFVVVDIKKNHLKVVLKGQPPIIDGELYKPVKVDDCFWSIEDGKTLSILLTKHNQMEWWKSVIKGGPEVDTQKVEPENSKLSDLDPETRQTVEKMMFDQRQKQMGLPTSDEMQKQEILKKFMSEHPEMDFSRAKMP

SEQ ID NO: 33805 - protein, 236 aa, Zea mays subsp. mays
  peptide (1)..(236): Ceres Seq. ID no. 12566164
  misc_feature (69)..(220): Pfam Name: Pfam Description:  Nuclear movement protein
  misc_feature (1)..(234): NCBI GI NO: 30524691 NR Description: salt tolerance protein 5 [Beta vulgaris]
  misc_feature (1)..(234): NCBI GI NO: 21593329 NR Description: unknown [Arabidopsis thaliana]
  misc_feature (1)..(234): NCBI GI NO: 15238732 NR Description: putative protein; protein id: At5g53400
  misc_feature (1)..(234): NCBI GI NO: 15234308 NR Description: putative protein; protein id: At4g27890.1
  misc_feature (10)..(234): NCBI GI NO: 6754910 NR Description: nuclear distribution gene C homolog (Aspergillus)
  misc_feature (10)..(234): NCBI GI NO: 8394272 NR Description: nuclear distribution gene C homolog
  misc_feature (10)..(234): NCBI GI NO: 5729953 NR Description: nuclear distribution gene C homolog (A
  misc_feature (1)..(234): NCBI GI NO: 8101760 NR Description: putative nuclear movement protein PNUDC
  misc_feature (1)..(234): NCBI GI NO: 28279157 NR Description: Similar to nuclear distribution gene C homolog
  misc_feature (10)..(234): NCBI GI NO: 12052969 NR Description: hypothetical protein [Homo sapiens]
MAAAVRAQVETEERAAREVKRKAEEAERKAAAEAQKPDMEAATATAEEKLEKDRMDADKAEEGNVRQPNAGNGLDLEKYSWTQQLPEVNITIPVPQGTKSRFVVVDIKKNHLKVVLKGQPPIIDGELYKPVKVDDCFWSIEDGKTLSILLTKHNQMEWWKSVIKGGPEVDTQKVEPENSKLSDLDPETRQTVEKMMFDQRQKQMGLPTSDEMQKQEILKKFMSEHPEMDFSRAKMP

SEQ ID NO: 33806 - DNA, 1719 bp, Zea mays subsp. mays
  misc_feature (1)..(1719): Ceres Seq. ID no. 12406579
actcttcgcttctaactccgctgggccaccagctttgaccgccgcctcccttcccctccgctactgctcctccccaccccactcccccgcaggagcggcggcggcggcggcgaggtcgtaccccacatcggcgagcggcggcggcaccgccggaggcaaaggcaagatgttcgggcgcgcgccgaagaagagcgacaacaccaagtactacgagatcctcggggtgcccaagtcggcgtcccaggacgatctcaagaaggcctaccgcaaggctgctatcaagaaccaccccgacaagggcggtgaccccgagaagttcaaggagctcgcacaagcctatgaggttttgagtgatccagagaaacgtgagatttatgatcagtatggtgaagatgcccttaaggaaggaatgggcggtggaggatcccatgttgatccatttgacatcttctcatcattttttggaccctcttttggaggaggtggtggaagcagcaggggaagaaggcaaaggaggggagaagatgtagttcacccacttaaagtttctctggaagatctttacaatggcacctcaaagaagctctctctttcgcgcaatgtcatctgctccaagtgcaagggcaagggctcgaagtctggtgcctcaatgaggtgccctggttgccagggctcaggcatgaaagtcactattcgtcagctgggcccttccatgatacagcagatgcagcagccttgcaatgagtgcaaggggactggagagagcatcaatgagaaggaccgctgtccagggtgcaagggtgagaaggtcattcaagagaagaaggttcttgaggttcatgttgagaaggggatgcaacacaaccagaagatcaccttccctggtgaagctgatgaagcgcctgatactgtcactggagacattgtattcgtcctccagcagaaggatcactccaaattcaaaagaaagggtgaagatctcttctatgagcacaccttgtctctgaccgaagcactatgtgggttccaatttgttcttacacatctggacaacaggcagcttctcatcaaatcagaccctggtgaagttgttaaacctgaccaattcaaggcgattaatgatgaggggatgccaatttaccagaggcctttcatgaaggggaagctgtacatccatttcacggtggagttccctgactcgttggcaccagagcagtgcaaggctctcgagacagtacttccaccaaggccttcatccaagctgacagacatggagatagatgaatgcgaggagacgactatgcatgatgtgaacaacatcgaggaagagatgcgcaggaagcaagctcacgctgcccaggaggcgtacgaggaggacgacgagatgccgggcggagcccagagagtgcagtgcgcgcaacagtaagcagactatcatcaaggcaattgggaggggtggtgcccttaaagcatgggagtgatctctggttttgctgtcgccgagctgggaaataggaagctgaatcgacctcgcaagcggggaatgtatccttttttgctgcaacataaaaaatgctacccaggcatagctgggtaccttttaacttctgtttgtgggatttgctagagtgatggtttcgatatatagggggacttgaatgtctggaatgctacggtataacgcacatttgggtgcaatgtctgttgcattgctgtctg

SEQ ID NO: 33807 - protein, 474 aa, Zea mays subsp. mays
  peptide (1)..(474): Ceres Seq. ID no. 12406580
  misc_feature (289)..(413): Pfam Name: Pfam Description:  DnaJ C terminal region
  misc_feature (56)..(474): NCBI GI NO: 7441932 NR Description: DnaJ protein homolog ZMDJ1 - maize
  misc_feature (56)..(474): NCBI GI NO: 29367357 NR Description: DNAJ-like protein
  misc_feature (56)..(474): NCBI GI NO: 7441930 NR Description: dnaJ protein homolog - potato
  misc_feature (56)..(474): NCBI GI NO: 4008159 NR Description: DnaJ homolog [Salix gilgiana]
  misc_feature (56)..(474): NCBI GI NO: 461944 NR Description: DnaJ protein homolog (DNAJ-1)
  misc_feature (56)..(474): NCBI GI NO: 10945669 NR Description: J1P [Daucus carota]
  misc_feature (56)..(474): NCBI GI NO: 1169382 NR Description: DnaJ protein homolog 2
  misc_feature (56)..(474): NCBI GI NO: 5802244 NR Description: seed maturation protein PM37 [Glycine max]
  misc_feature (56)..(474): NCBI GI NO: 6782421 NR Description: DnaJ-like protein [Lycopersicon esculentum]
  misc_feature (56)..(474): NCBI GI NO: 421809 NR Description: dnaJ protein homolog DnaJ-1 - cucumber
LFASNSAGPPALTAASLPLRYCSSPPHSPAGAAAAAARSYPTSASGGGTAGGKGKMFGRAPKKSDNTKYYEILGVPKSASQDDLKKAYRKAAIKNHPDKGGDPEKFKELAQAYEVLSDPEKREIYDQYGEDALKEGMGGGGSHVDPFDIFSSFFGPSFGGGGGSSRGRRQRRGEDVVHPLKVSLEDLYNGTSKKLSLSRNVICSKCKGKGSKSGASMRCPGCQGSGMKVTIRQLGPSMIQQMQQPCNECKGTGESINEKDRCPGCKGEKVIQEKKVLEVHVEKGMQHNQKITFPGEADEAPDTVTGDIVFVLQQKDHSKFKRKGEDLFYEHTLSLTEALCGFQFVLTHLDNRQLLIKSDPGEVVKPDQFKAINDEGMPIYQRPFMKGKLYIHFTVEFPDSLAPEQCKALETVLPPRPSSKLTDMEIDECEETTMHDVNNIEEEMRRKQAHAAQEAYEEDDEMPGGAQRVQCAQQ

SEQ ID NO: 33808 - protein, 419 aa, Zea mays subsp. mays
  peptide (1)..(419): Ceres Seq. ID no. 12406581
  misc_feature (234)..(358): Pfam Name: Pfam Description:  DnaJ C terminal region
  misc_feature (1)..(419): NCBI GI NO: 7441932 NR Description: DnaJ protein homolog ZMDJ1 - maize
  misc_feature (1)..(419): NCBI GI NO: 29367357 NR Description: DNAJ-like protein
  misc_feature (1)..(419): NCBI GI NO: 7441930 NR Description: dnaJ protein homolog - potato
  misc_feature (1)..(419): NCBI GI NO: 4008159 NR Description: DnaJ homolog [Salix gilgiana]
  misc_feature (1)..(419): NCBI GI NO: 461944 NR Description: DnaJ protein homolog (DNAJ-1)
  misc_feature (1)..(419): NCBI GI NO: 10945669 NR Description: J1P [Daucus carota]
  misc_feature (1)..(419): NCBI GI NO: 1169382 NR Description: DnaJ protein homolog 2
  misc_feature (1)..(419): NCBI GI NO: 5802244 NR Description: seed maturation protein PM37 [Glycine max]
  misc_feature (1)..(419): NCBI GI NO: 6782421 NR Description: DnaJ-like protein [Lycopersicon esculentum]
  misc_feature (1)..(419): NCBI GI NO: 421809 NR Description: dnaJ protein homolog DnaJ-1 - cucumber
MFGRAPKKSDNTKYYEILGVPKSASQDDLKKAYRKAAIKNHPDKGGDPEKFKELAQAYEVLSDPEKREIYDQYGEDALKEGMGGGGSHVDPFDIFSSFFGPSFGGGGGSSRGRRQRRGEDVVHPLKVSLEDLYNGTSKKLSLSRNVICSKCKGKGSKSGASMRCPGCQGSGMKVTIRQLGPSMIQQMQQPCNECKGTGESINEKDRCPGCKGEKVIQEKKVLEVHVEKGMQHNQKITFPGEADEAPDTVTGDIVFVLQQKDHSKFKRKGEDLFYEHTLSLTEALCGFQFVLTHLDNRQLLIKSDPGEVVKPDQFKAINDEGMPIYQRPFMKGKLYIHFTVEFPDSLAPEQCKALETVLPPRPSSKLTDMEIDECEETTMHDVNNIEEEMRRKQAHAAQEAYEEDDEMPGGAQRVQCAQQ

SEQ ID NO: 33809 - protein, 338 aa, Zea mays subsp. mays
  peptide (1)..(338): Ceres Seq. ID no. 12406582
  misc_feature (153)..(277): Pfam Name: Pfam Description:  DnaJ C terminal region
  misc_feature (1)..(338): NCBI GI NO: 7441932 NR Description: DnaJ protein homolog ZMDJ1 - maize
  misc_feature (1)..(338): NCBI GI NO: 29367357 NR Description: DNAJ-like protein
  misc_feature (1)..(338): NCBI GI NO: 7441930 NR Description: dnaJ protein homolog - potato
  misc_feature (1)..(338): NCBI GI NO: 4008159 NR Description: DnaJ homolog [Salix gilgiana]
  misc_feature (1)..(338): NCBI GI NO: 461944 NR Description: DnaJ protein homolog (DNAJ-1)
  misc_feature (1)..(338): NCBI GI NO: 10945669 NR Description: J1P [Daucus carota]
  misc_feature (1)..(338): NCBI GI NO: 1169382 NR Description: DnaJ protein homolog 2
  misc_feature (1)..(338): NCBI GI NO: 5802244 NR Description: seed maturation protein PM37 [Glycine max]
  misc_feature (1)..(338): NCBI GI NO: 6782421 NR Description: DnaJ-like protein [Lycopersicon esculentum]
  misc_feature (1)..(338): NCBI GI NO: 421809 NR Description: dnaJ protein homolog DnaJ-1 - cucumber
MGGGGSHVDPFDIFSSFFGPSFGGGGGSSRGRRQRRGEDVVHPLKVSLEDLYNGTSKKLSLSRNVICSKCKGKGSKSGASMRCPGCQGSGMKVTIRQLGPSMIQQMQQPCNECKGTGESINEKDRCPGCKGEKVIQEKKVLEVHVEKGMQHNQKITFPGEADEAPDTVTGDIVFVLQQKDHSKFKRKGEDLFYEHTLSLTEALCGFQFVLTHLDNRQLLIKSDPGEVVKPDQFKAINDEGMPIYQRPFMKGKLYIHFTVEFPDSLAPEQCKALETVLPPRPSSKLTDMEIDECEETTMHDVNNIEEEMRRKQAHAAQEAYEEDDEMPGGAQRVQCAQQ

SEQ ID NO: 33810 - DNA, 1152 bp, Zea mays subsp. mays
  misc_feature (1)..(1152): Ceres Seq. ID no. 12341292
aacccaatcgtctctccaccacccaactcctcctgcctgtgctctcctcctttttctccactccgcttttgcttggttccatcgggccggagagggagaagctagctagctagcagcagctctgttggtgtgtgtgtgtgtgtgtgtgtggagggtagctgcagctggggctagctggaaaggtcgggagccatggggaggggccgggtggagctgaagcggatcgagaacaagatcaaccgccaggtcaccttcgccaagcgccgcaacggcctgctcaagaaggcgtacgagctctccgtgctctgcgacgccgaagtcgcgctcatcatcttctccaaccgcggcaagctctacgagttctgcagcggacagagcattaccaaaacacttgagaggtatgaaaaaaacagttatggaggaccagatactgctgtacagaacaaggagaacgagttagtccagagcagtcgtaatgagtacctcaagctgaaagcgagggtggataatttacagaggactcagaggaatttgcttggtgaagatctgggttcacttggtgtcaaagagcttgatcagcttgagaagcaaattgattcatccttaagtcacataagatccacaaggacacagcatatgcttgatcagctcactgatcttcagaggagggagcaaatgatgtgtgaagcaaataagtgccttagaagaaagctggaggagaccagcaaccaggtgcatggccaagtgtgggagcacggtgccaacttattactcggctacgagcggcactcctcgccacagcaagccccatcacatgttggcaatggattattctttcatcccctggaagctgcagcagagccaaccctgcagatcgggttcgctcccgagcatatgaataacttcatgccggcatggctaccctgaagatggatctttgaggcaaagggaataaataaagatgcgatggcagaatcatattgtactgcaagagtgacaattgtgtgttccactcacatatatgacctagttttgtgtgtctatatgtcgaaacccatatgtctgtgattttattatatgttatgtaagcacaaatgaaacatgccggactagttgcttttgcttgtctatgtatttgtatctgttctgtgt

SEQ ID NO: 33811 - protein, 244 aa, Zea mays subsp. mays
  peptide (1)..(244): Ceres Seq. ID no. 12341293
  misc_feature (75)..(176): Pfam Name: Pfam Description:  K-box region
  misc_feature (1)..(244): NCBI GI NO: 29372772 NR Description: putative MADS-domain transcription factor
  misc_feature (14)..(244): NCBI GI NO: 3851333 NR Description: putative MADS-domain transcription factor
  misc_feature (1)..(244): NCBI GI NO: 7446544 NR Description: MADS box protein - rice
  misc_feature (1)..(244): NCBI GI NO: 33333045 NR Description: MADS box protein [Triticum aestivum]
  misc_feature (12)..(244): NCBI GI NO: 2055376 NR Description: MADS box protein
  misc_feature (1)..(244): NCBI GI NO: 33304376 NR Description: MADS box protein [Oryza sativa]
  misc_feature (1)..(244): NCBI GI NO: 7446519 NR Description: MADS box protein - rice
  misc_feature (1)..(244): NCBI GI NO: 9367315 NR Description: MADS-box protein 9
  misc_feature (1)..(244): NCBI GI NO: 7446543 NR Description: MADS box protein - rice
  misc_feature (1)..(244): NCBI GI NO: 7446518 NR Description: M79 protein - rice
MGRGRVELKRIENKINRQVTFAKRRNGLLKKAYELSVLCDAEVALIIFSNRGKLYEFCSGQSITKTLERYEKNSYGGPDTAVQNKENELVQSSRNEYLKLKARVDNLQRTQRNLLGEDLGSLGVKELDQLEKQIDSSLSHIRSTRTQHMLDQLTDLQRREQMMCEANKCLRRKLEETSNQVHGQVWEHGANLLLGYERHSSPQQAPSHVGNGLFFHPLEAAAEPTLQIGFAPEHMNNFMPAWLP

SEQ ID NO: 33812 - DNA, 1240 bp, Zea mays subsp. mays
  misc_feature (1)..(1240): Ceres Seq. ID no. 12350926
aactagtgcattttaaatcccaagacgtctctcactcttcagccgctttacaactccccaccccatcccatccacacacacttcacccagcgcggcggccgccggccgccggcaatggaggccgtggcgcacagcggcgactacctttggcggttcgtggcggagacagagtggtacaacgaggttgtcctcagcgccgtggcgccaggcgactggtggcgcggcctgccgcacccggtgcagtcatggatgcgcaactgcgtcggcggttacctcctctatttcatctctggtttcctctggtgcttcgtcatctactactggaagcgccacgcctacatccccaaagatgccatccccacaaatgacgctatgaagaagcaaatagttgtagcatcgaaggctatgcctttttactgcgctcttccaactttatctgaatatatgattgagagcggatggactcagtgctacttcaatatcagcgaaattggtttttctatgtacctctgttatatggctatgtatctcatctttgtggagtttggaatttactggatgcacagggagttgcatgacataaaaccattatacaaatatctgcatgcaacccaccatatttacaacaaggagaataccttgtctccatttgctggacttgcatttcatccactggatggtattctgcaagcaataccacatgtgttcgcgctcttcctctttccaacgcacttcaggacacatattgcactcttgttcctagaggctgtgtggacaacaaacatccacgactgcattcatggcaagatatggccagtcatgggtgctggatatcacaccattcaccatacgacttaccgtcacaactatggccactacaccatctggatggactggatgtttggtacgctcaatgagccagaagatatcctcaagaaggcttgagtttctcggagctgtggtattcctatggtgctgctgctggaactgctcgatctgttcccagtgtttctaatccgttgagcctgttcagcactgtctgtttatgtaggcatcagtgtgttaattactttgctaggttcatatggctttgtgcttattctgtaatttagcgatgtttgtctcatgacgcaacggagttcaggacgaataaaactttgctagacacattctggattccagttgcttgtacaatgttggaactcaactgtcaatataggatgtaaaacggattccttcg

SEQ ID NO: 33813 - protein, 276 aa, Zea mays subsp. mays; identical to SEQ ID NO: 28558
  peptide (1)..(276): Ceres Seq. ID no. 12350927
  misc_feature (8)..(180): NCBI GI NO: 34895618 NR Description: putative sterol-C5(6)-desaturase
  misc_feature (215)..(275): NCBI GI NO: 34895618 NR Description: putative sterol-C5(6)-desaturase
  misc_feature (9)..(275): NCBI GI NO: 4426627 NR Description: sterol-C5(6)-desaturase homolog
  misc_feature (9)..(275): NCBI GI NO: 33301670 NR Description: Delta-7-sterol-C5
  misc_feature (4)..(269): NCBI GI NO: 5031219 NR Description: delta7 sterol C-5 desaturase
  misc_feature (4)..(269): NCBI GI NO: 15232935 NR Description: sterol-C5-desaturase; protein id: At3g02580
  misc_feature (4)..(269): NCBI GI NO: 21594971 NR Description: sterol-C5-desaturase [Arabidopsis thaliana]
  misc_feature (4)..(269): NCBI GI NO: 2129741 NR Description: C-5 sterol desaturase (EC 1
  misc_feature (5)..(269): NCBI GI NO: 15232937 NR Description: putative sterol-C5-desaturase
  misc_feature (50)..(269): NCBI GI NO: 25742651 NR Description: sterol-C5-desaturase

SEQ ID NO: 33814 - protein, 231 aa, Zea mays subsp. mays; identical to SEQ ID NO: 28559
  peptide (1)..(231): Ceres Seq. ID no. 12350928
  misc_feature (1)..(135): NCBI GI NO: 34895618 NR Description: putative sterol-C5(6)-desaturase
  misc_feature (170)..(230): NCBI GI NO: 34895618 NR Description: putative sterol-C5(6)-desaturase
  misc_feature (1)..(230): NCBI GI NO: 4426627 NR Description: sterol-C5(6)-desaturase homolog
  misc_feature (1)..(230): NCBI GI NO: 33301670 NR Description: Delta-7-sterol-C5
  misc_feature (1)..(224): NCBI GI NO: 5031219 NR Description: delta7 sterol C-5 desaturase
  misc_feature (1)..(224): NCBI GI NO: 15232935 NR Description: sterol-C5-desaturase; protein id: At3g02580
  misc_feature (1)..(224): NCBI GI NO: 21594971 NR Description: sterol-C5-desaturase [Arabidopsis thaliana]
  misc_feature (1)..(224): NCBI GI NO: 2129741 NR Description: C-5 sterol desaturase (EC 1
  misc_feature (1)..(224): NCBI GI NO: 15232937 NR Description: putative sterol-C5-desaturase
  misc_feature (5)..(224): NCBI GI NO: 25742651 NR Description: sterol-C5-desaturase

SEQ ID NO: 33815 - protein, 190 aa, Zea mays subsp. mays
  peptide (1)..(190): Ceres Seq. ID no. 12350929
  misc_feature (1)..(94): NCBI GI NO: 34895618 NR Description: putative sterol-C5(6)-desaturase
  misc_feature (129)..(189): NCBI GI NO: 34895618 NR Description: putative sterol-C5(6)-desaturase
  misc_feature (1)..(189): NCBI GI NO: 4426627 NR Description: sterol-C5(6)-desaturase homolog
  misc_feature (1)..(189): NCBI GI NO: 33301670 NR Description: Delta-7-sterol-C5
  misc_feature (1)..(183): NCBI GI NO: 5031219 NR Description: delta7 sterol C-5 desaturase
  misc_feature (1)..(183): NCBI GI NO: 15232935 NR Description: sterol-C5-desaturase; protein id: At3g02580
  misc_feature (1)..(183): NCBI GI NO: 21594971 NR Description: sterol-C5-desaturase [Arabidopsis thaliana]
  misc_feature (1)..(183): NCBI GI NO: 2129741 NR Description: C-5 sterol desaturase (EC 1
  misc_feature (1)..(183): NCBI GI NO: 15232937 NR Description: putative sterol-C5-desaturase
  misc_feature (1)..(183): NCBI GI NO: 25742651 NR Description: sterol-C5-desaturase
MKKQIVVASKAMPFYCALPTLSEYMIESGWTQCYFNISEIGFSMYLCYMAMYLIFVEFGIYWMHRELHDIKPLYKYLHATHHIYNKENTLSPFAGLAFHPLDGILQAIPHVFALFLFPTHFRTHIALLFLEAVWTTNIHDCIHGKIWPVMGAGYHTIHHTTYRHNYGHYTIWMDWMFGTLNEPEDILKKA

SEQ ID NO: 33816 - DNA, 1231 bp, Zea mays subsp. mays
  misc_feature (1)..(1231): Ceres Seq. ID no. 13494457
ctcacatcctctttcagttccctctctggatctcttcctgaagagaggcactactgccacaccaccacgccacccatgctcaacatgatgaccgatctgagctgcgggccgtcgtccaaggcggcgaaaggagggcagccggcagcgacgacgggctccggcggcgacaggcaggggaggggcaagatcgagatcaagcgcatcgagaacacgacgaaccggcaggtcaccttctgcaagcgccgcaacggcctgctcaagaaggcgtacgagctctcggtgctctgcgacgccgaggtcgcgctcgtcgtcttctccagccgcggccgcctctacgagtacgccaacaacagtgtgaagtccaccattgagaggtacaagaaggccaacagtgacacctccaactctggcacagttgcagaagtcaatgctcagcactaccagcaggagtcctccaagctgcgccaggcgatcgatagcttgcaaaacgcaaacaggaccatagtgggagattcaatccacaccatgggcctcagggagcttaagcagatggagggcaagctggagaaggccataaacaagattagagctagaaagaatgagctcttgtatgctgaagttgaatatatgcaaaaaagggagatggatctgcagactgacaacatgtacctgaggagcaagatcgccgagaataatgaaacggggcagccaccgatgaacatgattggattgccgtcgacgagcgagtacgatcacatggccccgtttgttgactcgagaaactttcttcaggtgaacatgcagcagcagcctcagcactactcccatctatcagctgcaaccaacgaccctccaactcggatgatgaaattaagaatcttcggccaacaatccatgcacgcaagcacgcagtaaatcatgtgtccaattcagataaaaaaatctactctagcgtttgtataattattaataatcgtgactagtaaactgttatatatatagccatgtgtgtgtggcgcctacatatatgtcatgtggctgtacggcgagtttttctttttcacaagcgtttgcagcagcatttggtgttgctcatcgatcaattaatcgcaagaaattaaacttgtcaccactgtgtgtgcattatttgtacgtgttaatgcagttgttgtatctgttaattgtaccctccatcagataaacgcgggtgcgcgtatgcatatttatgtgt

SEQ ID NO: 33817 - protein, 304 aa, Zea mays subsp. mays
  peptide (1)..(304): Ceres Seq. ID no. 13494458
  misc_feature (131)..(230): Pfam Name: Pfam Description:  K-box region
  misc_feature (1)..(304): NCBI GI NO: 29372756 NR Description: m23 [Zea mays]
  misc_feature (25)..(276): NCBI GI NO: 29372746 NR Description: putative MADS-domain transcription factor
  misc_feature (26)..(276): NCBI GI NO: 7446524 NR Description: hypothetical protein - maize
  misc_feature (59)..(276): NCBI GI NO: 2130078 NR Description: MADS-box protein 3 - rice
  misc_feature (59)..(276): NCBI GI NO: 34903684 NR Description: putative MADS-box protein
  misc_feature (71)..(276): NCBI GI NO: 1006768 NR Description: ZMM2 [Zea mays]
  misc_feature (59)..(275): NCBI GI NO: 19698536 NR Description: AGAMOUS-like protein 1 HvAG1
  misc_feature (40)..(275): NCBI GI NO: 24636577 NR Description: MADS box transcription factor [Triticum aestivum]
  misc_feature (59)..(275): NCBI GI NO: 19698538 NR Description: AGAMOUS-like protein 2 HvAG2
  misc_feature (56)..(276): NCBI GI NO: 18650789 NR Description: MADS-box transcription factor
LTSSFSSLSGSLPEERHYCHTTTPPMLNMMTDLSCGPSSKAAKGGQPAATTGSGGDRQGRGKIEIKRIENTTNRQVTFCKRRNGLLKKAYELSVLCDAEVALVVFSSRGRLYEYANNSVKSTIERYKKANSDTSNSGTVAEVNAQHYQQESSKLRQAIDSLQNANRTIVGDSIHTMGLRELKQMEGKLEKAINKIRARKNELLYAEVEYMQKREMDLQTDNMYLRSKIAENNETGQPPMNMIGLPSTSEYDHMAPFVDSRNFLQVNMQQQPQHYSHLSAATNDPPTRMMKLRIFGQQSMHASTQ

SEQ ID NO: 33818 - protein, 279 aa, Zea mays subsp. mays
  peptide (1)..(279): Ceres Seq. ID no. 13494459
  misc_feature (106)..(205): Pfam Name: Pfam Description:  K-box region
  misc_feature (1)..(279): NCBI GI NO: 29372756 NR Description: m23 [Zea mays]
  misc_feature (1)..(251): NCBI GI NO: 29372746 NR Description: putative MADS-domain transcription factor
  misc_feature (1)..(251): NCBI GI NO: 7446524 NR Description: hypothetical protein - maize
  misc_feature (34)..(251): NCBI GI NO: 2130078 NR Description: MADS-box protein 3 - rice
  misc_feature (34)..(251): NCBI GI NO: 34903684 NR Description: putative MADS-box protein
  misc_feature (46)..(251): NCBI GI NO: 1006768 NR Description: ZMM2 [Zea mays]
  misc_feature (34)..(250): NCBI GI NO: 19698536 NR Description: AGAMOUS-like protein 1 HvAG1
  misc_feature (15)..(250): NCBI GI NO: 24636577 NR Description: MADS box transcription factor [Triticum aestivum]
  misc_feature (34)..(250): NCBI GI NO: 19698538 NR Description: AGAMOUS-like protein 2 HvAG2
  misc_feature (31)..(251): NCBI GI NO: 18650789 NR Description: MADS-box transcription factor
MLNMMTDLSCGPSSKAAKGGQPAATTGSGGDRQGRGKIEIKRIENTTNRQVTFCKRRNGLLKKAYELSVLCDAEVALVVFSSRGRLYEYANNSVKSTIERYKKANSDTSNSGTVAEVNAQHYQQESSKLRQAIDSLQNANRTIVGDSIHTMGLRELKQMEGKLEKAINKIRARKNELLYAEVEYMQKREMDLQTDNMYLRSKIAENNETGQPPMNMIGLPSTSEYDHMAPFVDSRNFLQVNMQQQPQHYSHLSAATNDPPTRMMKLRIFGQQSMHASTQ

SEQ ID NO: 33819 - protein, 276 aa, Zea mays subsp. mays
  peptide (1)..(276): Ceres Seq. ID no. 13494460
  misc_feature (103)..(202): Pfam Name: Pfam Description:  K-box region
  misc_feature (1)..(276): NCBI GI NO: 29372756 NR Description: m23 [Zea mays]
  misc_feature (1)..(248): NCBI GI NO: 29372746 NR Description: putative MADS-domain transcription factor
  misc_feature (1)..(248): NCBI GI NO: 7446524 NR Description: hypothetical protein - maize
  misc_feature (31)..(248): NCBI GI NO: 2130078 NR Description: MADS-box protein 3 - rice
  misc_feature (31)..(248): NCBI GI NO: 34903684 NR Description: putative MADS-box protein
  misc_feature (43)..(248): NCBI GI NO: 1006768 NR Description: ZMM2 [Zea mays]
  misc_feature (31)..(247): NCBI GI NO: 19698536 NR Description: AGAMOUS-like protein 1 HvAG1
  misc_feature (12)..(247): NCBI GI NO: 24636577 NR Description: MADS box transcription factor [Triticum aestivum]
  misc_feature (31)..(247): NCBI GI NO: 19698538 NR Description: AGAMOUS-like protein 2 HvAG2
  misc_feature (28)..(248): NCBI GI NO: 18650789 NR Description: MADS-box transcription factor
MMTDLSCGPSSKAAKGGQPAATTGSGGDRQGRGKIEIKRIENTTNRQVTFCKRRNGLLKKAYELSVLCDAEVALVVFSSRGRLYEYANNSVKSTIERYKKANSDTSNSGTVAEVNAQHYQQESSKLRQAIDSLQNANRTIVGDSIHTMGLRELKQMEGKLEKAINKIRARKNELLYAEVEYMQKREMDLQTDNMYLRSKIAENNETGQPPMNMIGLPSTSEYDHMAPFVDSRNFLQVNMQQQPQHYSHLSAATNDPPTRMMKLRIFGQQSMHASTQ

SEQ ID NO: 33820 - DNA, 1316 bp, Zea mays subsp. mays; identical to SEQ ID NO: 25803
  misc_feature (1)..(1316): Ceres Seq. ID no. 12358113

SEQ ID NO: 33821 - protein, 371 aa, Zea mays subsp. mays; identical to SEQ ID NO: 25804
  peptide (1)..(371): Ceres Seq. ID no. 12358114
  misc_feature (70)..(317): Pfam Name: Pfam Description:  Peroxidase
  misc_feature (35)..(354): NCBI GI NO: 19698448 NR Description: gaiacol peroxidase [Gossypium hirsutum]
  misc_feature (34)..(354): NCBI GI NO: 15227200 NR Description: putative peroxidase; protein id: At2g22420
  misc_feature (34)..(352): NCBI GI NO: 15234394 NR Description: peroxidase, putative; protein id: At4g36430
  misc_feature (57)..(353): NCBI GI NO: 15224116 NR Description: peroxidase, putative; protein id: At2g18150
  misc_feature (57)..(353): NCBI GI NO: 21537275 NR Description: putative peroxidase [Arabidopsis thaliana]
  misc_feature (36)..(352): NCBI GI NO: 1403134 NR Description: peroxidase [Arabidopsis thaliana]
  misc_feature (36)..(352): NCBI GI NO: 21593604 NR Description: peroxidase ATP N [Arabidopsis thaliana]
  misc_feature (36)..(352): NCBI GI NO: 18420061 NR Description: peroxidase, putative; protein id: At5g19890
  misc_feature (52)..(353): NCBI GI NO: 15224114 NR Description: peroxidase, putative; protein id: At2g18140.1
  misc_feature (53)..(352): NCBI GI NO: 7245406 NR Description: Chain A, Arabidopsis Thaliana Peroxidase N

SEQ ID NO: 33822 - protein, 347 aa, Zea mays subsp. mays; identical to SEQ ID NO: 25805
  peptide (1)..(347): Ceres Seq. ID no. 12358115
  misc_feature (46)..(293): Pfam Name: Pfam Description:  Peroxidase
  misc_feature (11)..(330): NCBI GI NO: 19698448 NR Description: gaiacol peroxidase [Gossypium hirsutum]
  misc_feature (10)..(330): NCBI GI NO: 15227200 NR Description: putative peroxidase; protein id: At2g22420
  misc_feature (10)..(328): NCBI GI NO: 15234394 NR Description: peroxidase, putative; protein id: At4g36430
  misc_feature (33)..(329): NCBI GI NO: 15224116 NR Description: peroxidase, putative; protein id: At2g18150
  misc_feature (33)..(329): NCBI GI NO: 21537275 NR Description: putative peroxidase [Arabidopsis thaliana]
  misc_feature (12)..(328): NCBI GI NO: 1403134 NR Description: peroxidase [Arabidopsis thaliana]
  misc_feature (12)..(328): NCBI GI NO: 21593604 NR Description: peroxidase ATP N [Arabidopsis thaliana]
  misc_feature (12)..(328): NCBI GI NO: 18420061 NR Description: peroxidase, putative; protein id: At5g19890
  misc_feature (28)..(329): NCBI GI NO: 15224114 NR Description: peroxidase, putative; protein id: At2g18140.1
  misc_feature (29)..(328): NCBI GI NO: 7245406 NR Description: Chain A, Arabidopsis Thaliana Peroxidase N

SEQ ID NO: 33823 - protein, 298 aa, Zea mays subsp. mays; identical to SEQ ID NO: 25806
  peptide (1)..(298): Ceres Seq. ID no. 12358116
  misc_feature (1)..(244): Pfam Name: Pfam Description:  Peroxidase
  misc_feature (1)..(281): NCBI GI NO: 19698448 NR Description: gaiacol peroxidase [Gossypium hirsutum]
  misc_feature (1)..(281): NCBI GI NO: 15227200 NR Description: putative peroxidase; protein id: At2g22420
  misc_feature (1)..(279): NCBI GI NO: 15234394 NR Description: peroxidase, putative; protein id: At4g36430
  misc_feature (1)..(280): NCBI GI NO: 15224116 NR Description: peroxidase, putative; protein id: At2g18150
  misc_feature (1)..(280): NCBI GI NO: 21537275 NR Description: putative peroxidase [Arabidopsis thaliana]
  misc_feature (1)..(279): NCBI GI NO: 1403134 NR Description: peroxidase [Arabidopsis thaliana]
  misc_feature (1)..(279): NCBI GI NO: 21593604 NR Description: peroxidase ATP N [Arabidopsis thaliana]
  misc_feature (1)..(279): NCBI GI NO: 18420061 NR Description: peroxidase, putative; protein id: At5g19890
  misc_feature (1)..(280): NCBI GI NO: 15224114 NR Description: peroxidase, putative; protein id: At2g18140.1
  misc_feature (1)..(279): NCBI GI NO: 7245406 NR Description: Chain A, Arabidopsis Thaliana Peroxidase N

SEQ ID NO: 33824 - DNA, 1655 bp, Zea mays subsp. mays
  misc_feature (1)..(1655): Ceres Seq. ID no. 12343676
aaataaaactgaaatagcgaggaagggacgggttcggcctctctgcccgaattcccgattgcgcctcctccgactccgagattccgtcagccatggacgggctcctgtcgaagctccgcagcctggacgcgtaccccaaggtgaacgaggacttctacagccgcaccctctccggcggcatcatcacgctcgtctcctctgctgtcatgctcctcctcttcgtctccgagctccgattatatctccatgcagttactgagacaacactaagggttgatacttcaaggggagaaacacttcgcataaattttgatgtcacctttccagcccttcaatgttctataattagcctggatgcaatggacatcagtggacaggagcacctagatgtgaaacatgatgtattcaagcagcgaattgatgcccatggcaatgttattgcgactaggcaagatgtagttggtgggatgaagatggaggcacctctacaacatcatggtggaaggcttgaacacaatgaaacctattgtggctcttgttatggtgcacaagaatctgatgatcaatgttgtaacacatgtgaagatgttcgtgaagcctataggaaaaaaggttggggtgtatcgaatccagatttgcttgaccagtgcaaaagggagggctttcttcaaagtataaaggacgaagaaggcgaaggatgcaatatttatggttttattgaagttaataaggttgctgggaatttccattttgctccagggaaaagtttccagcagtcaaatgtgcacgttcatgacttgctcccgttccagaaggacagcttcaatgtcagtcataagataaacagactaagttttggagaatactttccaggtgttgttaatccacttgatggggcaaattgggtgcagcattcatcatatggaatgtatcaatacttcatcaaggttgttcctacagtctacacggacataaatgaacacattattctctctaatcagttctctgtaacggaacattttagaagtggtgagagtggtcggatgcaggctcttcctggtgtgttcttcttttatgacctttctccaatcaaggtcacattcacggaacaacatgtgtcatttttacactttttaactaatgtttgcgctattgttggaggtgtgttcaccgtttctggaatcatagattcgtttgtataccatagtcaaagagcaatcaagaagaagatggaaatcggcaaattcaactgatgttgccttactattgctgcaattaagtagctcctgttgcagctccaagatccagaaatgcaatgtggcttttcctcgaactcttggcacagttgcgtagttgacaaacaattgctcatcagataactcttgatgtgcttgccaacttgcttccggcaaagataccagcgagcaagatggtcatcttgtatacttcgatgttacatttttgtacgcttagtctgacaagaaaacattttacttcctccagctgcaggtgttcgtgtactgttgtaaatttgtggtagagggagcctatctgtagttttttttacaattatgtgtttgtaccagtttttctgagacatttgtagcttagacaggtaaaggttgtttgaaatacatataaaccatttttgaagc

SEQ ID NO: 33825 - protein, 386 aa, Zea mays subsp. mays
  peptide (1)..(386): Ceres Seq. ID no. 12343677
  misc_feature (1)..(386): NCBI GI NO: 38347102 NR Description: OSJNBa0006M15.17
  misc_feature (1)..(386): NCBI GI NO: 30693281 NR Description: expressed protein [Arabidopsis thaliana]
  misc_feature (1)..(386): NCBI GI NO: 18395087 NR Description: expressed protein; protein id: At1g22200
  misc_feature (149)..(386): NCBI GI NO: 6598578 NR Description: F5J5.4 [Arabidopsis thaliana]
  misc_feature (1)..(153): NCBI GI NO: 6598578 NR Description: F5J5.4 [Arabidopsis thaliana]
  misc_feature (1)..(384): NCBI GI NO: 28278376 NR Description: Similar to serologically defined breast cancerantigen 84
  misc_feature (5)..(384): NCBI GI NO: 7706278 NR Description: serologically defined breast cancer antigen 84
  misc_feature (1)..(384): NCBI GI NO: 34860248 NR Description: similar to serologically defined breast cancerantigen 84
  misc_feature (5)..(384): NCBI GI NO: 13384938 NR Description: serologically defined breast cancer antigen 84
  misc_feature (5)..(384): NCBI GI NO: 22760064 NR Description: unnamed protein product [Homo sapiens]
MDGLLSKLRSLDAYPKVNEDFYSRTLSGGIITLVSSAVMLLLFVSELRLYLHAVTETTLRVDTSRGETLRINFDVTFPALQCSIISLDAMDISGQEHLDVKHDVFKQRIDAHGNVIATRQDVVGGMKMEAPLQHHGGRLEHNETYCGSCYGAQESDDQCCNTCEDVREAYRKKGWGVSNPDLLDQCKREGFLQSIKDEEGEGCNIYGFIEVNKVAGNFHFAPGKSFQQSNVHVHDLLPFQKDSFNVSHKINRLSFGEYFPGVVNPLDGANWVQHSSYGMYQYFIKVVPTVYTDINEHIILSNQFSVTEHFRSGESGRMQALPGVFFFYDLSPIKVTFTEQHVSFLHFLTNVCAIVGGVFTVSGIIDSFVYHSQRAIKKKMEIGKFN

SEQ ID NO: 33826 - protein, 348 aa, Zea mays subsp. mays
  peptide (1)..(348): Ceres Seq. ID no. 12343678
  misc_feature (1)..(348): NCBI GI NO: 38347102 NR Description: OSJNBa0006M15.17
  misc_feature (1)..(348): NCBI GI NO: 30693281 NR Description: expressed protein [Arabidopsis thaliana]
  misc_feature (1)..(348): NCBI GI NO: 18395087 NR Description: expressed protein; protein id: At1g22200
  misc_feature (111)..(348): NCBI GI NO: 6598578 NR Description: F5J5.4 [Arabidopsis thaliana]
  misc_feature (1)..(115): NCBI GI NO: 6598578 NR Description: F5J5.4 [Arabidopsis thaliana]
  misc_feature (1)..(346): NCBI GI NO: 28278376 NR Description: Similar to serologically defined breast cancerantigen 84
  misc_feature (1)..(346): NCBI GI NO: 7706278 NR Description: serologically defined breast cancer antigen 84
  misc_feature (1)..(346): NCBI GI NO: 34860248 NR Description: similar to serologically defined breast cancerantigen 84
  misc_feature (1)..(346): NCBI GI NO: 13384938 NR Description: serologically defined breast cancer antigen 84
  misc_feature (1)..(346): NCBI GI NO: 22760064 NR Description: unnamed protein product [Homo sapiens]
MLLLFVSELRLYLHAVTETTLRVDTSRGETLRINFDVTFPALQCSIISLDAMDISGQEHLDVKHDVFKQRIDAHGNVIATRQDVVGGMKMEAPLQHHGGRLEHNETYCGSCYGAQESDDQCCNTCEDVREAYRKKGWGVSNPDLLDQCKREGFLQSIKDEEGEGCNIYGFIEVNKVAGNFHFAPGKSFQQSNVHVHDLLPFQKDSFNVSHKINRLSFGEYFPGVVNPLDGANWVQHSSYGMYQYFIKVVPTVYTDINEHIILSNQFSVTEHFRSGESGRMQALPGVFFFYDLSPIKVTFTEQHVSFLHFLTNVCAIVGGVFTVSGIIDSFVYHSQRAIKKKMEIGKFN

SEQ ID NO: 33827 - protein, 297 aa, Zea mays subsp. mays
  peptide (1)..(297): Ceres Seq. ID no. 12343679
  misc_feature (1)..(297): NCBI GI NO: 38347102 NR Description: OSJNBa0006M15.17
  misc_feature (1)..(297): NCBI GI NO: 30693281 NR Description: expressed protein [Arabidopsis thaliana]
  misc_feature (1)..(297): NCBI GI NO: 18395087 NR Description: expressed protein; protein id: At1g22200
  misc_feature (60)..(297): NCBI GI NO: 6598578 NR Description: F5J5.4 [Arabidopsis thaliana]
  misc_feature (1)..(64): NCBI GI NO: 6598578 NR Description: F5J5.4 [Arabidopsis thaliana]
  misc_feature (1)..(295): NCBI GI NO: 28278376 NR Description: Similar to serologically defined breast cancerantigen 84
  misc_feature (1)..(295): NCBI GI NO: 7706278 NR Description: serologically defined breast cancer antigen 84
  misc_feature (1)..(295): NCBI GI NO: 34860248 NR Description: similar to serologically defined breast cancerantigen 84
  misc_feature (1)..(295): NCBI GI NO: 13384938 NR Description: serologically defined breast cancer antigen 84
  misc_feature (1)..(295): NCBI GI NO: 22760064 NR Description: unnamed protein product [Homo sapiens]
MDISGQEHLDVKHDVFKQRIDAHGNVIATRQDVVGGMKMEAPLQHHGGRLEHNETYCGSCYGAQESDDQCCNTCEDVREAYRKKGWGVSNPDLLDQCKREGFLQSIKDEEGEGCNIYGFIEVNKVAGNFHFAPGKSFQQSNVHVHDLLPFQKDSFNVSHKINRLSFGEYFPGVVNPLDGANWVQHSSYGMYQYFIKVVPTVYTDINEHIILSNQFSVTEHFRSGESGRMQALPGVFFFYDLSPIKVTFTEQHVSFLHFLTNVCAIVGGVFTVSGIIDSFVYHSQRAIKKKMEIGKFN

SEQ ID NO: 33828 - DNA, 1639 bp, Zea mays subsp. mays
  misc_feature (1)..(1639): Ceres Seq. ID no. 12367070
  misc_feature (457)..(457): n is a, c, t, g, unknown, or other
gcacgagaccattacctagaacatcctaatcgaaaaaaagccactcgctgactcatctccatccacaacatcacatactcgctccaacagtcccacccacgctacctagacagtagacacgtgtaccatggtgttcttcaaggcgcgtcgcatggatcctgagttggtgttgccggcgcggccgacgccggccgagacgaaagcgctctccgacctcgacgaccagcggacgctgaggtactacgagacggtgatcgccttcttccgcagccggcgtggctacagcagccacagacgacggccagacgatccagccaaggccatcaaggcggccctcgcggaggcgctcgtgtactactaccccatcgccgggcggctcagggaggccgccggtgggaagctggtggtggattgcaccgcgcagggggtggtgtttgtggaggccgatgcggatgtncggctggaggagctgggcaggcctctgttgccgccgtacccgtgtgtggaggaactgctgtgcgatgcgggtgaaacaagagcggtgattggcaagccattagtcctcatgcaggtgacgaggctcaaatgtggcggatttgtcattggattccacatgtgccatagcattgcagatggattcggcatggttcaattcttcagatgtgtcgccgaactagctcgcggtgaaaaagtgcccacacttttgcccgtgtggagaagagagctcctaacacgacacaggtcaaatactactgcatataatcacacagccacggttaggtccgagtccgactccgacgactacaaatctgacgacgtcatgctgtcaactccaatggacgacatggtagtccagtacttcctcttcgggccaagggagatcgcaaccctacgaagccacctgaggggagacgaccagctgctgctcgccacctccgctacatccttcgagctgctagcggccgtcatgtggcggtgccgcaccttggcgctgggctacgagtcccatcggcgcgttcgcctcatggttaccatgaacgcgcgcgggaagtggaaccagcacacgcccatcccgcggggttactacggcaacgcgcacgtgtcccccatggcggaggccaccgccggcgagctctgcagccagccgctcgcccgcacggtcgatctcgtgcgcaggaccaagctcagcgtcaccaaggaacgcatggagtcgatggtggacacgatcgcttcgacgcgccagtggccgcctccgacgatggacaggatctacgaggtttctgacaccaagtggattgccaccaatgcgacgcagtttgggtgggccgagctggtgggtggtgggataccactggctggcgaccttgcctccaagctgggaagcgaccacatgagctgcaggaaccaggatggcgaccactcgaccatcgtgtcgatgcttctgcccaagccggcgatggacaagtttagcagtgagctgtctgtttggttgaacaacaagcatgatcacaagaacttggttatactcagttctctctagtctaccaacagatttaaacaatattaatgtacctacaatttgttgtacgaaagagaaatgattggctcaatgagaatgaaataatttcggtgttcttct

SEQ ID NO: 33829 - protein, 470 aa, Zea mays subsp. mays
  peptide (1)..(470): Ceres Seq. ID no. 12367071
  misc_feature (1)..(453): Pfam Name: Pfam Description:  Transferase family
  misc_feature (1)..(470): NCBI GI NO: 37532050 NR Description: putative acetyl transferase
  misc_feature (4)..(457): NCBI GI NO: 29027875 NR Description: putative acetyl transferase
  misc_feature (30)..(456): NCBI GI NO: 37530404 NR Description: putative hsr201 hypersensitivity-related protein
  misc_feature (6)..(463): NCBI GI NO: 37530414 NR Description: putative hsr201 hypersensitivity-related protein
  misc_feature (149)..(452): NCBI GI NO: 37530408 NR Description: putative hsr201 hypersensitivity-related protein
  misc_feature (1)..(152): NCBI GI NO: 37530408 NR Description: putative hsr201 hypersensitivity-related protein
  misc_feature (4)..(451): NCBI GI NO: 7489142 NR Description: hsr201 protein
  misc_feature (4)..(467): NCBI GI NO: 22854880 NR Description: benzoyl coenzyme A: benzyl alcohol benzoyltransferase
  misc_feature (1)..(451): NCBI GI NO: 37535814 NR Description: putative hypersensitivity-related (hsr)protein
  misc_feature (1)..(457): NCBI GI NO: 34898614 NR Description: putative hypersensitivity-related (hsr) protein
  misc_feature (110)..(110): Xaa is any aa, unknown or other
MVFFKARRMDPELVLPARPTPAETKALSDLDDQRTLRYYETVIAFFRSRRGYSSHRRRPDDPAKAIKAALAEALVYYYPIAGRLREAAGGKLVVDCTAQGVVFVEADADXRLEELGRPLLPPYPCVEELLCDAGETRAVIGKPLVLMQVTRLKCGGFVIGFHMCHSIADGFGMVQFFRCVAELARGEKVPTLLPVWRRELLTRHRSNTTAYNHTATVRSESDSDDYKSDDVMLSTPMDDMVVQYFLFGPREIATLRSHLRGDDQLLLATSATSFELLAAVMWRCRTLALGYESHRRVRLMVTMNARGKWNQHTPIPRGYYGNAHVSPMAEATAGELCSQPLARTVDLVRRTKLSVTKERMESMVDTIASTRQWPPPTMDRIYEVSDTKWIATNATQFGWAELVGGGIPLAGDLASKLGSDHMSCRNQDGDHSTIVSMLLPKPAMDKFSSELSVWLNNKHDHKNLVILSSL

SEQ ID NO: 33830 - protein, 462 aa, Zea mays subsp. mays
  peptide (1)..(462): Ceres Seq. ID no. 12367072
  misc_feature (1)..(445): Pfam Name: Pfam Description:  Transferase family
  misc_feature (1)..(462): NCBI GI NO: 37532050 NR Description: putative acetyl transferase
  misc_feature (1)..(449): NCBI GI NO: 29027875 NR Description: putative acetyl transferase
  misc_feature (22)..(448): NCBI GI NO: 37530404 NR Description: putative hsr201 hypersensitivity-related protein
  misc_feature (1)..(455): NCBI GI NO: 37530414 NR Description: putative hsr201 hypersensitivity-related protein
  misc_feature (141)..(444): NCBI GI NO: 37530408 NR Description: putative hsr201 hypersensitivity-related protein
  misc_feature (1)..(144): NCBI GI NO: 37530408 NR Description: putative hsr201 hypersensitivity-related protein
  misc_feature (1)..(443): NCBI GI NO: 7489142 NR Description: hsr201 protein
  misc_feature (1)..(459): NCBI GI NO: 22854880 NR Description: benzoyl coenzyme A: benzyl alcohol benzoyltransferase
  misc_feature (1)..(443): NCBI GI NO: 37535814 NR Description: putative hypersensitivity-related (hsr)protein
  misc_feature (1)..(449): NCBI GI NO: 34898614 NR Description: putative hypersensitivity-related (hsr) protein
  misc_feature (102)..(102): Xaa is any aa, unknown or other
MDPELVLPARPTPAETKALSDLDDQRTLRYYETVIAFFRSRRGYSSHRRRPDDPAKAIKAALAEALVYYYPIAGRLREAAGGKLVVDCTAQGVVFVEADADXRLEELGRPLLPPYPCVEELLCDAGETRAVIGKPLVLMQVTRLKCGGFVIGFHMCHSIADGFGMVQFFRCVAELARGEKVPTLLPVWRRELLTRHRSNTTAYNHTATVRSESDSDDYKSDDVMLSTPMDDMVVQYFLFGPREIATLRSHLRGDDQLLLATSATSFELLAAVMWRCRTLALGYESHRRVRLMVTMNARGKWNQHTPIPRGYYGNAHVSPMAEATAGELCSQPLARTVDLVRRTKLSVTKERMESMVDTIASTRQWPPPTMDRIYEVSDTKWIATNATQFGWAELVGGGIPLAGDLASKLGSDHMSCRNQDGDHSTIVSMLLPKPAMDKFSSELSVWLNNKHDHKNLVILSSL

SEQ ID NO: 33831 - protein, 324 aa, Zea mays subsp. mays
  peptide (1)..(324): Ceres Seq. ID no. 12367073
  misc_feature (1)..(307): Pfam Name: Pfam Description:  Transferase family
  misc_feature (1)..(324): NCBI GI NO: 37532050 NR Description: putative acetyl transferase
  misc_feature (1)..(311): NCBI GI NO: 29027875 NR Description: putative acetyl transferase
  misc_feature (1)..(310): NCBI GI NO: 37530404 NR Description: putative hsr201 hypersensitivity-related protein
  misc_feature (1)..(317): NCBI GI NO: 37530414 NR Description: putative hsr201 hypersensitivity-related protein
  misc_feature (3)..(306): NCBI GI NO: 37530408 NR Description: putative hsr201 hypersensitivity-related protein
  misc_feature (1)..(305): NCBI GI NO: 7489142 NR Description: hsr201 protein
  misc_feature (1)..(321): NCBI GI NO: 22854880 NR Description: benzoyl coenzyme A: benzyl alcohol benzoyltransferase
  misc_feature (1)..(305): NCBI GI NO: 37535814 NR Description: putative hypersensitivity-related (hsr)protein
  misc_feature (1)..(311): NCBI GI NO: 34898614 NR Description: putative hypersensitivity-related (hsr) protein
  misc_feature (1)..(224): NCBI GI NO: 22854876 NR Description: benzoyl coenzyme A: benzyl alcohol benzoyltransferase
MQVTRLKCGGFVIGFHMCHSIADGFGMVQFFRCVAELARGEKVPTLLPVWRRELLTRHRSNTTAYNHTATVRSESDSDDYKSDDVMLSTPMDDMVVQYFLFGPREIATLRSHLRGDDQLLLATSATSFELLAAVMWRCRTLALGYESHRRVRLMVTMNARGKWNQHTPIPRGYYGNAHVSPMAEATAGELCSQPLARTVDLVRRTKLSVTKERMESMVDTIASTRQWPPPTMDRIYEVSDTKWIATNATQFGWAELVGGGIPLAGDLASKLGSDHMSCRNQDGDHSTIVSMLLPKPAMDKFSSELSVWLNNKHDHKNLVILSSL

SEQ ID NO: 33832 - DNA, 1642 bp, Zea mays subsp. mays
  misc_feature (1)..(1642): Ceres Seq. ID no. 13498894
agacaccagacgcagtcggctgccgcagggctggtagtagccggcgcgccgtcaccgtatcctcagatcagcggcgagcagaaaccacaccactctactgacgcccgacgagccatgggtaaggagaagactcacatcaacattgtggtcattggccatgtcgactctggcaagtcgaccaccactggccacctgatctacaagcttggaggtattgacaagcgagtgattgagaggttcgagaaagaggctgccgagatgaacaagcggtcattcaagtatgcgtgggtgcttgacaagctcaaggctgagcgtgagagaggtattacaattgatattgccctgtggaagttcgagaccaccaagtactactgcactgttattgatgccccgggacaccgtgacttcatcaagaatatgatcactggcacttcccaagctgactgtgctgttcttatcattgactcaaccactggtggttttgaggctggtatctccaaggatggccagacccgtgagcatgctctccttgctttcacacttggtgtgaagcagatgatttgctgctgcaacaagatggatgctactacacccaagtattcaaaggcccgttatgatgagattgtgaaggaagtctcttcctacctgaagaaggttggatacaaccctgataagatccacttcgttccaatctctggttttgaaggtgacaacatgattgagaggtccaccaaccttgactggtacaagggcccaaccctacttgaggctctggacttgatcaatgagccaaagaggccttcagacaagcccctgcgtctcccccttcaggatgtgtacaagattggtggtattggaactgtccctgttggacgtgttgagactggtgtcattaagcctggtatggttgttacttttgggcctactggtcttactactgaggttaagtccgttgagatgcaccatgaggctctccaggaggcccttcccggtgacaatgttggcttcaacgtgaagaatgttgctgtgaaggatctgaagcgtgggtatgtggcctccaactccaaggatgaccctgccaaggaggctgctagcttcacctcccaggtcatcatcatgaaccaccctggccagattggcaatggctatgccccagttctggactgccacacctcacacattgctgtcaagtttgctgagctcgttaccaagattgataggcgatccggcaaggagctggagaaggagcccaaatttctcaagaacggtgatgctggtatggtgaagatggttcccactaagcccatggtggtggagaccttttctcagtatcctcctcttggtcgatttgctgtccgtgacatgaggcaaacggtggctgtcggagtcatcaagagtgtggagaagaaggacccaactggagccaaggtgacgaaggctgctgccaagaagaaatgatctatctggctggtgctgtgcttgcttgttggttacctcgtggaagcttaaaatatctcgtcttgttgacatccttgcagttgtcgcgtgaacaagtaatctatgatggcaatgtttgcctggtcatgaagtattattactttcgttgaaaccgtgatgctattaagacttaatttttttatgg

SEQ ID NO: 33833 - protein, 485 aa, Zea mays subsp. mays
  peptide (1)..(485): Ceres Seq. ID no. 13498895
  misc_feature (43)..(265): Pfam Name: Pfam Description:  Elongation factor Tu GTP binding domain
  misc_feature (39)..(485): NCBI GI NO: 2282584 NR Description: elongation factor 1-alpha [Zea mays]
  misc_feature (39)..(485): NCBI GI NO: 3122071 NR Description: ELONGATION FACTOR 1-ALPHA (EF-1-ALPHA)
  misc_feature (39)..(485): NCBI GI NO: 18873725 NR Description: elongation factor 1 alpha
  misc_feature (39)..(485): NCBI GI NO: 2662341 NR Description: EF-1 alpha [Oryza sativa]
  misc_feature (39)..(485): NCBI GI NO: 2662343 NR Description: EF-1 alpha [Oryza sativa]
  misc_feature (39)..(485): NCBI GI NO: 6015059 NR Description: ELONGATION FACTOR 1-ALPHA (EF-1-ALPHA)
  misc_feature (45)..(485): NCBI GI NO: 18873727 NR Description: elongation factor 1 alpha
  misc_feature (39)..(485): NCBI GI NO: 7230387 NR Description: elongation factor 1 alpha [Zea mays]
  misc_feature (39)..(485): NCBI GI NO: 7230385 NR Description: elongation factor 1 alpha [Zea mays]
  misc_feature (39)..(485): NCBI GI NO: 1864017 NR Description: elongation factor-1 alpha [Nicotiana tabacum]
RHQTQSAAAGLVVAGAPSPYPQISGEQKPHHSTDARRAMGKEKTHINIVVIGHVDSGKSTTTGHLIYKLGGIDKRVIERFEKEAAEMNKRSFKYAWVLDKLKAERERGITIDIALWKFETTKYYCTVIDAPGHRDFIKNMITGTSQADCAVLIIDSTTGGFEAGISKDGQTREHALLAFTLGVKQMICCCNKMDATTPKYSKARYDEIVKEVSSYLKKVGYNPDKIHFVPISGFEGDNMIERSTNLDWYKGPTLLEALDLINEPKRPSDKPLRLPLQDVYKIGGIGTVPVGRVETGVIKPGMVVTFGPTGLTTEVKSVEMHHEALQEALPGDNVGFNVKNVAVKDLKRGYVASNSKDDPAKEAASFTSQVIIMNHPGQIGNGYAPVLDCHTSHIAVKFAELVTKIDRRSGKELEKEPKFLKNGDAGMVKMVPTKPMVVETFSQYPPLGRFAVRDMRQTVAVGVIKSVEKKDPTGAKVTKAAAKKK

SEQ ID NO: 33834 - protein, 447 aa, Zea mays subsp. mays
  peptide (1)..(447): Ceres Seq. ID no. 13498896
  misc_feature (5)..(227): Pfam Name: Pfam Description:  Elongation factor Tu GTP binding domain
  misc_feature (1)..(447): NCBI GI NO: 2282584 NR Description: elongation factor 1-alpha [Zea mays]
  misc_feature (1)..(447): NCBI GI NO: 3122071 NR Description: ELONGATION FACTOR 1-ALPHA (EF-1-ALPHA)
  misc_feature (1)..(447): NCBI GI NO: 18873725 NR Description: elongation factor 1 alpha
  misc_feature (1)..(447): NCBI GI NO: 2662341 NR Description: EF-1 alpha [Oryza sativa]
  misc_feature (1)..(447): NCBI GI NO: 2662343 NR Description: EF-1 alpha [Oryza sativa]
  misc_feature (1)..(447): NCBI GI NO: 6015059 NR Description: ELONGATION FACTOR 1-ALPHA (EF-1-ALPHA)
  misc_feature (7)..(447): NCBI GI NO: 18873727 NR Description: elongation factor 1 alpha
  misc_feature (1)..(447): NCBI GI NO: 7230387 NR Description: elongation factor 1 alpha [Zea mays]
  misc_feature (1)..(447): NCBI GI NO: 7230385 NR Description: elongation factor 1 alpha [Zea mays]
  misc_feature (1)..(447): NCBI GI NO: 1864017 NR Description: elongation factor-1 alpha [Nicotiana tabacum]
MGKEKTHINIVVIGHVDSGKSTTTGHLIYKLGGIDKRVIERFEKEAAEMNKRSFKYAWVLDKLKAERERGITIDIALWKFETTKYYCTVIDAPGHRDFIKNMITGTSQADCAVLIIDSTTGGFEAGISKDGQTREHALLAFTLGVKQMICCCNKMDATTPKYSKARYDEIVKEVSSYLKKVGYNPDKIHFVPISGFEGDNMIERSTNLDWYKGPTLLEALDLINEPKRPSDKPLRLPLQDVYKIGGIGTVPVGRVETGVIKPGMVVTFGPTGLTTEVKSVEMHHEALQEALPGDNVGFNVKNVAVKDLKRGYVASNSKDDPAKEAASFTSQVIIMNHPGQIGNGYAPVLDCHTSHIAVKFAELVTKIDRRSGKELEKEPKFLKNGDAGMVKMVPTKPMVVETFSQYPPLGRFAVRDMRQTVAVGVIKSVEKKDPTGAKVTKAAAKKK

SEQ ID NO: 33835 - protein, 399 aa, Zea mays subsp. mays
  peptide (1)..(399): Ceres Seq. ID no. 13498897
  misc_feature (1)..(179): Pfam Name: Pfam Description:  Elongation factor Tu GTP binding domain
  misc_feature (1)..(399): NCBI GI NO: 2282584 NR Description: elongation factor 1-alpha [Zea mays]
  misc_feature (1)..(399): NCBI GI NO: 3122071 NR Description: ELONGATION FACTOR 1-ALPHA (EF-1-ALPHA)
  misc_feature (1)..(399): NCBI GI NO: 18873725 NR Description: elongation factor 1 alpha
  misc_feature (1)..(399): NCBI GI NO: 2662341 NR Description: EF-1 alpha [Oryza sativa]
  misc_feature (1)..(399): NCBI GI NO: 2662343 NR Description: EF-1 alpha [Oryza sativa]
  misc_feature (1)..(399): NCBI GI NO: 6015059 NR Description: ELONGATION FACTOR 1-ALPHA (EF-1-ALPHA)
  misc_feature (1)..(399): NCBI GI NO: 18873727 NR Description: elongation factor 1 alpha
  misc_feature (1)..(399): NCBI GI NO: 7230387 NR Description: elongation factor 1 alpha [Zea mays]
  misc_feature (1)..(399): NCBI GI NO: 7230385 NR Description: elongation factor 1 alpha [Zea mays]
  misc_feature (1)..(399): NCBI GI NO: 1864017 NR Description: elongation factor-1 alpha [Nicotiana tabacum]
MNKRSFKYAWVLDKLKAERERGITIDIALWKFETTKYYCTVIDAPGHRDFIKNMITGTSQADCAVLIIDSTTGGFEAGISKDGQTREHALLAFTLGVKQMICCCNKMDATTPKYSKARYDEIVKEVSSYLKKVGYNPDKIHFVPISGFEGDNMIERSTNLDWYKGPTLLEALDLINEPKRPSDKPLRLPLQDVYKIGGIGTVPVGRVETGVIKPGMVVTFGPTGLTTEVKSVEMHHEALQEALPGDNVGFNVKNVAVKDLKRGYVASNSKDDPAKEAASFTSQVIIMNHPGQIGNGYAPVLDCHTSHIAVKFAELVTKIDRRSGKELEKEPKFLKNGDAGMVKMVPTKPMVVETFSQYPPLGRFAVRDMRQTVAVGVIKSVEKKDPTGAKVTKAAAKKK

SEQ ID NO: 33836 - DNA, 883 bp, Zea mays subsp. mays
  misc_feature (1)..(883): Ceres Seq. ID no. 12348783
ctctcgcccgtctcgatcccacaggatccgagagacctcacaagccgccacgccaggtccccatcccatcgcggcgcctgccccacccccgccctgctcccgcccggtagtagtagcagagcctcgccgccgctgccgagaatagatggggttcgtgtccttcgtcgggcgggtgctcttcgtcgccgctttcctcctctccgcctaccaggagtttaatgaatttggcgctgatggtgggccagcagctaaggcccttcagcccaagttcaatgtgtttgtaaaaaatatctctgcacatctgggagtagctgtcccgcacattgagttgaagcatgtgattgctgctacaattgctcttaagggacttggaagtctcctttttattttgaccagctccctcggtgcttatctcctgctgctgtacctcgctctgatcagtcctatcgttcacgacttctacaactacgacacggggaaggaagaattcgcgcggctgtttgcgaagttcacccaggacgtggcgctagttggagctctcctcgtcttcctgggcatgaagaactccaccccgaagcggcagggcaagaagaaggctcacaaggcgaagacgaactagtaagaggttgctcgctcggcctcaggcgggtgtcaggagacgaatagtggcccagtgcgaagcagtcgatgcgcatcgagctgtcggctgcgcttttacatgtatcggatattcagattccattttgcggggcgcggcccgaacgaaggtgtgactagtgggcggcgggttaggcgacacgacacggtcatgtatgtgattgcgattggttggttggtttcttgaactgggctgacggtggttaatcttttcgatttgattagc

SEQ ID NO: 33837 - protein, 157 aa, Zea mays subsp. mays
  peptide (1)..(157): Ceres Seq. ID no. 12348784
  misc_feature (1)..(138): Pfam Name: Pfam Description:  HR-like lesion-inducing
  misc_feature (1)..(157): NCBI GI NO: 27261473 NR Description: Unknown protein
  misc_feature (1)..(157): NCBI GI NO: 7489144 NR Description: hypothetical protein (clone NF22) - common tobacco
  misc_feature (24)..(156): NCBI GI NO: 37534824 NR Description: putative RNA-binding protein
  misc_feature (1)..(24): NCBI GI NO: 37534824 NR Description: putative RNA-binding protein
  misc_feature (1)..(157): NCBI GI NO: 38346190 NR Description: OSJNBa0027O01.6
  misc_feature (1)..(157): NCBI GI NO: 15236497 NR Description: elicitor like protein; protein id: At4g14420
  misc_feature (1)..(128): NCBI GI NO: 7489143 NR Description: hypothetical protein (clone ND1) - common tobacco
  misc_feature (1)..(155): NCBI GI NO: 15219714 NR Description: unknown protein; protein id: At1g04340
  misc_feature (1)..(156): NCBI GI NO: 40287494 NR Description: putative lesion-inducing protein [Capsicum annuum]
  misc_feature (1)..(155): NCBI GI NO: 21592798 NR Description: Nicotiana lesion-inducing like
MGFVSFVGRVLFVAAFLLSAYQEFNEFGADGGPAAKALQPKFNVFVKNISAHLGVAVPHIELKHVIAATIALKGLGSLLFILTSSLGAYLLLLYLALISPIVHDFYNYDTGKEEFARLFAKFTQDVALVGALLVFLGMKNSTPKRQGKKKAHKAKTN

SEQ ID NO: 33838 - DNA, 1334 bp, Zea mays subsp. mays
  misc_feature (1)..(1334): Ceres Seq. ID no. 12374355
acgactctcttctctgagaaaacccaacaaaaaccctcgctcgcctcacttgttcgctcacctcggtgcggcgcgtcgttcggacacggagatacagcggcgattccggcgatggagtacgtgaaccccctcaccggcttccgcgtcgacggccgccgccccaacgagatgcggcaactcaagggcgaggtcggcgtcgttgtgcgcgcagacgggtcggcgctgtttgagatgggcaacaccagagtcatcgccgccgtctacggcccgcgagaggttcagaacaaaggtcagcaagtaaacagcaaggaggctttggttcgttgtgagtacaggatggcagagtttagtacaggagatcggaggagaaaaccgaagggtgacaggcgatcaacagaaatttctcttgttattcgacagacaatggaggcaagcatattaacacatttaatgccacactcacagattgatatatatgtccaagttcttcaagctgatggtggaacaaggtcagcttgcataaatgctgcaacactagctcttgcagatgctgggattccaatgcgagacattgccacatcatgtagtgctggttatctgtgttctactcctttgctcgatctgaattacctcgaagacagtgctgggggttccgatgtcactgttggcattcttgcaaagatggacaaagtgactttgcttcagatggatgcaaaattaccaattgatacatttgaaaatgtaatgggacttgcaatagaagggtgcaaagcaattgcaacttacatccgagaggtgctattggagaatacaaagaagcttgagtgtcagcgtggttaaccttaggagtgcaggcaggttgatgacctgaacctacccaacaccggacatcacacagccattaagggcttgttcggttagctcttaatccatgtggattgagtgggattggatgagtttgaatcccaaacaattcaaacttcttaagaattttttccaatcccatccaatccatgtgtattgggaataaccaaacaaggcctaaaaggtttactggttgtggttgtgggtggctggctctggtgcagttcacaggaacttccaacggagttgtgggtggctggcttctgttcaaggcatcttgtcatcatcaccagggatacaagacatgcttcctcagtaaggtgttatcggaatttttcagttcctgtaaactgatataaatcgatggtggcactgtactgataatcttccgtatggtgttattggaatttgtgtgacagttcctgtaaactaatgcaaagagagagatccagcggggctcctgcctcctg

SEQ ID NO: 33839 - protein, 279 aa, Zea mays subsp. mays
  peptide (1)..(279): Ceres Seq. ID no. 12374356
  misc_feature (56)..(187): Pfam Name: Pfam Description:  3' exoribonuclease family, domain 1
  misc_feature (38)..(278): NCBI GI NO: 15233167 NR Description: exonuclease RRP41; protein id: At3g61620
  misc_feature (46)..(273): NCBI GI NO: 9506689 NR Description: exosome component Rrp41; hypothetical protein
  misc_feature (46)..(279): NCBI GI NO: 29611663 NR Description: exosome complex exonuclease RRP41 [Mus musculus]
  misc_feature (46)..(273): NCBI GI NO: 33411774 NR Description: putative exosome complex exonuclease RRP41
  misc_feature (46)..(273): NCBI GI NO: 34866849 NR Description: similar to putative exosome complex exonucleaseRRP41
  misc_feature (46)..(274): NCBI GI NO: 14520826 NR Description: ribonuclease PH [Pyrococcus abyssi]
  misc_feature (46)..(273): NCBI GI NO: 40217446 NR Description: ribonuclease PH [uncultured archaeon]
  misc_feature (46)..(274): NCBI GI NO: 18977940 NR Description: ribonuclease ph (rph)
  misc_feature (46)..(274): NCBI GI NO: 14591333 NR Description: hypothetical protein [Pyrococcus horikoshii]
  misc_feature (46)..(269): NCBI GI NO: 20093819 NR Description: Predicted exosome subunit, RNase PH
TTLFSEKTQQKPSLASLVRSPRCGASFGHGDTAAIPAMEYVNPLTGFRVDGRRPNEMRQLKGEVGVVVRADGSALFEMGNTRVIAAVYGPREVQNKGQQVNSKEALVRCEYRMAEFSTGDRRRKPKGDRRSTEISLVIRQTMEASILTHLMPHSQIDIYVQVLQADGGTRSACINAATLALADAGIPMRDIATSCSAGYLCSTPLLDLNYLEDSAGGSDVTVGILAKMDKVTLLQMDAKLPIDTFENVMGLAIEGCKAIATYIREVLLENTKKLECQRG

SEQ ID NO: 33840 - protein, 242 aa, Zea mays subsp. mays
  peptide (1)..(242): Ceres Seq. ID no. 12374357
  misc_feature (19)..(150): Pfam Name: Pfam Description:  3' exoribonuclease family, domain 1
  misc_feature (1)..(241): NCBI GI NO: 15233167 NR Description: exonuclease RRP41; protein id: At3g61620
  misc_feature (9)..(236): NCBI GI NO: 9506689 NR Description: exosome component Rrp41; hypothetical protein
  misc_feature (9)..(242): NCBI GI NO: 29611663 NR Description: exosome complex exonuclease RRP41 [Mus musculus]
  misc_feature (9)..(236): NCBI GI NO: 33411774 NR Description: putative exosome complex exonuclease RRP41
  misc_feature (9)..(236): NCBI GI NO: 34866849 NR Description: similar to putative exosome complex exonucleaseRRP41
  misc_feature (9)..(237): NCBI GI NO: 14520826 NR Description: ribonuclease PH [Pyrococcus abyssi]
  misc_feature (9)..(236): NCBI GI NO: 40217446 NR Description: ribonuclease PH [uncultured archaeon]
  misc_feature (9)..(237): NCBI GI NO: 18977940 NR Description: ribonuclease ph (rph)
  misc_feature (9)..(237): NCBI GI NO: 14591333 NR Description: hypothetical protein [Pyrococcus horikoshii]
  misc_feature (9)..(232): NCBI GI NO: 20093819 NR Description: Predicted exosome subunit, RNase PH
MEYVNPLTGFRVDGRRPNEMRQLKGEVGVVVRADGSALFEMGNTRVIAAVYGPREVQNKGQQVNSKEALVRCEYRMAEFSTGDRRRKPKGDRRSTEISLVIRQTMEASILTHLMPHSQIDIYVQVLQADGGTRSACINAATLALADAGIPMRDIATSCSAGYLCSTPLLDLNYLEDSAGGSDVTVGILAKMDKVTLLQMDAKLPIDTFENVMGLAIEGCKAIATYIREVLLENTKKLECQRG

SEQ ID NO: 33841 - protein, 223 aa, Zea mays subsp. mays
  peptide (1)..(223): Ceres Seq. ID no. 12374358
  misc_feature (1)..(131): Pfam Name: Pfam Description:  3' exoribonuclease family, domain 1
  misc_feature (1)..(222): NCBI GI NO: 15233167 NR Description: exonuclease RRP41; protein id: At3g61620
  misc_feature (1)..(217): NCBI GI NO: 9506689 NR Description: exosome component Rrp41; hypothetical protein
  misc_feature (1)..(223): NCBI GI NO: 29611663 NR Description: exosome complex exonuclease RRP41 [Mus musculus]
  misc_feature (1)..(217): NCBI GI NO: 33411774 NR Description: putative exosome complex exonuclease RRP41
  misc_feature (1)..(217): NCBI GI NO: 34866849 NR Description: similar to putative exosome complex exonucleaseRRP41
  misc_feature (1)..(218): NCBI GI NO: 14520826 NR Description: ribonuclease PH [Pyrococcus abyssi]
  misc_feature (1)..(217): NCBI GI NO: 40217446 NR Description: ribonuclease PH [uncultured archaeon]
  misc_feature (1)..(218): NCBI GI NO: 18977940 NR Description: ribonuclease ph (rph)
  misc_feature (1)..(218): NCBI GI NO: 14591333 NR Description: hypothetical protein [Pyrococcus horikoshii]
  misc_feature (1)..(213): NCBI GI NO: 20093819 NR Description: Predicted exosome subunit, RNase PH
MRQLKGEVGVVVRADGSALFEMGNTRVIAAVYGPREVQNKGQQVNSKEALVRCEYRMAEFSTGDRRRKPKGDRRSTEISLVIRQTMEASILTHLMPHSQIDIYVQVLQADGGTRSACINAATLALADAGIPMRDIATSCSAGYLCSTPLLDLNYLEDSAGGSDVTVGILAKMDKVTLLQMDAKLPIDTFENVMGLAIEGCKAIATYIREVLLENTKKLECQRG

SEQ ID NO: 33842 - DNA, 1758 bp, Zea mays subsp. mays
  misc_feature (1)..(1758): Ceres Seq. ID no. 12406812
aagtagtacgagtaaccaacaatccaatggacgcggcgaaatattggcacccggcagcacacccccaccaatcccgtgtccccacgatccagatcagaaacgcaaaggacaatcgacacggacgcgacgcgaaggcgacgcaccagcaccacctaaaattctaaaaaggcaggggccgtttctccgaccaccgcccgacgaatcagcgcgtccgctacaactccggcgacccccgccggcggcgaccccccagggcagcgatccacgcaggcgaacaacgatgggcggccgcaagatcgcgctgctggtgggcatcaactacccgggcaccaaggccgagctcaagggctgctacaacgacgtcgaccgcatgcgccgctgcctcgtcgaccgcttcggcttccgacgaggccgacatccgagtcctcagcgacgccgaccgatccgcgccgcagcccacgggggctaacatccgccgcgccctcgcccgcctcgtcggggatgcccgccccggggacttcctcttcttccactacagcggccacggcacgcgcctgccagccgagacggggcagcacgacgacaccggctacgacgagtgcatcgtgccctgcgacatgaacctcatcacagatcaggatttcagggaactcgtgcagaaggtccctgaaggttgcctattcaccatcgtctctgactcatgccatagtggtggcctgctggacagtgctaaggagcagataggtaatagcaccaagcagaataagacccagtcccgtgaacctgatgagcctcgtcattctggttctggcagcggcttccggtcatttctcaaagagactgtccgcgatgtgttcgagtctgaggggattcacatccctcatagtcgtcgccatggggatgatgaccaggacgacggttacgcacagccaactggaaatggccgcaccaaaaaccgctccctgccactctcgaccctgatagagatgctcaaggaacaaactggaaaggatgacattgatgtgggttctatccggatgacgctgttcaacatctttggtgatgatgccagcccaaagattaagaagttcatgaaggtcatgctcggaaagttccaccagggccagtcaggtgagcaaggcagtggtggtggtggtgtctttggcatggttggtgcccttgctcaggagttcttgaaggctaagcttgaagggaaggaggaagaggctttcaaacctgcattagagcaagaggttcacagtgttgacgaggtgtacgccgggagtaaggcctgggcaccaaacaatggcattctgatcagtgggtgccagactaaccaaacatcagcggatgcaactacaccgcagggtgtctcctttggtgctctgagcaatgctatccaaaccattcttgcagacaagcacgggaaggtgacgaataaggatctcgtgatgaaagcacgtgagctgctgtctaagcaagggtacactcaacagcctggactatactgcagcgatgagcatgttcatgtcgctttcatatgctaaaacttggattgttacagcgattgctttcctccatccttttgtgttgatcggtgcaccagaggttgaagtttttcttcccatgtatgttacagttatattgtatcagtgtttgttgcttgaggatatgtttcaatggactatgtcaatattgaaataactttgagaaatgtttctatatatgaataatatacacacttgtatcgtgatctgt

SEQ ID NO: 33843 - protein, 309 aa, Zea mays subsp. mays
  peptide (1)..(309): Ceres Seq. ID no. 12406813
  misc_feature (1)..(309): Pfam Name: Pfam Description:  Caspase domain
  misc_feature (1)..(309): NCBI GI NO: 34908928 NR Description: putative latex-abundant protein
  misc_feature (1)..(309): NCBI GI NO: 29367583 NR Description: latex-abundant protein-like protein
  misc_feature (1)..(309): NCBI GI NO: 4235430 NR Description: latex-abundant protein [Hevea brasiliensis]
  misc_feature (1)..(309): NCBI GI NO: 23343885 NR Description: metacaspase 1 [Lycopersicon esculentum]
  misc_feature (1)..(309): NCBI GI NO: 40644374 NR Description: metacaspase type II [Picea abies]
  misc_feature (1)..(309): NCBI GI NO: 15219345 NR Description: hypothetical protein common family
  misc_feature (1)..(309): NCBI GI NO: 15219342 NR Description: hypothetical protein common family
  misc_feature (1)..(309): NCBI GI NO: 33304380 NR Description: metacaspase 7 [Arabidopsis thaliana]
  misc_feature (113)..(309): NCBI GI NO: 15219340 NR Description: hypothetical protein common family
  misc_feature (1)..(83): NCBI GI NO: 15219340 NR Description: hypothetical protein common family
MNLITDQDFRELVQKVPEGCLFTIVSDSCHSGGLLDSAKEQIGNSTKQNKTQSREPDEPRHSGSGSGFRSFLKETVRDVFESEGIHIPHSRRHGDDDQDDGYAQPTGNGRTKNRSLPLSTLIEMLKEQTGKDDIDVGSIRMTLFNIFGDDASPKIKKFMKVMLGKFHQGQSGEQGSGGGGVFGMVGALAQEFLKAKLEGKEEEAFKPALEQEVHSVDEVYAGSKAWAPNNGILISGCQTNQTSADATTPQGVSFGALSNAIQTILADKHGKVTNKDLVMKARELLSKQGYTQQPGLYCSDEHVHVAFIC

SEQ ID NO: 33844 - protein, 186 aa, Zea mays subsp. mays
  peptide (1)..(186): Ceres Seq. ID no. 12406814
  misc_feature (1)..(186): Pfam Name: Pfam Description:  Caspase domain
  misc_feature (1)..(186): NCBI GI NO: 34908928 NR Description: putative latex-abundant protein
  misc_feature (1)..(186): NCBI GI NO: 29367583 NR Description: latex-abundant protein-like protein
  misc_feature (1)..(186): NCBI GI NO: 4235430 NR Description: latex-abundant protein [Hevea brasiliensis]
  misc_feature (1)..(186): NCBI GI NO: 23343885 NR Description: metacaspase 1 [Lycopersicon esculentum]
  misc_feature (1)..(186): NCBI GI NO: 40644374 NR Description: metacaspase type II [Picea abies]
  misc_feature (1)..(186): NCBI GI NO: 15219345 NR Description: hypothetical protein common family
  misc_feature (1)..(186): NCBI GI NO: 15219342 NR Description: hypothetical protein common family
  misc_feature (1)..(186): NCBI GI NO: 33304380 NR Description: metacaspase 7 [Arabidopsis thaliana]
  misc_feature (1)..(186): NCBI GI NO: 15219340 NR Description: hypothetical protein common family
  misc_feature (1)..(186): NCBI GI NO: 37788557 NR Description: metacaspase 7 [Arabidopsis thaliana]
MLKEQTGKDDIDVGSIRMTLFNIFGDDASPKIKKFMKVMLGKFHQGQSGEQGSGGGGVFGMVGALAQEFLKAKLEGKEEEAFKPALEQEVHSVDEVYAGSKAWAPNNGILISGCQTNQTSADATTPQGVSFGALSNAIQTILADKHGKVTNKDLVMKARELLSKQGYTQQPGLYCSDEHVHVAFIC

SEQ ID NO: 33845 - protein, 169 aa, Zea mays subsp. mays
  peptide (1)..(169): Ceres Seq. ID no. 12406815
  misc_feature (1)..(169): Pfam Name: Pfam Description:  Caspase domain
  misc_feature (1)..(169): NCBI GI NO: 34908928 NR Description: putative latex-abundant protein
  misc_feature (1)..(169): NCBI GI NO: 29367583 NR Description: latex-abundant protein-like protein
  misc_feature (1)..(169): NCBI GI NO: 4235430 NR Description: latex-abundant protein [Hevea brasiliensis]
  misc_feature (1)..(169): NCBI GI NO: 23343885 NR Description: metacaspase 1 [Lycopersicon esculentum]
  misc_feature (1)..(169): NCBI GI NO: 40644374 NR Description: metacaspase type II [Picea abies]
  misc_feature (1)..(169): NCBI GI NO: 15219345 NR Description: hypothetical protein common family
  misc_feature (1)..(169): NCBI GI NO: 15219342 NR Description: hypothetical protein common family
  misc_feature (1)..(169): NCBI GI NO: 33304380 NR Description: metacaspase 7 [Arabidopsis thaliana]
  misc_feature (1)..(169): NCBI GI NO: 15219340 NR Description: hypothetical protein common family
  misc_feature (1)..(169): NCBI GI NO: 37788557 NR Description: metacaspase 7 [Arabidopsis thaliana]
MTLFNIFGDDASPKIKKFMKVMLGKFHQGQSGEQGSGGGGVFGMVGALAQEFLKAKLEGKEEEAFKPALEQEVHSVDEVYAGSKAWAPNNGILISGCQTNQTSADATTPQGVSFGALSNAIQTILADKHGKVTNKDLVMKARELLSKQGYTQQPGLYCSDEHVHVAFIC

SEQ ID NO: 33846 - DNA, 1093 bp, Zea mays subsp. mays
  misc_feature (1)..(1093): Ceres Seq. ID no. 12381286
gccgcctcctccccactgcctcgtgtggccgtcgtctcccgttcggaacgcccccccccctccggcgaaatggcccccaagcgaggtggcagggcgccggtgccggccaagaagaagacggataaagtgacgaaccctctattcgagaagaggccgaagcagttcggcatcggcggcgcgttgccgcccaagaaggacctgcaccggttcgtcaagtggcccaaggtcgtgcgtatccagcggcagcgccgcatcctcaagcagcgcctcaaggtaccaccggcgctcaaccagttcacccgcaccctcgacaagaacctcgctacgaacctgtttaagatgcttctcaagtaccggcctgaagacaaggctgccaagaaggagaggcttctgaagagggcccaagctgagaatgaaggaaaaactgttgagtcgaagaaaccaattgttgtgaagtatggccttaaccatgtgacttacctcattgagcagaacaaggctcagcttgttgtcatcgctcacgacgtggatccgatcgaacttgttgtgtggcttccagccctgtgcaggaagatggaggtcccttactgcattgttaaaggaaaggctcgccttggatcgattgttcacaagaagaatgcatcagtcttgtgtctgaccactgtcaagaacgaggataagcttgagttcagcaagatcttggaggctattaaggcaaacttcaacgacaagttcgatgaggtcaggaagaagtggggaggtggcatcatgggatccaagtcgcaggccaagaccaaggcccgggaaaagttgctcgccaaggaggctgcgcagcggatgacctagattgtctattgtctactgctgtgtctgccctgtagtttgacggggaagaactgatgaactcgtattgtggtttttctgaatctagtttcatatgtttctgtccaccagaccatgtttagaagctttgcaagacagagttaccatgtttagaagctttgcaagacagagttacagtgtttatgtgatacctcagatccatgcagctttgcttctatttgcctaagagcaaccccaaaagtatttcatg

SEQ ID NO: 33847 - protein, 281 aa, Zea mays subsp. mays
  peptide (1)..(281): Ceres Seq. ID no. 12381287
  misc_feature (136)..(231): Pfam Name: Pfam Description:  Ribosomal protein L7Ae/L30e/S12e/Gadd45 family
  misc_feature (24)..(281): NCBI GI NO: 548774 NR Description: 60S RIBOSOMAL PROTEIN L7A
  misc_feature (24)..(280): NCBI GI NO: 15229338 NR Description: 60S RIBOSOMAL PROTEIN L7A protein
  misc_feature (24)..(280): NCBI GI NO: 15226635 NR Description: 60S ribosomal protein L7A; protein id: At2g47610
  misc_feature (17)..(281): NCBI GI NO: 20161741 NR Description: putative 60S ribosomal protein
  misc_feature (16)..(279): NCBI GI NO: 17530825 NR Description: Ribosomal protein L7A CG3314-PD
  misc_feature (16)..(279): NCBI GI NO: 1173062 NR Description: 60S RIBOSOMAL PROTEIN L7A
  misc_feature (12)..(280): NCBI GI NO: 34853132 NR Description: similar to 60S ribosomal protein L7a
  misc_feature (20)..(280): NCBI GI NO: 4506661 NR Description: ribosomal protein L7a
  misc_feature (20)..(280): NCBI GI NO: 7305443 NR Description: ribosomal protein L7a; surfeit 3 [Mus musculus]
  misc_feature (20)..(280): NCBI GI NO: 6094094 NR Description: 60S RIBOSOMAL PROTEIN L7A
AASSPLPRVAVVSRSERPPPSGEMAPKRGGRAPVPAKKKTDKVTNPLFEKRPKQFGIGGALPPKKDLHRFVKWPKVVRIQRQRRILKQRLKVPPALNQFTRTLDKNLATNLFKMLLKYRPEDKAAKKERLLKRAQAENEGKTVESKKPIVVKYGLNHVTYLIEQNKAQLVVIAHDVDPIELVVWLPALCRKMEVPYCIVKGKARLGSIVHKKNASVLCLTTVKNEDKLEFSKILEAIKANFNDKFDEVRKKWGGGIMGSKSQAKTKAREKLLAKEAAQRMT

SEQ ID NO: 33848 - protein, 258 aa, Zea mays subsp. mays
  peptide (1)..(258): Ceres Seq. ID no. 12381288
  misc_feature (113)..(208): Pfam Name: Pfam Description:  Ribosomal protein L7Ae/L30e/S12e/Gadd45 family
  misc_feature (1)..(258): NCBI GI NO: 548774 NR Description: 60S RIBOSOMAL PROTEIN L7A
  misc_feature (1)..(257): NCBI GI NO: 15229338 NR Description: 60S RIBOSOMAL PROTEIN L7A protein
  misc_feature (1)..(257): NCBI GI NO: 15226635 NR Description: 60S ribosomal protein L7A; protein id: At2g47610
  misc_feature (1)..(258): NCBI GI NO: 20161741 NR Description: putative 60S ribosomal protein
  misc_feature (1)..(256): NCBI GI NO: 17530825 NR Description: Ribosomal protein L7A CG3314-PD
  misc_feature (1)..(256): NCBI GI NO: 1173062 NR Description: 60S RIBOSOMAL PROTEIN L7A
  misc_feature (1)..(257): NCBI GI NO: 34853132 NR Description: similar to 60S ribosomal protein L7a
  misc_feature (1)..(257): NCBI GI NO: 4506661 NR Description: ribosomal protein L7a
  misc_feature (1)..(257): NCBI GI NO: 7305443 NR Description: ribosomal protein L7a; surfeit 3 [Mus musculus]
  misc_feature (1)..(257): NCBI GI NO: 6094094 NR Description: 60S RIBOSOMAL PROTEIN L7A
MAPKRGGRAPVPAKKKTDKVTNPLFEKRPKQFGIGGALPPKKDLHRFVKWPKVVRIQRQRRILKQRLKVPPALNQFTRTLDKNLATNLFKMLLKYRPEDKAAKKERLLKRAQAENEGKTVESKKPIVVKYGLNHVTYLIEQNKAQLVVIAHDVDPIELVVWLPALCRKMEVPYCIVKGKARLGSIVHKKNASVLCLTTVKNEDKLEFSKILEAIKANFNDKFDEVRKKWGGGIMGSKSQAKTKAREKLLAKEAAQRMT

SEQ ID NO: 33849 - protein, 168 aa, Zea mays subsp. mays
  peptide (1)..(168): Ceres Seq. ID no. 12381289
  misc_feature (23)..(118): Pfam Name: Pfam Description:  Ribosomal protein L7Ae/L30e/S12e/Gadd45 family
  misc_feature (1)..(168): NCBI GI NO: 548774 NR Description: 60S RIBOSOMAL PROTEIN L7A
  misc_feature (1)..(167): NCBI GI NO: 15229338 NR Description: 60S RIBOSOMAL PROTEIN L7A protein
  misc_feature (1)..(167): NCBI GI NO: 15226635 NR Description: 60S ribosomal protein L7A; protein id: At2g47610
  misc_feature (1)..(168): NCBI GI NO: 20161741 NR Description: putative 60S ribosomal protein
  misc_feature (1)..(166): NCBI GI NO: 17530825 NR Description: Ribosomal protein L7A CG3314-PD
  misc_feature (1)..(166): NCBI GI NO: 1173062 NR Description: 60S RIBOSOMAL PROTEIN L7A
  misc_feature (1)..(167): NCBI GI NO: 34853132 NR Description: similar to 60S ribosomal protein L7a
  misc_feature (1)..(167): NCBI GI NO: 4506661 NR Description: ribosomal protein L7a
  misc_feature (1)..(167): NCBI GI NO: 7305443 NR Description: ribosomal protein L7a; surfeit 3 [Mus musculus]
  misc_feature (1)..(167): NCBI GI NO: 6094094 NR Description: 60S RIBOSOMAL PROTEIN L7A
MLLKYRPEDKAAKKERLLKRAQAENEGKTVESKKPIVVKYGLNHVTYLIEQNKAQLVVIAHDVDPIELVVWLPALCRKMEVPYCIVKGKARLGSIVHKKNASVLCLTTVKNEDKLEFSKILEAIKANFNDKFDEVRKKWGGGIMGSKSQAKTKAREKLLAKEAAQRMT

SEQ ID NO: 33850 - DNA, 842 bp, Zea mays subsp. mays
  misc_feature (1)..(842): Ceres Seq. ID no. 12413106
aaaacccaatccatccaaacccatttccctcgctcccatcccgtcccgccccttgtctcttccgcttccccccgaccccgcgcgccgcggaccagcagccatgtcgtgctcccacctctccaccgcctggtcctcctcggcgctcgccagcagcgcctccaccacccgacggcgctcccccccgcgctcgggtctcctggtgcggtgttccctccgtgagctccgcacccgcatcgactccgtcaggaacacgcagaagatcacggaggccatgaagctggtggccgccgccaaggtccggcgcgcgcaggaggccgtcgtctcctctcgccctttctcggaggcgctggtggaggtgctctacaacatgaaccaggagatccagacggaggacatcgacctgcccctcacccgcacccgccccgtcaagaaggtggccctcgtggtcctgaccggcgagcgcggcctctgcgggagcttcaacaacaacgtgctcaagaaggcggaaacccgcatcgatgagctcaagcagctgggcctccagtacaccgtcgtcagcgtggggaagaagggcaacgcctacttccagcgccgcccctacatcccgttggagcgcgatctagaggactgccactggctcaacatcgctgcccggcctgatggcctcatgtgtggcaagcacgcctagttatagtatctgtgggagaaacgggactcacgtatatatgtgtgctgtgtatatagtgcggtgatgccatcttgtttgcttgcatatgcatactactgaacatatgatgatgaataaggtcatgccaactttagggcaaaaaataaacatactt

SEQ ID NO: 33851 - protein, 228 aa, Zea mays subsp. mays
  peptide (1)..(228): Ceres Seq. ID no. 12413107
  misc_feature (70)..(208): Pfam Name: Pfam Description:  ATP synthase
  misc_feature (34)..(208): NCBI GI NO: 27818005 NR Description: OSJNBb0041J06.11
  misc_feature (34)..(208): NCBI GI NO: 18412632 NR Description: coded for by A
  misc_feature (31)..(208): NCBI GI NO: 114640 NR Description: ATP synthase gamma chain, chloroplast precursor
  misc_feature (31)..(208): NCBI GI NO: 231610 NR Description: ATP synthase gamma chain, chloroplast precursor
  misc_feature (34)..(205): NCBI GI NO: 114643 NR Description: ATP synthase gamma chain, chloroplast precursor
  misc_feature (67)..(205): NCBI GI NO: 755801 NR Description: ATP synthase [Spinacia oleracea]
  misc_feature (58)..(208): NCBI GI NO: 15218281 NR Description: ATP synthase gamma-subunit, putative
  misc_feature (91)..(208): NCBI GI NO: 5708095 NR Description: ATP synthase gamma chain, chloroplast precursor
  misc_feature (62)..(198): NCBI GI NO: 114638 NR Description: ATP synthase gamma chain, chloroplast precursor
  misc_feature (62)..(198): NCBI GI NO: 228698 NR Description: CF1 ATP synthase:SUBUNIT=gamma
KPNPSKPISLAPIPSRPLSLPLPPDPARRGPAAMSCSHLSTAWSSSALASSASTTRRRSPPRSGLLVRCSLRELRTRIDSVRNTQKITEAMKLVAAAKVRRAQEAVVSSRPFSEALVEVLYNMNQEIQTEDIDLPLTRTRPVKKVALVVLTGERGLCGSFNNNVLKKAETRIDELKQLGLQYTVVSVGKKGNAYFQRRPYIPLERDLEDCHWLNIAARPDGLMCGKHA

SEQ ID NO: 33852 - protein, 195 aa, Zea mays subsp. mays
  peptide (1)..(195): Ceres Seq. ID no. 12413108
  misc_feature (37)..(175): Pfam Name: Pfam Description:  ATP synthase
  misc_feature (1)..(175): NCBI GI NO: 27818005 NR Description: OSJNBb0041J06.11
  misc_feature (1)..(175): NCBI GI NO: 18412632 NR Description: coded for by A
  misc_feature (1)..(175): NCBI GI NO: 114640 NR Description: ATP synthase gamma chain, chloroplast precursor
  misc_feature (1)..(175): NCBI GI NO: 231610 NR Description: ATP synthase gamma chain, chloroplast precursor
  misc_feature (1)..(172): NCBI GI NO: 114643 NR Description: ATP synthase gamma chain, chloroplast precursor
  misc_feature (34)..(172): NCBI GI NO: 755801 NR Description: ATP synthase [Spinacia oleracea]
  misc_feature (25)..(175): NCBI GI NO: 15218281 NR Description: ATP synthase gamma-subunit, putative
  misc_feature (58)..(175): NCBI GI NO: 5708095 NR Description: ATP synthase gamma chain, chloroplast precursor
  misc_feature (29)..(165): NCBI GI NO: 114638 NR Description: ATP synthase gamma chain, chloroplast precursor
  misc_feature (29)..(165): NCBI GI NO: 228698 NR Description: CF1 ATP synthase:SUBUNIT=gamma
MSCSHLSTAWSSSALASSASTTRRRSPPRSGLLVRCSLRELRTRIDSVRNTQKITEAMKLVAAAKVRRAQEAVVSSRPFSEALVEVLYNMNQEIQTEDIDLPLTRTRPVKKVALVVLTGERGLCGSFNNNVLKKAETRIDELKQLGLQYTVVSVGKKGNAYFQRRPYIPLERDLEDCHWLNIAARPDGLMCGKHA

SEQ ID NO: 33853 - protein, 138 aa, Zea mays subsp. mays
  peptide (1)..(138): Ceres Seq. ID no. 12413109
  misc_feature (1)..(118): Pfam Name: Pfam Description:  ATP synthase
  misc_feature (1)..(118): NCBI GI NO: 27818005 NR Description: OSJNBb0041J06.11
  misc_feature (1)..(118): NCBI GI NO: 18412632 NR Description: coded for by A
  misc_feature (1)..(118): NCBI GI NO: 114640 NR Description: ATP synthase gamma chain, chloroplast precursor
  misc_feature (1)..(118): NCBI GI NO: 231610 NR Description: ATP synthase gamma chain, chloroplast precursor
  misc_feature (1)..(115): NCBI GI NO: 114643 NR Description: ATP synthase gamma chain, chloroplast precursor
  misc_feature (1)..(115): NCBI GI NO: 755801 NR Description: ATP synthase [Spinacia oleracea]
  misc_feature (1)..(118): NCBI GI NO: 15218281 NR Description: ATP synthase gamma-subunit, putative
  misc_feature (1)..(118): NCBI GI NO: 5708095 NR Description: ATP synthase gamma chain, chloroplast precursor
  misc_feature (1)..(108): NCBI GI NO: 114638 NR Description: ATP synthase gamma chain, chloroplast precursor
  misc_feature (1)..(108): NCBI GI NO: 228698 NR Description: CF1 ATP synthase:SUBUNIT=gamma
MKLVAAAKVRRAQEAVVSSRPFSEALVEVLYNMNQEIQTEDIDLPLTRTRPVKKVALVVLTGERGLCGSFNNNVLKKAETRIDELKQLGLQYTVVSVGKKGNAYFQRRPYIPLERDLEDCHWLNIAARPDGLMCGKHA

SEQ ID NO: 33854 - DNA, 773 bp, Zea mays subsp. mays
  misc_feature (1)..(773): Ceres Seq. ID no. 13492259
aagtcagtctcactcaagtaaagtggacgccaagtcagtcacactcacaccaccgtagcacacaccagtacaccacacactcgcctttccgatcccatccctctccagccaccttcctccgctcgccgtgcttctgcttcctccgccaccaccgccggcatggctgcgcgctgcccctacttcgccgtcgaggagtcctcccgcggcatccgctcgggggagtccccggccgcggcgctccgccggatcctcgcgacgcctggtgcgcaccaggcgccctgctgctacgacgcgctcggcgcgcgcctcgtcgagcgcgcggggtttccgatcgggttcatgggcggtttctgtgtttctgccgcgcgacttggcttgcctgatgttggcctcatttcctatggagaaatggtagatcaagggcgtctcatcaatgaagctgtttcaatcccagtgattggtgatggagacaatggttacggaaactctatgaatatcaagagaaccataaaaggatatatcaatgctggttttgctggaattatgcttgaggatcaggtggcacctaaagcatgtggacatactgaaggaaggaaagtcatatcaagggaggaagctgtcatgcacataaaagctgctgtagatgctaggaaagagagtggtagtagggggcacgagtaaggaggggtttatacaatgatctaatctagtgtgttaagtctgggtgcaatttatttggtggatttagtggagcttgagtgagatgatttggt

SEQ ID NO: 33855 - protein, 173 aa, Zea mays subsp. mays
  peptide (1)..(173): Ceres Seq. ID no. 13492260
  misc_feature (17)..(165): Pfam Name: Pfam Description:  Isocitrate lyase family
  misc_feature (1)..(169): NCBI GI NO: 38347227 NR Description: OSJNBa0044M19.9
  misc_feature (1)..(169): NCBI GI NO: 32490267 NR Description: OSJNBb0116K07.9
  misc_feature (10)..(169): NCBI GI NO: 30689278 NR Description: carboxyphosphonoenolpyruvate mutase -related
  misc_feature (10)..(169): NCBI GI NO: 30689282 NR Description: carboxyphosphonoenolpyruvate mutase -related
  misc_feature (10)..(169): NCBI GI NO: 25408843 NR Description: probable carboxyphosphonoenolpyruvate mutase
  misc_feature (16)..(164): NCBI GI NO: 33599708 NR Description: carboxyvinyl-carboxyphosphonate phosphorylmutase
  misc_feature (22)..(168): NCBI GI NO: 23043034 NR Description: hypothetical protein
  misc_feature (40)..(166): NCBI GI NO: 40747280 NR Description: hypothetical protein AN9369.2
  misc_feature (12)..(166): NCBI GI NO: 40739091 NR Description: hypothetical protein AN6882.2
  misc_feature (22)..(168): NCBI GI NO: 17229355 NR Description: carboxyphosphonoenolpyruvate phosphonomutase
MAARCPYFAVEESSRGIRSGESPAAALRRILATPGAHQAPCCYDALGARLVERAGFPIGFMGGFCVSAARLGLPDVGLISYGEMVDQGRLINEAVSIPVIGDGDNGYGNSMNIKRTIKGYINAGFAGIMLEDQVAPKACGHTEGRKVISREEAVMHIKAAVDARKESGSRGHE

SEQ ID NO: 33856 - protein, 126 aa, Zea mays subsp. mays
  peptide (1)..(126): Ceres Seq. ID no. 13492261
VSLTQVKWTPSQSHSHHRSTHQYTTHSPFRSHPSPATFLRSPCFCFLRHHRRHGCALPLLRRRGVLPRHPLGGVPGRGAPPDPRDAWCAPGALLLRRARRAPRRARGVSDRVHGRFLCFCRATWLA

SEQ ID NO: 33857 - protein, 113 aa, Zea mays subsp. mays
  peptide (1)..(113): Ceres Seq. ID no. 13492262
  misc_feature (1)..(105): Pfam Name: Pfam Description:  Isocitrate lyase family
  misc_feature (1)..(109): NCBI GI NO: 38347227 NR Description: OSJNBa0044M19.9
  misc_feature (1)..(109): NCBI GI NO: 32490267 NR Description: OSJNBb0116K07.9
  misc_feature (1)..(109): NCBI GI NO: 30689278 NR Description: carboxyphosphonoenolpyruvate mutase -related
  misc_feature (1)..(109): NCBI GI NO: 30689282 NR Description: carboxyphosphonoenolpyruvate mutase -related
  misc_feature (1)..(109): NCBI GI NO: 25408843 NR Description: probable carboxyphosphonoenolpyruvate mutase
  misc_feature (1)..(104): NCBI GI NO: 33599708 NR Description: carboxyvinyl-carboxyphosphonate phosphorylmutase
  misc_feature (1)..(108): NCBI GI NO: 23043034 NR Description: hypothetical protein
  misc_feature (1)..(106): NCBI GI NO: 40747280 NR Description: hypothetical protein AN9369.2
  misc_feature (1)..(106): NCBI GI NO: 40739091 NR Description: hypothetical protein AN6882.2
  misc_feature (1)..(108): NCBI GI NO: 17229355 NR Description: carboxyphosphonoenolpyruvate phosphonomutase
MGGFCVSAARLGLPDVGLISYGEMVDQGRLINEAVSIPVIGDGDNGYGNSMNIKRTIKGYINAGFAGIMLEDQVAPKACGHTEGRKVISREEAVMHIKAAVDARKESGSRGHE

SEQ ID NO: 33858 - DNA, 1619 bp, Zea mays subsp. mays
  misc_feature (1)..(1619): Ceres Seq. ID no. 12414375
gggtcgacaacaatttgccgggcacacccaagacccgcggaagcccacgacgacaagcctccatcgcctcttgttgtttgcgggccccatacgtcagagaccacaagcccgaggcttaactctccctgccgctaatccctcgcgccgccggagggaagcaagagatagatctgtccgcggccatggcggcggcggcggcggcggcggagcaaggcgtggacgccgcgaggaaagaggaggaggaggagcaggtagtgaatccgtgggaggtgtcggcggggaagggcggcatcgactacgacaagctcgtggaccagttcggctgccagcgcatcgacgacgcgctcgtggaccgcatcgcacgcctcaccgcccgaccaccgcactgcttcctccgccgaggcctcttcttcgcccaccgtgatttgaacgagatactggatttgtatgagaacgggcagaagttctacctctacacggggagggggccctcgtcggaggccctgcacctcggccacctcatccccttcatgttcacaaaatacttgcaggaggcttttaaggtgcccctagttatacaactgactgacgatgagaagtacttgtggaaaaacttgactattcaggaaagtaaaaggcttgcccgtgaaaatgctaaagatattatagcatgtggttttgacattgaaagaacattcattttctctgatttttcttttgttggaggtgctttttatgaaaacatgatgcaagttgccagatgtgtaactatgaataaggctattggaatatttgggttcaatcttgaggatcacataagaaaggttagctttcctccagtgcaggcagtcccatcattcccttcttcatttccccatctcttcgctggcaaggaccaactgcggtgtcttatcccatgtgcaatagatcaggatccatattttaggatgactcgtgatgttgctcctagaattggttatcagaaaccatcactgattgaatctagattttttcctgctcttcagggggagaacacaaaaatgtcagctagtgacgcaaattcggcgatatacgtgacagatagtgctaaagaaataaagacaaaggtgaataaatatgccttctcaggtggccaggactcaatagagttccatagaaaacttggcgctaaccttgatgtggatgtcccaatcaaatacctgaacttcttccttgaagatgatgacgagcttgcgcacataaaaaaggagtacaaggagggaaggatgttgactggtgaagtgaagcaacggcttattgcagttctatctgagattgttgctagacaccagagagctagagctcaagtgaccgaagagatggtcgatgcattcatggcagtgaggcctcttcccaatatgtttggctgagcatcacggcgacaacttgaacaaacatttttgttatcagggagaattttaagagtctttagaattgtcgtgccaccataagtatcccctgtgttttacttcttcgggatttaggcaaacctggccaaacatcccatgtggtggctgtggttgattttgtaaactcatacttgatatggtatcaatgattcaattcagacattttttttc

SEQ ID NO: 33859 - protein, 408 aa, Zea mays subsp. mays
  peptide (1)..(408): Ceres Seq. ID no. 12414376
  misc_feature (16)..(407): NCBI GI NO: 15229319 NR Description: putative tryptophanyl-tRNA synthetase
  misc_feature (1)..(403): NCBI GI NO: 32709 NR Description: IFP53 [Homo sapiens]
  misc_feature (1)..(403): NCBI GI NO: 135191 NR Description: Tryptophanyl-tRNA synthetase
  misc_feature (1)..(403): NCBI GI NO: 4759316 NR Description: tryptophanyl-tRNA synthetase
  misc_feature (19)..(403): NCBI GI NO: 2851538 NR Description: TRYPTOPHANYL-TRNA SYNTHETASE
  misc_feature (4)..(403): NCBI GI NO: 37590880 NR Description: Unknown (protein for MGC:73274) [Danio rerio]
  misc_feature (1)..(403): NCBI GI NO: 837 NR Description: tryptophan tRNA ligase (AA 1-459) [Bos taurus]
  misc_feature (1)..(403): NCBI GI NO: 27806353 NR Description: tryptophanyl-tRNA synthetase [Bos taurus]
  misc_feature (19)..(403): NCBI GI NO: 7428462 NR Description: tryptophan-tRNA ligase (EC 6.1.1.2)
  misc_feature (1)..(403): NCBI GI NO: 12835778 NR Description: unnamed protein product [Mus musculus]
MAAAAAAAEQGVDAARKEEEEEQVVNPWEVSAGKGGIDYDKLVDQFGCQRIDDALVDRIARLTARPPHCFLRRGLFFAHRDLNEILDLYENGQKFYLYTGRGPSSEALHLGHLIPFMFTKYLQEAFKVPLVIQLTDDEKYLWKNLTIQESKRLARENAKDIIACGFDIERTFIFSDFSFVGGAFYENMMQVARCVTMNKAIGIFGFNLEDHIRKVSFPPVQAVPSFPSSFPHLFAGKDQLRCLIPCAIDQDPYFRMTRDVAPRIGYQKPSLIESRFFPALQGENTKMSASDANSAIYVTDSAKEIKTKVNKYAFSGGQDSIEFHRKLGANLDVDVPIKYLNFFLEDDDELAHIKKEYKEGRMLTGEVKQRLIAVLSEIVARHQRARAQVTEEMVDAFMAVRPLPNMFG

SEQ ID NO: 33860 - protein, 292 aa, Zea mays subsp. mays
  peptide (1)..(292): Ceres Seq. ID no. 12414377
  misc_feature (1)..(291): NCBI GI NO: 15229319 NR Description: putative tryptophanyl-tRNA synthetase
  misc_feature (1)..(287): NCBI GI NO: 32709 NR Description: IFP53 [Homo sapiens]
  misc_feature (1)..(287): NCBI GI NO: 135191 NR Description: Tryptophanyl-tRNA synthetase
  misc_feature (1)..(287): NCBI GI NO: 4759316 NR Description: tryptophanyl-tRNA synthetase
  misc_feature (1)..(287): NCBI GI NO: 2851538 NR Description: TRYPTOPHANYL-TRNA SYNTHETASE
  misc_feature (1)..(287): NCBI GI NO: 37590880 NR Description: Unknown (protein for MGC:73274) [Danio rerio]
  misc_feature (1)..(287): NCBI GI NO: 837 NR Description: tryptophan tRNA ligase (AA 1-459) [Bos taurus]
  misc_feature (1)..(287): NCBI GI NO: 27806353 NR Description: tryptophanyl-tRNA synthetase [Bos taurus]
  misc_feature (1)..(287): NCBI GI NO: 7428462 NR Description: tryptophan-tRNA ligase (EC 6.1.1.2)
  misc_feature (1)..(287): NCBI GI NO: 12835778 NR Description: unnamed protein product [Mus musculus]
MFTKYLQEAFKVPLVIQLTDDEKYLWKNLTIQESKRLARENAKDIIACGFDIERTFIFSDFSFVGGAFYENMMQVARCVTMNKAIGIFGFNLEDHIRKVSFPPVQAVPSFPSSFPHLFAGKDQLRCLIPCAIDQDPYFRMTRDVAPRIGYQKPSLIESRFFPALQGENTKMSASDANSAIYVTDSAKEIKTKVNKYAFSGGQDSIEFHRKLGANLDVDVPIKYLNFFLEDDDELAHIKKEYKEGRMLTGEVKQRLIAVLSEIVARHQRARAQVTEEMVDAFMAVRPLPNMFG

SEQ ID NO: 33861 - protein, 221 aa, Zea mays subsp. mays
  peptide (1)..(221): Ceres Seq. ID no. 12414378
  misc_feature (1)..(220): NCBI GI NO: 15229319 NR Description: putative tryptophanyl-tRNA synthetase
  misc_feature (1)..(216): NCBI GI NO: 32709 NR Description: IFP53 [Homo sapiens]
  misc_feature (1)..(216): NCBI GI NO: 135191 NR Description: Tryptophanyl-tRNA synthetase
  misc_feature (1)..(216): NCBI GI NO: 4759316 NR Description: tryptophanyl-tRNA synthetase
  misc_feature (1)..(216): NCBI GI NO: 2851538 NR Description: TRYPTOPHANYL-TRNA SYNTHETASE
  misc_feature (1)..(216): NCBI GI NO: 37590880 NR Description: Unknown (protein for MGC:73274) [Danio rerio]
  misc_feature (1)..(216): NCBI GI NO: 837 NR Description: tryptophan tRNA ligase (AA 1-459) [Bos taurus]
  misc_feature (1)..(216): NCBI GI NO: 27806353 NR Description: tryptophanyl-tRNA synthetase [Bos taurus]
  misc_feature (1)..(216): NCBI GI NO: 7428462 NR Description: tryptophan-tRNA ligase (EC 6.1.1.2)
  misc_feature (1)..(216): NCBI GI NO: 12835778 NR Description: unnamed protein product [Mus musculus]
MMQVARCVTMNKAIGIFGFNLEDHIRKVSFPPVQAVPSFPSSFPHLFAGKDQLRCLIPCAIDQDPYFRMTRDVAPRIGYQKPSLIESRFFPALQGENTKMSASDANSAIYVTDSAKEIKTKVNKYAFSGGQDSIEFHRKLGANLDVDVPIKYLNFFLEDDDELAHIKKEYKEGRMLTGEVKQRLIAVLSEIVARHQRARAQVTEEMVDAFMAVRPLPNMFG

SEQ ID NO: 33862 - DNA, 1254 bp, Zea mays subsp. mays
  misc_feature (1)..(1254): Ceres Seq. ID no. 12411619
atggaaccgtacctccagtggttagggatacagctcatggagctcggcggtaccgcaatgtcgctgctgctgctgctcgtgctcgccgcgtcgccattgcagcaggccagggcggttggcggcggcaggccgcgggtgccggccatcctggtgttcggcgactccatcgtggacacgggcaacaacaacgccgtcctcacgctcaccaagtccaacttcaggccatacggcaaggacctcaacggcggcgtacccaccggacgcttctccaacggccggattccgacggacttcgtagcttcacggctcggcttgaaagatctggttccggcgtatctcggcaccgacctcagcgacgacgacctctgcacgggcgtcagcttcgcgtctgggggcaccggctacgacccgctcacctccactctcgtggaggagctcaacatgttcgcggagtacaaggagaggctcgcaggggtcgtcggagacgaggccgccgccgcaggaatcgtggccgaaagcctgttccttgtctgcgccgggtcggacgacatcgccaacaactactacctcgcccccgtcagacctctgcagtacgacatctcggcgtacgtggatttccttgtggagcaggcctgcgacttcattaggcaactgtaccagcaaggggccaggaggatcgcggtcctggggatgccgccggtcgggtgcgtgccctcgcagcggaccctcgccggcggcctagccagggactgcgaccccgctcgcaaccacgcggcgcagctgtacaactccaggctgaaggaggaggtagtgctgctccagaaggagctggcgtgccagagaatcggctacgtggatatctacgacgtcctgcaggacatgatcacgaacccctgcaaatacggcttcgaggtctccacgagaggatgctgcggcaccggggacttggaggtgtcgctcctgtgcaaccagctgacggcgccgacgtgccctgacgaccggaaatacgtcttctgggacagcttccatcccaccgagaaagcatacgagatcatcgtggactacctgttcccgagatacatagagaacctgctataattacttctgctttaccgtcgcttctttaattcgatcgtttctagttgttgtcaagtttagacatgccgtctttgtttcccaatttaagcttttgctttaaaactcaagacttttcaaggaaatgaaatgacacctgctagcttgttgcaagctgtt

SEQ ID NO: 33863 - protein, 365 aa, Zea mays subsp. mays
  peptide (1)..(365): Ceres Seq. ID no. 12411620
  misc_feature (49)..(356): Pfam Name: Pfam Description:  GDSL-like Lipase/Acylhydrolase
  misc_feature (22)..(365): NCBI GI NO: 30102970 NR Description: putative lipase/acylhydrolase
  misc_feature (19)..(360): NCBI GI NO: 37534726 NR Description: putative anter-specific proline-rich protein
  misc_feature (46)..(365): NCBI GI NO: 15222901 NR Description: family II extracellular lipase 3
  misc_feature (46)..(365): NCBI GI NO: 26449364 NR Description: putative family II lipase EXL3
  misc_feature (46)..(356): NCBI GI NO: 25404994 NR Description: protein T4O12.13 [imported] - Arabidopsis thaliana
  misc_feature (142)..(361): NCBI GI NO: 8778807 NR Description: T4O12.12 [Arabidopsis thaliana]
  misc_feature (142)..(361): NCBI GI NO: 18410956 NR Description: family II extracellular lipase 2
  misc_feature (47)..(142): NCBI GI NO: 8778807 NR Description: T4O12.12 [Arabidopsis thaliana]
  misc_feature (47)..(142): NCBI GI NO: 18410956 NR Description: family II extracellular lipase 2
  misc_feature (22)..(361): NCBI GI NO: 28393626 NR Description: putative family II extracellular lipase 1 (EXL1)
MEPYLQWLGIQLMELGGTAMSLLLLLVLAASPLQQARAVGGGRPRVPAILVFGDSIVDTGNNNAVLTLTKSNFRPYGKDLNGGVPTGRFSNGRIPTDFVASRLGLKDLVPAYLGTDLSDDDLCTGVSFASGGTGYDPLTSTLVEELNMFAEYKERLAGVVGDEAAAAGIVAESLFLVCAGSDDIANNYYLAPVRPLQYDISAYVDFLVEQACDFIRQLYQQGARRIAVLGMPPVGCVPSQRTLAGGLARDCDPARNHAAQLYNSRLKEEVVLLQKELACQRIGYVDIYDVLQDMITNPCKYGFEVSTRGCCGTGDLEVSLLCNQLTAPTCPDDRKYVFWDSFHPTEKAYEIIVDYLFPRYIENLL

SEQ ID NO: 33864 - protein, 353 aa, Zea mays subsp. mays
  peptide (1)..(353): Ceres Seq. ID no. 12411621
  misc_feature (37)..(344): Pfam Name: Pfam Description:  GDSL-like Lipase/Acylhydrolase
  misc_feature (10)..(353): NCBI GI NO: 30102970 NR Description: putative lipase/acylhydrolase
  misc_feature (7)..(348): NCBI GI NO: 37534726 NR Description: putative anter-specific proline-rich protein
  misc_feature (34)..(353): NCBI GI NO: 15222901 NR Description: family II extracellular lipase 3
  misc_feature (34)..(353): NCBI GI NO: 26449364 NR Description: putative family II lipase EXL3
  misc_feature (34)..(344): NCBI GI NO: 25404994 NR Description: protein T4O12.13 [imported] - Arabidopsis thaliana
  misc_feature (130)..(349): NCBI GI NO: 8778807 NR Description: T4O12.12 [Arabidopsis thaliana]
  misc_feature (130)..(349): NCBI GI NO: 18410956 NR Description: family II extracellular lipase 2
  misc_feature (35)..(130): NCBI GI NO: 8778807 NR Description: T4O12.12 [Arabidopsis thaliana]
  misc_feature (35)..(130): NCBI GI NO: 18410956 NR Description: family II extracellular lipase 2
  misc_feature (10)..(349): NCBI GI NO: 28393626 NR Description: putative family II extracellular lipase 1 (EXL1)
MELGGTAMSLLLLLVLAASPLQQARAVGGGRPRVPAILVFGDSIVDTGNNNAVLTLTKSNFRPYGKDLNGGVPTGRFSNGRIPTDFVASRLGLKDLVPAYLGTDLSDDDLCTGVSFASGGTGYDPLTSTLVEELNMFAEYKERLAGVVGDEAAAAGIVAESLFLVCAGSDDIANNYYLAPVRPLQYDISAYVDFLVEQACDFIRQLYQQGARRIAVLGMPPVGCVPSQRTLAGGLARDCDPARNHAAQLYNSRLKEEVVLLQKELACQRIGYVDIYDVLQDMITNPCKYGFEVSTRGCCGTGDLEVSLLCNQLTAPTCPDDRKYVFWDSFHPTEKAYEIIVDYLFPRYIENLL

SEQ ID NO: 33865 - protein, 346 aa, Zea mays subsp. mays
  peptide (1)..(346): Ceres Seq. ID no. 12411622
  misc_feature (30)..(337): Pfam Name: Pfam Description:  GDSL-like Lipase/Acylhydrolase
  misc_feature (3)..(346): NCBI GI NO: 30102970 NR Description: putative lipase/acylhydrolase
  misc_feature (1)..(341): NCBI GI NO: 37534726 NR Description: putative anter-specific proline-rich protein
  misc_feature (27)..(346): NCBI GI NO: 15222901 NR Description: family II extracellular lipase 3
  misc_feature (27)..(346): NCBI GI NO: 26449364 NR Description: putative family II lipase EXL3
  misc_feature (27)..(337): NCBI GI NO: 25404994 NR Description: protein T4O12.13 [imported] - Arabidopsis thaliana
  misc_feature (123)..(342): NCBI GI NO: 8778807 NR Description: T4O12.12 [Arabidopsis thaliana]
  misc_feature (123)..(342): NCBI GI NO: 18410956 NR Description: family II extracellular lipase 2
  misc_feature (28)..(123): NCBI GI NO: 8778807 NR Description: T4O12.12 [Arabidopsis thaliana]
  misc_feature (28)..(123): NCBI GI NO: 18410956 NR Description: family II extracellular lipase 2
  misc_feature (3)..(342): NCBI GI NO: 28393626 NR Description: putative family II extracellular lipase 1 (EXL1)
MSLLLLLVLAASPLQQARAVGGGRPRVPAILVFGDSIVDTGNNNAVLTLTKSNFRPYGKDLNGGVPTGRFSNGRIPTDFVASRLGLKDLVPAYLGTDLSDDDLCTGVSFASGGTGYDPLTSTLVEELNMFAEYKERLAGVVGDEAAAAGIVAESLFLVCAGSDDIANNYYLAPVRPLQYDISAYVDFLVEQACDFIRQLYQQGARRIAVLGMPPVGCVPSQRTLAGGLARDCDPARNHAAQLYNSRLKEEVVLLQKELACQRIGYVDIYDVLQDMITNPCKYGFEVSTRGCCGTGDLEVSLLCNQLTAPTCPDDRKYVFWDSFHPTEKAYEIIVDYLFPRYIENLL

SEQ ID NO: 33866 - DNA, 958 bp, Zea mays subsp. mays; identical to SEQ ID NO: 25880
  misc_feature (1)..(958): Ceres Seq. ID no. 13571162

SEQ ID NO: 33867 - protein, 231 aa, Zea mays subsp. mays; identical to SEQ ID NO: 25881
  peptide (1)..(231): Ceres Seq. ID no. 13571163
  misc_feature (45)..(211): Pfam Name: Pfam Description:  Chromadorea ALT protein
  misc_feature (21)..(224): NCBI GI NO: 34894890 NR Description: B1140D12.10
  misc_feature (25)..(230): NCBI GI NO: 18401985 NR Description: expressed protein [Arabidopsis thaliana]
  misc_feature (59)..(224): NCBI GI NO: 35210494 NR Description: aspartic acid-rich protein aspolin2
  misc_feature (59)..(224): NCBI GI NO: 35210492 NR Description: aspartic acid-rich protein aspolin1
  misc_feature (59)..(224): NCBI GI NO: 35210494 NR Description: aspartic acid-rich protein aspolin2
  misc_feature (50)..(224): NCBI GI NO: 33284873 NR Description: SI:bZ1G18
  misc_feature (52)..(224): NCBI GI NO: 35210492 NR Description: aspartic acid-rich protein aspolin1
  misc_feature (52)..(224): NCBI GI NO: 35210494 NR Description: aspartic acid-rich protein aspolin2
  misc_feature (59)..(224): NCBI GI NO: 35210494 NR Description: aspartic acid-rich protein aspolin2
  misc_feature (59)..(224): NCBI GI NO: 35210492 NR Description: aspartic acid-rich protein aspolin1

SEQ ID NO: 33868 - protein, 211 aa, Zea mays subsp. mays; identical to SEQ ID NO: 25882
  peptide (1)..(211): Ceres Seq. ID no. 13571164
  misc_feature (25)..(191): Pfam Name: Pfam Description:  Chromadorea ALT protein
  misc_feature (1)..(204): NCBI GI NO: 34894890 NR Description: B1140D12.10
  misc_feature (5)..(210): NCBI GI NO: 18401985 NR Description: expressed protein [Arabidopsis thaliana]
  misc_feature (39)..(204): NCBI GI NO: 35210494 NR Description: aspartic acid-rich protein aspolin2
  misc_feature (39)..(204): NCBI GI NO: 35210492 NR Description: aspartic acid-rich protein aspolin1
  misc_feature (39)..(204): NCBI GI NO: 35210494 NR Description: aspartic acid-rich protein aspolin2
  misc_feature (30)..(204): NCBI GI NO: 33284873 NR Description: SI:bZ1G18
  misc_feature (32)..(204): NCBI GI NO: 35210492 NR Description: aspartic acid-rich protein aspolin1
  misc_feature (32)..(204): NCBI GI NO: 35210494 NR Description: aspartic acid-rich protein aspolin2
  misc_feature (39)..(204): NCBI GI NO: 35210494 NR Description: aspartic acid-rich protein aspolin2
  misc_feature (39)..(204): NCBI GI NO: 35210492 NR Description: aspartic acid-rich protein aspolin1

SEQ ID NO: 33869 - protein, 195 aa, Zea mays subsp. mays; identical to SEQ ID NO: 25883
  peptide (1)..(195): Ceres Seq. ID no. 13571165
  misc_feature (9)..(175): Pfam Name: Pfam Description:  Chromadorea ALT protein
  misc_feature (1)..(188): NCBI GI NO: 34894890 NR Description: B1140D12.10
  misc_feature (1)..(194): NCBI GI NO: 18401985 NR Description: expressed protein [Arabidopsis thaliana]
  misc_feature (23)..(188): NCBI GI NO: 35210494 NR Description: aspartic acid-rich protein aspolin2
  misc_feature (23)..(188): NCBI GI NO: 35210492 NR Description: aspartic acid-rich protein aspolin1
  misc_feature (23)..(188): NCBI GI NO: 35210494 NR Description: aspartic acid-rich protein aspolin2
  misc_feature (14)..(188): NCBI GI NO: 33284873 NR Description: SI:bZ1G18
  misc_feature (16)..(188): NCBI GI NO: 35210492 NR Description: aspartic acid-rich protein aspolin1
  misc_feature (16)..(188): NCBI GI NO: 35210494 NR Description: aspartic acid-rich protein aspolin2
  misc_feature (23)..(188): NCBI GI NO: 35210494 NR Description: aspartic acid-rich protein aspolin2
  misc_feature (23)..(188): NCBI GI NO: 35210492 NR Description: aspartic acid-rich protein aspolin1

SEQ ID NO: 33870 - DNA, 1617 bp, Zea mays subsp. mays
  misc_feature (1)..(1617): Ceres Seq. ID no. 12411615
aaccggacaaatcaccccgtcgtctcgtcccgtagtcactcgcagagtcgcagtcgcagcccctgcgcccaccgggatcgtgatggagagctgggtccgcgcggtgggtggaggccatccactcctctcgctcccagacagtcatctacctcgccgggcggtgcatcccaggcgctcggttggctcctctccgtgcccggcgcttcgggcaccgtcctcgaggtcgtcgtgccatactctagggcctccatggcgcagctccttggcaagatgcccctgcaattcactagcaagcaggctgcagaggacatggcactggccgcatacaatcgagcactcaagctttctggaccaggtctgcaagttatgggtgttggatttactgggtcactggcgagctcacgtccaaaacatggtgaccacaggttttacgtgtcaacatggacacataattgtctcaggacatcacatgttaccttgtcgaagggtttacggagtagggaggaagaagacaaggtttcaagctactttttgcttaaggcaatagcagatacctgcagagtttctgcaaccattcagtcagacattcacaaatctgaaattccagaagaaatcatggaacaatttgatgaagatcaagaactccagcaagttattaatgggcaagtttgcatgaaagtatataattttgctgctccggcggaaagtaacttgaacagaaaaataattctgcctggttcgttcaaccccttgcacgatggtcaccttagattgctagaagctgcagtaagcatgtgtgatgatgggcttccattctttgagatatcagcaattaatgctgataaacctccactatctattgcagaaattaagaggcgtgttgagcaatttagaaaagcagggaagaatgtgattatatctaaccagccatacttctataagaaagcagaacttttcccaggaagcgcttttataattggtgcagacactgcagcaaggcttgttaatcctaagtactatggaggagattacaacagaatgctggagatacttctcgaatgtaagagcatagggactacttttcttgttggtggtcgaaagattgaaggagatttcaaggtccttgagaacttagacattccagaagagctgagagaaatgttcatttctattccggaggaaaagtttcgcatagatatttcatctactgaaataagaaagagccaagggctctgatgtatcaagtggtcgtattctacagcagatttgggatgattctccacgactatagaagattatgataggtccattcatgcatccttgcaaaggaactgttgatgtattctcagggagaatattttatttaacttttgtcttgactgggccccttggtattttgttcagcaaattggaatcaatcctcttgtagaacctcttgatgtcttcactaccccttgcggctaggtggtcaacctctgtctcatatctttggtacaacgctggcaaagtgtgggcgcagagaaatcctgtggatggaatataagaattgttaaatgtatgtcacaactgctttatatattgtcttgccttgttataaaagtcacatttttctgcgct

SEQ ID NO: 33871 - protein, 411 aa, Zea mays subsp. mays
  peptide (1)..(411): Ceres Seq. ID no. 12411616
  misc_feature (53)..(410): NCBI GI NO: 30677890 NR Description: expressed protein [Arabidopsis thaliana]
  misc_feature (53)..(410): NCBI GI NO: 30677893 NR Description: expressed protein [Arabidopsis thaliana]
  misc_feature (53)..(410): NCBI GI NO: 26451899 NR Description: unknown protein [Arabidopsis thaliana]
  misc_feature (53)..(410): NCBI GI NO: 21537099 NR Description: unknown [Arabidopsis thaliana]
  misc_feature (176)..(299): NCBI GI NO: 34911372 NR Description: P0034C09.17
  misc_feature (337)..(410): NCBI GI NO: 34911372 NR Description: P0034C09.17
  misc_feature (53)..(123): NCBI GI NO: 34911372 NR Description: P0034C09.17
  misc_feature (53)..(410): NCBI GI NO: 15232221 NR Description: unknown protein; protein id: At3g27610.1
  misc_feature (53)..(410): NCBI GI NO: 9294466 NR Description: gb|AAD14522
  misc_feature (53)..(180): NCBI GI NO: 25371182 NR Description: hypothetical protein At2g01220
NRTNHPVVSSRSHSQSRSRSPCAHRDRDGELGPRGGWRPSTPLAPRQSSTSPGGASQALGWLLSVPGASGTVLEVVVPYSRASMAQLLGKMPLQFTSKQAAEDMALAAYNRALKLSGPGLQVMGVGFTGSLASSRPKHGDHRFYVSTWTHNCLRTSHVTLSKGLRSREEEDKVSSYFLLKAIADTCRVSATIQSDIHKSEIPEEIMEQFDEDQELQQVINGQVCMKVYNFAAPAESNLNRKIILPGSFNPLHDGHLRLLEAAVSMCDDGLPFFEISAINADKPPLSIAEIKRRVEQFRKAGKNVIISNQPYFYKKAELFPGSAFIIGADTAARLVNPKYYGGDYNRMLEILLECKSIGTTFLVGGRKIEGDFKVLENLDIPEELREMFISIPEEKFRIDISSTEIRKSQGL

SEQ ID NO: 33872 - protein, 328 aa, Zea mays subsp. mays
  peptide (1)..(328): Ceres Seq. ID no. 12411617
  misc_feature (1)..(327): NCBI GI NO: 30677890 NR Description: expressed protein [Arabidopsis thaliana]
  misc_feature (1)..(327): NCBI GI NO: 30677893 NR Description: expressed protein [Arabidopsis thaliana]
  misc_feature (1)..(327): NCBI GI NO: 26451899 NR Description: unknown protein [Arabidopsis thaliana]
  misc_feature (1)..(327): NCBI GI NO: 21537099 NR Description: unknown [Arabidopsis thaliana]
  misc_feature (93)..(216): NCBI GI NO: 34911372 NR Description: P0034C09.17
  misc_feature (254)..(327): NCBI GI NO: 34911372 NR Description: P0034C09.17
  misc_feature (1)..(40): NCBI GI NO: 34911372 NR Description: P0034C09.17
  misc_feature (1)..(327): NCBI GI NO: 15232221 NR Description: unknown protein; protein id: At3g27610.1
  misc_feature (1)..(327): NCBI GI NO: 9294466 NR Description: gb|AAD14522
  misc_feature (1)..(97): NCBI GI NO: 25371182 NR Description: hypothetical protein At2g01220
MAQLLGKMPLQFTSKQAAEDMALAAYNRALKLSGPGLQVMGVGFTGSLASSRPKHGDHRFYVSTWTHNCLRTSHVTLSKGLRSREEEDKVSSYFLLKAIADTCRVSATIQSDIHKSEIPEEIMEQFDEDQELQQVINGQVCMKVYNFAAPAESNLNRKIILPGSFNPLHDGHLRLLEAAVSMCDDGLPFFEISAINADKPPLSIAEIKRRVEQFRKAGKNVIISNQPYFYKKAELFPGSAFIIGADTAARLVNPKYYGGDYNRMLEILLECKSIGTTFLVGGRKIEGDFKVLENLDIPEELREMFISIPEEKFRIDISSTEIRKSQGL

SEQ ID NO: 33873 - protein, 321 aa, Zea mays subsp. mays
  peptide (1)..(321): Ceres Seq. ID no. 12411618
  misc_feature (1)..(320): NCBI GI NO: 30677890 NR Description: expressed protein [Arabidopsis thaliana]
  misc_feature (1)..(320): NCBI GI NO: 30677893 NR Description: expressed protein [Arabidopsis thaliana]
  misc_feature (1)..(320): NCBI GI NO: 26451899 NR Description: unknown protein [Arabidopsis thaliana]
  misc_feature (1)..(320): NCBI GI NO: 21537099 NR Description: unknown [Arabidopsis thaliana]
  misc_feature (86)..(209): NCBI GI NO: 34911372 NR Description: P0034C09.17
  misc_feature (247)..(320): NCBI GI NO: 34911372 NR Description: P0034C09.17
  misc_feature (1)..(33): NCBI GI NO: 34911372 NR Description: P0034C09.17
  misc_feature (1)..(320): NCBI GI NO: 15232221 NR Description: unknown protein; protein id: At3g27610.1
  misc_feature (1)..(320): NCBI GI NO: 9294466 NR Description: gb|AAD14522
  misc_feature (1)..(90): NCBI GI NO: 25371182 NR Description: hypothetical protein At2g01220
MPLQFTSKQAAEDMALAAYNRALKLSGPGLQVMGVGFTGSLASSRPKHGDHRFYVSTWTHNCLRTSHVTLSKGLRSREEEDKVSSYFLLKAIADTCRVSATIQSDIHKSEIPEEIMEQFDEDQELQQVINGQVCMKVYNFAAPAESNLNRKIILPGSFNPLHDGHLRLLEAAVSMCDDGLPFFEISAINADKPPLSIAEIKRRVEQFRKAGKNVIISNQPYFYKKAELFPGSAFIIGADTAARLVNPKYYGGDYNRMLEILLECKSIGTTFLVGGRKIEGDFKVLENLDIPEELREMFISIPEEKFRIDISSTEIRKSQGL

SEQ ID NO: 33874 - DNA, 1320 bp, Zea mays subsp. mays
  misc_feature (1)..(1320): Ceres Seq. ID no. 12357862
acccgttccgcgcccgtcctcgaccctcccacctattcgctcgctcgctcgccgtccgcgcccgcgcgggccgcgagatctaggccagtcgccgcggccgtggccgcgggctgacgggatctctgtcctcccgacacgacgaacctctaggaaggcgcctaagacgaggaggaagcgggggctatggaggcgtcttcctgggacgccgttcgcaagcaggcaaggaggttggaagctcatttagatgaccaaatgattgcataccgtaaattggtttctatgaaatcagacggttcagaggacaacattgagtctgatatagaaagatcactgaagcagttacagcaagtgaattcgcaaatgcaaacttgggtatcatcaggaggttctgaagttctttctcatactctgactcgtcatatggagattttgcaagaccttactcaggaattctatcggcttcgatcaagtctcagggcaaaacaacagcatacttctctccttgacttgagagattttgacagagcaaagtttgatgttgaggagccgtcagactcagctgatcaagttcttctcagggaacaagctgcgattggcaggagtactggacagatggataacgtgatatcacaagctcaggcaacacttggttctctcatgacccaacggtcaacattcggtggcatcactacaaagataagcaacgtcagcagccagcttccaacaattaaccacgtcctctcatcgatcagaaggaagaaatccatggataccatcattctttcgctcgttgcatctgtctgcacgtttctcatcttcatctactggctgtcgaagtaggtttaccagagcaaagatattacagtgttgtaagcttgggaccacaccaccagtaccggtacagatagtcttcattggtgtttgtacaatattattggttgattgaatgctgttacgattcgggcgtgctgtagccaccgtgtctccagctgtgcaactgctgccaatactgtgaactgaactctgtacctcgtgtacttcggcataactaagggtggagcaactggcgttgctttagctgccccatgttggcatgttgctcagatgtcggcttaaaggtggatcttcacctatgactatagttgacaatataggctctatattttatacaataaaatataaggatgaggctctatttgtttttatttttgaactaaaaataatttagaaccctatcaatttgtaaagaaacatttggatcacgatctattaccacccctacctatgtcgtaagcctctgttatcagacattttcgagtc

SEQ ID NO: 33875 - protein, 218 aa, Zea mays subsp. mays
  peptide (1)..(218): Ceres Seq. ID no. 12357863
  misc_feature (46)..(196): Pfam Name: Pfam Description:  Vesicle transport v-SNARE protein
  misc_feature (4)..(218): NCBI GI NO: 18394296 NR Description: cis-Golgi SNARE protein, putative
  misc_feature (32)..(218): NCBI GI NO: 6850926 NR Description: hypothetical protein [Cicer arietinum]
  misc_feature (1)..(218): NCBI GI NO: 15225431 NR Description: cis-Golgi SNARE protein, putative
  misc_feature (45)..(214): NCBI GI NO: 4758456 NR Description: golgi SNAP receptor complex member 1
  misc_feature (3)..(45): NCBI GI NO: 4758456 NR Description: golgi SNAP receptor complex member 1
  misc_feature (45)..(214): NCBI GI NO: 11132038 NR Description: 28 kDa Golgi SNARE protein
  misc_feature (45)..(214): NCBI GI NO: 28280046 NR Description: Similar to golgi SNAP receptor complex member 1
  misc_feature (45)..(214): NCBI GI NO: 16758358 NR Description: golgi SNAP receptor complex member 1
  misc_feature (45)..(214): NCBI GI NO: 30388705 NR Description: Gosr1 protein [Mus musculus]
  misc_feature (45)..(214): NCBI GI NO: 3335132 NR Description: GOS28/P28 protein [Homo sapiens]
MEASSWDAVRKQARRLEAHLDDQMIAYRKLVSMKSDGSEDNIESDIERSLKQLQQVNSQMQTWVSSGGSEVLSHTLTRHMEILQDLTQEFYRLRSSLRAKQQHTSLLDLRDFDRAKFDVEEPSDSADQVLLREQAAIGRSTGQMDNVISQAQATLGSLMTQRSTFGGITTKISNVSSQLPTINHVLSSIRRKKSMDTIILSLVASVCTFLIFIYWLSK

SEQ ID NO: 33876 - protein, 195 aa, Zea mays subsp. mays
  peptide (1)..(195): Ceres Seq. ID no. 12357864
  misc_feature (23)..(173): Pfam Name: Pfam Description:  Vesicle transport v-SNARE protein
  misc_feature (1)..(195): NCBI GI NO: 18394296 NR Description: cis-Golgi SNARE protein, putative
  misc_feature (9)..(195): NCBI GI NO: 6850926 NR Description: hypothetical protein [Cicer arietinum]
  misc_feature (1)..(195): NCBI GI NO: 15225431 NR Description: cis-Golgi SNARE protein, putative
  misc_feature (22)..(191): NCBI GI NO: 4758456 NR Description: golgi SNAP receptor complex member 1
  misc_feature (1)..(22): NCBI GI NO: 4758456 NR Description: golgi SNAP receptor complex member 1
  misc_feature (22)..(191): NCBI GI NO: 11132038 NR Description: 28 kDa Golgi SNARE protein
  misc_feature (22)..(191): NCBI GI NO: 28280046 NR Description: Similar to golgi SNAP receptor complex member 1
  misc_feature (22)..(191): NCBI GI NO: 16758358 NR Description: golgi SNAP receptor complex member 1
  misc_feature (22)..(191): NCBI GI NO: 30388705 NR Description: Gosr1 protein [Mus musculus]
  misc_feature (22)..(191): NCBI GI NO: 3335132 NR Description: GOS28/P28 protein [Homo sapiens]
MIAYRKLVSMKSDGSEDNIESDIERSLKQLQQVNSQMQTWVSSGGSEVLSHTLTRHMEILQDLTQEFYRLRSSLRAKQQHTSLLDLRDFDRAKFDVEEPSDSADQVLLREQAAIGRSTGQMDNVISQAQATLGSLMTQRSTFGGITTKISNVSSQLPTINHVLSSIRRKKSMDTIILSLVASVCTFLIFIYWLSK

SEQ ID NO: 33877 - protein, 186 aa, Zea mays subsp. mays
  peptide (1)..(186): Ceres Seq. ID no. 12357865
  misc_feature (14)..(164): Pfam Name: Pfam Description:  Vesicle transport v-SNARE protein
  misc_feature (1)..(186): NCBI GI NO: 18394296 NR Description: cis-Golgi SNARE protein, putative
  misc_feature (1)..(186): NCBI GI NO: 6850926 NR Description: hypothetical protein [Cicer arietinum]
  misc_feature (1)..(186): NCBI GI NO: 15225431 NR Description: cis-Golgi SNARE protein, putative
  misc_feature (13)..(182): NCBI GI NO: 4758456 NR Description: golgi SNAP receptor complex member 1
  misc_feature (1)..(13): NCBI GI NO: 4758456 NR Description: golgi SNAP receptor complex member 1
  misc_feature (13)..(182): NCBI GI NO: 11132038 NR Description: 28 kDa Golgi SNARE protein
  misc_feature (13)..(182): NCBI GI NO: 28280046 NR Description: Similar to golgi SNAP receptor complex member 1
  misc_feature (13)..(182): NCBI GI NO: 16758358 NR Description: golgi SNAP receptor complex member 1
  misc_feature (13)..(182): NCBI GI NO: 30388705 NR Description: Gosr1 protein [Mus musculus]
  misc_feature (13)..(182): NCBI GI NO: 3335132 NR Description: GOS28/P28 protein [Homo sapiens]
MKSDGSEDNIESDIERSLKQLQQVNSQMQTWVSSGGSEVLSHTLTRHMEILQDLTQEFYRLRSSLRAKQQHTSLLDLRDFDRAKFDVEEPSDSADQVLLREQAAIGRSTGQMDNVISQAQATLGSLMTQRSTFGGITTKISNVSSQLPTINHVLSSIRRKKSMDTIILSLVASVCTFLIFIYWLSK

SEQ ID NO: 33878 - DNA, 1229 bp, Zea mays subsp. mays
  misc_feature (1)..(1229): Ceres Seq. ID no. 12367074
cctggccaccaaagaagcaaaagtcttccaggttctcccacccacacggccacacgcccacacccactgctcctctaatctcacatgctcatgcatcctcctaatgtaacctgaagctttaagaaaacaaagtgctcccggaagactccaagctgcagctaccggccttcctctcccccattccaattccgagaacaggggcggcggagtcaaccaggtacgatgtgctcggtagcgaggctggcgtttgtgcttgcactggccatagccgcctcatcaattacggttgcggagagcagagattttaatatctttgctcagggcagcttgcctgatgcaaccaagggatcgtcaggtctagctgcaaccagtggaaagttgtgtcagttatgcgagcagtactcatccgaggcgctcctctatctcacacaaaacgagacccagactgagattcttagcattctacaccatgaatgtgccagccttgccccactcaagcagcagtgcatcacgctggttgactactacgtaccccttttcttcttggaggtctccatggttacccctgagaagttctgcgagtcgatgcatctctgcaagaaggggatgaagattagcctacccacccgggagggtacttgtggtttgtgccaccatgttgttgttgagattcttatcatgcttaaagaccccaacatgcagctggaagtaatcgacctactcaccaaaacatgcagcaaggcgcagaactatgaacagcagtgcaagcggctggtcctcaagtatattccactgattctggtgaagggccagaaattccttgagacaacggatgtctgctctgtgatacatgcatgcaaagcaggcacacaagcatcaatggaagccatgcctctgtctgccatgttgtgaaggtgatgcgaatcagaataaggcttatttgcctaggagatcaaattggggagaaacgatgaaaagtcagatgactgttttaagctctcttcctctattgctgaaacactattgatcggtgaaaattcgtctgtgtaaaattcttgtgtaaatttgggggtatatccagtgtttctctgaagtatacagcaactgcagctacaccaatctcttcggcattgggttgagaagttctaagcagtaattgcattttactgtatcatctatttgtttgtaactactgagagttattaattccttgtttctctgttgctctg

SEQ ID NO: 33879 - protein, 229 aa, Zea mays subsp. mays
  peptide (1)..(229): Ceres Seq. ID no. 12367075
  misc_feature (92)..(125): Pfam Name: Pfam Description:  Saposin-like type B, region 2
  misc_feature (17)..(227): NCBI GI NO: 34896130 NR Description: P0701D05.19
  misc_feature (53)..(212): NCBI GI NO: 15231028 NR Description: putative protein; protein id: At3g51730
  misc_feature (56)..(221): NCBI GI NO: 6942199 NR Description: putative protein [Vitis riparia]
  misc_feature (47)..(212): NCBI GI NO: 15241065 NR Description: putative protein; protein id: At5g01800
  misc_feature (51)..(212): NCBI GI NO: 26364659 NR Description: unnamed protein product [Mus musculus]
  misc_feature (51)..(212): NCBI GI NO: 26324414 NR Description: unnamed protein product [Mus musculus]
  misc_feature (51)..(212): NCBI GI NO: 34878577 NR Description: similar to prosaposin
MCSVARLAFVLALAIAASSITVAESRDFNIFAQGSLPDATKGSSGLAATSGKLCQLCEQYSSEALLYLTQNETQTEILSILHHECASLAPLKQQCITLVDYYVPLFFLEVSMVTPEKFCESMHLCKKGMKISLPTREGTCGLCHHVVVEILIMLKDPNMQLEVIDLLTKTCSKAQNYEQQCKRLVLKYIPLILVKGQKFLETTDVCSVIHACKAGTQASMEAMPLSAML

SEQ ID NO: 33880 - protein, 118 aa, Zea mays subsp. mays
  peptide (1)..(118): Ceres Seq. ID no. 12367076
  misc_feature (1)..(116): NCBI GI NO: 34896130 NR Description: P0701D05.19
  misc_feature (1)..(101): NCBI GI NO: 15231028 NR Description: putative protein; protein id: At3g51730
  misc_feature (1)..(110): NCBI GI NO: 6942199 NR Description: putative protein [Vitis riparia]
  misc_feature (1)..(101): NCBI GI NO: 15241065 NR Description: putative protein; protein id: At5g01800
  misc_feature (1)..(101): NCBI GI NO: 26364659 NR Description: unnamed protein product [Mus musculus]
  misc_feature (1)..(101): NCBI GI NO: 26324414 NR Description: unnamed protein product [Mus musculus]
  misc_feature (1)..(101): NCBI GI NO: 34878577 NR Description: similar to prosaposin
MVTPEKFCESMHLCKKGMKISLPTREGTCGLCHHVVVEILIMLKDPNMQLEVIDLLTKTCSKAQNYEQQCKRLVLKYIPLILVKGQKFLETTDVCSVIHACKAGTQASMEAMPLSAML

SEQ ID NO: 33881 - DNA, 1541 bp, Zea mays subsp. mays
  misc_feature (1)..(1541): Ceres Seq. ID no. 12348785
accccccgcggggacaccgagcgctcgccgccgccttcgagttcggagcggagccacagccacgcatgccaatggccgtctccgctgttaccgcctcccatctcgctctctcttttccagcacgtagtcgccggagacgcgctgcgccccgcgccgcggcaggcggcctaacggctcgcgcacggcggctgcgctgcgagttcgtcgccggtggtgggaacggggcgctctccggagaggacgaccctcgcctcgtcgaccgccaaaaagttcttgatgccgctatgaatgacataaacaactcttttggaaaaggaagtgttacaagattaggcagtgctggtggtgcttttgttgagacattcccaagtggttgtctaacactagattttgctctgggtggcggtcttccaaaaggaagagtagtggaggtatatggtccagaaagcagtggaaagactaccctagctttgcatgcaattgctgaaatacagaagcttggaggaaatgccatgcttgtcgatgcagagcatgcttttgatccagcttattcaaaagctcttggggtagatattgaaaatctgattgtctgccagcctgacaacggagagatggcactagaaattgcggaccgtatgtgcagatctggagcaatagatcttatctgtattgattcggtgtcagcgctcaccccacgtgcagaaattgaaggtgagataggaatgcagcagatgggtctacaagctcgtctgatgagtcaagcattgagaaaaatgtcaggcaatgcctcaaaggctggctgtactcttatgttcttgaatcaaataagatacaagattggagtgttctatgggaatcctgaagtcactagtggagggatagccttgaaattctttgcatctgtccgtcttgagatacggctcattgggaagataaaatctgccaagggagatgaagatgttggtgtgaaggttcgtgtcagagtgcagaagagtaaagtatctaggccctacaagcaagctgaatttgaaatcatttttggggagggtgttagtaaattggggtgcgttcttgattgtgctgagctgatggatgtagttgcaaagaagggttcgtggtacagctacaaagatataagattgggccaaggcagagagaaggcactgcagtatctccgagagagcccaaccacctgcgatgagatagaaaaggtggttcgagctatgataccagaaggatccagacatatgagcctactagctttcgggcagtcatcatcaactgaagatgaacaggcgtatgatgaacaataatggtacatgaggttccgaagatggaacacttgtgaaaccgtcaagctctggcttgtgtcccttgcggataacagaaaagatcagagctggaacgattccgggtgcaatccgacggaaacgaacaaggcctaatgttgtacgtgtactgtggcatggcagaaccgtccggtttaacccaatttcgggcacacctgccagctatttatcactaagtgcaccagagattat

SEQ ID NO: 33882 - protein, 436 aa, Zea mays subsp. mays
  peptide (1)..(436): Ceres Seq. ID no. 12348786
  misc_feature (89)..(409): Pfam Name: Pfam Description:  recA bacterial DNA recombination protein
  misc_feature (73)..(436): NCBI GI NO: 421845 NR Description: recombination protein recA homolog
  misc_feature (73)..(436): NCBI GI NO: 18412241 NR Description: replicase, putative; protein id: At1g79050
  misc_feature (86)..(434): NCBI GI NO: 1350564 NR Description: RecA protein (Recombinase A)
  misc_feature (86)..(431): NCBI GI NO: 132240 NR Description: RecA protein (Recombinase A)
  misc_feature (86)..(435): NCBI GI NO: 23042013 NR Description: hypothetical protein
  misc_feature (86)..(430): NCBI GI NO: 22299632 NR Description: recombination protein
  misc_feature (75)..(413): NCBI GI NO: 33866594 NR Description: RecA bacterial DNA recombination protein
  misc_feature (87)..(434): NCBI GI NO: 23123656 NR Description: hypothetical protein [Nostoc punctiforme]
  misc_feature (80)..(413): NCBI GI NO: 33241165 NR Description: RecA recombinase
  misc_feature (87)..(413): NCBI GI NO: 37522985 NR Description: recombination protein [Gloeobacter violaceus]
PPRGHRALAAAFEFGAEPQPRMPMAVSAVTASHLALSFPARSRRRRAAPRAAAGGLTARARRLRCEFVAGGGNGALSGEDDPRLVDRQKVLDAAMNDINNSFGKGSVTRLGSAGGAFVETFPSGCLTLDFALGGGLPKGRVVEVYGPESSGKTTLALHAIAEIQKLGGNAMLVDAEHAFDPAYSKALGVDIENLIVCQPDNGEMALEIADRMCRSGAIDLICIDSVSALTPRAEIEGEIGMQQMGLQARLMSQALRKMSGNASKAGCTLMFLNQIRYKIGVFYGNPEVTSGGIALKFFASVRLEIRLIGKIKSAKGDEDVGVKVRVRVQKSKVSRPYKQAEFEIIFGEGVSKLGCVLDCAELMDVVAKKGSWYSYKDIRLGQGREKALQYLRESPTTCDEIEKVVRAMIPEGSRHMSLLAFGQSSSTEDEQAYDEQ

SEQ ID NO: 33883 - protein, 415 aa, Zea mays subsp. mays
  peptide (1)..(415): Ceres Seq. ID no. 12348787
  misc_feature (68)..(388): Pfam Name: Pfam Description:  recA bacterial DNA recombination protein
  misc_feature (52)..(415): NCBI GI NO: 421845 NR Description: recombination protein recA homolog
  misc_feature (52)..(415): NCBI GI NO: 18412241 NR Description: replicase, putative; protein id: At1g79050
  misc_feature (65)..(413): NCBI GI NO: 1350564 NR Description: RecA protein (Recombinase A)
  misc_feature (65)..(410): NCBI GI NO: 132240 NR Description: RecA protein (Recombinase A)
  misc_feature (65)..(414): NCBI GI NO: 23042013 NR Description: hypothetical protein
  misc_feature (65)..(409): NCBI GI NO: 22299632 NR Description: recombination protein
  misc_feature (54)..(392): NCBI GI NO: 33866594 NR Description: RecA bacterial DNA recombination protein
  misc_feature (66)..(413): NCBI GI NO: 23123656 NR Description: hypothetical protein [Nostoc punctiforme]
  misc_feature (59)..(392): NCBI GI NO: 33241165 NR Description: RecA recombinase
  misc_feature (66)..(392): NCBI GI NO: 37522985 NR Description: recombination protein [Gloeobacter violaceus]
MPMAVSAVTASHLALSFPARSRRRRAAPRAAAGGLTARARRLRCEFVAGGGNGALSGEDDPRLVDRQKVLDAAMNDINNSFGKGSVTRLGSAGGAFVETFPSGCLTLDFALGGGLPKGRVVEVYGPESSGKTTLALHAIAEIQKLGGNAMLVDAEHAFDPAYSKALGVDIENLIVCQPDNGEMALEIADRMCRSGAIDLICIDSVSALTPRAEIEGEIGMQQMGLQARLMSQALRKMSGNASKAGCTLMFLNQIRYKIGVFYGNPEVTSGGIALKFFASVRLEIRLIGKIKSAKGDEDVGVKVRVRVQKSKVSRPYKQAEFEIIFGEGVSKLGCVLDCAELMDVVAKKGSWYSYKDIRLGQGREKALQYLRESPTTCDEIEKVVRAMIPEGSRHMSLLAFGQSSSTEDEQAYDEQ

SEQ ID NO: 33884 - protein, 413 aa, Zea mays subsp. mays
  peptide (1)..(413): Ceres Seq. ID no. 12348788
  misc_feature (66)..(386): Pfam Name: Pfam Description:  recA bacterial DNA recombination protein
  misc_feature (50)..(413): NCBI GI NO: 421845 NR Description: recombination protein recA homolog
  misc_feature (50)..(413): NCBI GI NO: 18412241 NR Description: replicase, putative; protein id: At1g79050
  misc_feature (63)..(411): NCBI GI NO: 1350564 NR Description: RecA protein (Recombinase A)
  misc_feature (63)..(408): NCBI GI NO: 132240 NR Description: RecA protein (Recombinase A)
  misc_feature (63)..(412): NCBI GI NO: 23042013 NR Description: hypothetical protein
  misc_feature (63)..(407): NCBI GI NO: 22299632 NR Description: recombination protein
  misc_feature (52)..(390): NCBI GI NO: 33866594 NR Description: RecA bacterial DNA recombination protein
  misc_feature (64)..(411): NCBI GI NO: 23123656 NR Description: hypothetical protein [Nostoc punctiforme]
  misc_feature (57)..(390): NCBI GI NO: 33241165 NR Description: RecA recombinase
  misc_feature (64)..(390): NCBI GI NO: 37522985 NR Description: recombination protein [Gloeobacter violaceus]
MAVSAVTASHLALSFPARSRRRRAAPRAAAGGLTARARRLRCEFVAGGGNGALSGEDDPRLVDRQKVLDAAMNDINNSFGKGSVTRLGSAGGAFVETFPSGCLTLDFALGGGLPKGRVVEVYGPESSGKTTLALHAIAEIQKLGGNAMLVDAEHAFDPAYSKALGVDIENLIVCQPDNGEMALEIADRMCRSGAIDLICIDSVSALTPRAEIEGEIGMQQMGLQARLMSQALRKMSGNASKAGCTLMFLNQIRYKIGVFYGNPEVTSGGIALKFFASVRLEIRLIGKIKSAKGDEDVGVKVRVRVQKSKVSRPYKQAEFEIIFGEGVSKLGCVLDCAELMDVVAKKGSWYSYKDIRLGQGREKALQYLRESPTTCDEIEKVVRAMIPEGSRHMSLLAFGQSSSTEDEQAYDEQ

SEQ ID NO: 33885 - DNA, 1765 bp, Zea mays subsp. mays
  misc_feature (1)..(1765): Ceres Seq. ID no. 12411611
gtttttcggtcctattcgacccccaaactccggacgagccttccgcgcgacgctgcacggctccgccagccacccgtaaaaccctagacggctagccggcgcacggaagcgggcagcggagcggaggtgagcctctcctgcgtcggattgtccccgcccccgctaggcgccatgaagctgacggtgaagaccctcaagggaacgcacttcgagatccgggtgcagcccaacgacacgattatggctgtgaagaagaatattgaagagatacaagggaaagacagctatccatggggccaacaactgctgattttcaatggaaaggtcttgaaagatgaaagtacattggaagagaataaagtcaatgaggatgggtttctagttgtcatgcttagtaagggtaaaacatctggttcaactggaacttcatcttcccagcactcaaacactcctgcaacaaggcaggcacctcctctagaggccccacaacaagctcctcaacccccggtggcaccaattacaacttctcagcctgaaggacttcctgcacaggcacctaacacacatgacaatgcggcatcaaatcttctgtctggaaggaatgttgacacaataattaaccagctaatggagatgggtgggggcagttgggacaaagataaagtccaaagggctctccgtgccgcttacaacaaccccgaacgtgctgttgaatacctctactctggtattccagtaacagctgaaattgctgttccaattggtggtcaaggggcaaacacaactgatcgagctcctactggggaagctggtctctctgggattccaaacaccgctccactagatcttttcccgcagggggcttccaatgctggaggtggtgctggtggtggaccacttgattttcttagaaacaatccacagtttcaagcagttcgggaaatggtccatacaaatccacaaattttgcagcctatgctcgttgagttgagcaagcagaatcctcaaattctaaggttgattgaggagaatcatgatgagtttcttcagttactaaatgagccctttgaaggcggagagggggatttcttagaccaacctgaggaggatgaaatgcctcatgccattagtgttacaccagaggagcaggaggccattggacggcttgagtccatggggttcgacagagcacgcgttatcgaagcattcttagcctgcgataggaacgaggagctagcagcaaactatctccttgagcatgctggtgaggaagattaagcgggagtagttttcatacgattttttttagtaccgagtgacgaagagttgatatggagctgacgatcatttgaattgatttcgttgtgcaagacttgtattacataaacatttaaatacatgtagctgaacatttcagtagaaatgctacggttgtggtctcccatcgttgactttcattagcgtggtggtaaacatcggttctgctcctgtcctgtattaacacaagcttggcttgggaggaagcacaaggagctattgctacctagcaaaaggataaaagggaggatgatgaattggcgatgtgtttgtgacacgctgccctcaagtgtggatgatgagtgcagatatgttgatgactgttccaaggctgtcaagtgtgtaaacgaacgctgccttcgtagttctgacaactgcgacagttctgtagctagacctatttgctatctttatgataaaattatctaaatgggacggtccttgaccg

SEQ ID NO: 33886 - protein, 368 aa, Zea mays subsp. mays
  peptide (1)..(368): Ceres Seq. ID no. 12411612
  misc_feature (1)..(78): Pfam Name: Pfam Description:  Ubiquitin family
  misc_feature (1)..(368): NCBI GI NO: 22330746 NR Description: DNA repair protein RAD23, putative
  misc_feature (1)..(368): NCBI GI NO: 30699439 NR Description: DNA repair protein RAD23 -related
  misc_feature (1)..(368): NCBI GI NO: 30409720 NR Description: RAD23-like protein [Arabidopsis thaliana]
  misc_feature (1)..(368): NCBI GI NO: 7446460 NR Description: RAD23 protein, isoform II - carrot
  misc_feature (1)..(368): NCBI GI NO: 30409718 NR Description: RAD23-like protein [Arabidopsis thaliana]
  misc_feature (1)..(368): NCBI GI NO: 15221013 NR Description: hypothetical protein; protein id: At1g16190.1
  misc_feature (1)..(368): NCBI GI NO: 30409722 NR Description: RAD23-like protein [Arabidopsis thaliana]
  misc_feature (1)..(368): NCBI GI NO: 25387250 NR Description: protein F20B17.8 [imported] - Arabidopsis thaliana
  misc_feature (94)..(366): NCBI GI NO: 15232924 NR Description: putative RAD23; protein id: At3g02540
  misc_feature (1)..(129): NCBI GI NO: 15232924 NR Description: putative RAD23; protein id: At3g02540
MKLTVKTLKGTHFEIRVQPNDTIMAVKKNIEEIQGKDSYPWGQQLLIFNGKVLKDESTLEENKVNEDGFLVVMLSKGKTSGSTGTSSSQHSNTPATRQAPPLEAPQQAPQPPVAPITTSQPEGLPAQAPNTHDNAASNLLSGRNVDTIINQLMEMGGGSWDKDKVQRALRAAYNNPERAVEYLYSGIPVTAEIAVPIGGQGANTTDRAPTGEAGLSGIPNTAPLDLFPQGASNAGGGAGGGPLDFLRNNPQFQAVREMVHTNPQILQPMLVELSKQNPQILRLIEENHDEFLQLLNEPFEGGEGDFLDQPEEDEMPHAISVTPEEQEAIGRLESMGFDRARVIEAFLACDRNEELAANYLLEHAGEED

SEQ ID NO: 33887 - protein, 345 aa, Zea mays subsp. mays
  peptide (1)..(345): Ceres Seq. ID no. 12411613
  misc_feature (1)..(55): Pfam Name: Pfam Description:  Ubiquitin family
  misc_feature (1)..(345): NCBI GI NO: 22330746 NR Description: DNA repair protein RAD23, putative
  misc_feature (1)..(345): NCBI GI NO: 30699439 NR Description: DNA repair protein RAD23 -related
  misc_feature (1)..(345): NCBI GI NO: 30409720 NR Description: RAD23-like protein [Arabidopsis thaliana]
  misc_feature (1)..(345): NCBI GI NO: 7446460 NR Description: RAD23 protein, isoform II - carrot
  misc_feature (1)..(345): NCBI GI NO: 30409718 NR Description: RAD23-like protein [Arabidopsis thaliana]
  misc_feature (1)..(345): NCBI GI NO: 15221013 NR Description: hypothetical protein; protein id: At1g16190.1
  misc_feature (1)..(345): NCBI GI NO: 30409722 NR Description: RAD23-like protein [Arabidopsis thaliana]
  misc_feature (1)..(345): NCBI GI NO: 25387250 NR Description: protein F20B17.8 [imported] - Arabidopsis thaliana
  misc_feature (71)..(343): NCBI GI NO: 15232924 NR Description: putative RAD23; protein id: At3g02540
  misc_feature (1)..(106): NCBI GI NO: 15232924 NR Description: putative RAD23; protein id: At3g02540
MAVKKNIEEIQGKDSYPWGQQLLIFNGKVLKDESTLEENKVNEDGFLVVMLSKGKTSGSTGTSSSQHSNTPATRQAPPLEAPQQAPQPPVAPITTSQPEGLPAQAPNTHDNAASNLLSGRNVDTIINQLMEMGGGSWDKDKVQRALRAAYNNPERAVEYLYSGIPVTAEIAVPIGGQGANTTDRAPTGEAGLSGIPNTAPLDLFPQGASNAGGGAGGGPLDFLRNNPQFQAVREMVHTNPQILQPMLVELSKQNPQILRLIEENHDEFLQLLNEPFEGGEGDFLDQPEEDEMPHAISVTPEEQEAIGRLESMGFDRARVIEAFLACDRNEELAANYLLEHAGEED

SEQ ID NO: 33888 - protein, 296 aa, Zea mays subsp. mays
  peptide (1)..(296): Ceres Seq. ID no. 12411614
  misc_feature (72)..(114): Pfam Name: Pfam Description:  UBA/TS-N domain
  misc_feature (1)..(296): NCBI GI NO: 22330746 NR Description: DNA repair protein RAD23, putative
  misc_feature (1)..(296): NCBI GI NO: 30699439 NR Description: DNA repair protein RAD23 -related
  misc_feature (1)..(296): NCBI GI NO: 30409720 NR Description: RAD23-like protein [Arabidopsis thaliana]
  misc_feature (1)..(296): NCBI GI NO: 7446460 NR Description: RAD23 protein, isoform II - carrot
  misc_feature (1)..(296): NCBI GI NO: 30409718 NR Description: RAD23-like protein [Arabidopsis thaliana]
  misc_feature (1)..(296): NCBI GI NO: 15221013 NR Description: hypothetical protein; protein id: At1g16190.1
  misc_feature (1)..(296): NCBI GI NO: 30409722 NR Description: RAD23-like protein [Arabidopsis thaliana]
  misc_feature (1)..(296): NCBI GI NO: 25387250 NR Description: protein F20B17.8 [imported] - Arabidopsis thaliana
  misc_feature (22)..(294): NCBI GI NO: 15232924 NR Description: putative RAD23; protein id: At3g02540
  misc_feature (1)..(57): NCBI GI NO: 15232924 NR Description: putative RAD23; protein id: At3g02540
MLSKGKTSGSTGTSSSQHSNTPATRQAPPLEAPQQAPQPPVAPITTSQPEGLPAQAPNTHDNAASNLLSGRNVDTIINQLMEMGGGSWDKDKVQRALRAAYNNPERAVEYLYSGIPVTAEIAVPIGGQGANTTDRAPTGEAGLSGIPNTAPLDLFPQGASNAGGGAGGGPLDFLRNNPQFQAVREMVHTNPQILQPMLVELSKQNPQILRLIEENHDEFLQLLNEPFEGGEGDFLDQPEEDEMPHAISVTPEEQEAIGRLESMGFDRARVIEAFLACDRNEELAANYLLEHAGEED

SEQ ID NO: 33889 - DNA, 1340 bp, Zea mays subsp. mays
  misc_feature (1)..(1340): Ceres Seq. ID no. 12413195
aaccactgctcgcactcactcacagtcgccgccgctgcccagtgcccactgctcgccgctagaggaatctgagagagagaggggaaagggcgaaggaggcgcaggcaggcatgggctccccttcctccctccccgccgcggcggcgctcgtgctcctggccctgctcgccggagcccagtgccgcgaggcccagttcgacgccgcggacgccggcgcggagaacttcaacaccagcgaggccgccgtgtactggggcccctggcagaaggcccgggccacctggtacggccagcccaacggcgccggcccggacgacaacggtggtgcgtgcggcttcaagcacaccaaccagtaccccttcatgtccatgggctcctgcggaaaccagccattgttcaaggacggcaagggatgcggctcctgctacaagattcggtgcaggaaggacccgtcctgctccgggcggacggagacggtgatcatcaccgacatgaactactacccggtgtccaagtaccacttcgacctcagcggcacggcgttcggcaggctggccaagcccggcctcaacgacaagctccgccactcgggcatcatcgacatcgagttcaccagggtgccgtgcgagttccctggcctcaagatcgggttccacgtggaggagtactcgagccccgtctacttcgcggtgctggtggagtacgaggacggcgacggcgacgtggtgcaggtggacctgatggagtccaagacggcgcgcgggccgccgacggggcggtgggcgccgatgcgcgagtcctggggctccatctggcgcatggacaccaaccaccgcatgcagccgcccttctccatccgcatccgcaacgagtccggcaagacgctcgtcgccaggaacgtcatcccggccaactggaggcccaacaccttctaccgctccttcgtccagtacagctagctagctggtttgcgccctcgggccgctcggtcaccaccacccaccactactaccaccaccacccactagactactgcttctgctaccaaatactacggcggaacggaacggctggttgccgccgccgccgtcgtccttggaaaggttgaggcgtctcttggtcatccgtatcgttaccgttgtcatggtcctttgagtcgttgcaaccctgattgcaagccggcaagggggaaaaaaccaacaaagccgtgtgggaaaatggaggaggcaggcgtacaatgtacgctctcccgcccactgttgctttataatctctatatcatcatcatcttcttcttctccattccgatcggtgattaatcgaaaagtatattgtaatgt

SEQ ID NO: 33890 - protein, 368 aa, Zea mays subsp. mays
  peptide (1)..(368): Ceres Seq. ID no. 12413196
TTARTHSQSPPLPSAHCSPLEESERERGKGEGGAGRHGLPFLPPRRGGARAPGPARRSPVPRGPVRRRGRRRGELQHQRGRRVLGPLAEGPGHLVRPAQRRRPGRQRWCVRLQAHQPVPLHVHGLLRKPAIVQGRQGMRLLLQDSVQEGPVLLRADGDGDHHRHELLPGVQVPLRPQRHGVRQAGQARPQRQAPPLGHHRHRVHQGAVRVPWPQDRVPRGGVLEPRLLRGAGGVRGRRRRRGAGGPDGVQDGARAADGAVGADARVLGLHLAHGHQPPHAAALLHPHPQRVRQDARRQERHPGQLEAQHLLPLLRPVQLASWFAPSGRSVTTTHHYYHHHPLDYCFCYQILRRNGTAGCRRRRRPWKG

SEQ ID NO: 33891 - protein, 282 aa, Zea mays subsp. mays
  peptide (1)..(282): Ceres Seq. ID no. 12413197
  misc_feature (179)..(266): Pfam Name: Pfam Description:  Pollen allergen
  misc_feature (1)..(282): NCBI GI NO: 14193775 NR Description: beta-expansin 8 [Zea mays]
  misc_feature (1)..(282): NCBI GI NO: 37536762 NR Description: beta-expansin EXPB4
  misc_feature (1)..(282): NCBI GI NO: 8118425 NR Description: beta-expansin [Oryza sativa]
  misc_feature (38)..(282): NCBI GI NO: 37536756 NR Description: beta-expansin EXPB6
  misc_feature (9)..(282): NCBI GI NO: 14330328 NR Description: beta expansin B2 [Festuca pratensis]
  misc_feature (31)..(282): NCBI GI NO: 14330330 NR Description: beta expansin B3 [Festuca pratensis]
  misc_feature (14)..(282): NCBI GI NO: 11346546 NR Description: beta-expansin [Oryza sativa]
  misc_feature (34)..(282): NCBI GI NO: 37536760 NR Description: beta-expansin EXPB3
  misc_feature (11)..(281): NCBI GI NO: 14193773 NR Description: beta-expansin 7 [Zea mays]
  misc_feature (49)..(281): NCBI GI NO: 8118432 NR Description: beta-expansin [Oryza sativa]
MGSPSSLPAAAALVLLALLAGAQCREAQFDAADAGAENFNTSEAAVYWGPWQKARATWYGQPNGAGPDDNGGACGFKHTNQYPFMSMGSCGNQPLFKDGKGCGSCYKIRCRKDPSCSGRTETVIITDMNYYPVSKYHFDLSGTAFGRLAKPGLNDKLRHSGIIDIEFTRVPCEFPGLKIGFHVEEYSSPVYFAVLVEYEDGDGDVVQVDLMESKTARGPPTGRWAPMRESWGSIWRMDTNHRMQPPFSIRIRNESGKTLVARNVIPANWRPNTFYRSFVQYS

SEQ ID NO: 33892 - protein, 231 aa, Zea mays subsp. mays
  peptide (1)..(231): Ceres Seq. ID no. 12413198
MRLLLQDSVQEGPVLLRADGDGDHHRHELLPGVQVPLRPQRHGVRQAGQARPQRQAPPLGHHRHRVHQGAVRVPWPQDRVPRGGVLEPRLLRGAGGVRGRRRRRGAGGPDGVQDGARAADGAVGADARVLGLHLAHGHQPPHAAALLHPHPQRVRQDARRQERHPGQLEAQHLLPLLRPVQLASWFAPSGRSVTTTHHYYHHHPLDYCFCYQILRRNGTAGCRRRRRPWKG

SEQ ID NO: 33893 - DNA, 1274 bp, Zea mays subsp. mays
  misc_feature (1)..(1274): Ceres Seq. ID no. 12408122
gcgcagagccagccaagccaaccagccagtcagaagaggaaccggggagcggcagctgcagcggccgagggcggagcacgcgaggttcaagattatccggtttaaagacatcagaagaggctgtggcatggatagataccaaagggtagagaagcctcggaatgacacgccaatcagccagaatgagatcagaatcactactcaggggaggatgaggaactatatcagctatgggatgtcgctgcttgaggaaaatggacatgatgagattagtatcaaggccatgggacgggccataaataagacagttatggttgttgaattgatcaagagaagggttggaggtcttcatcagaacactgctactgaatctgttgatatcacagacacatgggaacctttggaagaaggccttctcccactagagacaactcgccatgtgtcgatgatcactgtgacactgtcaaagaaccctctggatacatcatctccaggataccagccacctatcccagctgaagaggtgaaacctgcttttgactatgatcatgaagaatcgtatcccactggtcgtggaagaggacgtggtggtggcagaagaggcaggggaagaggcatgagcaatggcccccctccacctgcttatggttacaacgaagagtgggaggaggaaggagattattataacagagggcgcgggagagggcggctacgtggacgaggagggagagggcgtggtggctactacggaggtgggaggcgtggtggctacggttatgattatggctatgcccccagaggcgggtactatgaagagcaagacgaatactatgatgagcccgaggaatatgctcctccccctggccgcggacgtggcagagggagaaggggcggcatgccttggcgtgggcgtggaggccgcgggccaccgcgcggtggccgagggagctactactaggcgcgagaaatgcgacgtgccgaatgcgtgtgcttattagttatctgttagcgtttgctgcagtgctcttctatggagctccgaccccggactggaattatctcgtaggcccttccaggtgctactctacttcagctgctgtccctgtgcaactcgtccgggcaagttttgtggctcgctcgtggttttgtagctaggttaagcgagtgaagttacactcggtagcgcagtatttcctgcgagattgtttattcttctgttaatgtacctaccttactatttcgtttggattatggatactgggtgcatccgttcc

SEQ ID NO: 33894 - protein, 318 aa, Zea mays subsp. mays
  peptide (1)..(318): Ceres Seq. ID no. 12408123
  misc_feature (43)..(310): NCBI GI NO: 34897552 NR Description: OSJNBa0042L16.13
  misc_feature (43)..(317): NCBI GI NO: 18410994 NR Description: expressed protein; protein id: At1g76010
  misc_feature (43)..(318): NCBI GI NO: 24417384 NR Description: unknown [Arabidopsis thaliana]
  misc_feature (43)..(310): NCBI GI NO: 18394837 NR Description: expressed protein; protein id: At1g20220
  misc_feature (43)..(310): NCBI GI NO: 25518088 NR Description: T20H2.2 protein - Arabidopsis thaliana
  misc_feature (84)..(317): NCBI GI NO: 25404999 NR Description: protein T4O12.22 [imported] - Arabidopsis thaliana
  misc_feature (43)..(90): NCBI GI NO: 25404999 NR Description: protein T4O12.22 [imported] - Arabidopsis thaliana
  misc_feature (43)..(179): NCBI GI NO: 15231369 NR Description: unknown protein; protein id: At3g07030.1
  misc_feature (57)..(307): NCBI GI NO: 23612874 NR Description: hypothetical protein, conserved
  misc_feature (181)..(315): NCBI GI NO: 25404999 NR Description: protein T4O12.22 [imported] - Arabidopsis thaliana
RRASQANQPVRRGTGERQLQRPRAEHARFKIIRFKDIRRGCGMDRYQRVEKPRNDTPISQNEIRITTQGRMRNYISYGMSLLEENGHDEISIKAMGRAINKTVMVVELIKRRVGGLHQNTATESVDITDTWEPLEEGLLPLETTRHVSMITVTLSKNPLDTSSPGYQPPIPAEEVKPAFDYDHEESYPTGRGRGRGGGRRGRGRGMSNGPPPPAYGYNEEWEEEGDYYNRGRGRGRLRGRGGRGRGGYYGGGRRGGYGYDYGYAPRGGYYEEQDEYYDEPEEYAPPPGRGRGRGRRGGMPWRGRGGRGPPRGGRGSYY

SEQ ID NO: 33895 - protein, 276 aa, Zea mays subsp. mays
  peptide (1)..(276): Ceres Seq. ID no. 12408124
  misc_feature (1)..(268): NCBI GI NO: 34897552 NR Description: OSJNBa0042L16.13
  misc_feature (1)..(275): NCBI GI NO: 18410994 NR Description: expressed protein; protein id: At1g76010
  misc_feature (1)..(276): NCBI GI NO: 24417384 NR Description: unknown [Arabidopsis thaliana]
  misc_feature (1)..(268): NCBI GI NO: 18394837 NR Description: expressed protein; protein id: At1g20220
  misc_feature (1)..(268): NCBI GI NO: 25518088 NR Description: T20H2.2 protein - Arabidopsis thaliana
  misc_feature (42)..(275): NCBI GI NO: 25404999 NR Description: protein T4O12.22 [imported] - Arabidopsis thaliana
  misc_feature (1)..(48): NCBI GI NO: 25404999 NR Description: protein T4O12.22 [imported] - Arabidopsis thaliana
  misc_feature (1)..(137): NCBI GI NO: 15231369 NR Description: unknown protein; protein id: At3g07030.1
  misc_feature (15)..(265): NCBI GI NO: 23612874 NR Description: hypothetical protein, conserved
  misc_feature (139)..(273): NCBI GI NO: 25404999 NR Description: protein T4O12.22 [imported] - Arabidopsis thaliana
MDRYQRVEKPRNDTPISQNEIRITTQGRMRNYISYGMSLLEENGHDEISIKAMGRAINKTVMVVELIKRRVGGLHQNTATESVDITDTWEPLEEGLLPLETTRHVSMITVTLSKNPLDTSSPGYQPPIPAEEVKPAFDYDHEESYPTGRGRGRGGGRRGRGRGMSNGPPPPAYGYNEEWEEEGDYYNRGRGRGRLRGRGGRGRGGYYGGGRRGGYGYDYGYAPRGGYYEEQDEYYDEPEEYAPPPGRGRGRGRRGGMPWRGRGGRGPPRGGRGSYY

SEQ ID NO: 33896 - protein, 248 aa, Zea mays subsp. mays
  peptide (1)..(248): Ceres Seq. ID no. 12408125
  misc_feature (1)..(240): NCBI GI NO: 34897552 NR Description: OSJNBa0042L16.13
  misc_feature (1)..(247): NCBI GI NO: 18410994 NR Description: expressed protein; protein id: At1g76010
  misc_feature (1)..(248): NCBI GI NO: 24417384 NR Description: unknown [Arabidopsis thaliana]
  misc_feature (1)..(240): NCBI GI NO: 18394837 NR Description: expressed protein; protein id: At1g20220
  misc_feature (1)..(240): NCBI GI NO: 25518088 NR Description: T20H2.2 protein - Arabidopsis thaliana
  misc_feature (14)..(247): NCBI GI NO: 25404999 NR Description: protein T4O12.22 [imported] - Arabidopsis thaliana
  misc_feature (1)..(20): NCBI GI NO: 25404999 NR Description: protein T4O12.22 [imported] - Arabidopsis thaliana
  misc_feature (1)..(109): NCBI GI NO: 15231369 NR Description: unknown protein; protein id: At3g07030.1
  misc_feature (1)..(237): NCBI GI NO: 23612874 NR Description: hypothetical protein, conserved
  misc_feature (111)..(245): NCBI GI NO: 25404999 NR Description: protein T4O12.22 [imported] - Arabidopsis thaliana
MRNYISYGMSLLEENGHDEISIKAMGRAINKTVMVVELIKRRVGGLHQNTATESVDITDTWEPLEEGLLPLETTRHVSMITVTLSKNPLDTSSPGYQPPIPAEEVKPAFDYDHEESYPTGRGRGRGGGRRGRGRGMSNGPPPPAYGYNEEWEEEGDYYNRGRGRGRLRGRGGRGRGGYYGGGRRGGYGYDYGYAPRGGYYEEQDEYYDEPEEYAPPPGRGRGRGRRGGMPWRGRGGRGPPRGGRGSYY

SEQ ID NO: 33897 - DNA, 1086 bp, Zea mays subsp. mays
  misc_feature (1)..(1086): Ceres Seq. ID no. 12413899
agtcacggtactccaccgctaaaaccttcggaaagaatccccaaatctcgcacacctcgaagccttcgaggcccgaaaccctagctcctcggcctccccgccgcttccacccatggctccaggactgcagcgcttcactgacattgcggacgacggcacgccccagctcgacgccgcgtccggcgaggagctggtccgtgtggaccgcaccgtggctgtcgcccttggcccccgctcgccggagtccccggggactctgttcgtcaccaccaggagggtgatttggctcagcgaagcggagaagggcaagggctacgcggtggacttcctcgccatctcgcttcacgctgtgtcgcgcgacctcgaggcgtacccctcgccctgtatctacactcagattgaggcacagttggtacagaagaggaggctggggaatcaaatcctgaagcaaatgaactagagctatctagagtatctgaaatgaggctcatactagcggaccccggtcaactggatgcactttttgatgtcttctgtcattgtgctgaactgaatcctgaccctaatgctgagtgcaatggggagaatggctggatccgtggtgaagatatgtctaatggtgactggattcgtgatgatgtggacatggttgatgaaaatgtcccgcagtttttcaatgccaatccgataggtcaaaatggtggatatgaccttagtcgttcagtatttgagcttcaaatcaacgaccaacgttttgaggatgcagaggaggaacaggagagccatgaaaataatggacattagaaacagagacatgttcctcgagagcatcatgtgatttattttgttgtaaatcactaccgatgcagctcggtttgcctactgtttcatctacactttctcttcctttttccttgatgttataggattaacatcactgggtgactttctggaattgcatcgatggttccttttggtgagaaaaggtcttgctgctggtcaagaatgtaacttgtagagcatgatgttgaatcgtgtgaaattagttcagtacttttgatctaacaaatagaaggtcgaattggg

SEQ ID NO: 33898 - protein, 115 aa, Zea mays subsp. mays
  peptide (1)..(115): Ceres Seq. ID no. 12413900
  misc_feature (44)..(97): Pfam Name: ICln Pfam Description: Nucleotide-sensitive chloride conductance regulator
  misc_feature (1)..(99): NCBI GI NO: 15241766 NR Description: putative protein; protein id: At5g62290
  misc_feature (1)..(97): NCBI GI NO: 37531484 NR Description: unknown protein
  misc_feature (26)..(100): NCBI GI NO: 18873796 NR Description: swelling dependent chloride channel [Danio rerio]
  misc_feature (26)..(100): NCBI GI NO: 30354604 NR Description: Similar to chloride channel
MAPGLQRFTDIADDGTPQLDAASGEELVRVDRTVAVALGPRSPESPGTLFVTTRRVIWLSEAEKGKGYAVDFLAISLHAVSRDLEAYPSPCIYTQIEAQLVQKRRLGNQILKQMN

SEQ ID NO: 33899 - protein, 107 aa, Zea mays subsp. mays
  peptide (1)..(107): Ceres Seq. ID no. 12413901
  misc_feature (1)..(107): NCBI GI NO: 15241766 NR Description: putative protein; protein id: At5g62290
  misc_feature (1)..(107): NCBI GI NO: 37531488 NR Description: hypothetical protein
  misc_feature (1)..(107): NCBI GI NO: 21671879 NR Description: Hypothetical protein
  misc_feature (11)..(107): NCBI GI NO: 19881624 NR Description: Hypothetical protein [Oryza sativa]
  misc_feature (1)..(65): NCBI GI NO: 18873796 NR Description: swelling dependent chloride channel [Danio rerio]
  misc_feature (1)..(65): NCBI GI NO: 30354604 NR Description: Similar to chloride channel
MRLILADPGQLDALFDVFCHCAELNPDPNAECNGENGWIRGEDMSNGDWIRDDVDMVDENVPQFFNANPIGQNGGYDLSRSVFELQINDQRFEDAEEEQESHENNGH

SEQ ID NO: 33900 - protein, 92 aa, Zea mays subsp. mays
  peptide (1)..(92): Ceres Seq. ID no. 12413902
SRYSTAKTFGKNPQISHTSKPSRPETLAPRPPRRFHPWLQDCSASLTLRTTARPSSTPRPARSWSVWTAPWLSPLAPARRSPRGLCSSPPGG

SEQ ID NO: 33901 - DNA, 840 bp, Zea mays subsp. mays
  misc_feature (1)..(840): Ceres Seq. ID no. 12467613
attggcaaggcttctcaaaagcacaagggaaaaatctctcgttctcttgctgcaaaaacagctcttgctatccggtatgatgcccttggtgatggtgaggacaactccattggcactgagagtcgacttaagcttgagacacggcttcaagttcttgagggtagagaacttgggaaatctgctggttccacaaaggggaagcccaagatagaagtgtatgaaaaggaccggaagaagggtactggggctttaacaactcctgctaagacatataaccctgcagctgatctggtactcacggaagaaacaccaaagaagtcagaattggcttcaaagaagaggaaacataatgaggtggaaactgaaccattagcagagcctgcagaggaagcaatccaggaggatggtgaccaggaggatcggaagaagaagaagaaaaagaacaaggaaagcaaggaggctcctgctggtgaaggtgatggtgagaagaaaaagaaaaagaagtctaaggaggtcgaggaagagcctgttgtggctgctgcttcagaagttaagaagaagaaaaagaagtctgacgctgatggtgaggatgtcgcaatgcaaaccgaagaatcaggtaagaaagagaagaaaaagaagaaaaaggcgtgctgatgatgagtgagacattcacactggaagagaatttgcgggtaccaaactaccaaaggctgggactcagctgttctgtaaaatggatttgcgggtagaaacgatatcgacatcagtttttttggacccggcttgtattcaagtacttgctcgatcctggtgatgatggaatttaagttttgctgttgc

SEQ ID NO: 33902 - protein, 217 aa, Zea mays subsp. mays
  peptide (1)..(217): Ceres Seq. ID no. 12467614
  misc_feature (1)..(55): Pfam Name: Pfam Description:  Putative snoRNA binding domain
  misc_feature (1)..(139): NCBI GI NO: 3288883 NR Description: SAR DNA binding protein [Oryza sativa]
  misc_feature (1)..(215): NCBI GI NO: 13623892 NR Description: MAR-binding protein [Nicotiana tabacum]
  misc_feature (1)..(192): NCBI GI NO: 7451352 NR Description: SAR DNA-binding protein 2 - garden pea
  misc_feature (1)..(192): NCBI GI NO: 33945887 NR Description: SAR DNA-binding protein-like protein
  misc_feature (1)..(194): NCBI GI NO: 15229884 NR Description: putative SAR DNA-binding protein-1
  misc_feature (1)..(192): NCBI GI NO: 15240445 NR Description: SAR DNA-binding protein - like
  misc_feature (1)..(214): NCBI GI NO: 7451353 NR Description: SAR DNA-binding protein-1 - garden pea
  misc_feature (1)..(89): NCBI GI NO: 2811028 NR Description: Hypothetical protein At5g27120
  misc_feature (1)..(197): NCBI GI NO: 9256555 NR Description: nucleolar protein 5; SIK similar protein
  misc_feature (1)..(197): NCBI GI NO: 26336274 NR Description: unnamed protein product [Mus musculus]
IGKASQKHKGKISRSLAAKTALAIRYDALGDGEDNSIGTESRLKLETRLQVLEGRELGKSAGSTKGKPKIEVYEKDRKKGTGALTTPAKTYNPAADLVLTEETPKKSELASKKRKHNEVETEPLAEPAEEAIQEDGDQEDRKKKKKKNKESKEAPAGEGDGEKKKKKKSKEVEEEPVVAAASEVKKKKKKSDADGEDVAMQTEESGKKEKKKKKKAC

SEQ ID NO: 33903 - DNA, 1561 bp, Zea mays subsp. mays
  misc_feature (1)..(1561): Ceres Seq. ID no. 12411608
ctctccccgtctgcctcgccctccacaccaggccacgccacacacaggatagcgagcgggagcgacggcggcggcggaggagctagggttttgatccggcctcgccggctaggctgcgccgccccgacgccgaagccatggacagggagcttctagagacgtttgacgcggccaagaaggcggccgacgaggcggcaggggacggcaactcgccggaggctggccgctgcctcgacgcgctgcggcggctgcgcgacattcgcgtcaacaccgacatcctcgtctcgacgcaggttggcaaacgccttcgaccccttactaagcatcctcactcaggcattcaagcagttgctgcagacctttttgggtactggaaaaaggttgtccttgaagagtcaggaaagaaaaatggcggctcagagaatgaaagatcaagtgactcttcaggaaaggttgagaaggtgaggcccgtgaagattgaaaagaactctgcatcagcaagcatgaagcttgagaaaagagatgtggatgttaggggtcagaagcctaacaatgtcaaagttgagaagactactagtaatggttccaaagctcaatctgtgaaggtggaaagggtatccaaagaagtcataaggactcctgactcgaagaggccagcatccgtccccaatggccacccaaagcttacatctcttgtcaaatgcaatgatcctacccgagataaaatccgggaactacttgctgaagcctttgtaagtgtttccagagagactagtgatgatgacagagacgaagtgaaaaacatcttggatgaagtcgaggcatgcgacccatacagggttgccgtgacagtagagtctgcactattcgagaggcttggaccttccactgggactcacagggcgaaatacaggtcaatcatgttcaacctgagggctgaaaacaataccgatttccggaggagggtcctcatcggtctagtggcgccggagaggcttccagacataccccctgatgagatggctagcgacgcaaggaagcaagagaacatgcagatcaaggagaaggctctgttcgactgcgagcgtggagcggcaccaaaggcgacgacggaccagttcaagtgtgccagatgtgggcagcggaagacgacttactaccagctgcagactcggagtgctgatgaaccgatgacgacgttcgtcacatgcgtgaactgcaacaatcactggaagttctgctgagtgttcagccttgctaaagtgtttacttagttgtgctgagcacactatcctgctgtgatgtgtgtgctctgttagttgtgactggaagttcgacagggcaggctgaacaactcaacttttttccccttttttaccccccgtaaactaggagcagttatcctcttcctctgtcaggcagcctcctgattcattcagattgtactagtcgaacgcgtgaatgttgttgacttgatcgcatcgtcaccagatgtgaatgttcttgggtggagttagaatagaatggtgccaagtcagacgatgctgatggattagtggcg

SEQ ID NO: 33904 - protein, 368 aa, Zea mays subsp. mays
  peptide (1)..(368): Ceres Seq. ID no. 12411609
  misc_feature (328)..(366): Pfam Name: TFIIS Pfam Description: Transcription factor S-II
  misc_feature (1)..(368): NCBI GI NO: 28876018 NR Description: putative transcription elongation factor
  misc_feature (1)..(368): NCBI GI NO: 23617251 NR Description: putative transcription elongation factor
  misc_feature (1)..(368): NCBI GI NO: 15224901 NR Description: putative elongation factor; protein id: At2g38560
  misc_feature (1)..(368): NCBI GI NO: 18377737 NR Description: putative elongation factor [Arabidopsis thaliana]
  misc_feature (32)..(368): NCBI GI NO: 20473950 NR Description: similar to transcription elongation factor TFIIS.h
  misc_feature (35)..(368): NCBI GI NO: 3288459 NR Description: transcription elongation factor TFIIS.h
  misc_feature (32)..(368): NCBI GI NO: 12832213 NR Description: unnamed protein product [Mus musculus]
  misc_feature (181)..(297): NCBI GI NO: 15233998 NR Description: putative protein; protein id: At4g18720.1
  misc_feature (3)..(97): NCBI GI NO: 15233998 NR Description: putative protein; protein id: At4g18720.1
  misc_feature (38)..(367): NCBI GI NO: 23485845 NR Description: transcription elongation factor TFIIS.h, putative
MDRELLETFDAAKKAADEAAGDGNSPEAGRCLDALRRLRDIRVNTDILVSTQVGKRLRPLTKHPHSGIQAVAADLFGYWKKVVLEESGKKNGGSENERSSDSSGKVEKVRPVKIEKNSASASMKLEKRDVDVRGQKPNNVKVEKTTSNGSKAQSVKVERVSKEVIRTPDSKRPASVPNGHPKLTSLVKCNDPTRDKIRELLAEAFVSVSRETSDDDRDEVKNILDEVEACDPYRVAVTVESALFERLGPSTGTHRAKYRSIMFNLRAENNTDFRRRVLIGLVAPERLPDIPPDEMASDARKQENMQIKEKALFDCERGAAPKATTDQFKCARCGQRKTTYYQLQTRSADEPMTTFVTCVNCNNHWKFC

SEQ ID NO: 33905 - protein, 246 aa, Zea mays subsp. mays
  peptide (1)..(246): Ceres Seq. ID no. 12411610
  misc_feature (206)..(244): Pfam Name: TFIIS Pfam Description: Transcription factor S-II
  misc_feature (1)..(246): NCBI GI NO: 28876018 NR Description: putative transcription elongation factor
  misc_feature (1)..(246): NCBI GI NO: 23617251 NR Description: putative transcription elongation factor
  misc_feature (1)..(246): NCBI GI NO: 15224901 NR Description: putative elongation factor; protein id: At2g38560
  misc_feature (1)..(246): NCBI GI NO: 18377737 NR Description: putative elongation factor [Arabidopsis thaliana]
  misc_feature (1)..(246): NCBI GI NO: 20473950 NR Description: similar to transcription elongation factor TFIIS.h
  misc_feature (1)..(246): NCBI GI NO: 3288459 NR Description: transcription elongation factor TFIIS.h
  misc_feature (1)..(246): NCBI GI NO: 12832213 NR Description: unnamed protein product [Mus musculus]
  misc_feature (59)..(175): NCBI GI NO: 15233998 NR Description: putative protein; protein id: At4g18720.1
  misc_feature (1)..(245): NCBI GI NO: 23485845 NR Description: transcription elongation factor TFIIS.h, putative
  misc_feature (39)..(246): NCBI GI NO: 4507385 NR Description: transcription elongation factor A (SII), 2
MKLEKRDVDVRGQKPNNVKVEKTTSNGSKAQSVKVERVSKEVIRTPDSKRPASVPNGHPKLTSLVKCNDPTRDKIRELLAEAFVSVSRETSDDDRDEVKNILDEVEACDPYRVAVTVESALFERLGPSTGTHRAKYRSIMFNLRAENNTDFRRRVLIGLVAPERLPDIPPDEMASDARKQENMQIKEKALFDCERGAAPKATTDQFKCARCGQRKTTYYQLQTRSADEPMTTFVTCVNCNNHWKFC

SEQ ID NO: 33906 - DNA, 1443 bp, Zea mays subsp. mays; identical to SEQ ID NO: 30847
  misc_feature (1)..(1443): Ceres Seq. ID no. 12351752
  misc_feature (1217)..(1217): n is a, c, t, g, unknown, or other

SEQ ID NO: 33907 - protein, 242 aa, Zea mays subsp. mays; identical to SEQ ID NO: 30848
  peptide (1)..(242): Ceres Seq. ID no. 12351753
  misc_feature (48)..(233): Pfam Name: Pfam Description:  GDSL-like Lipase/Acylhydrolase
  misc_feature (19)..(233): NCBI GI NO: 34898314 NR Description: ESTs AU075322
  misc_feature (19)..(233): NCBI GI NO: 15234074 NR Description: putative acetyltransferase; protein id: At4g01130
  misc_feature (19)..(216): NCBI GI NO: 7485222 NR Description: hypothetical protein A_IG002N01
  misc_feature (7)..(216): NCBI GI NO: 33147015 NR Description: putative early nodulin 8 precursor
  misc_feature (7)..(216): NCBI GI NO: 34901120 NR Description: contains ESTsAU172828
  misc_feature (31)..(217): NCBI GI NO: 33147016 NR Description: putative early nodulin 8 precursor
  misc_feature (23)..(216): NCBI GI NO: 30909057 NR Description: ENSP-like protein [Hevea brasiliensis]
  misc_feature (24)..(216): NCBI GI NO: 15231558 NR Description: nodulin, putative; protein id: At3g26430
  misc_feature (23)..(224): NCBI GI NO: 18390045 NR Description: Enod8.1 [Medicago truncatula]
  misc_feature (23)..(224): NCBI GI NO: 25457244 NR Description: early nodule-specific protein ENOD8

SEQ ID NO: 33908 - protein, 233 aa, Zea mays subsp. mays; identical to SEQ ID NO: 30849
  peptide (1)..(233): Ceres Seq. ID no. 12351754
  misc_feature (39)..(224): Pfam Name: Pfam Description:  GDSL-like Lipase/Acylhydrolase
  misc_feature (10)..(224): NCBI GI NO: 34898314 NR Description: ESTs AU075322
  misc_feature (10)..(224): NCBI GI NO: 15234074 NR Description: putative acetyltransferase; protein id: At4g01130
  misc_feature (10)..(207): NCBI GI NO: 7485222 NR Description: hypothetical protein A_IG002N01
  misc_feature (1)..(207): NCBI GI NO: 33147015 NR Description: putative early nodulin 8 precursor
  misc_feature (1)..(207): NCBI GI NO: 34901120 NR Description: contains ESTsAU172828
  misc_feature (22)..(208): NCBI GI NO: 33147016 NR Description: putative early nodulin 8 precursor
  misc_feature (14)..(207): NCBI GI NO: 30909057 NR Description: ENSP-like protein [Hevea brasiliensis]
  misc_feature (15)..(207): NCBI GI NO: 15231558 NR Description: nodulin, putative; protein id: At3g26430
  misc_feature (14)..(215): NCBI GI NO: 18390045 NR Description: Enod8.1 [Medicago truncatula]
  misc_feature (14)..(215): NCBI GI NO: 25457244 NR Description: early nodule-specific protein ENOD8

SEQ ID NO: 33909 - protein, 230 aa, Zea mays subsp. mays; identical to SEQ ID NO: 30850
  peptide (1)..(230): Ceres Seq. ID no. 12351755

SEQ ID NO: 33910 - DNA, 1482 bp, Zea mays subsp. mays
  misc_feature (1)..(1482): Ceres Seq. ID no. 12390132
tcttcctcctcccctctcccccgttggcttgttcagttgctcttcgtctcctcccctcccctccgccggctctccggcccctcttcgtcccccctcatcctccgcgcacatttccagacgaggaaccagggaggctaagtgcaggaaggcaggatgcagtacaagaacctgggccggtcggggctccgcgtcagccagctctcgtacggcgcgtgggtgaccttcgggaaccagctggacgtgaaggaggccaaggcgctgctgcaggcgtgccgggacgcgggcgtcaacttcttcgacaacgccgaggtgtacgccaacggccgcgccgaggagatcatgggccaggccatccgggacctgggctggcgccgctccgacgtcgtcatctccaccaagctcttctggggcggccagggccccaacgacaaggggcctctcccgcaagcacgtcgtcgagggcctccgcgcctcgctccgccgcctcgacatggactacgtcgacgtcgtctactgccaccgccccgacgcctccacgcccgtcgaggagacggtgcgcgccatcaactgggtcatcgaccagggctgggccttctactggggcacctccgagtggtccgcgcagcagatcaccgaggcctgggcagtcgccaaccgcctcgacctcgtcggacccatcgtcgagcagccggagtacaaccttttctccagacacaaggttgagtctgagttcttgccactttacagcacctatggcatcggattgactacatggagtcctctagcttcaggagtactaactggaaaatataccaaagggaacatacctgctgatagcaggtttgctctagacaattacaagaacctggcaaataggtccctggttgacgacacgcttcggaaagtgaatgggctaaaacctatcgccgctgaactcggcgtttcgttagctcaactctccattgcttggtgcgcgtcaaaccccaacgtctcatccgtgatcactggagccaccaaagaaagccagatcgtggagaacatgaaggctctagatgtcatcccactgctgacgccggaggtcgttgacaggattgaggcggtcgtccagagcaagcccaaacgcactgaatcatacaggtgaaggcggtacgtacgggcctacgtgaccgtgcagattgtgagtggcgcggagggattctcggcattcgtccgaatggagtttaggcctctccagtaccttgatttcacgaaattatatccatggaacattggtcccatgtattctttctgggcgtccccagtcgtggtgctgtgttccaaacatctgtccgtcctgtgtgtattctgcctgcgtttcagattcagattttttttttattttggacccaatcaaccctgcactgccttgtcgaggaccgtggtccgtggatggcaatggttcttacttcttactggttatattatatatgctgcaagattgct

SEQ ID NO: 33911 - protein, 254 aa, Zea mays subsp. mays
  peptide (1)..(254): Ceres Seq. ID no. 12390133
  misc_feature (136)..(253): Pfam Name: Pfam Description:  Equine herpesvirus glycoprotein gp2
FLLPSPPLACSVALRLLPSPPPALRPLFVPPHPPRTFPDEEPGRLSAGRQDAVQEPGPVGAPRQPALVRRVGDLREPAGREGGQGAAAGVPGRGRQLLRQRRGVRQRPRRGDHGPGHPGPGLAPLRRRHLHQALLGRPGPQRQGASPASTSSRASAPRSAASTWTTSTSSTATAPTPPRPSRRRCAPSTGSSTRAGPSTGAPPSGPRSRSPRPGQSPTASTSSDPSSSSRSTTFSPDTRLSLSSCHFTAPMASD

SEQ ID NO: 33912 - protein, 216 aa, Zea mays subsp. mays
  peptide (1)..(216): Ceres Seq. ID no. 12390134
  misc_feature (1)..(216): NCBI GI NO: 2832783 NR Description: potassium channel beta subunit [Egeria densa]
  misc_feature (1)..(216): NCBI GI NO: 15219795 NR Description: putative K+ channel, beta subunit
  misc_feature (1)..(216): NCBI GI NO: 7447934 NR Description: probable potassium channel beta chain KB1 - potato
  misc_feature (1)..(216): NCBI GI NO: 1063415 NR Description: K+ channel protein
  misc_feature (1)..(216): NCBI GI NO: 7447935 NR Description: probable potassium channel beta chain - rice
  misc_feature (1)..(210): NCBI GI NO: 23394348 NR Description: K+ channel protein [Phytophthora infestans]
  misc_feature (1)..(205): NCBI GI NO: 22987410 NR Description: hypothetical protein [Burkholderia fungorum]
  misc_feature (1)..(216): NCBI GI NO: 5019764 NR Description: potassium channel subunit Kv beta 1.1
  misc_feature (1)..(216): NCBI GI NO: 8393643 NR Description: potassium voltage gated channel
  misc_feature (1)..(216): NCBI GI NO: 1695763 NR Description: voltage gated potassium channels, beta subunit
MDYVDVVYCHRPDASTPVEETVRAINWVIDQGWAFYWGTSEWSAQQITEAWAVANRLDLVGPIVEQPEYNLFSRHKVESEFLPLYSTYGIGLTTWSPLASGVLTGKYTKGNIPADSRFALDNYKNLANRSLVDDTLRKVNGLKPIAAELGVSLAQLSIAWCASNPNVSSVITGATKESQIVENMKALDVIPLLTPEVVDRIEAVVQSKPKRTESYR

SEQ ID NO: 33913 - protein, 189 aa, Zea mays subsp. mays
  peptide (1)..(189): Ceres Seq. ID no. 12390135
  misc_feature (1)..(94): NCBI GI NO: 2832783 NR Description: potassium channel beta subunit [Egeria densa]
  misc_feature (1)..(94): NCBI GI NO: 15219795 NR Description: putative K+ channel, beta subunit
  misc_feature (1)..(94): NCBI GI NO: 7447934 NR Description: probable potassium channel beta chain KB1 - potato
  misc_feature (1)..(94): NCBI GI NO: 1063415 NR Description: K+ channel protein
  misc_feature (1)..(94): NCBI GI NO: 23394348 NR Description: K+ channel protein [Phytophthora infestans]
  misc_feature (1)..(91): NCBI GI NO: 22987410 NR Description: hypothetical protein [Burkholderia fungorum]
  misc_feature (1)..(94): NCBI GI NO: 5019764 NR Description: potassium channel subunit Kv beta 1.1
  misc_feature (1)..(94): NCBI GI NO: 8393643 NR Description: potassium voltage gated channel
  misc_feature (1)..(94): NCBI GI NO: 18202525 NR Description: Voltage-gated potassium channel beta-1 subunit
  misc_feature (1)..(94): NCBI GI NO: 27436962 NR Description: potassium voltage-gated channel
MQYKNLGRSGLRVSQLSYGAWVTFGNQLDVKEAKALLQACRDAGVNFFDNAEVYANGRAEEIMGQAIRDLGWRRSDVVISTKLFWGGQGPNDKGPLPQARRRGPPRLAPPPRHGLRRRRLLPPPRRLHARRGDGARHQLGHRPGLGLLLGHLRVVRAADHRGLGSRQPPRPRRTHRRAAGVQPFLQTQG

SEQ ID NO: 33914 - DNA, 1244 bp, Zea mays subsp. mays
  misc_feature (1)..(1244): Ceres Seq. ID no. 12376380
gccttctttcgccgttcatatactccgccgcttctactagtggtatcgtaggttaaggccaccccaagcaggagtctgcttccgttccattgcatcccagtcccagccaaagcaggatgccgcacgccaagacggactcggaggtgacgagcctggcgccgtcgtcgcctccgcggtcgcctccacggacccgcggcgccgtctactacgtgcagagcccgtcccgcgactcgcacgacggcgagacgatcaaggcggccacgtctgtgcactccacccccgcgctgagccccatggcgtcgccgcggccactcgcactcccactcccactcgtccatgggcagggactcctcctccagccgattctcgggccacggccacaacaagcgcaaggccgacaagggcggcagcaacaagggcgcgccgggcggcaaggggtggcaggagatcggcgtcatcgaggaggaagggctcatggacgaggaggaccacacgcggatcgtgccccgcaagtgctactgcttcctcgccttcctgctcggcttcgtcgcgctcttctccttcttcgcgctcgtgctctggggcgccagcaggtcccagaagccgcgcatcgtcatgggcaccatccgcttcgacaacttcatcatccaggccggcaccgacgcgtcgctcgtgcccaccgacatggccaccaccaactccaccgtcagattcacctaccgcaacaggggcaccttcttcgggatccacgtcaccgccgacccgttccagctctcctacagccagctcacgctcgcgtcaggagacctccacaacttctaccagcctcgcagcagcagccgcaccgtcagcgtcgccgtggtcggcaacaaggtgccgctgtacggcggcggacccacgctgacggcggcgccggcggccgggggcaaggggcagcagcaggccagcgccaaggtggcatcggtgcccatggtgctgaggaccacgctgcactcgcgggcctacgtgctgggcgcgctggtcaagcccaagttcacgctcgccgtcgagtgcagggtgctcatgaacccaaacaagcagaacaagcccatctcgctcgggaacgcctgccactactcatgatatatttagcctctcatactagctgctcaacatcaccatgcccatgcatccatctcctacctacctctcaattgtactgtaatggagtatttattgatttatttatgctttgcttcgtcttc

SEQ ID NO: 33915 - protein, 376 aa, Zea mays subsp. mays
  peptide (1)..(376): Ceres Seq. ID no. 12376381
  misc_feature (1)..(64): NCBI GI NO: 5777621 NR Description: CAA30379.1 protein [Oryza sativa]
  misc_feature (3)..(64): NCBI GI NO: 38345517 NR Description: OSJNBa0039K24.20
  misc_feature (3)..(63): NCBI GI NO: 18401556 NR Description: expressed protein; protein id: At1g45688
  misc_feature (10)..(63): NCBI GI NO: 34904260 NR Description: P0452F10.18
  misc_feature (1)..(59): NCBI GI NO: 34898370 NR Description: ESTD24835
  misc_feature (3)..(112): NCBI GI NO: 15239097 NR Description: putative protein; protein id: At5g42860.1
  misc_feature (3)..(112): NCBI GI NO: 28416677 NR Description: At5g42860 [Arabidopsis thaliana]
MPHAKTDSEVTSLAPSSPPRSPPRTRGAVYYVQSPSRDSHDGETIKAATSVHSTPALSPMASPRPLALPLPLVHGQGLLLQPILGPRPQQAQGRQGRQQQGRAGRQGVAGDRRHRGGRAHGRGGPHADRAPQVLLLPRLPARLRRALLLLRARALGRQQVPEAAHRHGHHPLRQLHHPGRHRRVARAHRHGHHQLHRQIHLPQQGHLLRDPRHRRPVPALLQPAHARVRRPPQLLPASQQQPHRQRRRGRQQGAAVRRRTHADGGAGGRGQGAAAGQRQGGIGAHGAEDHAALAGLRAGRAGQAQVHARRRVQGAHEPKQAEQAHLARERLPLLMIYLASHTSCSTSPCPCIHLLPTSQLYCNGVFIDLFMLCFVF

SEQ ID NO: 33916 - protein, 317 aa, Zea mays subsp. mays
  peptide (1)..(317): Ceres Seq. ID no. 12376382
  misc_feature (1)..(53): NCBI GI NO: 15239097 NR Description: putative protein; protein id: At5g42860.1
  misc_feature (1)..(53): NCBI GI NO: 28416677 NR Description: At5g42860 [Arabidopsis thaliana]
MASPRPLALPLPLVHGQGLLLQPILGPRPQQAQGRQGRQQQGRAGRQGVAGDRRHRGGRAHGRGGPHADRAPQVLLLPRLPARLRRALLLLRARALGRQQVPEAAHRHGHHPLRQLHHPGRHRRVARAHRHGHHQLHRQIHLPQQGHLLRDPRHRRPVPALLQPAHARVRRPPQLLPASQQQPHRQRRRGRQQGAAVRRRTHADGGAGGRGQGAAAGQRQGGIGAHGAEDHAALAGLRAGRAGQAQVHARRRVQGAHEPKQAEQAHLARERLPLLMIYLASHTSCSTSPCPCIHLLPTSQLYCNGVFIDLFMLCFVF

SEQ ID NO: 33917 - protein, 261 aa, Zea mays subsp. mays
  peptide (1)..(261): Ceres Seq. ID no. 12376383
  misc_feature (1)..(260): NCBI GI NO: 5777621 NR Description: CAA30379.1 protein [Oryza sativa]
  misc_feature (1)..(260): NCBI GI NO: 38345517 NR Description: OSJNBa0039K24.20
  misc_feature (1)..(258): NCBI GI NO: 18401556 NR Description: expressed protein; protein id: At1g45688
  misc_feature (1)..(258): NCBI GI NO: 32488073 NR Description: OSJNBa0084A10.1
  misc_feature (1)..(261): NCBI GI NO: 34904260 NR Description: P0452F10.18
  misc_feature (5)..(258): NCBI GI NO: 15239097 NR Description: putative protein; protein id: At5g42860.1
  misc_feature (5)..(258): NCBI GI NO: 28416677 NR Description: At5g42860 [Arabidopsis thaliana]
  misc_feature (1)..(99): NCBI GI NO: 34898370 NR Description: ESTD24835
  misc_feature (158)..(258): NCBI GI NO: 34898370 NR Description: ESTD24835
  misc_feature (1)..(258): NCBI GI NO: 15227481 NR Description: unknown protein; protein id: At2g41990.1
MGRDSSSSRFSGHGHNKRKADKGGSNKGAPGGKGWQEIGVIEEEGLMDEEDHTRIVPRKCYCFLAFLLGFVALFSFFALVLWGASRSQKPRIVMGTIRFDNFIIQAGTDASLVPTDMATTNSTVRFTYRNRGTFFGIHVTADPFQLSYSQLTLASGDLHNFYQPRSSSRTVSVAVVGNKVPLYGGGPTLTAAPAAGGKGQQQASAKVASVPMVLRTTLHSRAYVLGALVKPKFTLAVECRVLMNPNKQNKPISLGNACHYS

SEQ ID NO: 33918 - DNA, 1389 bp, Zea mays subsp. mays; identical to SEQ ID NO: 25266
  misc_feature (1)..(1389): Ceres Seq. ID no. 13498794

SEQ ID NO: 33919 - protein, 254 aa, Zea mays subsp. mays; identical to SEQ ID NO: 25267
  peptide (1)..(254): Ceres Seq. ID no. 13498795
  misc_feature (14)..(210): Pfam Name: Pfam Description:  Ribosomal protein L3
  misc_feature (1)..(254): NCBI GI NO: 34902796 NR Description: unnamed protein product
  misc_feature (1)..(254): NCBI GI NO: 18401521 NR Description: ribosomal protein L3p family
  misc_feature (1)..(236): NCBI GI NO: 23108389 NR Description: hypothetical protein
  misc_feature (1)..(233): NCBI GI NO: 16125497 NR Description: ribosomal protein L3 [Caulobacter crescentus CB15]
  misc_feature (7)..(225): NCBI GI NO: 23014088 NR Description: hypothetical protein
  misc_feature (122)..(254): NCBI GI NO: 21450877 NR Description: putative ribosomal protein L3
  misc_feature (7)..(223): NCBI GI NO: 22956505 NR Description: hypothetical protein [Rhodobacter sphaeroides]
  misc_feature (7)..(228): NCBI GI NO: 22965161 NR Description: hypothetical protein [Rhodopseudomonas palustris]
  misc_feature (7)..(235): NCBI GI NO: 27380511 NR Description: 50S ribosomal protein L3
  misc_feature (2)..(223): NCBI GI NO: 17987040 NR Description: LSU ribosomal protein L3P [Brucella melitensis]

SEQ ID NO: 33920 - protein, 238 aa, Zea mays subsp. mays; identical to SEQ ID NO: 25268
  peptide (1)..(238): Ceres Seq. ID no. 13498796
  misc_feature (1)..(194): Pfam Name: Pfam Description:  Ribosomal protein L3
  misc_feature (1)..(238): NCBI GI NO: 34902796 NR Description: unnamed protein product
  misc_feature (1)..(238): NCBI GI NO: 18401521 NR Description: ribosomal protein L3p family
  misc_feature (1)..(220): NCBI GI NO: 23108389 NR Description: hypothetical protein
  misc_feature (1)..(217): NCBI GI NO: 16125497 NR Description: ribosomal protein L3 [Caulobacter crescentus CB15]
  misc_feature (1)..(209): NCBI GI NO: 23014088 NR Description: hypothetical protein
  misc_feature (106)..(238): NCBI GI NO: 21450877 NR Description: putative ribosomal protein L3
  misc_feature (1)..(207): NCBI GI NO: 22956505 NR Description: hypothetical protein [Rhodobacter sphaeroides]
  misc_feature (1)..(212): NCBI GI NO: 22965161 NR Description: hypothetical protein [Rhodopseudomonas palustris]
  misc_feature (1)..(219): NCBI GI NO: 27380511 NR Description: 50S ribosomal protein L3
  misc_feature (1)..(207): NCBI GI NO: 17987040 NR Description: LSU ribosomal protein L3P [Brucella melitensis]

SEQ ID NO: 33921 - protein, 235 aa, Zea mays subsp. mays; identical to SEQ ID NO: 25269
  peptide (1)..(235): Ceres Seq. ID no. 13498797
  misc_feature (1)..(191): Pfam Name: Pfam Description:  Ribosomal protein L3
  misc_feature (1)..(235): NCBI GI NO: 34902796 NR Description: unnamed protein product
  misc_feature (1)..(235): NCBI GI NO: 18401521 NR Description: ribosomal protein L3p family
  misc_feature (1)..(217): NCBI GI NO: 23108389 NR Description: hypothetical protein
  misc_feature (1)..(214): NCBI GI NO: 16125497 NR Description: ribosomal protein L3 [Caulobacter crescentus CB15]
  misc_feature (1)..(206): NCBI GI NO: 23014088 NR Description: hypothetical protein
  misc_feature (103)..(235): NCBI GI NO: 21450877 NR Description: putative ribosomal protein L3
  misc_feature (1)..(204): NCBI GI NO: 22956505 NR Description: hypothetical protein [Rhodobacter sphaeroides]
  misc_feature (1)..(209): NCBI GI NO: 22965161 NR Description: hypothetical protein [Rhodopseudomonas palustris]
  misc_feature (1)..(216): NCBI GI NO: 27380511 NR Description: 50S ribosomal protein L3
  misc_feature (1)..(204): NCBI GI NO: 17987040 NR Description: LSU ribosomal protein L3P [Brucella melitensis]

SEQ ID NO: 33922 - DNA, 1283 bp, Zea mays subsp. mays
  misc_feature (1)..(1283): Ceres Seq. ID no. 12348789
atcgtacgtcgtgtcctgcagtggctcacattcgacgacacacagtagagggtagctagcagtggtgctcctggcctgtgacgatggtttcctcgtcgtcgtctccttccgccaccgccgccgccgccgccgccgtggtcctggcggtggccctgatgacgacgacgtgcttccatggcgcgacggcgcagctgtgcgaggactactatgacagcacctgcccggacgcctacgacatcgtgaaccaggtgctcgtcgacgcagtgcagtcggacacccgcatcttcgccagcctcatccgcctgcacttccacgactgcttcgtccagggctgcgacgcctcgcttctgctggacagcgtcccagggatgccgtcggagaagacgtcggcgcccaacaacggctcagcgcgcgggttcggggtggtggacgccgccaaggctgcgctggagagcgcctgccctggtgttgtctcctgcgctgacatcctcgccatcgccgcagagatctcagtcgagctgtcgggaggccccagctggggtgtgcttctgggcaggctggacagcaagacctccgacttcaacggatccctggacctcccagagcccaccgacaacctcaccatacttcagcagaagttcagcaacctcagcctcaacgatgtcgacctggtcgccctttcaggggggcacacgttcggccgggtccaatgcaagttcatcacggaccggctctacaacttcagcgggacgaacatgcccgacccgacgctggacgcctcctaccgggccttcctgacgcagaggtgccccaggaacggcgaccccacagccctgaacgacctggacccgacgaccccggacaccttcgacaacaactactacaccaacatcgaggtgaaccgaggcatcctcaactccgaccaggagctcaagtcgtcgcccctagcgcagggcaccacggcgcccatcgtcgaccagttcgcggccagccaagacgacttcttcgcgagcttcgcgcagtccatgatcaacatggggaacatcaagccgctcacggacccgtccagaggagaagtccgcaccaactgcagaagggtcaactgatccaattaagtcgatcggtcgtaattaatgtgtgcagagaaaacgacatgttcatcattggctggtcgatgtcatttggctagctgctcatcagggtgtgaagtttctgtatacacatgcagcatgcatgtatgtttcatgttttccaatccaactcaataaaatttgccaaagatt

SEQ ID NO: 33923 - protein, 340 aa, Zea mays subsp. mays
  peptide (1)..(340): Ceres Seq. ID no. 12348790
  misc_feature (53)..(303): Pfam Name: Pfam Description:  Peroxidase
  misc_feature (4)..(340): NCBI GI NO: 37530466 NR Description: putative peroxidase
  misc_feature (13)..(340): NCBI GI NO: 20330758 NR Description: Putative peroxidase
  misc_feature (14)..(340): NCBI GI NO: 8546851 NR Description: peroxidase [Ipomoea batatas]
  misc_feature (19)..(340): NCBI GI NO: 21593262 NR Description: peroxidase [Arabidopsis thaliana]
  misc_feature (19)..(340): NCBI GI NO: 5002348 NR Description: peroxidase 5 precursor [Phaseolus vulgaris]
  misc_feature (19)..(340): NCBI GI NO: 15240140 NR Description: peroxidase, putative; protein id: At5g06720
  misc_feature (7)..(340): NCBI GI NO: 15224496 NR Description: peroxidase; protein id: At2g38380
  misc_feature (33)..(340): NCBI GI NO: 1279654 NR Description: peroxidase
  misc_feature (7)..(340): NCBI GI NO: 81653 NR Description: peroxidase (EC 1.11.1.7) E - Arabidopsis thaliana
  misc_feature (36)..(340): NCBI GI NO: 11513747 NR Description: Chain A, Arabidopsis Thaliana Peroxidase A2
MVSSSSSPSATAAAAAAVVLAVALMTTTCFHGATAQLCEDYYDSTCPDAYDIVNQVLVDAVQSDTRIFASLIRLHFHDCFVQGCDASLLLDSVPGMPSEKTSAPNNGSARGFGVVDAAKAALESACPGVVSCADILAIAAEISVELSGGPSWGVLLGRLDSKTSDFNGSLDLPEPTDNLTILQQKFSNLSLNDVDLVALSGGHTFGRVQCKFITDRLYNFSGTNMPDPTLDASYRAFLTQRCPRNGDPTALNDLDPTTPDTFDNNYYTNIEVNRGILNSDQELKSSPLAQGTTAPIVDQFAASQDDFFASFAQSMINMGNIKPLTDPSRGEVRTNCRRVN

SEQ ID NO: 33924 - protein, 316 aa, Zea mays subsp. mays
  peptide (1)..(316): Ceres Seq. ID no. 12348791
  misc_feature (29)..(279): Pfam Name: Pfam Description:  Peroxidase
  misc_feature (1)..(316): NCBI GI NO: 37530466 NR Description: putative peroxidase
  misc_feature (1)..(316): NCBI GI NO: 20330758 NR Description: Putative peroxidase
  misc_feature (1)..(316): NCBI GI NO: 8546851 NR Description: peroxidase [Ipomoea batatas]
  misc_feature (1)..(316): NCBI GI NO: 21593262 NR Description: peroxidase [Arabidopsis thaliana]
  misc_feature (1)..(316): NCBI GI NO: 5002348 NR Description: peroxidase 5 precursor [Phaseolus vulgaris]
  misc_feature (1)..(316): NCBI GI NO: 15240140 NR Description: peroxidase, putative; protein id: At5g06720
  misc_feature (1)..(316): NCBI GI NO: 15224496 NR Description: peroxidase; protein id: At2g38380
  misc_feature (9)..(316): NCBI GI NO: 1279654 NR Description: peroxidase
  misc_feature (1)..(316): NCBI GI NO: 81653 NR Description: peroxidase (EC 1.11.1.7) E - Arabidopsis thaliana
  misc_feature (12)..(316): NCBI GI NO: 11513747 NR Description: Chain A, Arabidopsis Thaliana Peroxidase A2
MTTTCFHGATAQLCEDYYDSTCPDAYDIVNQVLVDAVQSDTRIFASLIRLHFHDCFVQGCDASLLLDSVPGMPSEKTSAPNNGSARGFGVVDAAKAALESACPGVVSCADILAIAAEISVELSGGPSWGVLLGRLDSKTSDFNGSLDLPEPTDNLTILQQKFSNLSLNDVDLVALSGGHTFGRVQCKFITDRLYNFSGTNMPDPTLDASYRAFLTQRCPRNGDPTALNDLDPTTPDTFDNNYYTNIEVNRGILNSDQELKSSPLAQGTTAPIVDQFAASQDDFFASFAQSMINMGNIKPLTDPSRGEVRTNCRRVN

SEQ ID NO: 33925 - protein, 245 aa, Zea mays subsp. mays
  peptide (1)..(245): Ceres Seq. ID no. 12348792
  misc_feature (1)..(208): Pfam Name: Pfam Description:  Peroxidase
  misc_feature (1)..(245): NCBI GI NO: 37530466 NR Description: putative peroxidase
  misc_feature (1)..(245): NCBI GI NO: 20330758 NR Description: Putative peroxidase
  misc_feature (1)..(245): NCBI GI NO: 8546851 NR Description: peroxidase [Ipomoea batatas]
  misc_feature (1)..(245): NCBI GI NO: 21593262 NR Description: peroxidase [Arabidopsis thaliana]
  misc_feature (1)..(245): NCBI GI NO: 5002348 NR Description: peroxidase 5 precursor [Phaseolus vulgaris]
  misc_feature (1)..(245): NCBI GI NO: 15240140 NR Description: peroxidase, putative; protein id: At5g06720
  misc_feature (1)..(245): NCBI GI NO: 15224496 NR Description: peroxidase; protein id: At2g38380
  misc_feature (1)..(245): NCBI GI NO: 1279654 NR Description: peroxidase
  misc_feature (1)..(245): NCBI GI NO: 81653 NR Description: peroxidase (EC 1.11.1.7) E - Arabidopsis thaliana
  misc_feature (1)..(245): NCBI GI NO: 11513747 NR Description: Chain A, Arabidopsis Thaliana Peroxidase A2
MPSEKTSAPNNGSARGFGVVDAAKAALESACPGVVSCADILAIAAEISVELSGGPSWGVLLGRLDSKTSDFNGSLDLPEPTDNLTILQQKFSNLSLNDVDLVALSGGHTFGRVQCKFITDRLYNFSGTNMPDPTLDASYRAFLTQRCPRNGDPTALNDLDPTTPDTFDNNYYTNIEVNRGILNSDQELKSSPLAQGTTAPIVDQFAASQDDFFASFAQSMINMGNIKPLTDPSRGEVRTNCRRVN

SEQ ID NO: 33926 - DNA, 924 bp, Zea mays subsp. mays
  misc_feature (1)..(924): Ceres Seq. ID no. 12413613
aaaaaactgccactccactcctaccccacacagaagcggcggcggcggagcaaacgcaggcgaaggcgagggtgtgagggaaggagcaccagccatggtgcacgtcaacttctaccgcaactatggtaagacgttcaagaaaccaaggcgtccttatgagaaggagcgtcttgatgctgaactgaagctggtcggtgagtatgggctgaggtgcaagcgtgagctttggagggtccagtatgcactgagcaggatccgtaatgctgcaaggcacttgctcacccttgacgagaagaacccccgtcgtatctttgagggtgaggcgcttcttcgccgcatgaaccgctatgggctgcttgctgagggtcagaacaagcttgattatgttcttgccctcaccgctgagaacttcctcgcaaggcggcttcaaacacttgtcttcaaggctggcatggccaagtccattcaccatgctcgtgtcttgatcaagcagcgtcacatcagggttggcaggcaaattgtcaacgtcccatcattcatggtgagggtggagtctgagaagcacattgacttttcactgtcaagcccattcggtggaggccccgcaggaagggtgaagagaaagaatcagaagaaggcaagcggtggcggcgatgctggcgatgaggatgaggagtgaggatggacaagtagcgttacccaatataataatattatctagttttcttgaacttgttcgaatgatgagtgcttagctgtgtgatctgacgcagagttccctgtgctgactctgtgtcatggatggtccattttatcttatggtattatcagcctttacataactgctatgtttggatatgttcaattctgttgcaattttatgtggttgttttttgcgttttgttgctattaagctgttctttc

SEQ ID NO: 33927 - protein, 225 aa, Zea mays subsp. mays
  peptide (1)..(225): Ceres Seq. ID no. 12413614
  misc_feature (37)..(138): Pfam Name: Pfam Description:  Ribosomal protein S4/S9 N-terminal domain
  misc_feature (32)..(225): NCBI GI NO: 15242498 NR Description: 40S ribosomal protein S9-like
  misc_feature (32)..(225): NCBI GI NO: 15242241 NR Description: 40S ribosomal protein - like; protein id:At5g15200
  misc_feature (32)..(224): NCBI GI NO: 6440857 NR Description: 40S ribosomal protein S9 [Chlamydomonas sp. HS-5]
  misc_feature (39)..(225): NCBI GI NO: 40741183 NR Description: RS9_PODAN 40S ribosomal protein S9 (S7)
  misc_feature (39)..(225): NCBI GI NO: 1710780 NR Description: 40S ribosomal protein S9 (S7)
  misc_feature (43)..(225): NCBI GI NO: 14141193 NR Description: ribosomal protein S9; 40S ribosomal protein S9
  misc_feature (43)..(225): NCBI GI NO: 27735416 NR Description: Similar to ribosomal protein S9 [Xenopus laevis]
  misc_feature (43)..(225): NCBI GI NO: 13592067 NR Description: ribosomal protein S9 [Rattus norvegicus]
  misc_feature (43)..(225): NCBI GI NO: 15294029 NR Description: 40S ribosomal protein S9 [Ictalurus punctatus]
  misc_feature (43)..(225): NCBI GI NO: 1362936 NR Description: ribosomal protein S9, cytosolic - human
KNCHSTPTPHRSGGGGANAGEGEGVREGAPAMVHVNFYRNYGKTFKKPRRPYEKERLDAELKLVGEYGLRCKRELWRVQYALSRIRNAARHLLTLDEKNPRRIFEGEALLRRMNRYGLLAEGQNKLDYVLALTAENFLARRLQTLVFKAGMAKSIHHARVLIKQRHIRVGRQIVNVPSFMVRVESEKHIDFSLSSPFGGGPAGRVKRKNQKKASGGGDAGDEDEE

SEQ ID NO: 33928 - protein, 194 aa, Zea mays subsp. mays
  peptide (1)..(194): Ceres Seq. ID no. 12413615
  misc_feature (6)..(107): Pfam Name: Pfam Description:  Ribosomal protein S4/S9 N-terminal domain
  misc_feature (1)..(194): NCBI GI NO: 15242498 NR Description: 40S ribosomal protein S9-like
  misc_feature (1)..(194): NCBI GI NO: 15242241 NR Description: 40S ribosomal protein - like; protein id:At5g15200
  misc_feature (1)..(193): NCBI GI NO: 6440857 NR Description: 40S ribosomal protein S9 [Chlamydomonas sp. HS-5]
  misc_feature (8)..(194): NCBI GI NO: 40741183 NR Description: RS9_PODAN 40S ribosomal protein S9 (S7)
  misc_feature (8)..(194): NCBI GI NO: 1710780 NR Description: 40S ribosomal protein S9 (S7)
  misc_feature (12)..(194): NCBI GI NO: 14141193 NR Description: ribosomal protein S9; 40S ribosomal protein S9
  misc_feature (12)..(194): NCBI GI NO: 27735416 NR Description: Similar to ribosomal protein S9 [Xenopus laevis]
  misc_feature (12)..(194): NCBI GI NO: 13592067 NR Description: ribosomal protein S9 [Rattus norvegicus]
  misc_feature (12)..(194): NCBI GI NO: 15294029 NR Description: 40S ribosomal protein S9 [Ictalurus punctatus]
  misc_feature (12)..(194): NCBI GI NO: 1362936 NR Description: ribosomal protein S9, cytosolic - human
MVHVNFYRNYGKTFKKPRRPYEKERLDAELKLVGEYGLRCKRELWRVQYALSRIRNAARHLLTLDEKNPRRIFEGEALLRRMNRYGLLAEGQNKLDYVLALTAENFLARRLQTLVFKAGMAKSIHHARVLIKQRHIRVGRQIVNVPSFMVRVESEKHIDFSLSSPFGGGPAGRVKRKNQKKASGGGDAGDEDEE

SEQ ID NO: 33929 - protein, 113 aa, Zea mays subsp. mays
  peptide (1)..(113): Ceres Seq. ID no. 12413616
  misc_feature (28)..(75): Pfam Name: Pfam Description:  S4 domain
  misc_feature (1)..(113): NCBI GI NO: 15242498 NR Description: 40S ribosomal protein S9-like
  misc_feature (1)..(113): NCBI GI NO: 15242241 NR Description: 40S ribosomal protein - like; protein id:At5g15200
  misc_feature (1)..(112): NCBI GI NO: 6440857 NR Description: 40S ribosomal protein S9 [Chlamydomonas sp. HS-5]
  misc_feature (1)..(113): NCBI GI NO: 40741183 NR Description: RS9_PODAN 40S ribosomal protein S9 (S7)
  misc_feature (1)..(113): NCBI GI NO: 1710780 NR Description: 40S ribosomal protein S9 (S7)
  misc_feature (1)..(113): NCBI GI NO: 14141193 NR Description: ribosomal protein S9; 40S ribosomal protein S9
  misc_feature (1)..(113): NCBI GI NO: 27735416 NR Description: Similar to ribosomal protein S9 [Xenopus laevis]
  misc_feature (1)..(113): NCBI GI NO: 13592067 NR Description: ribosomal protein S9 [Rattus norvegicus]
  misc_feature (1)..(113): NCBI GI NO: 15294029 NR Description: 40S ribosomal protein S9 [Ictalurus punctatus]
  misc_feature (1)..(113): NCBI GI NO: 1362936 NR Description: ribosomal protein S9, cytosolic - human
MNRYGLLAEGQNKLDYVLALTAENFLARRLQTLVFKAGMAKSIHHARVLIKQRHIRVGRQIVNVPSFMVRVESEKHIDFSLSSPFGGGPAGRVKRKNQKKASGGGDAGDEDEE

SEQ ID NO: 33930 - DNA, 935 bp, Zea mays subsp. mays
  misc_feature (1)..(935): Ceres Seq. ID no. 12342362
gaggaagggaaggtggtggtgctgaactactccttgatggccaatttcgtgatggtttatgggtatgttcctggggcacagtctgaggtttgccggttgtgcttggagttgccggggctggagcctctactttatctggatggcgatcagctgaatggagtgcatgagaagggagttcatgatctgtggagagtgctgaaggatgagatttgcctgccactgatgatatcattgtgccaactgaacggtctgcgcttgccgccttgcttgatggctttgcctgctgatctcaagactaaggtattggggtttttacctggggttgatcttgcaaaggttgagtgcacatgcaaggaaatgatgaatcttgcatcagatgatagtatctggaagaagcttgtatccaagtttgaaaattatggcgagggctctaggctggcaggcaagaatgcaaaggccatatttgtagaagcttggcaggccaataagagacggcagaagaggcccaatccaaccttttggaactatggctggggaaacagtccttatagccgcccacttaggctgccattgattggtggggactcggacagacttccttttattgggaatcatggttctgttgggcgccactttggaaatcaacgaaggaatatctcaccgaactgcattcttgatggtcaccgtcataacttcctttgaagccatgtcaatgagttttacttgtatgttaagagtgttttataaggacttcaatggtgcatatacggttagaccgccttgttcatatcgtcaagtcgcacacttatgcttgtgcacagcactcttatgatcttatcctaatatatccccttagtatcttagatcgtatctttactatctttttttggtaccaaatgtaatccagtgtcctagtaataaagtacccttgttct

SEQ ID NO: 33931 - protein, 233 aa, Zea mays subsp. mays
  peptide (1)..(233): Ceres Seq. ID no. 12342363
  misc_feature (90)..(132): Pfam Name: Pfam Description:  F-box domain
  misc_feature (1)..(132): NCBI GI NO: 27311243 NR Description: Hypothetical protein
  misc_feature (6)..(219): NCBI GI NO: 18395296 NR Description: expressed protein; protein id: At1g23780
  misc_feature (6)..(131): NCBI GI NO: 15220857 NR Description: unknown protein; protein id: At1g23770.1
  misc_feature (63)..(125): NCBI GI NO: 15223132 NR Description: hypothetical protein; protein id: At1g70360.1
  misc_feature (62)..(136): NCBI GI NO: 37530790 NR Description: unknown protein
EEGKVVVLNYSLMANFVMVYGYVPGAQSEVCRLCLELPGLEPLLYLDGDQLNGVHEKGVHDLWRVLKDEICLPLMISLCQLNGLRLPPCLMALPADLKTKVLGFLPGVDLAKVECTCKEMMNLASDDSIWKKLVSKFENYGEGSRLAGKNAKAIFVEAWQANKRRQKRPNPTFWNYGWGNSPYSRPLRLPLIGGDSDRLPFIGNHGSVGRHFGNQRRNISPNCILDGHRHNFL

SEQ ID NO: 33932 - protein, 221 aa, Zea mays subsp. mays
  peptide (1)..(221): Ceres Seq. ID no. 12342364
  misc_feature (78)..(120): Pfam Name: Pfam Description:  F-box domain
  misc_feature (1)..(120): NCBI GI NO: 27311243 NR Description: Hypothetical protein
  misc_feature (1)..(207): NCBI GI NO: 18395296 NR Description: expressed protein; protein id: At1g23780
  misc_feature (1)..(119): NCBI GI NO: 15220857 NR Description: unknown protein; protein id: At1g23770.1
  misc_feature (51)..(113): NCBI GI NO: 15223132 NR Description: hypothetical protein; protein id: At1g70360.1
  misc_feature (50)..(124): NCBI GI NO: 37530790 NR Description: unknown protein
MANFVMVYGYVPGAQSEVCRLCLELPGLEPLLYLDGDQLNGVHEKGVHDLWRVLKDEICLPLMISLCQLNGLRLPPCLMALPADLKTKVLGFLPGVDLAKVECTCKEMMNLASDDSIWKKLVSKFENYGEGSRLAGKNAKAIFVEAWQANKRRQKRPNPTFWNYGWGNSPYSRPLRLPLIGGDSDRLPFIGNHGSVGRHFGNQRRNISPNCILDGHRHNFL

SEQ ID NO: 33933 - protein, 216 aa, Zea mays subsp. mays
  peptide (1)..(216): Ceres Seq. ID no. 12342365
  misc_feature (73)..(115): Pfam Name: Pfam Description:  F-box domain
  misc_feature (1)..(115): NCBI GI NO: 27311243 NR Description: Hypothetical protein
  misc_feature (1)..(202): NCBI GI NO: 18395296 NR Description: expressed protein; protein id: At1g23780
  misc_feature (1)..(114): NCBI GI NO: 15220857 NR Description: unknown protein; protein id: At1g23770.1
  misc_feature (46)..(108): NCBI GI NO: 15223132 NR Description: hypothetical protein; protein id: At1g70360.1
  misc_feature (45)..(119): NCBI GI NO: 37530790 NR Description: unknown protein
MVYGYVPGAQSEVCRLCLELPGLEPLLYLDGDQLNGVHEKGVHDLWRVLKDEICLPLMISLCQLNGLRLPPCLMALPADLKTKVLGFLPGVDLAKVECTCKEMMNLASDDSIWKKLVSKFENYGEGSRLAGKNAKAIFVEAWQANKRRQKRPNPTFWNYGWGNSPYSRPLRLPLIGGDSDRLPFIGNHGSVGRHFGNQRRNISPNCILDGHRHNFL

SEQ ID NO: 33934 - DNA, 1191 bp, Zea mays subsp. mays
  misc_feature (1)..(1191): Ceres Seq. ID no. 12411600
gtccaaaaaggaggcgccgcgctcctcttcttctacgccgttcactctctctagtctctcccttcccttctccacgcctccgcccccactcgtgagactctacctagccctagcgccagcaccacccgcccaacctcccggagagagagagagagaggaggaggccttcgccgccgccgttgccgtcggccgagacgccaggatgttcgggtaccagaagggcctcgatgtcgaggcggggacatcgggcgccgccgccacgggcggcgcgcgccagctctacccggggatgcaggagagccccgagctgcgctgggcgctcatccgcaagatctacgtcattctctccctccagctgctcctcaccgccgtcgtcgccgcagtcgtcgtcaaggtccgcgccatcccgcacttcttcaccaccaccagcgccggcctcggcctctacatcttcctcatcatcctcccctttatcgtgctgtgcccgttgtacttctaccacgagaagcacccagtcaacctgatcctgctcggcctcttcaccgttgccatcagctttgctgtgggcatgacatgtgccttcaccagtggcaaggtcattctggagtctgcaattctgacaacagtggtcgtgctcagccttaccgcatacactttctgggccgtgaataggggcaaagacttcagcttcctgggtcctttcctgttcgccgccctcatagtgctgcttgtgttcgcactcatccagatcctgttcccactgggcaagctctcccagatgatctacggcgggctggcgtcgctcatcttcagcgggtacatcgtctacgacacaaacaacatcatcaggcgctacacgtacgaccagtacgtctgggccgcagtctccctgtacctggacgttatcaacctcttcctgtccctgatgaccctcttcagggcagccgactaggcgctctgctctcatcctgtctatctacgagtcggtgcctgaatgctcccgtggttaagctccggtacccagaattccagttccaagaatagagttgtatatagctacctgtgttgcctttctactagtatggttttattcgacttggctcggttcgatcagagtctttatacgtagttggatcgcgaacaaatgaacctgcatgggattatggagagccatctgctttatgatcctcg

SEQ ID NO: 33935 - protein, 316 aa, Zea mays subsp. mays
  peptide (1)..(316): Ceres Seq. ID no. 12411601
  misc_feature (100)..(316): Pfam Name: Pfam Description:  Uncharacterised protein family UPF0005
  misc_feature (68)..(316): NCBI GI NO: 34393841 NR Description: putative z-protein
  misc_feature (90)..(316): NCBI GI NO: 14626300 NR Description: putative receptor-associated protein
  misc_feature (71)..(316): NCBI GI NO: 15218701 NR Description: putative glutamate/aspartate-binding peptide
  misc_feature (93)..(316): NCBI GI NO: 15229411 NR Description: putative protein; protein id: At3g63310.1
  misc_feature (71)..(314): NCBI GI NO: 15235466 NR Description: putative glutamate-/aspartate-binding peptide
  misc_feature (69)..(316): NCBI GI NO: 18414455 NR Description: Expressed protein; protein id: At4g15470
  misc_feature (97)..(316): NCBI GI NO: 34393840 NR Description: putative z-protein
  misc_feature (69)..(277): NCBI GI NO: 15810201 NR Description: AT4g15470/dl3775w [Arabidopsis thaliana]
  misc_feature (69)..(160): NCBI GI NO: 7485070 NR Description: hypothetical protein - Arabidopsis thaliana
  misc_feature (197)..(268): NCBI GI NO: 7485070 NR Description: hypothetical protein - Arabidopsis thaliana
SKKEAPRSSSSTPFTLSSLSLPFSTPPPPLVRLYLALAPAPPAQPPGEREREEEAFAAAVAVGRDARMFGYQKGLDVEAGTSGAAATGGARQLYPGMQESPELRWALIRKIYVILSLQLLLTAVVAAVVVKVRAIPHFFTTTSAGLGLYIFLIILPFIVLCPLYFYHEKHPVNLILLGLFTVAISFAVGMTCAFTSGKVILESAILTTVVVLSLTAYTFWAVNRGKDFSFLGPFLFAALIVLLVFALIQILFPLGKLSQMIYGGLASLIFSGYIVYDTNNIIRRYTYDQYVWAAVSLYLDVINLFLSLMTLFRAAD

SEQ ID NO: 33936 - protein, 249 aa, Zea mays subsp. mays
  peptide (1)..(249): Ceres Seq. ID no. 12411602
  misc_feature (33)..(249): Pfam Name: Pfam Description:  Uncharacterised protein family UPF0005
  misc_feature (1)..(249): NCBI GI NO: 34393841 NR Description: putative z-protein
  misc_feature (23)..(249): NCBI GI NO: 14626300 NR Description: putative receptor-associated protein
  misc_feature (4)..(249): NCBI GI NO: 15218701 NR Description: putative glutamate/aspartate-binding peptide
  misc_feature (26)..(249): NCBI GI NO: 15229411 NR Description: putative protein; protein id: At3g63310.1
  misc_feature (4)..(247): NCBI GI NO: 15235466 NR Description: putative glutamate-/aspartate-binding peptide
  misc_feature (2)..(249): NCBI GI NO: 18414455 NR Description: Expressed protein; protein id: At4g15470
  misc_feature (30)..(249): NCBI GI NO: 34393840 NR Description: putative z-protein
  misc_feature (2)..(210): NCBI GI NO: 15810201 NR Description: AT4g15470/dl3775w [Arabidopsis thaliana]
  misc_feature (2)..(93): NCBI GI NO: 7485070 NR Description: hypothetical protein - Arabidopsis thaliana
  misc_feature (130)..(201): NCBI GI NO: 7485070 NR Description: hypothetical protein - Arabidopsis thaliana
MFGYQKGLDVEAGTSGAAATGGARQLYPGMQESPELRWALIRKIYVILSLQLLLTAVVAAVVVKVRAIPHFFTTTSAGLGLYIFLIILPFIVLCPLYFYHEKHPVNLILLGLFTVAISFAVGMTCAFTSGKVILESAILTTVVVLSLTAYTFWAVNRGKDFSFLGPFLFAALIVLLVFALIQILFPLGKLSQMIYGGLASLIFSGYIVYDTNNIIRRYTYDQYVWAAVSLYLDVINLFLSLMTLFRAAD

SEQ ID NO: 33937 - protein, 220 aa, Zea mays subsp. mays
  peptide (1)..(220): Ceres Seq. ID no. 12411603
  misc_feature (4)..(220): Pfam Name: Pfam Description:  Uncharacterised protein family UPF0005
  misc_feature (1)..(220): NCBI GI NO: 34393841 NR Description: putative z-protein
  misc_feature (1)..(220): NCBI GI NO: 14626300 NR Description: putative receptor-associated protein
  misc_feature (1)..(220): NCBI GI NO: 15218701 NR Description: putative glutamate/aspartate-binding peptide
  misc_feature (1)..(220): NCBI GI NO: 15229411 NR Description: putative protein; protein id: At3g63310.1
  misc_feature (1)..(218): NCBI GI NO: 15235466 NR Description: putative glutamate-/aspartate-binding peptide
  misc_feature (1)..(220): NCBI GI NO: 18414455 NR Description: Expressed protein; protein id: At4g15470
  misc_feature (1)..(220): NCBI GI NO: 34393840 NR Description: putative z-protein
  misc_feature (1)..(181): NCBI GI NO: 15810201 NR Description: AT4g15470/dl3775w [Arabidopsis thaliana]
  misc_feature (1)..(64): NCBI GI NO: 7485070 NR Description: hypothetical protein - Arabidopsis thaliana
  misc_feature (101)..(172): NCBI GI NO: 7485070 NR Description: hypothetical protein - Arabidopsis thaliana
MQESPELRWALIRKIYVILSLQLLLTAVVAAVVVKVRAIPHFFTTTSAGLGLYIFLIILPFIVLCPLYFYHEKHPVNLILLGLFTVAISFAVGMTCAFTSGKVILESAILTTVVVLSLTAYTFWAVNRGKDFSFLGPFLFAALIVLLVFALIQILFPLGKLSQMIYGGLASLIFSGYIVYDTNNIIRRYTYDQYVWAAVSLYLDVINLFLSLMTLFRAAD

SEQ ID NO: 33938 - DNA, 1256 bp, Zea mays subsp. mays
  misc_feature (1)..(1256): Ceres Seq. ID no. 12411597
atctccggcctcacaccgcaaccgcaagcaagcgaagcgcagagcctgcctgaccagagctagctgagctacagccaacagcagctggtctgactgacatggcgaaggacatcgaggcatcggggcccgaggcgggcgagttctcggccaaggactacaccgaccctccgccggcgccgctgatcgacgcggaggagctcacccagtggtcactgtaccgcgcggtcatcgccgagttcatcgccacgctgctcttcctctacatcaccgtggccaccgtgatcgggtacaagcaccagacggacgcgtcggcgtcgggccccgacgcggcgtgcggcggcgtcggcatcctcggcatcgcttgggccttcggcggcatgatcttcatcctcgtctactgcaccgccggcatctcaggtgggcacatcaacccggccgtgaccttcggcctgttcctggccaggaaggtgtccctcgtccgcgcgctgctctacatcatcgcgcagtgcctgggcgccatctgcggcgtgggcctcgtcaagggcttccagagcgcctactacgtgcgctacggcggcggcgccaacgagctcagcgacggctactccaagggcaccggcctcgccgccgagatcatcggcacgttcgtgctcgtctacaccgtcttctccgccaccgaccccaagcgcagtgcccgtgactcccacgttccggtgctagctcctctcccaattgggttcgccgtgttcatggtgcacctggccaccatccccatcaccggcaccggcatcaacccggcgaggagcctgggagccgcggtcatctacaacaaggacaaggcctgggacgaccaatggatcttctgggtgggcccactgattggcgccgccatcgccgccgcctaccaccagtacgtgctgagggccagcgccaccaagctcgggtcctaccggagcaacgcctaagttccgcccggacgcgccaggagctgggcaccgttccgattctgttcctccacatgacgccctgttctgtttccgtgtggccaggactccgctcgctcgctgctgttttctacttcggaccaaagtgtgacatatctttgctttctgtatatgtatgtaggaatgcatcatgtaaggagaatttggaatacaattgcgtgagtttttatccgatcacaatctattgagtagtggcatataaaaaatgtcctgccctttctttaaacgaatgaaagtaaagaaaagaacctc

SEQ ID NO: 33939 - protein, 288 aa, Zea mays subsp. mays
  peptide (1)..(288): Ceres Seq. ID no. 12411598
  misc_feature (33)..(270): Pfam Name: Pfam Description:  Major intrinsic protein
  misc_feature (1)..(288): NCBI GI NO: 13447807 NR Description: plasma membrane integral protein ZmPIP2-4
  misc_feature (1)..(288): NCBI GI NO: 13447805 NR Description: plasma membrane integral protein ZmPIP2-3
  misc_feature (1)..(287): NCBI GI NO: 7441245 NR Description: plasma membrane intrinsic protein BPW1 - barley
  misc_feature (1)..(286): NCBI GI NO: 4741931 NR Description: plasma membrane intrinsic protein [Zea mays]
  misc_feature (1)..(288): NCBI GI NO: 13447801 NR Description: plasma membrane integral protein ZmPIP2-1
  misc_feature (1)..(288): NCBI GI NO: 29650727 NR Description: aquaporin [Zea mays]
  misc_feature (1)..(288): NCBI GI NO: 34901270 NR Description: putative plasma membrane intrinsic protein
  misc_feature (1)..(288): NCBI GI NO: 13447803 NR Description: plasma membrane integral protein ZmPIP2-2
  misc_feature (1)..(288): NCBI GI NO: 7441249 NR Description: probable plasma membrane intrinsic protein - rice
  misc_feature (1)..(288): NCBI GI NO: 13447809 NR Description: plasma membrane integral protein ZmPIP2-6
MAKDIEASGPEAGEFSAKDYTDPPPAPLIDAEELTQWSLYRAVIAEFIATLLFLYITVATVIGYKHQTDASASGPDAACGGVGILGIAWAFGGMIFILVYCTAGISGGHINPAVTFGLFLARKVSLVRALLYIIAQCLGAICGVGLVKGFQSAYYVRYGGGANELSDGYSKGTGLAAEIIGTFVLVYTVFSATDPKRSARDSHVPVLAPLPIGFAVFMVHLATIPITGTGINPARSLGAAVIYNKDKAWDDQWIFWVGPLIGAAIAAAYHQYVLRASATKLGSYRSNA

SEQ ID NO: 33940 - protein, 195 aa, Zea mays subsp. mays
  peptide (1)..(195): Ceres Seq. ID no. 12411599
  misc_feature (1)..(177): Pfam Name: Pfam Description:  Major intrinsic protein
  misc_feature (1)..(195): NCBI GI NO: 13447807 NR Description: plasma membrane integral protein ZmPIP2-4
  misc_feature (1)..(195): NCBI GI NO: 13447805 NR Description: plasma membrane integral protein ZmPIP2-3
  misc_feature (1)..(194): NCBI GI NO: 7441245 NR Description: plasma membrane intrinsic protein BPW1 - barley
  misc_feature (1)..(193): NCBI GI NO: 4741931 NR Description: plasma membrane intrinsic protein [Zea mays]
  misc_feature (1)..(195): NCBI GI NO: 13447801 NR Description: plasma membrane integral protein ZmPIP2-1
  misc_feature (1)..(195): NCBI GI NO: 29650727 NR Description: aquaporin [Zea mays]
  misc_feature (1)..(195): NCBI GI NO: 34901270 NR Description: putative plasma membrane intrinsic protein
  misc_feature (1)..(195): NCBI GI NO: 13447803 NR Description: plasma membrane integral protein ZmPIP2-2
  misc_feature (1)..(195): NCBI GI NO: 7441249 NR Description: probable plasma membrane intrinsic protein - rice
  misc_feature (1)..(195): NCBI GI NO: 13447809 NR Description: plasma membrane integral protein ZmPIP2-6
MIFILVYCTAGISGGHINPAVTFGLFLARKVSLVRALLYIIAQCLGAICGVGLVKGFQSAYYVRYGGGANELSDGYSKGTGLAAEIIGTFVLVYTVFSATDPKRSARDSHVPVLAPLPIGFAVFMVHLATIPITGTGINPARSLGAAVIYNKDKAWDDQWIFWVGPLIGAAIAAAYHQYVLRASATKLGSYRSNA

SEQ ID NO: 33941 - DNA, 1305 bp, Zea mays subsp. mays
  misc_feature (1)..(1305): Ceres Seq. ID no. 12411593
gtcatcgattcagagctcacgagtcacgatccaaatcccttttccactccgccggacgtcgagagaggcggtgggtgcgggacgcgaaggcgaagccctagccccctccctgccgcggacgccgatggacccacctcgcgccgtcgcctttcttctcatactcctgcccgtgctcgccccggtggcctccggtgtacctttcgtcgtcctacacgggattggcgacgagtgcgggaacgatgggctgtcatccttcaccaagatgcttggggagtggtcaggctccaagggttactgcattgaaattggaagaggagcatgggactcttggttaatgccacttcaagagcaggcaaatacggtttgtaagaaggtcaagaaaatgaaagagctcagtgaaggttacaatatagttggcctgtctcaggggaacttaattggcagggctgtaatcgagtactgtgattgtggacctccggtcaagaatttcatatcaattgggggtcctcatgctggtacagcttcagtgccactttgtggttctgggtttctttgtattcttattgatgatctgattaaatcagagatatattcagactatgtgcaggcgcatcttgcccctagtggttacctaaagatacccactgatatggaagattatttgaagggttgcaaatttcttccaaaacttaacaatgagatcccaagtgcaagaaatactacctataaagaaagattcagcagcttggaaaacttggtactgatcatgtttgaggacgatgcagtattaatacctcgggaaacagcgtggtttggttattaccctgatggagcctttagcccagtgctgccccctcaagagacgaagctgtatacagaagattggattggcttgaagaccctggacgaggctgggcgtgttaaattcgtgtctgtgccaggaggtcacctgcgtatcaccagaagcgacatgaagaagtacattgtgccttacttgacgccggaggcgtcatccaagaagaacatacacatacaccggatgctgtcgctttgagcgagtatctaacaaggtttgtatcggtggccattgtgccctgacacgtgggccatgtgttgacgccttgtaaatacgctgaacacgaagggaggaaatgatagctccttggaagagtggatccgaacttgtgaagtgaagcgtgtttggtcctttccgtttcctatctgacaaacaaatatgtccatgccgtggccacaacacgcataaatcattatgcacatttcctattgagtaaaatacaattccgg

SEQ ID NO: 33942 - protein, 350 aa, Zea mays subsp. mays
  peptide (1)..(350): Ceres Seq. ID no. 12411594
  misc_feature (62)..(314): Pfam Name: Pfam Description:  Palmitoyl protein thioesterase
  misc_feature (48)..(314): NCBI GI NO: 37536884 NR Description: putative palmitoyl-protein thioesterase
  misc_feature (42)..(341): NCBI GI NO: 15232301 NR Description: palmitoyl-protein thioesterase precursor - like
  misc_feature (42)..(341): NCBI GI NO: 14334718 NR Description: putative palmitoyl-protein thioesterase precursor
  misc_feature (42)..(341): NCBI GI NO: 21593393 NR Description: palmitoyl-protein thioesterase precursor-like
  misc_feature (48)..(343): NCBI GI NO: 15238063 NR Description: palmitoyl-protein thioesterase precursor-like
  misc_feature (48)..(343): NCBI GI NO: 28393539 NR Description: putative palmitoyl-protein thioesterase precursor
  misc_feature (51)..(344): NCBI GI NO: 15236078 NR Description: putative protein; protein id: At4g17480
  misc_feature (51)..(344): NCBI GI NO: 21554369 NR Description: palmitoyl-protein thioesterase precursor-like
  misc_feature (60)..(336): NCBI GI NO: 15236077 NR Description: putative protein; protein id: At4g17470.1
  misc_feature (58)..(332): NCBI GI NO: 15236079 NR Description: putative protein; protein id: At4g17483.1
SSIQSSRVTIQIPFPLRRTSREAVGAGREGEALAPSLPRTPMDPPRAVAFLLILLPVLAPVASGVPFVVLHGIGDECGNDGLSSFTKMLGEWSGSKGYCIEIGRGAWDSWLMPLQEQANTVCKKVKKMKELSEGYNIVGLSQGNLIGRAVIEYCDCGPPVKNFISIGGPHAGTASVPLCGSGFLCILIDDLIKSEIYSDYVQAHLAPSGYLKIPTDMEDYLKGCKFLPKLNNEIPSARNTTYKERFSSLENLVLIMFEDDAVLIPRETAWFGYYPDGAFSPVLPPQETKLYTEDWIGLKTLDEAGRVKFVSVPGGHLRITRSDMKKYIVPYLTPEASSKKNIHIHRMLSL

SEQ ID NO: 33943 - protein, 309 aa, Zea mays subsp. mays
  peptide (1)..(309): Ceres Seq. ID no. 12411595
  misc_feature (21)..(273): Pfam Name: Pfam Description:  Palmitoyl protein thioesterase
  misc_feature (7)..(273): NCBI GI NO: 37536884 NR Description: putative palmitoyl-protein thioesterase
  misc_feature (1)..(300): NCBI GI NO: 15232301 NR Description: palmitoyl-protein thioesterase precursor - like
  misc_feature (1)..(300): NCBI GI NO: 14334718 NR Description: putative palmitoyl-protein thioesterase precursor
  misc_feature (1)..(300): NCBI GI NO: 21593393 NR Description: palmitoyl-protein thioesterase precursor-like
  misc_feature (7)..(302): NCBI GI NO: 15238063 NR Description: palmitoyl-protein thioesterase precursor-like
  misc_feature (7)..(302): NCBI GI NO: 28393539 NR Description: putative palmitoyl-protein thioesterase precursor
  misc_feature (10)..(303): NCBI GI NO: 15236078 NR Description: putative protein; protein id: At4g17480
  misc_feature (10)..(303): NCBI GI NO: 21554369 NR Description: palmitoyl-protein thioesterase precursor-like
  misc_feature (19)..(295): NCBI GI NO: 15236077 NR Description: putative protein; protein id: At4g17470.1
  misc_feature (17)..(291): NCBI GI NO: 15236079 NR Description: putative protein; protein id: At4g17483.1
MDPPRAVAFLLILLPVLAPVASGVPFVVLHGIGDECGNDGLSSFTKMLGEWSGSKGYCIEIGRGAWDSWLMPLQEQANTVCKKVKKMKELSEGYNIVGLSQGNLIGRAVIEYCDCGPPVKNFISIGGPHAGTASVPLCGSGFLCILIDDLIKSEIYSDYVQAHLAPSGYLKIPTDMEDYLKGCKFLPKLNNEIPSARNTTYKERFSSLENLVLIMFEDDAVLIPRETAWFGYYPDGAFSPVLPPQETKLYTEDWIGLKTLDEAGRVKFVSVPGGHLRITRSDMKKYIVPYLTPEASSKKNIHIHRMLSL

SEQ ID NO: 33944 - protein, 263 aa, Zea mays subsp. mays
  peptide (1)..(263): Ceres Seq. ID no. 12411596
  misc_feature (1)..(227): Pfam Name: Pfam Description:  Palmitoyl protein thioesterase
  misc_feature (1)..(227): NCBI GI NO: 37536884 NR Description: putative palmitoyl-protein thioesterase
  misc_feature (1)..(254): NCBI GI NO: 15232301 NR Description: palmitoyl-protein thioesterase precursor - like
  misc_feature (1)..(254): NCBI GI NO: 14334718 NR Description: putative palmitoyl-protein thioesterase precursor
  misc_feature (1)..(254): NCBI GI NO: 21593393 NR Description: palmitoyl-protein thioesterase precursor-like
  misc_feature (1)..(256): NCBI GI NO: 15238063 NR Description: palmitoyl-protein thioesterase precursor-like
  misc_feature (1)..(256): NCBI GI NO: 28393539 NR Description: putative palmitoyl-protein thioesterase precursor
  misc_feature (1)..(257): NCBI GI NO: 15236078 NR Description: putative protein; protein id: At4g17480
  misc_feature (1)..(257): NCBI GI NO: 21554369 NR Description: palmitoyl-protein thioesterase precursor-like
  misc_feature (1)..(249): NCBI GI NO: 15236077 NR Description: putative protein; protein id: At4g17470.1
  misc_feature (1)..(245): NCBI GI NO: 15236079 NR Description: putative protein; protein id: At4g17483.1
MLGEWSGSKGYCIEIGRGAWDSWLMPLQEQANTVCKKVKKMKELSEGYNIVGLSQGNLIGRAVIEYCDCGPPVKNFISIGGPHAGTASVPLCGSGFLCILIDDLIKSEIYSDYVQAHLAPSGYLKIPTDMEDYLKGCKFLPKLNNEIPSARNTTYKERFSSLENLVLIMFEDDAVLIPRETAWFGYYPDGAFSPVLPPQETKLYTEDWIGLKTLDEAGRVKFVSVPGGHLRITRSDMKKYIVPYLTPEASSKKNIHIHRMLSL

SEQ ID NO: 33945 - DNA, 1666 bp, Zea mays subsp. mays
  misc_feature (1)..(1666): Ceres Seq. ID no. 12341194
gtccatccccgtcgccagcatcgcttccacttcggtctcagcgacggtcgccaccaccgctcccctccctctccccctcctcgcccagcggcaattaccacagcctccccagcaagccgggatggctgcactcaaggcatcgttccggggtgagctcagcgccgcttccttcctcgactccagcaggggacctctcgtccagcacaaagtggattttacgtttcaaaggaagggcaaacgagctatttcactgagaaggacatgctgttctatgcaacaggctccaccaccagcatggcctgggcgagctgttgctgagcctggccggaggtcatgggatggcccaaagcctatctcgattgttggttcaactggttccataggaacacagacattggacattgttgcggagaatcctgataagttcagagttgttgctcttgctgctggatccaatgtcacgcttctagctgatcaggtcaaaacattcaaacctaagttggttgctgtaagaaacgaatcattagttgatgaattgaaagaagccttggctgattgcgaagagaagccagaaattattcctggggagcaaggtgtcatagaagttgctcgccatccagatgcagttacagttgtcacagggatagtaggttgtgcagggctgaagcctacagttgctgcaattgaagctggtaaagacatagcattggcaaacaaagagacacttattgcaggtggtccttttgtgcttccccttgcacacaaacacaaagtgaaaattcttccagctgattctgagcactctgcaatatttcagtgtatacaaggcttgtccgaaggtgcacttcgtcgcattattctaactgcatcaggtggtgctttcagggactggccagttgacaggctgaaagatgtaaaagttgctgacgctttaaagcatccaaactggaatatgggaaggaagatcacagtagattctgctactttattcaacaagggtttagaagttattgaagcacattatttatttggtgctgaatatgatgacattgagattgtgattcacccacagtctatcatacactctatggttgaaacccaggattcatctgtcctagctcagttgggatggccagatatgcggttaccaatcttatacaccttatcatggccagatagaatctattgctctgaggtcacctggccccgtctggatctttgcaagttgggttcactgacattcagagctccagacaacgtaaaatacccatcaatggacctagcctatgcagctggccgcgctgggggcaccatgacaggagtcctgagcgctgctaatgagaaggccgtggagttgttcattgacgagaagattagctacctggacatattcaaggtggtggagcttacatgtaacgcgcatcggaacgagctggtaacaagcccgtcactggaggagatcgtccattacgatctgtgggcgaggagatatgcagccagtctacaaccatcttctggcctgagccctgtccctgcataataggtcgtcacgacaacgttgtacagcaggagttctaagatatgatgtgtttgtggctcctgtttccatgttcaattttcaggcctccacatgaataaaatgcatctattccatgtgatttctttt

SEQ ID NO: 33946 - protein, 512 aa, Zea mays subsp. mays
  peptide (1)..(512): Ceres Seq. ID no. 12341195
  misc_feature (118)..(498): Pfam Name: Pfam Description:  1-deoxy-D-xylulose 5-phosphate reductoisomerase
  misc_feature (41)..(512): NCBI GI NO: 9801280 NR Description: putative 1-deoxy-D-xylulose 5-phosphatereductoisomerase
  misc_feature (43)..(511): NCBI GI NO: 17225989 NR Description: 1-deoxy-D-xylulose 5-phosphate reductoisomeraseprecursor
  misc_feature (43)..(512): NCBI GI NO: 34996397 NR Description: putative 1-deoxy-D-xylulose 5-phosphatereductoisomerase
  misc_feature (43)..(509): NCBI GI NO: 15679908 NR Description: 1-deoxy-D-xylulose-5-phosphate reductoisomerase
  misc_feature (41)..(512): NCBI GI NO: 15241970 NR Description: 1-deoxy-D-xylulose 5-phosphate reductoisomerase
  misc_feature (43)..(509): NCBI GI NO: 7621710 NR Description: 1-deoxy-D-xylulose-5-phosphate reductoisomerase
  misc_feature (56)..(510): NCBI GI NO: 22797429 NR Description: 1-deoxy-D-xylulose 5-phosphate reductoisomerase
  misc_feature (51)..(509): NCBI GI NO: 9800656 NR Description: 1-deoxy-D-xylulose-5-phosphate reductoisomerase
  misc_feature (109)..(512): NCBI GI NO: 25323805 NR Description: 1-deoxy-d-xylulose-5-phosphate reductoisomerase
  misc_feature (51)..(509): NCBI GI NO: 8134417 NR Description: 1-deoxy-D-xylulose 5-phosphate reductoisomerase
SIPVASIASTSVSATVATTAPLPLPLLAQRQLPQPPQQAGMAALKASFRGELSAASFLDSSRGPLVQHKVDFTFQRKGKRAISLRRTCCSMQQAPPPAWPGRAVAEPGRRSWDGPKPISIVGSTGSIGTQTLDIVAENPDKFRVVALAAGSNVTLLADQVKTFKPKLVAVRNESLVDELKEALADCEEKPEIIPGEQGVIEVARHPDAVTVVTGIVGCAGLKPTVAAIEAGKDIALANKETLIAGGPFVLPLAHKHKVKILPADSEHSAIFQCIQGLSEGALRRIILTASGGAFRDWPVDRLKDVKVADALKHPNWNMGRKITVDSATLFNKGLEVIEAHYLFGAEYDDIEIVIHPQSIIHSMVETQDSSVLAQLGWPDMRLPILYTLSWPDRIYCSEVTWPRLDLCKLGSLTFRAPDNVKYPSMDLAYAAGRAGGTMTGVLSAANEKAVELFIDEKISYLDIFKVVELTCNAHRNELVTSPSLEEIVHYDLWARRYAASLQPSSGLSPVPA

SEQ ID NO: 33947 - protein, 472 aa, Zea mays subsp. mays
  peptide (1)..(472): Ceres Seq. ID no. 12341196
  misc_feature (78)..(458): Pfam Name: Pfam Description:  1-deoxy-D-xylulose 5-phosphate reductoisomerase
  misc_feature (1)..(472): NCBI GI NO: 9801280 NR Description: putative 1-deoxy-D-xylulose 5-phosphatereductoisomerase
  misc_feature (3)..(471): NCBI GI NO: 17225989 NR Description: 1-deoxy-D-xylulose 5-phosphate reductoisomeraseprecursor
  misc_feature (3)..(472): NCBI GI NO: 34996397 NR Description: putative 1-deoxy-D-xylulose 5-phosphatereductoisomerase
  misc_feature (3)..(469): NCBI GI NO: 15679908 NR Description: 1-deoxy-D-xylulose-5-phosphate reductoisomerase
  misc_feature (1)..(472): NCBI GI NO: 15241970 NR Description: 1-deoxy-D-xylulose 5-phosphate reductoisomerase
  misc_feature (3)..(469): NCBI GI NO: 7621710 NR Description: 1-deoxy-D-xylulose-5-phosphate reductoisomerase
  misc_feature (16)..(470): NCBI GI NO: 22797429 NR Description: 1-deoxy-D-xylulose 5-phosphate reductoisomerase
  misc_feature (11)..(469): NCBI GI NO: 9800656 NR Description: 1-deoxy-D-xylulose-5-phosphate reductoisomerase
  misc_feature (69)..(472): NCBI GI NO: 25323805 NR Description: 1-deoxy-d-xylulose-5-phosphate reductoisomerase
  misc_feature (11)..(469): NCBI GI NO: 8134417 NR Description: 1-deoxy-D-xylulose 5-phosphate reductoisomerase
MAALKASFRGELSAASFLDSSRGPLVQHKVDFTFQRKGKRAISLRRTCCSMQQAPPPAWPGRAVAEPGRRSWDGPKPISIVGSTGSIGTQTLDIVAENPDKFRVVALAAGSNVTLLADQVKTFKPKLVAVRNESLVDELKEALADCEEKPEIIPGEQGVIEVARHPDAVTVVTGIVGCAGLKPTVAAIEAGKDIALANKETLIAGGPFVLPLAHKHKVKILPADSEHSAIFQCIQGLSEGALRRIILTASGGAFRDWPVDRLKDVKVADALKHPNWNMGRKITVDSATLFNKGLEVIEAHYLFGAEYDDIEIVIHPQSIIHSMVETQDSSVLAQLGWPDMRLPILYTLSWPDRIYCSEVTWPRLDLCKLGSLTFRAPDNVKYPSMDLAYAAGRAGGTMTGVLSAANEKAVELFIDEKISYLDIFKVVELTCNAHRNELVTSPSLEEIVHYDLWARRYAASLQPSSGLSPVPA

SEQ ID NO: 33948 - protein, 422 aa, Zea mays subsp. mays
  peptide (1)..(422): Ceres Seq. ID no. 12341197
  misc_feature (28)..(408): Pfam Name: Pfam Description:  1-deoxy-D-xylulose 5-phosphate reductoisomerase
  misc_feature (1)..(422): NCBI GI NO: 9801280 NR Description: putative 1-deoxy-D-xylulose 5-phosphatereductoisomerase
  misc_feature (1)..(421): NCBI GI NO: 17225989 NR Description: 1-deoxy-D-xylulose 5-phosphate reductoisomeraseprecursor
  misc_feature (1)..(422): NCBI GI NO: 34996397 NR Description: putative 1-deoxy-D-xylulose 5-phosphatereductoisomerase
  misc_feature (1)..(419): NCBI GI NO: 15679908 NR Description: 1-deoxy-D-xylulose-5-phosphate reductoisomerase
  misc_feature (1)..(422): NCBI GI NO: 15241970 NR Description: 1-deoxy-D-xylulose 5-phosphate reductoisomerase
  misc_feature (1)..(419): NCBI GI NO: 7621710 NR Description: 1-deoxy-D-xylulose-5-phosphate reductoisomerase
  misc_feature (1)..(420): NCBI GI NO: 22797429 NR Description: 1-deoxy-D-xylulose 5-phosphate reductoisomerase
  misc_feature (1)..(419): NCBI GI NO: 9800656 NR Description: 1-deoxy-D-xylulose-5-phosphate reductoisomerase
  misc_feature (19)..(422): NCBI GI NO: 25323805 NR Description: 1-deoxy-d-xylulose-5-phosphate reductoisomerase
  misc_feature (1)..(419): NCBI GI NO: 8134417 NR Description: 1-deoxy-D-xylulose 5-phosphate reductoisomerase
MQQAPPPAWPGRAVAEPGRRSWDGPKPISIVGSTGSIGTQTLDIVAENPDKFRVVALAAGSNVTLLADQVKTFKPKLVAVRNESLVDELKEALADCEEKPEIIPGEQGVIEVARHPDAVTVVTGIVGCAGLKPTVAAIEAGKDIALANKETLIAGGPFVLPLAHKHKVKILPADSEHSAIFQCIQGLSEGALRRIILTASGGAFRDWPVDRLKDVKVADALKHPNWNMGRKITVDSATLFNKGLEVIEAHYLFGAEYDDIEIVIHPQSIIHSMVETQDSSVLAQLGWPDMRLPILYTLSWPDRIYCSEVTWPRLDLCKLGSLTFRAPDNVKYPSMDLAYAAGRAGGTMTGVLSAANEKAVELFIDEKISYLDIFKVVELTCNAHRNELVTSPSLEEIVHYDLWARRYAASLQPSSGLSPVPA

SEQ ID NO: 33949 - DNA, 1347 bp, Zea mays subsp. mays
  misc_feature (1)..(1347): Ceres Seq. ID no. 12411590
atcatagtgcctgttcctgagccagcagcatctgtctcttgcttcatcagctaggcgcccggccgcgcggaccaggctccaggagaccaaaaatgaagctctcggtggcagtcctctgcgcgcttctggctgtccaggcggcggtgctcctcgccaccgtgccgacgtcgcaggccagcgagctggaggtcgggtactacagcaagaaatgcaagggcgtggagaacgtggtgaagtggcacgtgatcaaggcgctcaaggccagccgccgcaccggcgccgctctcgtccgccttctcttccatgactgcttcgtcaggggatgcgatggttctgtcctcctggacgcttcctacgacaaccctcatccggagaaggaggcgccggtgaacatcggcctcgccgccttcgacctcctggaggagatcaaggccgctgtcgagaagaggtgccccggcgtcgtctcctgctcggacatcctcatctacgcggcccgcgacgcggccagcgtcctcagcaacggccacgtccacttcgccgtccccgccggccgcctggacggcttcgtctccaaggccgaggaggcccaggcggagctcccggactccaaccaagacgtgcagcagctcatcgacaacttcgccaggaagaacttcacggtggaggagctcgtcatcctcaccggggcgcactccatcggccagggccactgctcgtccttcaccggccgcctctccgagccatcgcagcagatcaccccggcgtaccgcgacctgctcaactacaagtgctcccaggggtccaacccgcccgtggacaacaacgtccgcgacgaggactacgacgtggtggcgaggttcatgccggggttcaccagccgggtgcgcaagatccccgacttcctggacaactccttctaccacaacaacctggccaagatcgtcaccttccactccgactggacgctgctcacgcacaaggaggcgttcggccacgtcgtggagtacgccgagaacgccacgctatgggacgaggacttctcggactcgctgctcaagctcagcaagctgcccatgcccaaaggaagcaagggagagatcaggaagaagtgcagcgtcgttaaccaccgcttatactaagcctgccagatgccgtggaaatcgaagaaagaggtcgtgccagcacaacacatatatatcaaccatcggagatcagaaagccataaggttgcgcttttttgtttcatccattcttttgattatcattcgtttgtgctacactcatctttttgtgtatttctcatgcatatctgtcaaactgcaataaaactttgttcctgatatgtgc

SEQ ID NO: 33950 - protein, 348 aa, Zea mays subsp. mays
  peptide (1)..(348): Ceres Seq. ID no. 12411591
  misc_feature (47)..(308): Pfam Name: Pfam Description:  Peroxidase
  misc_feature (1)..(348): NCBI GI NO: 34894404 NR Description: putative peroxidase
  misc_feature (1)..(346): NCBI GI NO: 34894394 NR Description: putative peroxidase
  misc_feature (1)..(345): NCBI GI NO: 34894402 NR Description: putative peroxidase
  misc_feature (11)..(344): NCBI GI NO: 34894398 NR Description: putative peroxidase
  misc_feature (10)..(248): NCBI GI NO: 27261094 NR Description: putative peroxidase
  misc_feature (268)..(344): NCBI GI NO: 27261094 NR Description: putative peroxidase
  misc_feature (2)..(345): NCBI GI NO: 34896944 NR Description: putative peroxidase [Oryza sativa]
  misc_feature (16)..(345): NCBI GI NO: 12056450 NR Description: peroxidase [Zea mays]
  misc_feature (24)..(344): NCBI GI NO: 27261097 NR Description: putative peroxidase
  misc_feature (24)..(249): NCBI GI NO: 27261088 NR Description: putative peroxidase
MKLSVAVLCALLAVQAAVLLATVPTSQASELEVGYYSKKCKGVENVVKWHVIKALKASRRTGAALVRLLFHDCFVRGCDGSVLLDASYDNPHPEKEAPVNIGLAAFDLLEEIKAAVEKRCPGVVSCSDILIYAARDAASVLSNGHVHFAVPAGRLDGFVSKAEEAQAELPDSNQDVQQLIDNFARKNFTVEELVILTGAHSIGQGHCSSFTGRLSEPSQQITPAYRDLLNYKCSQGSNPPVDNNVRDEDYDVVARFMPGFTSRVRKIPDFLDNSFYHNNLAKIVTFHSDWTLLTHKEAFGHVVEYAENATLWDEDFSDSLLKLSKLPMPKGSKGEIRKKCSVVNHRLY

SEQ ID NO: 33951 - protein, 266 aa, Zea mays subsp. mays
  peptide (1)..(266): Ceres Seq. ID no. 12411592
MRWFCPPGRFLRQPSSGEGGAGEHRPRRLRPPGGDQGRCREEVPRRRLLLGHPHLRGPRRGQRPQQRPRPLRRPRRPPGRLRLQGRGGPGGAPGLQPRRAAAHRQLRQEELHGGGARHPHRGALHRPGPLLVLHRPPLRAIAADHPGVPRPAQLQVLPGVQPARGQQRPRRGLRRGGEVHAGVHQPGAQDPRLPGQLLLPQQPGQDRHLPLRLDAAHAQGGVRPRRGVRRERHAMGRGLLGLAAQAQQAAHAQRKQGRDQEEVQRR

SEQ ID NO: 33952 - DNA, 1620 bp, Zea mays subsp. mays
  misc_feature (1)..(1620): Ceres Seq. ID no. 12351756
ctagactgtagcccttaatcgaaaccgtccccaacccttcttcctccacgctctcgtctccgccgcgctaggaacttccaactcccaagcccagccgcctgcctagggttaaggtcgcccctccgccccctcgctccgctcgtgaccggcagggttcgtcgccgccgttggatatgtcgcggacgctggtgcagccggtggggcagaagcgcctcaccaacgtggctgtggtgcggctgcgcaagcacggccagcgcttcgagatcgcctgcttcccaaacaaggtgctctcgtggcgctcccgcgtcgagaaggacatcgacgaggtgctccagtcccacaccgtctactccaacgtctccaagggcatcctcgccaactccaaggaactcgccaaggccttcggcaccgacgaccttacccaaatctgcatcgagattctggagaaaggggaactccaggtctccggcaaggagagggaggcgcagctctccagccagttccgcgacatcgcaactattgtcatggagaagaccatcaacccagagacccgccgcccctacaccatcaccatgatcgagcgcctcatgcacgagatacacttcgccgtcgacccaaacctcacctccaaggaacaggctctaaaagttatcaagaagctcacagagcatttccccataaagcgtgcaccgctaagggtgcggttcactgcaccaaaacccaattttccaggccttacggagaagattggcggatggaatgctaccataatttcaaaggatgaattgagcactcagccttctattgtatgcgagatcgagccatctcttctgcgctcatgtgaggagcggttgaaggatgtccaagggagggtcgaagtgctgtctgtctccacgcacgtagaaagtggcccatctgtggaacaacacaacagtgtggaagtgccacacgcggctcctgtaaaggaacctgatgctgttgctcagataagtgagaccatgcagaaacagagcatttctactgaaagccagggcaatgcacaaggcaagcaacagagaaggtgcaaggagtgtgatgtactcgtggaggacaagctttacagagagcactgcaagagtgggtggcacaaacacaactacacacgccacaagaatgggctcccgcctctcagccaagaggagtgtatggtggagatggaattggccgactccaagaaagaccttaaagactacgatttctgatgaggttacctggaagttcctttgacatgctatcttgtatttgggcactaatgttgtctgtctaatgcttttctaccacccaatcttatccaggatggttaacaaggggtgcacagggcatgaagttgtttccaatccgtttttattttaacgaggaagtgaggagtgaggcacatggtcgttttctgatgctgtataggaattattagaatgagatggtttagccacatctttgaactgagggtagaacctgtctgtctgtggattgctttggctttgtatcgtggacgagtgaacttggtagtggcattccaaattcgacattctatgcgggctagaaacttcgcttgttttaatacttatcggcatcctttctttt

SEQ ID NO: 33953 - protein, 355 aa, Zea mays subsp. mays
  peptide (1)..(355): Ceres Seq. ID no. 12351757
  misc_feature (6)..(244): Pfam Name: Pfam Description:  Uncharacterized protein family UPF0023
  misc_feature (1)..(355): NCBI GI NO: 21554225 NR Description: unknown [Arabidopsis thaliana]
  misc_feature (1)..(355): NCBI GI NO: 18401084 NR Description: expressed protein; protein id: At1g43860
  misc_feature (4)..(246): NCBI GI NO: 23956138 NR Description: RIKEN cDNA 4733401P19 [Mus musculus]
  misc_feature (4)..(246): NCBI GI NO: 27664348 NR Description: similar to RIKEN cDNA 4733401P19
  misc_feature (4)..(246): NCBI GI NO: 28416940 NR Description: Shwachman-Bodian-Diamond syndrome protein
  misc_feature (4)..(246): NCBI GI NO: 4929663 NR Description: CGI-97 protein [Homo sapiens]
  misc_feature (22)..(246): NCBI GI NO: 29476858 NR Description: Unknown (protein for MGC:56700) [Danio rerio]
  misc_feature (4)..(251): NCBI GI NO: 28828466 NR Description: similar to Homo sapiens (Human)
  misc_feature (1)..(244): NCBI GI NO: 39586134 NR Description: Hypothetical protein CBG15250
  misc_feature (5)..(183): NCBI GI NO: 29248137 NR Description: GLP_217_44273_45028 [Giardia lamblia ATCC 50803]
MSRTLVQPVGQKRLTNVAVVRLRKHGQRFEIACFPNKVLSWRSRVEKDIDEVLQSHTVYSNVSKGILANSKELAKAFGTDDLTQICIEILEKGELQVSGKEREAQLSSQFRDIATIVMEKTINPETRRPYTITMIERLMHEIHFAVDPNLTSKEQALKVIKKLTEHFPIKRAPLRVRFTAPKPNFPGLTEKIGGWNATIISKDELSTQPSIVCEIEPSLLRSCEERLKDVQGRVEVLSVSTHVESGPSVEQHNSVEVPHAAPVKEPDAVAQISETMQKQSISTESQGNAQGKQQRRCKECDVLVEDKLYREHCKSGWHKHNYTRHKNGLPPLSQEECMVEMELADSKKDLKDYDF

SEQ ID NO: 33954 - protein, 238 aa, Zea mays subsp. mays
  peptide (1)..(238): Ceres Seq. ID no. 12351758
  misc_feature (1)..(127): Pfam Name: Pfam Description:  Uncharacterized protein family UPF0023
  misc_feature (1)..(238): NCBI GI NO: 21554225 NR Description: unknown [Arabidopsis thaliana]
  misc_feature (1)..(238): NCBI GI NO: 18401084 NR Description: expressed protein; protein id: At1g43860
  misc_feature (1)..(129): NCBI GI NO: 23956138 NR Description: RIKEN cDNA 4733401P19 [Mus musculus]
  misc_feature (1)..(129): NCBI GI NO: 27664348 NR Description: similar to RIKEN cDNA 4733401P19
  misc_feature (1)..(129): NCBI GI NO: 28416940 NR Description: Shwachman-Bodian-Diamond syndrome protein
  misc_feature (1)..(129): NCBI GI NO: 4929663 NR Description: CGI-97 protein [Homo sapiens]
  misc_feature (1)..(129): NCBI GI NO: 29476858 NR Description: Unknown (protein for MGC:56700) [Danio rerio]
  misc_feature (1)..(134): NCBI GI NO: 28828466 NR Description: similar to Homo sapiens (Human)
  misc_feature (1)..(127): NCBI GI NO: 39586134 NR Description: Hypothetical protein CBG15250
  misc_feature (1)..(66): NCBI GI NO: 29248137 NR Description: GLP_217_44273_45028 [Giardia lamblia ATCC 50803]
MEKTINPETRRPYTITMIERLMHEIHFAVDPNLTSKEQALKVIKKLTEHFPIKRAPLRVRFTAPKPNFPGLTEKIGGWNATIISKDELSTQPSIVCEIEPSLLRSCEERLKDVQGRVEVLSVSTHVESGPSVEQHNSVEVPHAAPVKEPDAVAQISETMQKQSISTESQGNAQGKQQRRCKECDVLVEDKLYREHCKSGWHKHNYTRHKNGLPPLSQEECMVEMELADSKKDLKDYDF

SEQ ID NO: 33955 - protein, 222 aa, Zea mays subsp. mays
  peptide (1)..(222): Ceres Seq. ID no. 12351759
  misc_feature (1)..(111): Pfam Name: Pfam Description:  Uncharacterized protein family UPF0023
  misc_feature (1)..(222): NCBI GI NO: 21554225 NR Description: unknown [Arabidopsis thaliana]
  misc_feature (1)..(222): NCBI GI NO: 18401084 NR Description: expressed protein; protein id: At1g43860
  misc_feature (1)..(113): NCBI GI NO: 23956138 NR Description: RIKEN cDNA 4733401P19 [Mus musculus]
  misc_feature (1)..(113): NCBI GI NO: 27664348 NR Description: similar to RIKEN cDNA 4733401P19
  misc_feature (1)..(113): NCBI GI NO: 28416940 NR Description: Shwachman-Bodian-Diamond syndrome protein
  misc_feature (1)..(113): NCBI GI NO: 4929663 NR Description: CGI-97 protein [Homo sapiens]
  misc_feature (1)..(113): NCBI GI NO: 29476858 NR Description: Unknown (protein for MGC:56700) [Danio rerio]
  misc_feature (1)..(118): NCBI GI NO: 28828466 NR Description: similar to Homo sapiens (Human)
  misc_feature (1)..(111): NCBI GI NO: 39586134 NR Description: Hypothetical protein CBG15250
  misc_feature (1)..(50): NCBI GI NO: 29248137 NR Description: GLP_217_44273_45028 [Giardia lamblia ATCC 50803]
MIERLMHEIHFAVDPNLTSKEQALKVIKKLTEHFPIKRAPLRVRFTAPKPNFPGLTEKIGGWNATIISKDELSTQPSIVCEIEPSLLRSCEERLKDVQGRVEVLSVSTHVESGPSVEQHNSVEVPHAAPVKEPDAVAQISETMQKQSISTESQGNAQGKQQRRCKECDVLVEDKLYREHCKSGWHKHNYTRHKNGLPPLSQEECMVEMELADSKKDLKDYDF

SEQ ID NO: 33956 - DNA, 1417 bp, Zea mays subsp. mays
  misc_feature (1)..(1417): Ceres Seq. ID no. 12411579
gaccgcatcgcgttctacgttctccgccctctccgctccccctactctgcttggtttcccagaagatttgattggtttccccaaatccggtgactccattcctgttgttcttcacgtcgaccccgggaacctcccagaaggctctagcgaccccggccgcccggcgctctgagggctgtgctgccggcggcgagatccaggagctgcctgccatggtgaaggacagcgcctactacgacgtcctaggggtcagcgtcgacgcgtcctccgccgagatcaagaaggcgtattacatcaaggcgaagctggtgcatccggacaagaatcccgggaaccctgacgccgcactcaagttccaggaacttggagaggcctatcaagttcttagtgatcctgggaaaaaggaggcttatgataagtatggaaaggagggtattccccaggataacatggtggatcctgctgctgtctttgggatgatttttggaagtgactattttgaagattacgttggccagcttgctctagcatctatagcctcagtagaggttgatgaaaactcaaacagtcaagaagcaagagcaaaggttcaagaaaagataaaagagttacaaagagagagagaacaaaagcttacccagagcctgaaagaccgacttcaaccatatgtagatgagagaaaggatgaatttgtgagctacgcaagcacagaagctaggcgtttatctgaagcagcatttggtgaggctatgcttcacactattgggtatatttacgtgcggcaagcagcaagagaacttgggaaaagtagaatttatatgggtgtaccgtttatagctgagtgggttagagacaaaggacaccacattaaatcgcaggttaatgctgcttcaggtgctatttctctaatacaacttcaagaagggatgaaaaagatggaaggaagcgagaacagtgaagagcaacttatgaagagttttgaggagaaaaaagatgccatgcttagctcgctatggaaaattaatgtggtcgatattgagtcaacactttcacgtgtctgccaagcagttctgagagataacacggtctccaaagatgtcctgaagctgcgagcgaaagcgttgaaaaagctcggaacgatattccaaggcgcaaaatctatgtaccgtcgtgaaaacagcctgcgcgttgaaaacgagcacaaatcagcaagctaacccgtcacactgaagcccatggaccaccgtgtagcaagggatcggatttggtgatttttttgtggttttggcctttgttaatttgtttgtctgctaacgatagcattcggaaaatgcaaatccggtctacactagtacccctctattaattttctgtagatgtgagcatttaacacgaagctgtgatttgcgcttgatgc

SEQ ID NO: 33957 - protein, 334 aa, Zea mays subsp. mays
  peptide (1)..(334): Ceres Seq. ID no. 12411580
  misc_feature (6)..(71): Pfam Name: Pfam Description:  DnaJ domain
  misc_feature (1)..(201): NCBI GI NO: 25458468 NR Description: dnaJ-like protein [imported] - rice
  misc_feature (229)..(312): NCBI GI NO: 25458468 NR Description: dnaJ-like protein [imported] - rice
  misc_feature (1)..(329): NCBI GI NO: 15234962 NR Description: dnaJ-like protein; protein id: At4g39150
  misc_feature (1)..(327): NCBI GI NO: 15226572 NR Description: putative DnaJ protein; protein id: At2g21510
  misc_feature (1)..(316): NCBI GI NO: 15223142 NR Description: putative DnaJ protein; protein id: At1g76700.1
  misc_feature (1)..(331): NCBI GI NO: 18394951 NR Description: expressed protein; protein id: At1g21080
  misc_feature (1)..(316): NCBI GI NO: 26449747 NR Description: putative DnaJ protein [Arabidopsis thaliana]
  misc_feature (133)..(315): NCBI GI NO: 27817868 NR Description: OJ1081_B12.17
  misc_feature (1)..(127): NCBI GI NO: 27817868 NR Description: OJ1081_B12.17
  misc_feature (1)..(334): NCBI GI NO: 30699227 NR Description: DnaJ protein family [Arabidopsis thaliana]
MVKDSAYYDVLGVSVDASSAEIKKAYYIKAKLVHPDKNPGNPDAALKFQELGEAYQVLSDPGKKEAYDKYGKEGIPQDNMVDPAAVFGMIFGSDYFEDYVGQLALASIASVEVDENSNSQEARAKVQEKIKELQREREQKLTQSLKDRLQPYVDERKDEFVSYASTEARRLSEAAFGEAMLHTIGYIYVRQAARELGKSRIYMGVPFIAEWVRDKGHHIKSQVNAASGAISLIQLQEGMKKMEGSENSEEQLMKSFEEKKDAMLSSLWKINVVDIESTLSRVCQAVLRDNTVSKDVLKLRAKALKKLGTIFQGAKSMYRRENSLRVENEHKSAS

SEQ ID NO: 33958 - protein, 255 aa, Zea mays subsp. mays
  peptide (1)..(255): Ceres Seq. ID no. 12411581
  misc_feature (1)..(122): NCBI GI NO: 25458468 NR Description: dnaJ-like protein [imported] - rice
  misc_feature (150)..(233): NCBI GI NO: 25458468 NR Description: dnaJ-like protein [imported] - rice
  misc_feature (1)..(250): NCBI GI NO: 15234962 NR Description: dnaJ-like protein; protein id: At4g39150
  misc_feature (1)..(248): NCBI GI NO: 15226572 NR Description: putative DnaJ protein; protein id: At2g21510
  misc_feature (1)..(237): NCBI GI NO: 15223142 NR Description: putative DnaJ protein; protein id: At1g76700.1
  misc_feature (1)..(252): NCBI GI NO: 18394951 NR Description: expressed protein; protein id: At1g21080
  misc_feature (1)..(237): NCBI GI NO: 26449747 NR Description: putative DnaJ protein [Arabidopsis thaliana]
  misc_feature (54)..(236): NCBI GI NO: 27817868 NR Description: OJ1081_B12.17
  misc_feature (1)..(48): NCBI GI NO: 27817868 NR Description: OJ1081_B12.17
  misc_feature (1)..(255): NCBI GI NO: 30699227 NR Description: DnaJ protein family [Arabidopsis thaliana]
MVDPAAVFGMIFGSDYFEDYVGQLALASIASVEVDENSNSQEARAKVQEKIKELQREREQKLTQSLKDRLQPYVDERKDEFVSYASTEARRLSEAAFGEAMLHTIGYIYVRQAARELGKSRIYMGVPFIAEWVRDKGHHIKSQVNAASGAISLIQLQEGMKKMEGSENSEEQLMKSFEEKKDAMLSSLWKINVVDIESTLSRVCQAVLRDNTVSKDVLKLRAKALKKLGTIFQGAKSMYRRENSLRVENEHKSAS

SEQ ID NO: 33959 - protein, 246 aa, Zea mays subsp. mays
  peptide (1)..(246): Ceres Seq. ID no. 12411582
  misc_feature (1)..(113): NCBI GI NO: 25458468 NR Description: dnaJ-like protein [imported] - rice
  misc_feature (141)..(224): NCBI GI NO: 25458468 NR Description: dnaJ-like protein [imported] - rice
  misc_feature (1)..(241): NCBI GI NO: 15234962 NR Description: dnaJ-like protein; protein id: At4g39150
  misc_feature (1)..(239): NCBI GI NO: 15226572 NR Description: putative DnaJ protein; protein id: At2g21510
  misc_feature (1)..(228): NCBI GI NO: 15223142 NR Description: putative DnaJ protein; protein id: At1g76700.1
  misc_feature (1)..(243): NCBI GI NO: 18394951 NR Description: expressed protein; protein id: At1g21080
  misc_feature (1)..(228): NCBI GI NO: 26449747 NR Description: putative DnaJ protein [Arabidopsis thaliana]
  misc_feature (45)..(227): NCBI GI NO: 27817868 NR Description: OJ1081_B12.17
  misc_feature (1)..(39): NCBI GI NO: 27817868 NR Description: OJ1081_B12.17
  misc_feature (1)..(246): NCBI GI NO: 30699227 NR Description: DnaJ protein family [Arabidopsis thaliana]
MIFGSDYFEDYVGQLALASIASVEVDENSNSQEARAKVQEKIKELQREREQKLTQSLKDRLQPYVDERKDEFVSYASTEARRLSEAAFGEAMLHTIGYIYVRQAARELGKSRIYMGVPFIAEWVRDKGHHIKSQVNAASGAISLIQLQEGMKKMEGSENSEEQLMKSFEEKKDAMLSSLWKINVVDIESTLSRVCQAVLRDNTVSKDVLKLRAKALKKLGTIFQGAKSMYRRENSLRVENEHKSAS

SEQ ID NO: 33960 - DNA, 1757 bp, Zea mays subsp. mays
  misc_feature (1)..(1757): Ceres Seq. ID no. 12345695
gctgataacaacatcctatcgttcctgtagcccctttccgtgaccttgccaaagaatttgctcttctctgtgcgtgtgcaatttcttccgctacagctcaaggatccgctactgctgctgttttgggagattcgccatgggcggcggggccgttaacgaccacttcccgggggccagcgacccgctgctccccacgaagcgggatggggacggggacgaggacgacgcaggtgcctccgcgttccacgagttcgacggcgcctccttcgccggcgcggtgttcaacctctccaccaccatcgtcggcgcgggcatcatggccgctaccggccaccatgaaggtgctcggtctcgtccctgggctcgtcatgatagtgctcgccgcgctcctcaccgacgcctccatcgagctgctcgtgcggttcagccgggccgcgggcgcgcgctcctacagcgcggccatggccgacgccttcggatggtggggtaggaggctgctccaggtctgcgtcgtcatcaacaacgtcggcgtcatgattgtgtacatgatcattataggcgatgtgctttctggatccacttctggtggtgagcatcactatggtgtgttagaaggatggtttggaatacactggtggaatgggcgtttatttgttctccttgtcacaaccctttgtgtgttcactccactagcatgcttgaagcgtattgattcactaagctatacatccacaatatctgttgctttggcggttgtattcgttattattactgcaggaattgctgtcatcaagttgataggtggacaaattccaatgcccaagttgtttcccactgtttctgatttggcatctgtttgggaactttttacagcagtgccggttcttgtcactgcttacgtttgccattacaatgttcacccaattcataatgagctaaaggactctacccagattaagccaatagtacacacatcattgacactatgctcgaccatctacatcacaacaagtttctttggatatctcctctttggtgaatctacactctctgatgtgctctccaactttgattcaaatcttgggatcccatacagttcagtcctcaatgatgctgtcagagtgagctatgctgttcacctgatgcttgtgttccccatgatattccatgcattgaggcttaatttggatgggctcctcttcgcctctgcaaggcctctgtcttctgacaacagaagattcggcataattacagcatcgctcctcctagtgatttttgggtctgcaatcttcattcctagtatttgggatgcctttcagtttactggggcaactgctgctgtctgtatcgcctttattttcccagctgcgatcactttaagggattcacaaggtattgccaagaagtgggacaaaattctggcgatcttcatgattgttcttgctgttgtatcaaatgtagtagcggtctacagcgatgcctacaaaatattcaacaaggaaagtgctccttctaatgcctggatcggggagtcaactgaaaatagatcttcgtggtggcttgtacgttagttggccaataaaatattcatagttcatttaggctttgtttttggtgatttgttccacgggccatggtctgctcaaatctcattgagttttgtgtgtatatctacgataggtatgaaaatttgcacaaaccgaagtgctccggtaccataaaaataattgtgtcaaatctgaaattacagagttacg

SEQ ID NO: 33961 - protein, 455 aa, Zea mays subsp. mays
  peptide (1)..(455): Ceres Seq. ID no. 12345696
  misc_feature (41)..(439): NCBI GI NO: 34898706 NR Description: hypothetical protein
  misc_feature (41)..(436): NCBI GI NO: 18406463 NR Description: expressed protein; protein id: At3g30390
  misc_feature (41)..(434): NCBI GI NO: 9758059 NR Description: amino acid transporter-like protein
  misc_feature (41)..(434): NCBI GI NO: 15241555 NR Description: transporter -like protein; protein id: At5g38820.1
  misc_feature (41)..(429): NCBI GI NO: 15228851 NR Description: putative protein; protein id: At3g56200
  misc_feature (41)..(393): NCBI GI NO: 34907894 NR Description: P0439E11.11
  misc_feature (41)..(427): NCBI GI NO: 30688270 NR Description: amino acid transporter family
  misc_feature (41)..(432): NCBI GI NO: 18412864 NR Description: expressed protein; protein id: At1g80510
  misc_feature (41)..(308): NCBI GI NO: 24461850 NR Description: CTV.3 [Poncirus trifoliata]
  misc_feature (328)..(432): NCBI GI NO: 24461850 NR Description: CTV.3 [Poncirus trifoliata]
MGTGTRTTQVPPRSTSSTAPPSPARCSTSPPPSSARASWPLPATMKVLGLVPGLVMIVLAALLTDASIELLVRFSRAAGARSYSAAMADAFGWWGRRLLQVCVVINNVGVMIVYMIIIGDVLSGSTSGGEHHYGVLEGWFGIHWWNGRLFVLLVTTLCVFTPLACLKRIDSLSYTSTISVALAVVFVIITAGIAVIKLIGGQIPMPKLFPTVSDLASVWELFTAVPVLVTAYVCHYNVHPIHNELKDSTQIKPIVHTSLTLCSTIYITTSFFGYLLFGESTLSDVLSNFDSNLGIPYSSVLNDAVRVSYAVHLMLVFPMIFHALRLNLDGLLFASARPLSSDNRRFGIITASLLLVIFGSAIFIPSIWDAFQFTGATAAVCIAFIFPAAITLRDSQGIAKKWDKILAIFMIVLAVVSNVVAVYSDAYKIFNKESAPSNAWIGESTENRSSWWLVR

SEQ ID NO: 33962 - protein, 411 aa, Zea mays subsp. mays
  peptide (1)..(411): Ceres Seq. ID no. 12345697
  misc_feature (1)..(395): NCBI GI NO: 34898706 NR Description: hypothetical protein
  misc_feature (1)..(392): NCBI GI NO: 18406463 NR Description: expressed protein; protein id: At3g30390
  misc_feature (1)..(390): NCBI GI NO: 9758059 NR Description: amino acid transporter-like protein
  misc_feature (1)..(390): NCBI GI NO: 15241555 NR Description: transporter -like protein; protein id: At5g38820.1
  misc_feature (1)..(385): NCBI GI NO: 15228851 NR Description: putative protein; protein id: At3g56200
  misc_feature (1)..(349): NCBI GI NO: 34907894 NR Description: P0439E11.11
  misc_feature (1)..(383): NCBI GI NO: 30688270 NR Description: amino acid transporter family
  misc_feature (1)..(388): NCBI GI NO: 18412864 NR Description: expressed protein; protein id: At1g80510
  misc_feature (1)..(264): NCBI GI NO: 24461850 NR Description: CTV.3 [Poncirus trifoliata]
  misc_feature (284)..(388): NCBI GI NO: 24461850 NR Description: CTV.3 [Poncirus trifoliata]
MKVLGLVPGLVMIVLAALLTDASIELLVRFSRAAGARSYSAAMADAFGWWGRRLLQVCVVINNVGVMIVYMIIIGDVLSGSTSGGEHHYGVLEGWFGIHWWNGRLFVLLVTTLCVFTPLACLKRIDSLSYTSTISVALAVVFVIITAGIAVIKLIGGQIPMPKLFPTVSDLASVWELFTAVPVLVTAYVCHYNVHPIHNELKDSTQIKPIVHTSLTLCSTIYITTSFFGYLLFGESTLSDVLSNFDSNLGIPYSSVLNDAVRVSYAVHLMLVFPMIFHALRLNLDGLLFASARPLSSDNRRFGIITASLLLVIFGSAIFIPSIWDAFQFTGATAAVCIAFIFPAAITLRDSQGIAKKWDKILAIFMIVLAVVSNVVAVYSDAYKIFNKESAPSNAWIGESTENRSSWWLVR

SEQ ID NO: 33963 - protein, 400 aa, Zea mays subsp. mays
  peptide (1)..(400): Ceres Seq. ID no. 12345698
  misc_feature (1)..(384): NCBI GI NO: 34898706 NR Description: hypothetical protein
  misc_feature (1)..(381): NCBI GI NO: 18406463 NR Description: expressed protein; protein id: At3g30390
  misc_feature (1)..(379): NCBI GI NO: 9758059 NR Description: amino acid transporter-like protein
  misc_feature (1)..(379): NCBI GI NO: 15241555 NR Description: transporter -like protein; protein id: At5g38820.1
  misc_feature (1)..(374): NCBI GI NO: 15228851 NR Description: putative protein; protein id: At3g56200
  misc_feature (1)..(338): NCBI GI NO: 34907894 NR Description: P0439E11.11
  misc_feature (1)..(372): NCBI GI NO: 30688270 NR Description: amino acid transporter family
  misc_feature (1)..(377): NCBI GI NO: 18412864 NR Description: expressed protein; protein id: At1g80510
  misc_feature (1)..(253): NCBI GI NO: 24461850 NR Description: CTV.3 [Poncirus trifoliata]
  misc_feature (273)..(377): NCBI GI NO: 24461850 NR Description: CTV.3 [Poncirus trifoliata]
MIVLAALLTDASIELLVRFSRAAGARSYSAAMADAFGWWGRRLLQVCVVINNVGVMIVYMIIIGDVLSGSTSGGEHHYGVLEGWFGIHWWNGRLFVLLVTTLCVFTPLACLKRIDSLSYTSTISVALAVVFVIITAGIAVIKLIGGQIPMPKLFPTVSDLASVWELFTAVPVLVTAYVCHYNVHPIHNELKDSTQIKPIVHTSLTLCSTIYITTSFFGYLLFGESTLSDVLSNFDSNLGIPYSSVLNDAVRVSYAVHLMLVFPMIFHALRLNLDGLLFASARPLSSDNRRFGIITASLLLVIFGSAIFIPSIWDAFQFTGATAAVCIAFIFPAAITLRDSQGIAKKWDKILAIFMIVLAVVSNVVAVYSDAYKIFNKESAPSNAWIGESTENRSSWWLVR

SEQ ID NO: 33964 - DNA, 1744 bp, Zea mays subsp. mays
  misc_feature (1)..(1744): Ceres Seq. ID no. 12348828
ctccggcctttgccgcttccacagggagtccggggccatgcagagctccgtaaagctcgcggtgcttgctctactgctagcggcagcagctcaccacggtctgctgccgctgccgacggcgcgatgctactggctcaacccggagatctacgacgccggcgggctgagccgccgcgcgttcccggacggcttcgtcttcgggacggccgcgtcggcgtaccaggtcgaggggatggccaagcacggcgggcggggccccagcatctgggacgccttcatagaggttcctgggaccatccctaacaatgccaccgctgacgtgacggtcgacgagtatcatcggtacaaggaagatgtgaacataatgaagaacatgggctttgatgcgtaccggttttcgatctcttggtcgaggattttcccagatggaactggcaaggtgaaccaggaaggagtggattactacaacaggctcatagattacatgctccagcaaggtatcgcgccgtatgcaaatctctaccattatgacctcccattggcactccatgaacagtacctgggctggcttagcccaaagattgtggaggcgtttgcagactacgccgagttctgcttccacgcgttcggagacagggtgaagaactggtttaccttcaacgagccgaggtgcgtcgctgctctgggctacgacaatggcttgcacgcaccgggaaggtgttccgggtgccccgccggaggcaactccaccacggagccgtaccttgtcgcacaccatctcatcctttctcatgcagctgcggtcaggcgataccgcgacaagtatcagcttcaccagaaggggaagattggaattctcctggatttcgtgtggtacgaacctttcagcgacagcaatgcggaccaggctgcagcacagcgagccagggacttccacctaggctggttccttgaccccattgtacatggacggtacccgtactcgatgcaagagattgccaaagacaggctaccgttgttcagcgatgaagaagccaggatggtgaaaggctctatagactatgttggcatcaaccactacacttctttctacatgaaggaccctgggacatggaacctgacgccagtcagctaccaggatgattggcatgttggttttgtctacgaacgaaatggagttcctattggcgctcacgcaaactcctactggctgtacattgtgccgtggggcatcaacaaggctgtcagctatgtcaaggaaacttacaaaaatcttacaatgatccttgctgaaaacggaatggaccaacctggtgatgtcagtattactcagggtgtgcatgacacagtaagaatccgttattacagagactacataactgagctcaagaaagcaatagatgatggtgccagagtcattgggtactttgcgtggtcgctgcttgacaacttcgagtggaggcttgggtacacttcgcggtttggcttggtgtacgtggactacaagactctgaagaggtaccccaaggactcagctttctggttcaagcatatgctgtccaagaaaaggagctagagaattgcagacaagaggaccactggcttcaggtgtcatacaaaagttcactctgcaaatcctcttagtatgtcagatttagcttaagaaaccgtgcagacaattgagtctcaaggctcgacatctctagcttcgttaattgttgcaaggcaataaattggtatcttc

SEQ ID NO: 33965 - protein, 524 aa, Zea mays subsp. mays
  peptide (1)..(524): Ceres Seq. ID no. 12348829
  misc_feature (56)..(523): Pfam Name: Pfam Description:  Glycosyl hydrolase family 1
  misc_feature (19)..(523): NCBI GI NO: 34899014 NR Description: putative non-cyanogenic beta-glucosidase precursor
  misc_feature (13)..(524): NCBI GI NO: 1362162 NR Description: beta-glucosidase BGQ60 precursor - barley
  misc_feature (45)..(523): NCBI GI NO: 17226270 NR Description: beta-mannosidase enzyme [Lycopersicon esculentum]
  misc_feature (53)..(521): NCBI GI NO: 15229584 NR Description: glycosyl hydrolase family 1; protein id:At3g18080
  misc_feature (21)..(519): NCBI GI NO: 18875458 NR Description: beta-glucosidase [Oryza sativa]
  misc_feature (53)..(521): NCBI GI NO: 22331147 NR Description: glycosyl hydrolase family 1; protein id:At3g18070
  misc_feature (53)..(521): NCBI GI NO: 9294062 NR Description: beta-glucosidase [Arabidopsis thaliana]
  misc_feature (53)..(519): NCBI GI NO: 22658440 NR Description: beta-glucosidase
  misc_feature (12)..(519): NCBI GI NO: 6979913 NR Description: prunasin hydrolase isoform PHA precursor
  misc_feature (247)..(524): NCBI GI NO: 6103585 NR Description: raucaffricine-O-beta-D-glucosidase
SGLCRFHRESGAMQSSVKLAVLALLLAAAAHHGLLPLPTARCYWLNPEIYDAGGLSRRAFPDGFVFGTAASAYQVEGMAKHGGRGPSIWDAFIEVPGTIPNNATADVTVDEYHRYKEDVNIMKNMGFDAYRFSISWSRIFPDGTGKVNQEGVDYYNRLIDYMLQQGIAPYANLYHYDLPLALHEQYLGWLSPKIVEAFADYAEFCFHAFGDRVKNWFTFNEPRCVAALGYDNGLHAPGRCSGCPAGGNSTTEPYLVAHHLILSHAAAVRRYRDKYQLHQKGKIGILLDFVWYEPFSDSNADQAAAQRARDFHLGWFLDPIVHGRYPYSMQEIAKDRLPLFSDEEARMVKGSIDYVGINHYTSFYMKDPGTWNLTPVSYQDDWHVGFVYERNGVPIGAHANSYWLYIVPWGINKAVSYVKETYKNLTMILAENGMDQPGDVSITQGVHDTVRIRYYRDYITELKKAIDDGARVIGYFAWSLLDNFEWRLGYTSRFGLVYVDYKTLKRYPKDSAFWFKHMLSKKRS

SEQ ID NO: 33966 - protein, 512 aa, Zea mays subsp. mays
  peptide (1)..(512): Ceres Seq. ID no. 12348830
  misc_feature (44)..(511): Pfam Name: Pfam Description:  Glycosyl hydrolase family 1
  misc_feature (7)..(511): NCBI GI NO: 34899014 NR Description: putative non-cyanogenic beta-glucosidase precursor
  misc_feature (1)..(512): NCBI GI NO: 1362162 NR Description: beta-glucosidase BGQ60 precursor - barley
  misc_feature (33)..(511): NCBI GI NO: 17226270 NR Description: beta-mannosidase enzyme [Lycopersicon esculentum]
  misc_feature (41)..(509): NCBI GI NO: 15229584 NR Description: glycosyl hydrolase family 1; protein id:At3g18080
  misc_feature (9)..(507): NCBI GI NO: 18875458 NR Description: beta-glucosidase [Oryza sativa]
  misc_feature (41)..(509): NCBI GI NO: 22331147 NR Description: glycosyl hydrolase family 1; protein id:At3g18070
  misc_feature (41)..(509): NCBI GI NO: 9294062 NR Description: beta-glucosidase [Arabidopsis thaliana]
  misc_feature (41)..(507): NCBI GI NO: 22658440 NR Description: beta-glucosidase
  misc_feature (1)..(507): NCBI GI NO: 6979913 NR Description: prunasin hydrolase isoform PHA precursor
  misc_feature (235)..(512): NCBI GI NO: 6103585 NR Description: raucaffricine-O-beta-D-glucosidase
MQSSVKLAVLALLLAAAAHHGLLPLPTARCYWLNPEIYDAGGLSRRAFPDGFVFGTAASAYQVEGMAKHGGRGPSIWDAFIEVPGTIPNNATADVTVDEYHRYKEDVNIMKNMGFDAYRFSISWSRIFPDGTGKVNQEGVDYYNRLIDYMLQQGIAPYANLYHYDLPLALHEQYLGWLSPKIVEAFADYAEFCFHAFGDRVKNWFTFNEPRCVAALGYDNGLHAPGRCSGCPAGGNSTTEPYLVAHHLILSHAAAVRRYRDKYQLHQKGKIGILLDFVWYEPFSDSNADQAAAQRARDFHLGWFLDPIVHGRYPYSMQEIAKDRLPLFSDEEARMVKGSIDYVGINHYTSFYMKDPGTWNLTPVSYQDDWHVGFVYERNGVPIGAHANSYWLYIVPWGINKAVSYVKETYKNLTMILAENGMDQPGDVSITQGVHDTVRIRYYRDYITELKKAIDDGARVIGYFAWSLLDNFEWRLGYTSRFGLVYVDYKTLKRYPKDSAFWFKHMLSKKRS

SEQ ID NO: 33967 - protein, 447 aa, Zea mays subsp. mays
  peptide (1)..(447): Ceres Seq. ID no. 12348831
  misc_feature (1)..(446): Pfam Name: Pfam Description:  Glycosyl hydrolase family 1
  misc_feature (1)..(446): NCBI GI NO: 34899014 NR Description: putative non-cyanogenic beta-glucosidase precursor
  misc_feature (1)..(447): NCBI GI NO: 1362162 NR Description: beta-glucosidase BGQ60 precursor - barley
  misc_feature (1)..(446): NCBI GI NO: 17226270 NR Description: beta-mannosidase enzyme [Lycopersicon esculentum]
  misc_feature (1)..(444): NCBI GI NO: 15229584 NR Description: glycosyl hydrolase family 1; protein id:At3g18080
  misc_feature (1)..(442): NCBI GI NO: 18875458 NR Description: beta-glucosidase [Oryza sativa]
  misc_feature (1)..(444): NCBI GI NO: 22331147 NR Description: glycosyl hydrolase family 1; protein id:At3g18070
  misc_feature (1)..(444): NCBI GI NO: 9294062 NR Description: beta-glucosidase [Arabidopsis thaliana]
  misc_feature (1)..(442): NCBI GI NO: 22658440 NR Description: beta-glucosidase
  misc_feature (1)..(442): NCBI GI NO: 6979913 NR Description: prunasin hydrolase isoform PHA precursor
  misc_feature (170)..(447): NCBI GI NO: 6103585 NR Description: raucaffricine-O-beta-D-glucosidase
MAKHGGRGPSIWDAFIEVPGTIPNNATADVTVDEYHRYKEDVNIMKNMGFDAYRFSISWSRIFPDGTGKVNQEGVDYYNRLIDYMLQQGIAPYANLYHYDLPLALHEQYLGWLSPKIVEAFADYAEFCFHAFGDRVKNWFTFNEPRCVAALGYDNGLHAPGRCSGCPAGGNSTTEPYLVAHHLILSHAAAVRRYRDKYQLHQKGKIGILLDFVWYEPFSDSNADQAAAQRARDFHLGWFLDPIVHGRYPYSMQEIAKDRLPLFSDEEARMVKGSIDYVGINHYTSFYMKDPGTWNLTPVSYQDDWHVGFVYERNGVPIGAHANSYWLYIVPWGINKAVSYVKETYKNLTMILAENGMDQPGDVSITQGVHDTVRIRYYRDYITELKKAIDDGARVIGYFAWSLLDNFEWRLGYTSRFGLVYVDYKTLKRYPKDSAFWFKHMLSKKRS

SEQ ID NO: 33968 - DNA, 1906 bp, Zea mays subsp. mays
  misc_feature (1)..(1906): Ceres Seq. ID no. 12345740
acttcacctcttctgcttccttctccccagcatacagtgccagacaggatacccacacattcatggaggtggttcaagaagtccttaggcatggctcagcagatagtgtccgtgctgtcataagagctaacaaaaagagctacagccttgtccagctcattgcagcctcttttgatgtctacaacattttgtgcagcaaaaatatgacaccaaatgggatgcaagattcttcttccaaaggaagaaatggaacaggattccttcatggagctcgtgttggcattgtggctaaaccctctcctgaatttgttgctggggtatttggaacctggctttctggtggagttgcagtaccccttgcccttagctatccagaagctgagcttcttcatgtcatgaatgactcagatatttcaatggttttaagcaccaaggagcatcacgaaatcatggagaacctttctatcaagtgttctgcttattgttctattcttccatctgtcactagtataccttcagaaatcaatcctcaagaaccttcaagcaatgaggcgatttcatcagtctctactttaataactgagaccaacagttcaaagaaaatcaaaggcgatgaccctgctcttatcctttacacaagtggcacaactggtaaacctaaaggagtagttcacacccatgagggcattctttctcaggttcagattctatctgaagcgtggggatatcgaagtgaagaccaatttctgcactgtctcccgctgcaccatgtgcatgggcttttcaatgctctatttgcgcccctttattcaggatcagtggttgagtttataccaaaattcagtgtaagcgggatatggcagagatggcgagaatcatatcccaacgatgcgagtaaaagtacagaggccattacagtatttactggagttccaaccatgtatacacgtctgctgcaagggtatgatagtatggatcctgatcaaaagtcggcctcttcttacgctgcaaagcatctgaggttaatgatgtgtggatcatcagctcttccttccccacttatgaagaggtgggaggaagtgacaggccatcgtcttttggaacgctatggtatgactgagtttgtcatggcactgtctaatccattgcatggtatccgaaaagaaggtacagttggtaaacctcttccacgcattgaggccaagatcattatggaggacggggctgaaactacaactggagttggcgagctctgcattagaagtccatctcttttcaaggagtattggaaaagaccagaggtcaccgcagaatctttcattgatggaggattcttcaagacaggtgatacagtaactgtagatgaggaaggatacttcataattttgggacgcacaaatgccgacattatgaaatttggcggttacaagctgtcagcattagaaattgaggcagtactgttagagcatgatgctgtactggaatgtgctgtccttggcttgcctgatgaagcctatggggaggttatatgtgcaataattgtgcctaaggaggatgcaaagaaaaaggctggacaggactcaaagccagcgctaaccttggaagcattaacaagttggtcgaaagataagcttgctccatacaagattccaacaagactatacttgtgggattctcttcctcggaatgccatgggaaaggttaacaagaaggagctgaagaaattgttaggagcttagccatgtgtatagatgtatttatctcttcatttccttcttaaagtttagcaagtcgggctcattatattgattagcgaataagtgctttcgttaccatggaccaataatcttcgaaacggcccgagttatactgcgcacacatttatttatcagaaaagtttctagtc

SEQ ID NO: 33969 - protein, 578 aa, Zea mays subsp. mays
  peptide (1)..(578): Ceres Seq. ID no. 12345741
  misc_feature (89)..(497): Pfam Name: Pfam Description:  AMP-binding enzyme
  misc_feature (21)..(576): NCBI GI NO: 21536867 NR Description: putative long-chain acyl-CoA synthetase
  misc_feature (3)..(576): NCBI GI NO: 9294464 NR Description: long-chain-fatty-acid-CoA ligase-like protein
  misc_feature (21)..(576): NCBI GI NO: 18401035 NR Description: putative long-chain acyl-CoA synthetase
  misc_feature (6)..(233): NCBI GI NO: 34909750 NR Description: hypothetical protein~similar to Arabidopsisthaliana chromosome 3
  misc_feature (434)..(578): NCBI GI NO: 34909750 NR Description: hypothetical protein~similar to Arabidopsisthaliana chromosome 3
  misc_feature (207)..(578): NCBI GI NO: 23127962 NR Description: hypothetical protein [Nostoc punctiforme]
  misc_feature (87)..(176): NCBI GI NO: 23127962 NR Description: hypothetical protein [Nostoc punctiforme]
  misc_feature (162)..(578): NCBI GI NO: 37520691 NR Description: probable long chain fatty acid CoA ligase
  misc_feature (82)..(154): NCBI GI NO: 37520691 NR Description: probable long chain fatty acid CoA ligase
  misc_feature (85)..(406): NCBI GI NO: 28372537 NR Description: hypothetical protein LOC197322 [Homo sapiens]
FTSSASFSPAYSARQDTHTFMEVVQEVLRHGSADSVRAVIRANKKSYSLVQLIAASFDVYNILCSKNMTPNGMQDSSSKGRNGTGFLHGARVGIVAKPSPEFVAGVFGTWLSGGVAVPLALSYPEAELLHVMNDSDISMVLSTKEHHEIMENLSIKCSAYCSILPSVTSIPSEINPQEPSSNEAISSVSTLITETNSSKKIKGDDPALILYTSGTTGKPKGVVHTHEGILSQVQILSEAWGYRSEDQFLHCLPLHHVHGLFNALFAPLYSGSVVEFIPKFSVSGIWQRWRESYPNDASKSTEAITVFTGVPTMYTRLLQGYDSMDPDQKSASSYAAKHLRLMMCGSSALPSPLMKRWEEVTGHRLLERYGMTEFVMALSNPLHGIRKEGTVGKPLPRIEAKIIMEDGAETTTGVGELCIRSPSLFKEYWKRPEVTAESFIDGGFFKTGDTVTVDEEGYFIILGRTNADIMKFGGYKLSALEIEAVLLEHDAVLECAVLGLPDEAYGEVICAIIVPKEDAKKKAGQDSKPALTLEALTSWSKDKLAPYKIPTRLYLWDSLPRNAMGKVNKKELKKLLGA

SEQ ID NO: 33970 - protein, 558 aa, Zea mays subsp. mays
  peptide (1)..(558): Ceres Seq. ID no. 12345742
  misc_feature (69)..(477): Pfam Name: Pfam Description:  AMP-binding enzyme
  misc_feature (1)..(556): NCBI GI NO: 21536867 NR Description: putative long-chain acyl-CoA synthetase
  misc_feature (1)..(556): NCBI GI NO: 9294464 NR Description: long-chain-fatty-acid-CoA ligase-like protein
  misc_feature (1)..(556): NCBI GI NO: 18401035 NR Description: putative long-chain acyl-CoA synthetase
  misc_feature (1)..(213): NCBI GI NO: 34909750 NR Description: hypothetical protein~similar to Arabidopsisthaliana chromosome 3
  misc_feature (414)..(558): NCBI GI NO: 34909750 NR Description: hypothetical protein~similar to Arabidopsisthaliana chromosome 3
  misc_feature (187)..(558): NCBI GI NO: 23127962 NR Description: hypothetical protein [Nostoc punctiforme]
  misc_feature (67)..(156): NCBI GI NO: 23127962 NR Description: hypothetical protein [Nostoc punctiforme]
  misc_feature (142)..(558): NCBI GI NO: 37520691 NR Description: probable long chain fatty acid CoA ligase
  misc_feature (62)..(134): NCBI GI NO: 37520691 NR Description: probable long chain fatty acid CoA ligase
  misc_feature (65)..(386): NCBI GI NO: 28372537 NR Description: hypothetical protein LOC197322 [Homo sapiens]
MEVVQEVLRHGSADSVRAVIRANKKSYSLVQLIAASFDVYNILCSKNMTPNGMQDSSSKGRNGTGFLHGARVGIVAKPSPEFVAGVFGTWLSGGVAVPLALSYPEAELLHVMNDSDISMVLSTKEHHEIMENLSIKCSAYCSILPSVTSIPSEINPQEPSSNEAISSVSTLITETNSSKKIKGDDPALILYTSGTTGKPKGVVHTHEGILSQVQILSEAWGYRSEDQFLHCLPLHHVHGLFNALFAPLYSGSVVEFIPKFSVSGIWQRWRESYPNDASKSTEAITVFTGVPTMYTRLLQGYDSMDPDQKSASSYAAKHLRLMMCGSSALPSPLMKRWEEVTGHRLLERYGMTEFVMALSNPLHGIRKEGTVGKPLPRIEAKIIMEDGAETTTGVGELCIRSPSLFKEYWKRPEVTAESFIDGGFFKTGDTVTVDEEGYFIILGRTNADIMKFGGYKLSALEIEAVLLEHDAVLECAVLGLPDEAYGEVICAIIVPKEDAKKKAGQDSKPALTLEALTSWSKDKLAPYKIPTRLYLWDSLPRNAMGKVNKKELKKLLGA

SEQ ID NO: 33971 - protein, 511 aa, Zea mays subsp. mays
  peptide (1)..(511): Ceres Seq. ID no. 12345743
  misc_feature (22)..(430): Pfam Name: Pfam Description:  AMP-binding enzyme
  misc_feature (1)..(509): NCBI GI NO: 21536867 NR Description: putative long-chain acyl-CoA synthetase
  misc_feature (1)..(509): NCBI GI NO: 9294464 NR Description: long-chain-fatty-acid-CoA ligase-like protein
  misc_feature (1)..(509): NCBI GI NO: 18401035 NR Description: putative long-chain acyl-CoA synthetase
  misc_feature (1)..(166): NCBI GI NO: 34909750 NR Description: hypothetical protein~similar to Arabidopsisthaliana chromosome 3
  misc_feature (367)..(511): NCBI GI NO: 34909750 NR Description: hypothetical protein~similar to Arabidopsisthaliana chromosome 3
  misc_feature (140)..(511): NCBI GI NO: 23127962 NR Description: hypothetical protein [Nostoc punctiforme]
  misc_feature (20)..(109): NCBI GI NO: 23127962 NR Description: hypothetical protein [Nostoc punctiforme]
  misc_feature (95)..(511): NCBI GI NO: 37520691 NR Description: probable long chain fatty acid CoA ligase
  misc_feature (15)..(87): NCBI GI NO: 37520691 NR Description: probable long chain fatty acid CoA ligase
  misc_feature (18)..(339): NCBI GI NO: 28372537 NR Description: hypothetical protein LOC197322 [Homo sapiens]
MTPNGMQDSSSKGRNGTGFLHGARVGIVAKPSPEFVAGVFGTWLSGGVAVPLALSYPEAELLHVMNDSDISMVLSTKEHHEIMENLSIKCSAYCSILPSVTSIPSEINPQEPSSNEAISSVSTLITETNSSKKIKGDDPALILYTSGTTGKPKGVVHTHEGILSQVQILSEAWGYRSEDQFLHCLPLHHVHGLFNALFAPLYSGSVVEFIPKFSVSGIWQRWRESYPNDASKSTEAITVFTGVPTMYTRLLQGYDSMDPDQKSASSYAAKHLRLMMCGSSALPSPLMKRWEEVTGHRLLERYGMTEFVMALSNPLHGIRKEGTVGKPLPRIEAKIIMEDGAETTTGVGELCIRSPSLFKEYWKRPEVTAESFIDGGFFKTGDTVTVDEEGYFIILGRTNADIMKFGGYKLSALEIEAVLLEHDAVLECAVLGLPDEAYGEVICAIIVPKEDAKKKAGQDSKPALTLEALTSWSKDKLAPYKIPTRLYLWDSLPRNAMGKVNKKELKKLLGA

SEQ ID NO: 33972 - DNA, 1617 bp, Zea mays subsp. mays
  misc_feature (1)..(1617): Ceres Seq. ID no. 13494824
agccaaatcgaaggagattgaacgaagcagcccagccaaattcccctcgccgccccgtcccttctcgacatttcttgtcccgtcgtcgcctcaatctcgaagcctctccggcggagccgcctcatcatgttccgaaggcctccaaccaaacatcctctagggtttccgcatcgtccgtcgcgatgggcttcacgaagcggtcgccccagcatcccgcctccccagccggcggcgaggtcggcgcccagacggcagggaaggtcacaccagtgccggcggcgccggagtcggcgcccgcggcggtggtgccgaggcctccggacgtggcgcccttcctgaccaaggtctacgacatggtctccgacccggccaccgacgcggtcatctcctggagcgccgccggcggcagtttcgtgatctgggactcgcacgctttcgagcgcgacctgctgccgcggcacttcaagcacaatcacttcaccagcttcatacgccagctcaacacctacggatttcataaagttgatccagatagatgggaatgggccaatgaaggctttgttaagggccaaaaacatcttttgaagaccatcaagagaaagaagaaatcctctcaggatgtacctagtgatctgcagtcggtgcctgtcaaaactgcacctggcactgagaatatcgagataggaaaatatggaggccttgaaaaggaggttgagacacttaagagggacaaggcccttctaatgcagcagcttgtagatctacggcagtaccagcaatcatctagcgctgaagtgcagaatttaattcaacgcctccgtgtgatggagcagaaccagcagcagatgatggcacttttggcaattgttgtccagaatccagacttcctgaaccagctcgtgcagcagcagcgcaggagtaactggtggaatgatgatggtaacaggaaaagaaggttccaagctctggaacatggtcctgtagatgaccaagagacttctggtggaggcgcacaaattattcaatatcgtcctcctgttcctgaaacttccaatcagccaataccagcaaatgaagctttctattcaacccctgcacaaccagcttcaagccctgcacttgagatgcccatggatgtagagatgacttcaaacaatgttaatacctttgattcaactggcaatgattttactgacacctctgctctatgtgaatggtatgacatggatatatttggtgatgaacttgagcacattcttcaacagccagagcaggactttcaagtggaccctcctttaacagttgaggattatggttatgatcatccacggttagagcaggactatcagatggaagcacaacagaattgcaaaaatcctcaatatgttgcctgtgtcttgaagcaaagggaaagccatgcatctgatgtccattagtactgatcagtttgagctgatgtcataactgaagcatgagcggtggtcccccagaatgttgtccagtaacattagtggatagagatttgtgatgaacagaatcttgagactggcaggttagccaccattgggaacctgaagaccgtcgggattgctcagaattcagtatactaatactaat

SEQ ID NO: 33973 - protein, 477 aa, Zea mays subsp. mays
  peptide (1)..(477): Ceres Seq. ID no. 13494825
  misc_feature (109)..(286): Pfam Name: Pfam Description:  HSF-type DNA-binding
  misc_feature (61)..(461): NCBI GI NO: 34902282 NR Description: Putative heat shock factor 3
  misc_feature (81)..(350): NCBI GI NO: 29126355 NR Description: putative heat shock transcription factor
  misc_feature (71)..(364): NCBI GI NO: 729775 NR Description: HEAT SHOCK FACTOR PROTEIN HSF8
  misc_feature (90)..(367): NCBI GI NO: 25296101 NR Description: heat shock transcription factor HSF3
  misc_feature (90)..(367): NCBI GI NO: 27261140 NR Description: HSF3 DNA-binding domain/ VP16 activation domainfusion
  misc_feature (90)..(367): NCBI GI NO: 30686034 NR Description: heat shock transcription factor 3 (HSF3)
  misc_feature (80)..(344): NCBI GI NO: 15236631 NR Description: heat shock transcription factor 1 (HSF1)
  misc_feature (80)..(344): NCBI GI NO: 429155 NR Description: heat shock factor [Arabidopsis thaliana]
  misc_feature (71)..(364): NCBI GI NO: 11386827 NR Description: Heat shock factor protein HSF8
  misc_feature (93)..(348): NCBI GI NO: 15223168 NR Description: heat shock transcription factor family
PNRRRLNEAAQPNSPRRPVPSRHFLSRRRLNLEASPAEPPHHVPKASNQTSSRVSASSVAMGFTKRSPQHPASPAGGEVGAQTAGKVTPVPAAPESAPAAVVPRPPDVAPFLTKVYDMVSDPATDAVISWSAAGGSFVIWDSHAFERDLLPRHFKHNHFTSFIRQLNTYGFHKVDPDRWEWANEGFVKGQKHLLKTIKRKKKSSQDVPSDLQSVPVKTAPGTENIEIGKYGGLEKEVETLKRDKALLMQQLVDLRQYQQSSSAEVQNLIQRLRVMEQNQQQMMALLAIVVQNPDFLNQLVQQQRRSNWWNDDGNRKRRFQALEHGPVDDQETSGGGAQIIQYRPPVPETSNQPIPANEAFYSTPAQPASSPALEMPMDVEMTSNNVNTFDSTGNDFTDTSALCEWYDMDIFGDELEHILQQPEQDFQVDPPLTVEDYGYDHPRLEQDYQMEAQQNCKNPQYVACVLKQRESHASDVH

SEQ ID NO: 33974 - protein, 417 aa, Zea mays subsp. mays
  peptide (1)..(417): Ceres Seq. ID no. 13494826
  misc_feature (49)..(226): Pfam Name: Pfam Description:  HSF-type DNA-binding
  misc_feature (1)..(401): NCBI GI NO: 34902282 NR Description: Putative heat shock factor 3
  misc_feature (21)..(290): NCBI GI NO: 29126355 NR Description: putative heat shock transcription factor
  misc_feature (11)..(304): NCBI GI NO: 729775 NR Description: HEAT SHOCK FACTOR PROTEIN HSF8
  misc_feature (30)..(307): NCBI GI NO: 25296101 NR Description: heat shock transcription factor HSF3
  misc_feature (30)..(307): NCBI GI NO: 30686034 NR Description: heat shock transcription factor 3 (HSF3)
  misc_feature (30)..(307): NCBI GI NO: 27261140 NR Description: HSF3 DNA-binding domain/ VP16 activation domainfusion
  misc_feature (20)..(284): NCBI GI NO: 15236631 NR Description: heat shock transcription factor 1 (HSF1)
  misc_feature (20)..(284): NCBI GI NO: 429155 NR Description: heat shock factor [Arabidopsis thaliana]
  misc_feature (11)..(304): NCBI GI NO: 11386827 NR Description: Heat shock factor protein HSF8
  misc_feature (33)..(288): NCBI GI NO: 15223168 NR Description: heat shock transcription factor family
MGFTKRSPQHPASPAGGEVGAQTAGKVTPVPAAPESAPAAVVPRPPDVAPFLTKVYDMVSDPATDAVISWSAAGGSFVIWDSHAFERDLLPRHFKHNHFTSFIRQLNTYGFHKVDPDRWEWANEGFVKGQKHLLKTIKRKKKSSQDVPSDLQSVPVKTAPGTENIEIGKYGGLEKEVETLKRDKALLMQQLVDLRQYQQSSSAEVQNLIQRLRVMEQNQQQMMALLAIVVQNPDFLNQLVQQQRRSNWWNDDGNRKRRFQALEHGPVDDQETSGGGAQIIQYRPPVPETSNQPIPANEAFYSTPAQPASSPALEMPMDVEMTSNNVNTFDSTGNDFTDTSALCEWYDMDIFGDELEHILQQPEQDFQVDPPLTVEDYGYDHPRLEQDYQMEAQQNCKNPQYVACVLKQRESHASDVH

SEQ ID NO: 33975 - protein, 360 aa, Zea mays subsp. mays
  peptide (1)..(360): Ceres Seq. ID no. 13494827
  misc_feature (1)..(169): Pfam Name: Pfam Description:  HSF-type DNA-binding
  misc_feature (1)..(344): NCBI GI NO: 34902282 NR Description: Putative heat shock factor 3
  misc_feature (1)..(233): NCBI GI NO: 29126355 NR Description: putative heat shock transcription factor
  misc_feature (1)..(247): NCBI GI NO: 729775 NR Description: HEAT SHOCK FACTOR PROTEIN HSF8
  misc_feature (1)..(250): NCBI GI NO: 25296101 NR Description: heat shock transcription factor HSF3
  misc_feature (1)..(250): NCBI GI NO: 27261140 NR Description: HSF3 DNA-binding domain/ VP16 activation domainfusion
  misc_feature (1)..(250): NCBI GI NO: 30686034 NR Description: heat shock transcription factor 3 (HSF3)
  misc_feature (1)..(227): NCBI GI NO: 15236631 NR Description: heat shock transcription factor 1 (HSF1)
  misc_feature (1)..(227): NCBI GI NO: 429155 NR Description: heat shock factor [Arabidopsis thaliana]
  misc_feature (1)..(247): NCBI GI NO: 11386827 NR Description: Heat shock factor protein HSF8
  misc_feature (1)..(231): NCBI GI NO: 15223168 NR Description: heat shock transcription factor family
MVSDPATDAVISWSAAGGSFVIWDSHAFERDLLPRHFKHNHFTSFIRQLNTYGFHKVDPDRWEWANEGFVKGQKHLLKTIKRKKKSSQDVPSDLQSVPVKTAPGTENIEIGKYGGLEKEVETLKRDKALLMQQLVDLRQYQQSSSAEVQNLIQRLRVMEQNQQQMMALLAIVVQNPDFLNQLVQQQRRSNWWNDDGNRKRRFQALEHGPVDDQETSGGGAQIIQYRPPVPETSNQPIPANEAFYSTPAQPASSPALEMPMDVEMTSNNVNTFDSTGNDFTDTSALCEWYDMDIFGDELEHILQQPEQDFQVDPPLTVEDYGYDHPRLEQDYQMEAQQNCKNPQYVACVLKQRESHASDVH

SEQ ID NO: 33976 - DNA, 1309 bp, Zea mays subsp. mays
  misc_feature (1)..(1309): Ceres Seq. ID no. 12412564
accgtctcgtacatgcccttatccctctcgccccgcatcccatcacccgcaggccggaacagcagccgtcagccatgcccgcggcggccttcttctccgccgcgctgccccctccctcgcgtacgctgtcccgccgcctcgtcgtgtcccgcgcggctgcggccgcggcctcagcatcagcatcctcgtcctccgggtggcaaggtggcgggggagtggagttccagggcaaggtggggttcctggggctcgggatcatgggcgcgcccatggcatccaacctcatcaaggcaggctgcgacgtcacggtttggaacaggaccaagagcaagtgcgatcccctcctcagtctcgatgccaagtacgagcctacaccggcccaagtcgcttcatcttgtgacgtgacattcgcgattctcgctgatccacaaagcgcggctgaggttgcatgtgggtccagtggagctgctgaagggttggcccctgggaaaggctatgtcgatgtgtcgacggttgatggtgctacatccaagctgattggtgaacgcattacaagtactggagcatctttccttgaggctccagtttcaggctcgaaaaaaccagcagaagatgggctgctcatctttcttactgcaggtgatgagtccttgtacaagagagtggcgcccctccttgatgtcatggggaagtcaaggttttatcttggcgatgtaggcaatggtgctgcaatgaagctcgtggttaacatggtcatggggagcatgatggtttccttctcagaagggttgctcctgagtgaaaaagtcggtttagacccgaatactctcgtcgaggttatttcccagggtgctatcagtgcccccatgttctctctcaagggcccatccatggttaaagctgcatatcctcctgcatttcctctgaagcatcaacagaaggacttgaggctcgcattggcccctggcggaatcggtgtcccagtccattcctacagttgcagctgcgaacgagctgtacaaggctgcaaaatcgctcggccttagtgaccacgacttctcggcggttattgaagcgctgaaagccaaagtgcagagccagagctcacaatagtagttgcctgttcagcagagctcacagtagttgttgcctcttcagcagctaccattgaggcagcattttgtctcgatggatgaagttgacacttaggaaaatttctcaagatcgctacagaaaagtctcagaacaatacaatttctgtattcgtaaatattttctcaaacatcacaacgacgacatttccttaagg

SEQ ID NO: 33977 - protein, 347 aa, Zea mays subsp. mays
  peptide (1)..(347): Ceres Seq. ID no. 12412565
  misc_feature (78)..(237): Pfam Name: Pfam Description:  NAD binding domain of 6-phosphogluconate dehydrogenase
  misc_feature (23)..(320): NCBI GI NO: 34914300 NR Description: putative gamma hydroxybutyrate dehydrogenase
  misc_feature (78)..(319): NCBI GI NO: 18394513 NR Description: Expressed protein; protein id: At1g17650
  misc_feature (147)..(319): NCBI GI NO: 8778467 NR Description: F1L3.35 [Arabidopsis thaliana]
  misc_feature (78)..(149): NCBI GI NO: 8778467 NR Description: F1L3.35 [Arabidopsis thaliana]
  misc_feature (77)..(328): NCBI GI NO: 15375068 NR Description: gamma hydroxybutyrate dehydrogenase
  misc_feature (77)..(332): NCBI GI NO: 29368238 NR Description: gamma hydroxybutyrate dehydrogenase-like protein
  misc_feature (77)..(328): NCBI GI NO: 18404556 NR Description: expressed protein; protein id: At3g25530
  misc_feature (77)..(345): NCBI GI NO: 23054597 NR Description: hypothetical protein [Geobacter metallireducens]
  misc_feature (79)..(336): NCBI GI NO: 39996474 NR Description: 3-hydroxyisobutyrate dehydrogenase family protein
  misc_feature (40)..(322): NCBI GI NO: 20891625 NR Description: RIKEN cDNA 3930401K13 [Mus musculus]
RLVHALIPLAPHPITRRPEQQPSAMPAAAFFSAALPPPSRTLSRRLVVSRAAAAAASASASSSSGWQGGGGVEFQGKVGFLGLGIMGAPMASNLIKAGCDVTVWNRTKSKCDPLLSLDAKYEPTPAQVASSCDVTFAILADPQSAAEVACGSSGAAEGLAPGKGYVDVSTVDGATSKLIGERITSTGASFLEAPVSGSKKPAEDGLLIFLTAGDESLYKRVAPLLDVMGKSRFYLGDVGNGAAMKLVVNMVMGSMMVSFSEGLLLSEKVGLDPNTLVEVISQGAISAPMFSLKGPSMVKAAYPPAFPLKHQQKDLRLALAPGGIGVPVHSYSCSCERAVQGCKIARP

SEQ ID NO: 33978 - protein, 323 aa, Zea mays subsp. mays
  peptide (1)..(323): Ceres Seq. ID no. 12412566
  misc_feature (54)..(213): Pfam Name: Pfam Description:  NAD binding domain of 6-phosphogluconate dehydrogenase
  misc_feature (1)..(296): NCBI GI NO: 34914300 NR Description: putative gamma hydroxybutyrate dehydrogenase
  misc_feature (54)..(295): NCBI GI NO: 18394513 NR Description: Expressed protein; protein id: At1g17650
  misc_feature (123)..(295): NCBI GI NO: 8778467 NR Description: F1L3.35 [Arabidopsis thaliana]
  misc_feature (54)..(125): NCBI GI NO: 8778467 NR Description: F1L3.35 [Arabidopsis thaliana]
  misc_feature (53)..(304): NCBI GI NO: 15375068 NR Description: gamma hydroxybutyrate dehydrogenase
  misc_feature (53)..(308): NCBI GI NO: 29368238 NR Description: gamma hydroxybutyrate dehydrogenase-like protein
  misc_feature (53)..(304): NCBI GI NO: 18404556 NR Description: expressed protein; protein id: At3g25530
  misc_feature (53)..(321): NCBI GI NO: 23054597 NR Description: hypothetical protein [Geobacter metallireducens]
  misc_feature (55)..(312): NCBI GI NO: 39996474 NR Description: 3-hydroxyisobutyrate dehydrogenase family protein
  misc_feature (16)..(298): NCBI GI NO: 20891625 NR Description: RIKEN cDNA 3930401K13 [Mus musculus]
MPAAAFFSAALPPPSRTLSRRLVVSRAAAAAASASASSSSGWQGGGGVEFQGKVGFLGLGIMGAPMASNLIKAGCDVTVWNRTKSKCDPLLSLDAKYEPTPAQVASSCDVTFAILADPQSAAEVACGSSGAAEGLAPGKGYVDVSTVDGATSKLIGERITSTGASFLEAPVSGSKKPAEDGLLIFLTAGDESLYKRVAPLLDVMGKSRFYLGDVGNGAAMKLVVNMVMGSMMVSFSEGLLLSEKVGLDPNTLVEVISQGAISAPMFSLKGPSMVKAAYPPAFPLKHQQKDLRLALAPGGIGVPVHSYSCSCERAVQGCKIARP

SEQ ID NO: 33979 - protein, 262 aa, Zea mays subsp. mays
  peptide (1)..(262): Ceres Seq. ID no. 12412567
  misc_feature (1)..(152): Pfam Name: Pfam Description:  NAD binding domain of 6-phosphogluconate dehydrogenase
  misc_feature (1)..(235): NCBI GI NO: 34914300 NR Description: putative gamma hydroxybutyrate dehydrogenase
  misc_feature (1)..(234): NCBI GI NO: 18394513 NR Description: Expressed protein; protein id: At1g17650
  misc_feature (62)..(234): NCBI GI NO: 8778467 NR Description: F1L3.35 [Arabidopsis thaliana]
  misc_feature (1)..(64): NCBI GI NO: 8778467 NR Description: F1L3.35 [Arabidopsis thaliana]
  misc_feature (1)..(243): NCBI GI NO: 15375068 NR Description: gamma hydroxybutyrate dehydrogenase
  misc_feature (1)..(247): NCBI GI NO: 29368238 NR Description: gamma hydroxybutyrate dehydrogenase-like protein
  misc_feature (1)..(243): NCBI GI NO: 18404556 NR Description: expressed protein; protein id: At3g25530
  misc_feature (1)..(260): NCBI GI NO: 23054597 NR Description: hypothetical protein [Geobacter metallireducens]
  misc_feature (1)..(251): NCBI GI NO: 39996474 NR Description: 3-hydroxyisobutyrate dehydrogenase family protein
  misc_feature (1)..(237): NCBI GI NO: 20891625 NR Description: RIKEN cDNA 3930401K13 [Mus musculus]
MGAPMASNLIKAGCDVTVWNRTKSKCDPLLSLDAKYEPTPAQVASSCDVTFAILADPQSAAEVACGSSGAAEGLAPGKGYVDVSTVDGATSKLIGERITSTGASFLEAPVSGSKKPAEDGLLIFLTAGDESLYKRVAPLLDVMGKSRFYLGDVGNGAAMKLVVNMVMGSMMVSFSEGLLLSEKVGLDPNTLVEVISQGAISAPMFSLKGPSMVKAAYPPAFPLKHQQKDLRLALAPGGIGVPVHSYSCSCERAVQGCKIARP

SEQ ID NO: 33980 - DNA, 1338 bp, Zea mays subsp. mays
  misc_feature (1)..(1338): Ceres Seq. ID no. 12343920
gttcccggcctaaacggaggcggccgtataaaggcattctcctcgcgccccacccggcggttatcttcaccaccatatcgacatcgacgccagcgagccaaggacagaacagccggcgcccggccctaaaactgccgtgcagcgggagagaagcgagggaaagatggaccggtaccagagagtggagaagcagagggaggaggcacccatcaaggaaaacgagatccgcattaccacgcaggggaggatgcgcaactacatcacctacgccaccggcttgcttcaggacaaaggttctgatgaggttgtattcaaggccatggggagggctatcaataagactgtcatggttgtggaattgatcaagaggaggattgttggcctccatcagaataccaccactggatctactgatattactgatatgtgggagccattggaggaaggcctacttccgcttgagacaacaagacatgtctctatgataactataactctttcaaagaaggagctggacacatcatctatcggatatcaatctcctttgcctgctgatgaagtgaagcctttggttaaatatgataatgacgaagatgcacactcacctggtggccgtggaaggggtcgtggtggtcgaggccgtgggcggggcagggacaggggaagaggtggacgtggaaatgggttcaatgactatgctgatgccggttgggaagacgatcacgcccctgcatatatgggcaatggatatgcccgtggaagaggtcgtagtttcaggggccgtggcaggagaggcggctacaataaccagcctgaataccaacaagacggaggttattacgaggaggcacctgtccatgctccagctttaggtcgaggtcgtggtcgtgggagaggtccattcagaggcagaggacgtggtggcaacgcaaacggcgtgatgcacgctgctgcggacagtgcataagctgttcgttaccagtccaggctggttgtttgttggatgcctgctccaagtatgaagatgtatcatctgttgttatcagttaacgtcattacttggcataagattgacattctgtgtcggagtgcagccaggttttgatacttgactagatctgtagggtagcgtctttacagtgctttctcctttcacagtagatgtcttaaactaattgtagtttcgtaaaggtttagagcagggcattctttctatttttaaatataaaaacgaagtcttggtgtatgttcaaatgtgcacgtttttatatgtgctgtttttgaaatgcgagttagattaagttcgtggtacactgtgaatgaaatgcgagtcagatg

SEQ ID NO: 33981 - protein, 267 aa, Zea mays subsp. mays
  peptide (1)..(267): Ceres Seq. ID no. 12343921
  misc_feature (1)..(237): NCBI GI NO: 32526671 NR Description: chloroplast nucleoid DNA-binding protein -likeprotein
  misc_feature (1)..(254): NCBI GI NO: 18410994 NR Description: expressed protein; protein id: At1g76010
  misc_feature (1)..(254): NCBI GI NO: 34897552 NR Description: OSJNBa0042L16.13
  misc_feature (1)..(258): NCBI GI NO: 25518088 NR Description: T20H2.2 protein - Arabidopsis thaliana
  misc_feature (1)..(258): NCBI GI NO: 18394837 NR Description: expressed protein; protein id: At1g20220
  misc_feature (1)..(258): NCBI GI NO: 24417384 NR Description: unknown [Arabidopsis thaliana]
  misc_feature (41)..(254): NCBI GI NO: 25404999 NR Description: protein T4O12.22 [imported] - Arabidopsis thaliana
  misc_feature (1)..(41): NCBI GI NO: 25404999 NR Description: protein T4O12.22 [imported] - Arabidopsis thaliana
  misc_feature (1)..(154): NCBI GI NO: 15231369 NR Description: unknown protein; protein id: At3g07030.1
  misc_feature (7)..(258): NCBI GI NO: 23612874 NR Description: hypothetical protein, conserved
MDRYQRVEKQREEAPIKENEIRITTQGRMRNYITYATGLLQDKGSDEVVFKAMGRAINKTVMVVELIKRRIVGLHQNTTTGSTDITDMWEPLEEGLLPLETTRHVSMITITLSKKELDTSSIGYQSPLPADEVKPLVKYDNDEDAHSPGGRGRGRGGRGRGRGRDRGRGGRGNGFNDYADAGWEDDHAPAYMGNGYARGRGRSFRGRGRRGGYNNQPEYQQDGGYYEEAPVHAPALGRGRGRGRGPFRGRGRGGNANGVMHAAADSA

SEQ ID NO: 33982 - protein, 239 aa, Zea mays subsp. mays
  peptide (1)..(239): Ceres Seq. ID no. 12343922
  misc_feature (1)..(209): NCBI GI NO: 32526671 NR Description: chloroplast nucleoid DNA-binding protein -likeprotein
  misc_feature (1)..(226): NCBI GI NO: 18410994 NR Description: expressed protein; protein id: At1g76010
  misc_feature (1)..(226): NCBI GI NO: 34897552 NR Description: OSJNBa0042L16.13
  misc_feature (1)..(230): NCBI GI NO: 25518088 NR Description: T20H2.2 protein - Arabidopsis thaliana
  misc_feature (1)..(230): NCBI GI NO: 18394837 NR Description: expressed protein; protein id: At1g20220
  misc_feature (1)..(230): NCBI GI NO: 24417384 NR Description: unknown [Arabidopsis thaliana]
  misc_feature (13)..(226): NCBI GI NO: 25404999 NR Description: protein T4O12.22 [imported] - Arabidopsis thaliana
  misc_feature (1)..(13): NCBI GI NO: 25404999 NR Description: protein T4O12.22 [imported] - Arabidopsis thaliana
  misc_feature (1)..(126): NCBI GI NO: 15231369 NR Description: unknown protein; protein id: At3g07030.1
  misc_feature (1)..(230): NCBI GI NO: 23612874 NR Description: hypothetical protein, conserved
MRNYITYATGLLQDKGSDEVVFKAMGRAINKTVMVVELIKRRIVGLHQNTTTGSTDITDMWEPLEEGLLPLETTRHVSMITITLSKKELDTSSIGYQSPLPADEVKPLVKYDNDEDAHSPGGRGRGRGGRGRGRGRDRGRGGRGNGFNDYADAGWEDDHAPAYMGNGYARGRGRSFRGRGRRGGYNNQPEYQQDGGYYEEAPVHAPALGRGRGRGRGPFRGRGRGGNANGVMHAAADSA

SEQ ID NO: 33983 - protein, 215 aa, Zea mays subsp. mays
  peptide (1)..(215): Ceres Seq. ID no. 12343923
  misc_feature (1)..(185): NCBI GI NO: 32526671 NR Description: chloroplast nucleoid DNA-binding protein -likeprotein
  misc_feature (1)..(202): NCBI GI NO: 18410994 NR Description: expressed protein; protein id: At1g76010
  misc_feature (1)..(202): NCBI GI NO: 34897552 NR Description: OSJNBa0042L16.13
  misc_feature (1)..(206): NCBI GI NO: 25518088 NR Description: T20H2.2 protein - Arabidopsis thaliana
  misc_feature (1)..(206): NCBI GI NO: 18394837 NR Description: expressed protein; protein id: At1g20220
  misc_feature (1)..(206): NCBI GI NO: 24417384 NR Description: unknown [Arabidopsis thaliana]
  misc_feature (1)..(202): NCBI GI NO: 25404999 NR Description: protein T4O12.22 [imported] - Arabidopsis thaliana
  misc_feature (1)..(102): NCBI GI NO: 15231369 NR Description: unknown protein; protein id: At3g07030.1
  misc_feature (1)..(206): NCBI GI NO: 23612874 NR Description: hypothetical protein, conserved
  misc_feature (1)..(200): NCBI GI NO: 23485324 NR Description: Arabidopsis thaliana At1g20220/T20H2_3-related
MGRAINKTVMVVELIKRRIVGLHQNTTTGSTDITDMWEPLEEGLLPLETTRHVSMITITLSKKELDTSSIGYQSPLPADEVKPLVKYDNDEDAHSPGGRGRGRGGRGRGRGRDRGRGGRGNGFNDYADAGWEDDHAPAYMGNGYARGRGRSFRGRGRRGGYNNQPEYQQDGGYYEEAPVHAPALGRGRGRGRGPFRGRGRGGNANGVMHAAADSA

SEQ ID NO: 33984 - DNA, 1251 bp, Zea mays subsp. mays
  misc_feature (1)..(1251): Ceres Seq. ID no. 12366718
gtcggaaaaaccatcatctaaagttcaacgcccgcaccgcaagcgcaacacgccaacacccgagacccgacgcggccttcgccttccctccgcgcgagggagattcgaggggagagaggttctcaccttcgcgcctgcggttgcttggcgcagagtcgtcgcagatggaccggtaccagagggtggagaagccgcgggaggagtcccctatcggcgccaacgagatccgcatcacggcgcagggccggccccgcaactacatcacctatgcgctcgccctggtccaggacaatgcaacagatgacattgtcatcaaggccatgggaagggcgatcaacaagacagttgccatcgtggagcttcttaagagaaggattgctggtctccatcagaatacctctattgaatccattgatataacagacacttgggagccattggaagaaggccttgtcactcttgagaccattcgccatgtgtccttaatcactattaaattgtcaaagaaggagctggatacatcatccccaggttaccagccgcccataccagctgaccaggtcaggccagcagctgactttgatcaggatgcagaggccgtaccaagtggtcgtggaagaggacgtggtcgtcgcagcaggggcaggggaaggggaagggggttcagcagtggagtagactatgatgatgagattggagagccagaggaggctccgcgtggatatcgtggcagagggaggggccgtggagggcgtggatcttttgcagttggaaggggctatggtggtgataattatgcgatggaagaagctggtagatatgatgatgatggatataacgcaccacctatgcaacgatatgaaggtggcagaggaaggggcagagggcgtggacgcggtcgtgggcggggaaggcaaggccatggacctcctccgcagcagtagattggttggcacatcacctttgggatgtcataacctccatttctttccataagataaatgttaccgtccattatattttttatctggttattaggttcatgttgaaagttgacatagtgactctagcgtggaggatgcggctagttaagatttggtagctaggttgttcgtccatttgcctatttattatctcagatcagacttggtgccgttccagttgtgcattgtagcctctttttaccatgaaagttagttcagaagattcttttatgttgttgcaaatcacagactgaaaacgtttgttttc

SEQ ID NO: 33985 - protein, 313 aa, Zea mays subsp. mays
  peptide (1)..(313): Ceres Seq. ID no. 12366719
  misc_feature (55)..(311): NCBI GI NO: 34897552 NR Description: OSJNBa0042L16.13
  misc_feature (53)..(311): NCBI GI NO: 25518088 NR Description: T20H2.2 protein - Arabidopsis thaliana
  misc_feature (55)..(311): NCBI GI NO: 18394837 NR Description: expressed protein; protein id: At1g20220
  misc_feature (55)..(312): NCBI GI NO: 18410994 NR Description: expressed protein; protein id: At1g76010
  misc_feature (55)..(313): NCBI GI NO: 24417384 NR Description: unknown [Arabidopsis thaliana]
  misc_feature (55)..(207): NCBI GI NO: 15231369 NR Description: unknown protein; protein id: At3g07030.1
  misc_feature (95)..(312): NCBI GI NO: 25404999 NR Description: protein T4O12.22 [imported] - Arabidopsis thaliana
  misc_feature (55)..(95): NCBI GI NO: 25404999 NR Description: protein T4O12.22 [imported] - Arabidopsis thaliana
  misc_feature (61)..(303): NCBI GI NO: 23612874 NR Description: hypothetical protein, conserved
  misc_feature (61)..(298): NCBI GI NO: 23485324 NR Description: Arabidopsis thaliana At1g20220/T20H2_3-related
RKNHHLKFNARTASATRQHPRPDAAFAFPPREGDSRGERFSPSRLRLLGAESSQMDRYQRVEKPREESPIGANEIRITAQGRPRNYITYALALVQDNATDDIVIKAMGRAINKTVAIVELLKRRIAGLHQNTSIESIDITDTWEPLEEGLVTLETIRHVSLITIKLSKKELDTSSPGYQPPIPADQVRPAADFDQDAEAVPSGRGRGRGRRSRGRGRGRGFSSGVDYDDEIGEPEEAPRGYRGRGRGRGGRGSFAVGRGYGGDNYAMEEAGRYDDDGYNAPPMQRYEGGRGRGRGRGRGRGRGRQGHGPPPQQ

SEQ ID NO: 33986 - protein, 259 aa, Zea mays subsp. mays
  peptide (1)..(259): Ceres Seq. ID no. 12366720
  misc_feature (1)..(257): NCBI GI NO: 34897552 NR Description: OSJNBa0042L16.13
  misc_feature (1)..(257): NCBI GI NO: 25518088 NR Description: T20H2.2 protein - Arabidopsis thaliana
  misc_feature (1)..(257): NCBI GI NO: 18394837 NR Description: expressed protein; protein id: At1g20220
  misc_feature (1)..(258): NCBI GI NO: 18410994 NR Description: expressed protein; protein id: At1g76010
  misc_feature (1)..(259): NCBI GI NO: 24417384 NR Description: unknown [Arabidopsis thaliana]
  misc_feature (1)..(153): NCBI GI NO: 15231369 NR Description: unknown protein; protein id: At3g07030.1
  misc_feature (41)..(258): NCBI GI NO: 25404999 NR Description: protein T4O12.22 [imported] - Arabidopsis thaliana
  misc_feature (1)..(41): NCBI GI NO: 25404999 NR Description: protein T4O12.22 [imported] - Arabidopsis thaliana
  misc_feature (7)..(249): NCBI GI NO: 23612874 NR Description: hypothetical protein, conserved
  misc_feature (7)..(244): NCBI GI NO: 23485324 NR Description: Arabidopsis thaliana At1g20220/T20H2_3-related
MDRYQRVEKPREESPIGANEIRITAQGRPRNYITYALALVQDNATDDIVIKAMGRAINKTVAIVELLKRRIAGLHQNTSIESIDITDTWEPLEEGLVTLETIRHVSLITIKLSKKELDTSSPGYQPPIPADQVRPAADFDQDAEAVPSGRGRGRGRRSRGRGRGRGFSSGVDYDDEIGEPEEAPRGYRGRGRGRGGRGSFAVGRGYGGDNYAMEEAGRYDDDGYNAPPMQRYEGGRGRGRGRGRGRGRGRQGHGPPPQQ

SEQ ID NO: 33987 - protein, 207 aa, Zea mays subsp. mays
  peptide (1)..(207): Ceres Seq. ID no. 12366721
  misc_feature (1)..(205): NCBI GI NO: 34897552 NR Description: OSJNBa0042L16.13
  misc_feature (1)..(205): NCBI GI NO: 25518088 NR Description: T20H2.2 protein - Arabidopsis thaliana
  misc_feature (1)..(205): NCBI GI NO: 18394837 NR Description: expressed protein; protein id: At1g20220
  misc_feature (1)..(206): NCBI GI NO: 18410994 NR Description: expressed protein; protein id: At1g76010
  misc_feature (1)..(207): NCBI GI NO: 24417384 NR Description: unknown [Arabidopsis thaliana]
  misc_feature (1)..(101): NCBI GI NO: 15231369 NR Description: unknown protein; protein id: At3g07030.1
  misc_feature (1)..(206): NCBI GI NO: 25404999 NR Description: protein T4O12.22 [imported] - Arabidopsis thaliana
  misc_feature (1)..(197): NCBI GI NO: 23612874 NR Description: hypothetical protein, conserved
  misc_feature (1)..(192): NCBI GI NO: 23485324 NR Description: Arabidopsis thaliana At1g20220/T20H2_3-related
  misc_feature (97)..(206): NCBI GI NO: 25404999 NR Description: protein T4O12.22 [imported] - Arabidopsis thaliana
MGRAINKTVAIVELLKRRIAGLHQNTSIESIDITDTWEPLEEGLVTLETIRHVSLITIKLSKKELDTSSPGYQPPIPADQVRPAADFDQDAEAVPSGRGRGRGRRSRGRGRGRGFSSGVDYDDEIGEPEEAPRGYRGRGRGRGGRGSFAVGRGYGGDNYAMEEAGRYDDDGYNAPPMQRYEGGRGRGRGRGRGRGRGRQGHGPPPQQ

SEQ ID NO: 33988 - DNA, 789 bp, Zea mays subsp. mays; identical to SEQ ID NO: 23396
  misc_feature (1)..(789): Ceres Seq. ID no. 12355957

SEQ ID NO: 33989 - protein, 161 aa, Zea mays subsp. mays; identical to SEQ ID NO: 23397
  peptide (1)..(161): Ceres Seq. ID no. 12355958
  misc_feature (3)..(73): Pfam Name: Pfam Description:  Ribosomal protein L24e
  misc_feature (1)..(161): NCBI GI NO: 1710521 NR Description: 60S RIBOSOMAL PROTEIN L24
  misc_feature (4)..(161): NCBI GI NO: 34900364 NR Description: putative 60S ribosomal protein L24
  misc_feature (1)..(160): NCBI GI NO: 6094040 NR Description: 60S ribosomal protein L24
  misc_feature (1)..(156): NCBI GI NO: 10180025 NR Description: 60S ribosomal protein L24 [Prunus avium]
  misc_feature (1)..(161): NCBI GI NO: 18404176 NR Description: 60S ribosomal protein L24; protein id: At2g36620
  misc_feature (1)..(161): NCBI GI NO: 15231730 NR Description: 60S ribosomal protein - like; protein id:At3g53020
  misc_feature (5)..(161): NCBI GI NO: 25295112 NR Description: 60S ribosomal protein L24
  misc_feature (3)..(150): NCBI GI NO: 19075214 NR Description: 60s ribosomal protein L24
  misc_feature (3)..(150): NCBI GI NO: 19115030 NR Description: 60S ribosomal protein L24
  misc_feature (10)..(154): NCBI GI NO: 40741063 NR Description: conserved hypothetical protein

SEQ ID NO: 33990 - protein, 106 aa, Zea mays subsp. mays; identical to SEQ ID NO: 23398
  peptide (1)..(106): Ceres Seq. ID no. 12355959
  misc_feature (1)..(106): NCBI GI NO: 1710521 NR Description: 60S RIBOSOMAL PROTEIN L24
  misc_feature (1)..(106): NCBI GI NO: 34900364 NR Description: putative 60S ribosomal protein L24
  misc_feature (1)..(105): NCBI GI NO: 6094040 NR Description: 60S ribosomal protein L24
  misc_feature (1)..(101): NCBI GI NO: 10180025 NR Description: 60S ribosomal protein L24 [Prunus avium]
  misc_feature (1)..(106): NCBI GI NO: 18404176 NR Description: 60S ribosomal protein L24; protein id: At2g36620
  misc_feature (1)..(106): NCBI GI NO: 15231730 NR Description: 60S ribosomal protein - like; protein id:At3g53020
  misc_feature (1)..(106): NCBI GI NO: 25295112 NR Description: 60S ribosomal protein L24
  misc_feature (1)..(95): NCBI GI NO: 19075214 NR Description: 60s ribosomal protein L24
  misc_feature (1)..(95): NCBI GI NO: 19115030 NR Description: 60S ribosomal protein L24
  misc_feature (1)..(99): NCBI GI NO: 40741063 NR Description: conserved hypothetical protein

SEQ ID NO: 33991 - DNA, 1450 bp, Zea mays subsp. mays
  misc_feature (1)..(1450): Ceres Seq. ID no. 12372642
gcacgagaccattacctagaacatcctaatcgaaaaggcttctcgattcttgaccatcctgctgttctgccttctccgtccgcgccttcgagaaggccacagagcgaaggaattgcagagttttcttggcgcgaaagaaggggagagagagagagaaagacgaagatgtttatccagaaggcatggaggacggcggcgtttgggctctacggcttcaaccatttcacaaaatctggtttcctggagcatgcgaagaaattcagagaggaggatatgcagatccggttggatggaaaaaattgcctagtaactggagcgaattctggcattggttttgctatggctgagggcttggcttcacatggtgctaccgtctatatggtctgtcgtaacaaggagagaggggaggcagctctcaaccaaataagatccaaaactggcaatgcaaacgttcatctggagatatgtgacctttcatctatcaatcaagtaaaatcgtttgcaacaaagttcacttcgatggataaaccactccatgtcttggtaaacaatgctggcttattagagcacaagcatgagactacagcagaagggttggagctcaattttgctgtcaatgtagctgcaacatacactttaacagagctagttatgccgtcattggagaaagcggcaccagatgctcgtgtcatcacagttgcatcaggaggcatgtacaccgagccactgaacaaagacttacagttcaccgaaggcaccttcgatgggacgcaacagtatgctcgaaacaaaagagttcaggtggcactgactgaatggtgggctgagaaaagcggtgacaggggagtcggtttctacgccatgcatcctggatgggccgatacgcctggggtcgccaagagcttgcccggactgtcagagaggttgtctggaaacctgagaacaaatgacgaaggagctgatacagttgtttggttggcttgcaacctaaggagaagttagcctcgggagccttttacttcgaccgtgctgaagcaccaaaacatttgaagtttgctgggactgcagattcgcacgctcagataaaccctatcgttgatagcattagatccatctgtggtctctctgttaatggttgagctgccaaagcaaaagtgatatacagctccatcgtcaatagcattagattcatctgtggcttctctgttaaaggttgagcttccaaagcaaaagtgaagtgatatattacttgatataatgggtgcatgattcataaaaccgcaaaaaattgaagagtggaaaaaaaaatgcaccagccgggaatcgaacccgggtctgtaccgtggcagggtactattctaccactagaccactggtgcctttgatgctaaagttatgtacgtatttaatttcttttgaatcaacaatcaaacatagatccaacattctt

SEQ ID NO: 33992 - protein, 333 aa, Zea mays subsp. mays
  peptide (1)..(333): Ceres Seq. ID no. 12372643
  misc_feature (56)..(327): NCBI GI NO: 15234031 NR Description: putative protein; protein id: At4g09750.1
  misc_feature (62)..(327): NCBI GI NO: 34106252 NR Description: short chain dehydrogenase/reductase [Danio rerio]
  misc_feature (133)..(327): NCBI GI NO: 13375997 NR Description: hypothetical protein FLJ13639 [Homo sapiens]
  misc_feature (133)..(296): NCBI GI NO: 14602619 NR Description: hypothetical protein FLJ13639 [Homo sapiens]
  misc_feature (86)..(302): NCBI GI NO: 24586330 NR Description: CG30495-PA [Drosophila melanogaster]
  misc_feature (94)..(327): NCBI GI NO: 6630624 NR Description: M42C60 [Mus musculus]
  misc_feature (94)..(327): NCBI GI NO: 5668733 NR Description: UBE-1a [Mus musculus]
  misc_feature (94)..(327): NCBI GI NO: 19482172 NR Description: short-chain dehydrogenase/reductase 1
  misc_feature (94)..(327): NCBI GI NO: 5668735 NR Description: UBE-1b [Mus musculus]
  misc_feature (94)..(322): NCBI GI NO: 22748935 NR Description: hypothetical protein FLJ30273
ARDHYLEHPNRKGFSILDHPAVLPSPSAPSRRPQSEGIAEFSWRERRGERERKTKMFIQKAWRTAAFGLYGFNHFTKSGFLEHAKKFREEDMQIRLDGKNCLVTGANSGIGFAMAEGLASHGATVYMVCRNKERGEAALNQIRSKTGNANVHLEICDLSSINQVKSFATKFTSMDKPLHVLVNNAGLLEHKHETTAEGLELNFAVNVAATYTLTELVMPSLEKAAPDARVITVASGGMYTEPLNKDLQFTEGTFDGTQQYARNKRVQVALTEWWAEKSGDRGVGFYAMHPGWADTPGVAKSLPGLSERLSGNLRTNDEGADTVVWLACNLRRS

SEQ ID NO: 33993 - protein, 278 aa, Zea mays subsp. mays
  peptide (1)..(278): Ceres Seq. ID no. 12372644
  misc_feature (1)..(272): NCBI GI NO: 15234031 NR Description: putative protein; protein id: At4g09750.1
  misc_feature (7)..(272): NCBI GI NO: 34106252 NR Description: short chain dehydrogenase/reductase [Danio rerio]
  misc_feature (78)..(272): NCBI GI NO: 13375997 NR Description: hypothetical protein FLJ13639 [Homo sapiens]
  misc_feature (78)..(241): NCBI GI NO: 14602619 NR Description: hypothetical protein FLJ13639 [Homo sapiens]
  misc_feature (31)..(247): NCBI GI NO: 24586330 NR Description: CG30495-PA [Drosophila melanogaster]
  misc_feature (39)..(272): NCBI GI NO: 6630624 NR Description: M42C60 [Mus musculus]
  misc_feature (39)..(272): NCBI GI NO: 5668733 NR Description: UBE-1a [Mus musculus]
  misc_feature (39)..(272): NCBI GI NO: 5668735 NR Description: UBE-1b [Mus musculus]
  misc_feature (39)..(272): NCBI GI NO: 19482172 NR Description: short-chain dehydrogenase/reductase 1
  misc_feature (39)..(267): NCBI GI NO: 22748935 NR Description: hypothetical protein FLJ30273
MFIQKAWRTAAFGLYGFNHFTKSGFLEHAKKFREEDMQIRLDGKNCLVTGANSGIGFAMAEGLASHGATVYMVCRNKERGEAALNQIRSKTGNANVHLEICDLSSINQVKSFATKFTSMDKPLHVLVNNAGLLEHKHETTAEGLELNFAVNVAATYTLTELVMPSLEKAAPDARVITVASGGMYTEPLNKDLQFTEGTFDGTQQYARNKRVQVALTEWWAEKSGDRGVGFYAMHPGWADTPGVAKSLPGLSERLSGNLRTNDEGADTVVWLACNLRRS

SEQ ID NO: 33994 - protein, 242 aa, Zea mays subsp. mays
  peptide (1)..(242): Ceres Seq. ID no. 12372645
  misc_feature (1)..(236): NCBI GI NO: 15234031 NR Description: putative protein; protein id: At4g09750.1
  misc_feature (1)..(236): NCBI GI NO: 34106252 NR Description: short chain dehydrogenase/reductase [Danio rerio]
  misc_feature (42)..(236): NCBI GI NO: 13375997 NR Description: hypothetical protein FLJ13639 [Homo sapiens]
  misc_feature (42)..(205): NCBI GI NO: 14602619 NR Description: hypothetical protein FLJ13639 [Homo sapiens]
  misc_feature (1)..(211): NCBI GI NO: 24586330 NR Description: CG30495-PA [Drosophila melanogaster]
  misc_feature (3)..(236): NCBI GI NO: 6630624 NR Description: M42C60 [Mus musculus]
  misc_feature (3)..(236): NCBI GI NO: 5668733 NR Description: UBE-1a [Mus musculus]
  misc_feature (3)..(236): NCBI GI NO: 19482172 NR Description: short-chain dehydrogenase/reductase 1
  misc_feature (3)..(236): NCBI GI NO: 5668735 NR Description: UBE-1b [Mus musculus]
  misc_feature (3)..(231): NCBI GI NO: 22748935 NR Description: hypothetical protein FLJ30273
MQIRLDGKNCLVTGANSGIGFAMAEGLASHGATVYMVCRNKERGEAALNQIRSKTGNANVHLEICDLSSINQVKSFATKFTSMDKPLHVLVNNAGLLEHKHETTAEGLELNFAVNVAATYTLTELVMPSLEKAAPDARVITVASGGMYTEPLNKDLQFTEGTFDGTQQYARNKRVQVALTEWWAEKSGDRGVGFYAMHPGWADTPGVAKSLPGLSERLSGNLRTNDEGADTVVWLACNLRRS

SEQ ID NO: 33995 - DNA, 1432 bp, Zea mays subsp. mays
  misc_feature (1)..(1432): Ceres Seq. ID no. 12348832
aagatgctgagccacataactccggtgggtgtgggtccaacgccccccacctgcacgctggccccccgccccgccgcgggatcaaatacgccgcctccgcccgtccactccctcgccgcccccgtctcctctcctctcctctcccccgcatccacggccgcaggccgcagccagccactcgacgatctagtcgtctctctctccccgctctgccgcctcgctgccgcggcttcccgtcggctggaggatgaaggtcacggtcgtgtcccggagcggccgggaggtcgtcaagggcggcatcgacctcaaggactcggccaaggtcgcggacctgcaggaggccatccatgccaggactaagaagtattatccttctaggcagcggctcaccctcccccttcaacctggaaaaggcgggaagccagttgtcctcagtccgaaggccagcctgctagaatactgcgagaagggttctgggtcactgacagtggtcttcaaagatttagggccacaggtctactacagcacactgttcttcttcgagtacctgggtcctctcatcatctaccccatgttctactatctgcctgtctacaaatacttcgggtacgagggggagcgggccatgcaccctgtccagacctacgccatgtactactggtgcttccactacttcaagcggatcatggagacattcttcgtgcaccgcttcagccacgcgacgtcgccgctctcgaacgtcttcaggaactgtgcctactactggaccttcggcgcctacattgcttactactgcaaccacccgctgtacaccccagtgagtgatctgcagatgaagattgggtttggttttggggtcgtctgccaggtcgcgaacttctactgccacatcctgctgcggaacctcaggagcccaagcggcagcggcgggtaccagatcccccgcggtttcttgttcaacatcgtgacctgcgccaattacaccaccgagatctatcagtgggtcggcttcaacatcgccacgcagaccgtggcaggttacgtcttccttgtcgtggcggcaggcatcatgaccaactgggcgctcggcaagcacagccgtctgaagaagctgtttgacggcaaggatgggaggcccaagtaccctcgccggtgggtgattctccctccgttcctgtgaagaggtggtggtggtcggcctattgtgattcgatgtctacagacagttgtactgtactaatcgtgcctgtttagcggttgaacttggattccgttgtccgaaatttctaatccgaaagatggatttcattgtcttcttcttcttagcattatgtcactatctcacgtcgtcctgtctcaatacagtctaaggttcatgtgatgttatccccatttgtccacgcacaagtgaatgcagtcactatttcgattc

SEQ ID NO: 33996 - protein, 310 aa, Zea mays subsp. mays; identical to SEQ ID NO: 24079
  peptide (1)..(310): Ceres Seq. ID no. 12348833
  misc_feature (158)..(310): Pfam Name: Pfam Description:  3-oxo-5-alpha-steroid 4-dehydrogenase
  misc_feature (1)..(310): NCBI GI NO: 34895848 NR Description: putative glycoprotein
  misc_feature (1)..(310): NCBI GI NO: 15233250 NR Description: synaptic glycoprotein SC2-like protein
  misc_feature (1)..(310): NCBI GI NO: 25004880 NR Description: steroid 5-alpha reductase [Cicer arietinum]
  misc_feature (38)..(310): NCBI GI NO: 39590267 NR Description: Hypothetical protein CBG11196
  misc_feature (38)..(310): NCBI GI NO: 17531783 NR Description: Synaptic glycoprotein SC2 (35.1 kD)
  misc_feature (24)..(291): NCBI GI NO: 13111809 NR Description: Unknown (protein for IMAGE:2901253) [Homo sapiens]
  misc_feature (24)..(291): NCBI GI NO: 24475816 NR Description: glycoprotein, synaptic 2
  misc_feature (24)..(291): NCBI GI NO: 30585427 NR Description: Homo sapiens glycoprotein, synaptic 2
  misc_feature (24)..(310): NCBI GI NO: 33585860 NR Description: Glycoprotein, synaptic 2 [Xenopus laevis]
  misc_feature (20)..(291): NCBI GI NO: 31418870 NR Description: Unknown (protein for MGC:64025) [Danio rerio]

SEQ ID NO: 33997 - protein, 202 aa, Zea mays subsp. mays; identical to SEQ ID NO: 24080
  peptide (1)..(202): Ceres Seq. ID no. 12348834
  misc_feature (50)..(202): Pfam Name: Pfam Description:  3-oxo-5-alpha-steroid 4-dehydrogenase
  misc_feature (1)..(202): NCBI GI NO: 34895848 NR Description: putative glycoprotein
  misc_feature (1)..(202): NCBI GI NO: 15233250 NR Description: synaptic glycoprotein SC2-like protein
  misc_feature (1)..(202): NCBI GI NO: 25004880 NR Description: steroid 5-alpha reductase [Cicer arietinum]
  misc_feature (1)..(202): NCBI GI NO: 39590267 NR Description: Hypothetical protein CBG11196
  misc_feature (1)..(202): NCBI GI NO: 17531783 NR Description: Synaptic glycoprotein SC2 (35.1 kD)
  misc_feature (1)..(183): NCBI GI NO: 13111809 NR Description: Unknown (protein for IMAGE:2901253) [Homo sapiens]
  misc_feature (1)..(183): NCBI GI NO: 24475816 NR Description: glycoprotein, synaptic 2
  misc_feature (1)..(183): NCBI GI NO: 30585427 NR Description: Homo sapiens glycoprotein, synaptic 2
  misc_feature (1)..(202): NCBI GI NO: 33585860 NR Description: Glycoprotein, synaptic 2 [Xenopus laevis]
  misc_feature (1)..(183): NCBI GI NO: 31418870 NR Description: Unknown (protein for MGC:64025) [Danio rerio]

SEQ ID NO: 33998 - protein, 184 aa, Zea mays subsp. mays; identical to SEQ ID NO: 24081
  peptide (1)..(184): Ceres Seq. ID no. 12348835
  misc_feature (32)..(184): Pfam Name: Pfam Description:  3-oxo-5-alpha-steroid 4-dehydrogenase
  misc_feature (1)..(184): NCBI GI NO: 34895848 NR Description: putative glycoprotein
  misc_feature (1)..(184): NCBI GI NO: 15233250 NR Description: synaptic glycoprotein SC2-like protein
  misc_feature (1)..(184): NCBI GI NO: 25004880 NR Description: steroid 5-alpha reductase [Cicer arietinum]
  misc_feature (1)..(184): NCBI GI NO: 39590267 NR Description: Hypothetical protein CBG11196
  misc_feature (1)..(184): NCBI GI NO: 17531783 NR Description: Synaptic glycoprotein SC2 (35.1 kD)
  misc_feature (1)..(165): NCBI GI NO: 13111809 NR Description: Unknown (protein for IMAGE:2901253) [Homo sapiens]
  misc_feature (1)..(165): NCBI GI NO: 24475816 NR Description: glycoprotein, synaptic 2
  misc_feature (1)..(165): NCBI GI NO: 30585427 NR Description: Homo sapiens glycoprotein, synaptic 2
  misc_feature (1)..(184): NCBI GI NO: 33585860 NR Description: Glycoprotein, synaptic 2 [Xenopus laevis]
  misc_feature (1)..(165): NCBI GI NO: 31418870 NR Description: Unknown (protein for MGC:64025) [Danio rerio]

SEQ ID NO: 33999 - DNA, 393 bp, Zea mays subsp. mays
  misc_feature (1)..(393): Ceres Seq. ID no. 1337693
tcaagaaagaagcatgctggacgatctcaaacatcacagctggtaacaaggagcagattcaggctgtgatcaatgcaaatataattgcacctctgshractcctgcaaactgctgaatttgacatcaagaaagaagcagcctgggcaatttcaaatgccacttctggtggcacacatgatcagatcaagtaccttgttgcccagggttgcattaagccactctgtgatctgcttgtttgcccggatcccagaatcgtaacagtttgcttggagggtctcgagaacatcctgaaggttggcgaggcagagaaaaaccttggtgcaggtgatgtcaatgtctatgcacagatgattsatgatgctgagggcctggacaagattgagaacctgcag

SEQ ID NO: 34000 - protein, 37 aa, Zea mays subsp. mays
  peptide (1)..(37): Ceres Seq. ID no. 1337694
  misc_feature (1)..(31): NCBI GI NO: 6682927 NR Description: importin alpha 1b
  misc_feature (1)..(31): NCBI GI NO: 34897636 NR Description: putative impotin alpha 1b [Oryza sativa]
  misc_feature (1)..(31): NCBI GI NO: 13699777 NR Description: AtKAP alpha [Arabidopsis thaliana]
  misc_feature (1)..(31): NCBI GI NO: 15809794 NR Description: AT3g06720/F3E22_14 [Arabidopsis thaliana]
  misc_feature (1)..(31): NCBI GI NO: 25314876 NR Description: probable nuclear transport factor importin alpha-like protein
  misc_feature (1)..(31): NCBI GI NO: 15230778 NR Description: importin alpha; protein id: At3g06720
  misc_feature (1)..(31): NCBI GI NO: 34902832 NR Description: unnamed protein product
  misc_feature (1)..(31): NCBI GI NO: 33337497 NR Description: importin [Oryza sativa]
  misc_feature (1)..(31): NCBI GI NO: 3915737 NR Description: Importin alpha subunit
  misc_feature (1)..(31): NCBI GI NO: 13752562 NR Description: importin alpha 2 [Capsicum annuum]
  misc_feature (32)..(32): Xaa is any aa, unknown or other
KKEACWTISNITAGNKEQIQAVINANIIAPLXTPANC

SEQ ID NO: 34001 - protein, 34 aa, Zea mays subsp. mays
  peptide (1)..(34): Ceres Seq. ID no. 1337695
MPLLVAHMIRSSTLLPRVALSHSVICLFARIPES

SEQ ID NO: 34002 - DNA, 1862 bp, Zea mays subsp. mays
  misc_feature (1)..(1862): Ceres Seq. ID no. 12374063
accgaaaggagaaggcttcagccttcaagcgcacacaggcacgcaaatcccctcttcatcaacctcgactcgagtccgcgcgcgtccccgaatcgaggggagatgagtcgtccgcatgacggtcacaggtccttctttcccatggggaatcccttcaggatgattctcccaagaggagcccgcctgccaccgaagctcactgagctgctcacttcgtatgaggatggcctggcctcgagcttgaggaaggtcaagccagaggccacctcagaggtgttcacactatcatggatgaagctcgcagtggagtgcttatcagagctgcacaccaatatagccaccctgattactgagcttgagctgcccttatcagactgggatgagaagtgggtggacatttacctgaacagcagtgtgaagctgctggacatctgcattgccctgagctcggagctctctcggttggatcaagggcagctgcttgtgcgatatctcctgaatgtgttgaactctgggagcgacatgccatcccaggagcagctcaggagagctgaggtgtctcttaaggaatggatagagcgagcaagtgaaaggtctcccaggcttgatagttgcttggcagcgctacaggagctttctggaaaccttagcctgatgaaggttaggcattctgctaaggggaaagtgctcatgcgagcattgtatggaatcgaggctgttaccgtcttaatctgcagcgtacttgtagctgtactgtcgggtaccttcaagccactggtggactttgatgtccctgagaaatttggttggtctacggccttcattgatcttcagaaggccataagcggtgaacttagcaggcaactgtccagaggtagtgttgcagctgtaaaagagctggaggatgttgatgtatgtgctaaacagctgcatacattgacttgcactgttcagcttgaagaggagaatgccagcctggctcattcatttagccgttcaaaggaagtggtcctggcagatactacagcccagggaagaggccatgcggataatctcaagttggctgatgatagtagctgtcagcatgaagtgatcatgctgcaaagtattactacagaaggaggaatggatacagctgatatcaaggaggataccgagaccattggccatacaaaggaagtgatggcgcctgagaaaataattgacagaggacaccaagatgataacacaaagcaggacactggtgttgtcactgatatcagttgcttggaaaggagagaggaactgctgaactgcatctcccggatgtcgaaaagtgctgaaaggctccagttggggttggactcgctgtcgaagcgggtggatgacttcttccatattgtgcttacagggcgtgatgcactactttgtaatctcaggttttcaaacggcggcaaggttgctgcagaggtcaggtcttaatatgccatctcatgtttgtgccatgttatgcatgtatagtcagctcagcggcccatcgtgatgtgtggtgcttctgacttctggcccctgctcagctccaccaacactaagccggggccagatctcagaagcattgtgcatgatatgtgcctctagctgtgctgtgcaaaagcttatatagcttctctttttggttaagtatgaactagagttctgctgagtaaatagtgctgttaagttggtgtcgggtggaatgtacaccatctagagtagagcagctgtatgtatgctcatgtgtccttgtaagttgtaatggagatgaaaaatgagttgcaaaatgttgatccctgtttgtctgttggataacttaaactggtaatgtacaactttcaatgtacccg

SEQ ID NO: 34003 - protein, 486 aa, Zea mays subsp. mays
  peptide (1)..(486): Ceres Seq. ID no. 12374064
  misc_feature (35)..(483): NCBI GI NO: 37536014 NR Description: unknown protein
  misc_feature (35)..(313): NCBI GI NO: 18406969 NR Description: expressed protein; protein id: At2g46080
  misc_feature (433)..(484): NCBI GI NO: 18406969 NR Description: expressed protein; protein id: At2g46080
  misc_feature (35)..(313): NCBI GI NO: 16604342 NR Description: At2g46080/T3F17.27 [Arabidopsis thaliana]
  misc_feature (433)..(484): NCBI GI NO: 16604342 NR Description: At2g46080/T3F17.27 [Arabidopsis thaliana]
  misc_feature (35)..(311): NCBI GI NO: 18378853 NR Description: expressed protein; protein id: At1g01550
  misc_feature (436)..(473): NCBI GI NO: 18378853 NR Description: expressed protein; protein id: At1g01550
  misc_feature (50)..(312): NCBI GI NO: 28392962 NR Description: unknown protein [Arabidopsis thaliana]
  misc_feature (50)..(312): NCBI GI NO: 7485228 NR Description: hypothetical protein A_IG002N01
  misc_feature (50)..(312): NCBI GI NO: 30678866 NR Description: expressed protein [Arabidopsis thaliana]
TERRRLQPSSAHRHANPLFINLDSSPRASPNRGEMSRPHDGHRSFFPMGNPFRMILPRGARLPPKLTELLTSYEDGLASSLRKVKPEATSEVFTLSWMKLAVECLSELHTNIATLITELELPLSDWDEKWVDIYLNSSVKLLDICIALSSELSRLDQGQLLVRYLLNVLNSGSDMPSQEQLRRAEVSLKEWIERASERSPRLDSCLAALQELSGNLSLMKVRHSAKGKVLMRALYGIEAVTVLICSVLVAVLSGTFKPLVDFDVPEKFGWSTAFIDLQKAISGELSRQLSRGSVAAVKELEDVDVCAKQLHTLTCTVQLEEENASLAHSFSRSKEVVLADTTAQGRGHADNLKLADDSSCQHEVIMLQSITTEGGMDTADIKEDTETIGHTKEVMAPEKIIDRGHQDDNTKQDTGVVTDISCLERREELLNCISRMSKSAERLQLGLDSLSKRVDDFFHIVLTGRDALLCNLRFSNGGKVAAEVRS

SEQ ID NO: 34004 - protein, 452 aa, Zea mays subsp. mays
  peptide (1)..(452): Ceres Seq. ID no. 12374065
  misc_feature (1)..(449): NCBI GI NO: 37536014 NR Description: unknown protein
  misc_feature (1)..(279): NCBI GI NO: 18406969 NR Description: expressed protein; protein id: At2g46080
  misc_feature (399)..(450): NCBI GI NO: 18406969 NR Description: expressed protein; protein id: At2g46080
  misc_feature (1)..(279): NCBI GI NO: 16604342 NR Description: At2g46080/T3F17.27 [Arabidopsis thaliana]
  misc_feature (399)..(450): NCBI GI NO: 16604342 NR Description: At2g46080/T3F17.27 [Arabidopsis thaliana]
  misc_feature (1)..(277): NCBI GI NO: 18378853 NR Description: expressed protein; protein id: At1g01550
  misc_feature (402)..(439): NCBI GI NO: 18378853 NR Description: expressed protein; protein id: At1g01550
  misc_feature (16)..(278): NCBI GI NO: 28392962 NR Description: unknown protein [Arabidopsis thaliana]
  misc_feature (16)..(278): NCBI GI NO: 7485228 NR Description: hypothetical protein A_IG002N01
  misc_feature (16)..(278): NCBI GI NO: 30678866 NR Description: expressed protein [Arabidopsis thaliana]
MSRPHDGHRSFFPMGNPFRMILPRGARLPPKLTELLTSYEDGLASSLRKVKPEATSEVFTLSWMKLAVECLSELHTNIATLITELELPLSDWDEKWVDIYLNSSVKLLDICIALSSELSRLDQGQLLVRYLLNVLNSGSDMPSQEQLRRAEVSLKEWIERASERSPRLDSCLAALQELSGNLSLMKVRHSAKGKVLMRALYGIEAVTVLICSVLVAVLSGTFKPLVDFDVPEKFGWSTAFIDLQKAISGELSRQLSRGSVAAVKELEDVDVCAKQLHTLTCTVQLEEENASLAHSFSRSKEVVLADTTAQGRGHADNLKLADDSSCQHEVIMLQSITTEGGMDTADIKEDTETIGHTKEVMAPEKIIDRGHQDDNTKQDTGVVTDISCLERREELLNCISRMSKSAERLQLGLDSLSKRVDDFFHIVLTGRDALLCNLRFSNGGKVAAEVRS

SEQ ID NO: 34005 - protein, 439 aa, Zea mays subsp. mays
  peptide (1)..(439): Ceres Seq. ID no. 12374066
  misc_feature (1)..(436): NCBI GI NO: 37536014 NR Description: unknown protein
  misc_feature (1)..(266): NCBI GI NO: 18406969 NR Description: expressed protein; protein id: At2g46080
  misc_feature (386)..(437): NCBI GI NO: 18406969 NR Description: expressed protein; protein id: At2g46080
  misc_feature (1)..(266): NCBI GI NO: 16604342 NR Description: At2g46080/T3F17.27 [Arabidopsis thaliana]
  misc_feature (386)..(437): NCBI GI NO: 16604342 NR Description: At2g46080/T3F17.27 [Arabidopsis thaliana]
  misc_feature (1)..(264): NCBI GI NO: 18378853 NR Description: expressed protein; protein id: At1g01550
  misc_feature (389)..(426): NCBI GI NO: 18378853 NR Description: expressed protein; protein id: At1g01550
  misc_feature (3)..(265): NCBI GI NO: 28392962 NR Description: unknown protein [Arabidopsis thaliana]
  misc_feature (3)..(265): NCBI GI NO: 7485228 NR Description: hypothetical protein A_IG002N01
  misc_feature (3)..(265): NCBI GI NO: 30678866 NR Description: expressed protein [Arabidopsis thaliana]
MGNPFRMILPRGARLPPKLTELLTSYEDGLASSLRKVKPEATSEVFTLSWMKLAVECLSELHTNIATLITELELPLSDWDEKWVDIYLNSSVKLLDICIALSSELSRLDQGQLLVRYLLNVLNSGSDMPSQEQLRRAEVSLKEWIERASERSPRLDSCLAALQELSGNLSLMKVRHSAKGKVLMRALYGIEAVTVLICSVLVAVLSGTFKPLVDFDVPEKFGWSTAFIDLQKAISGELSRQLSRGSVAAVKELEDVDVCAKQLHTLTCTVQLEEENASLAHSFSRSKEVVLADTTAQGRGHADNLKLADDSSCQHEVIMLQSITTEGGMDTADIKEDTETIGHTKEVMAPEKIIDRGHQDDNTKQDTGVVTDISCLERREELLNCISRMSKSAERLQLGLDSLSKRVDDFFHIVLTGRDALLCNLRFSNGGKVAAEVRS

SEQ ID NO: 34006 - DNA, 1701 bp, Zea mays subsp. mays
  misc_feature (1)..(1701): Ceres Seq. ID no. 12342304
atcttgcgcttaatccagtccgttcaattcttgacatccgaacaccccgccgacgcagccctagattccgcattcctctctgtcacctccgcggcgccgccagcccgccatcacataacttcggcttctatcccttcgtaaacccttctctcttcttcccgcggcctgctcgttctatctgtccagcagacttgaggttccgagcggccggaaaccagcggcaaccgtcggcatggcgctcgtattgcattctggggctggaaacaaaaatgccttcaaggcacttattgctgcagaatacagtggggtcaaggttgagttgaccaaggattttgagatgggtgtctcgaacaagacccctgagtttctaaagatgaacccccttgggaaggttcctgttctggagactcctgatggccctgtttttgagagtaatgctattgcgcgctatgttgctcgcttgaaggatgacaaccctcttttcgggtcttcccgtattgaacaagcccacgttgagcagtggatggactttgctgcaacagaagttgatcctggtgttggatggtacttgtatccaaggcttgggtacatcccttatgctcacacgactgaggaaacagctattgcttcattgaagagatcccttggtgctctgaacacacatcttgccttgaacacataccttgttggacattctgttactctagctgacattgtattgacatgcaacctctaccatggaattgcacggatcttgaccaaaagcttcacttctgatttccctcatgttgagaggtatttctggaccatggttaaccaacctaatttcaagaaggtcattggtgaggtcaagcaggcagagtctgtacctcctgttcttaaaaagggtgttcctcctaaggagtcaaaggcaaaggatgtgaagaaagaaactccaaaggaggcccccaagccaaaggtggttgaggtaccagcagaagaggaagcaccaaagccaaagccaaagaatcctcttgacttgctgccaccaagcaagatggtccttgatgactggaagaggctatactcaaacacaaagaccaacttccgggaggttgccatcaaaggtttctgggacatgtatgacccagagggctactctctgtggttctgtgactacaagtacaatgacgagaacaccgtctcctttgtgaccctgaacaaggttggtggattcctgcagcggatggacctgtgccgcaagtacgcctttggcaagatgctcgtggtaggttctgagccacccttcaagctgaagggcctttggctcttccgtggccaggaggttcccaagtttgtaatggatgaggtctatgacatggagctctacgagtggaccaaggtcgacatctctgatgaggcccagaaggagcgtgtcaatgccatgatcgaggaccaggaaccctttgagggcgaggccttgcttgacgcgaaatgcttcaagtgagtgtgctttatccagagctgtttagccctcgaattggatgtctatgttgatctggtatatcttgctatgaactggttaaggtttgtgctggtttgagaatttttgtttaccttctcatcatttaagtgtttcgccgtaacaattttggtcatgtttttgaaagcctgtttgtattcgcgtcgtagttggggctatttatgcagactatccgattt

SEQ ID NO: 34007 - protein, 417 aa, Zea mays subsp. mays
  peptide (1)..(417): Ceres Seq. ID no. 12342305
  misc_feature (256)..(364): Pfam Name: Pfam Description:  Elongation factor 1 gamma, conserved domain
  misc_feature (4)..(417): NCBI GI NO: 29367381 NR Description: elongation factor 1 gamma-like protein
  misc_feature (1)..(417): NCBI GI NO: 13626515 NR Description: Elongation factor 1-gamma
  misc_feature (10)..(417): NCBI GI NO: 29367403 NR Description: elongation factor 1 gamma-like protein
  misc_feature (1)..(417): NCBI GI NO: 13626392 NR Description: Elongation factor 1-gamma
  misc_feature (3)..(417): NCBI GI NO: 18958499 NR Description: elongation factor 1-gamma [Glycine max]
  misc_feature (1)..(417): NCBI GI NO: 14334818 NR Description: putative elongation factor 1B gamma
  misc_feature (1)..(417): NCBI GI NO: 15223649 NR Description: elongation factor 1B-gamma, putative
  misc_feature (1)..(417): NCBI GI NO: 18391048 NR Description: elongation factor 1B-gamma, putative
  misc_feature (70)..(417): NCBI GI NO: 19423960 NR Description: unknown protein [Arabidopsis thaliana]
  misc_feature (5)..(262): NCBI GI NO: 27545277 NR Description: eukaryotic translation elongation factor 1 gamma
MALVLHSGAGNKNAFKALIAAEYSGVKVELTKDFEMGVSNKTPEFLKMNPLGKVPVLETPDGPVFESNAIARYVARLKDDNPLFGSSRIEQAHVEQWMDFAATEVDPGVGWYLYPRLGYIPYAHTTEETAIASLKRSLGALNTHLALNTYLVGHSVTLADIVLTCNLYHGIARILTKSFTSDFPHVERYFWTMVNQPNFKKVIGEVKQAESVPPVLKKGVPPKESKAKDVKKETPKEAPKPKVVEVPAEEEAPKPKPKNPLDLLPPSKMVLDDWKRLYSNTKTNFREVAIKGFWDMYDPEGYSLWFCDYKYNDENTVSFVTLNKVGGFLQRMDLCRKYAFGKMLVVGSEPPFKLKGLWLFRGQEVPKFVMDEVYDMELYEWTKVDISDEAQKERVNAMIEDQEPFEGEALLDAKCFK

SEQ ID NO: 34008 - protein, 382 aa, Zea mays subsp. mays
  peptide (1)..(382): Ceres Seq. ID no. 12342306
  misc_feature (221)..(329): Pfam Name: Pfam Description:  Elongation factor 1 gamma, conserved domain
  misc_feature (1)..(382): NCBI GI NO: 29367381 NR Description: elongation factor 1 gamma-like protein
  misc_feature (1)..(382): NCBI GI NO: 13626515 NR Description: Elongation factor 1-gamma
  misc_feature (1)..(382): NCBI GI NO: 29367403 NR Description: elongation factor 1 gamma-like protein
  misc_feature (1)..(382): NCBI GI NO: 13626392 NR Description: Elongation factor 1-gamma
  misc_feature (1)..(382): NCBI GI NO: 18958499 NR Description: elongation factor 1-gamma [Glycine max]
  misc_feature (1)..(382): NCBI GI NO: 14334818 NR Description: putative elongation factor 1B gamma
  misc_feature (1)..(382): NCBI GI NO: 15223649 NR Description: elongation factor 1B-gamma, putative
  misc_feature (1)..(382): NCBI GI NO: 18391048 NR Description: elongation factor 1B-gamma, putative
  misc_feature (35)..(382): NCBI GI NO: 19423960 NR Description: unknown protein [Arabidopsis thaliana]
  misc_feature (1)..(227): NCBI GI NO: 27545277 NR Description: eukaryotic translation elongation factor 1 gamma
MGVSNKTPEFLKMNPLGKVPVLETPDGPVFESNAIARYVARLKDDNPLFGSSRIEQAHVEQWMDFAATEVDPGVGWYLYPRLGYIPYAHTTEETAIASLKRSLGALNTHLALNTYLVGHSVTLADIVLTCNLYHGIARILTKSFTSDFPHVERYFWTMVNQPNFKKVIGEVKQAESVPPVLKKGVPPKESKAKDVKKETPKEAPKPKVVEVPAEEEAPKPKPKNPLDLLPPSKMVLDDWKRLYSNTKTNFREVAIKGFWDMYDPEGYSLWFCDYKYNDENTVSFVTLNKVGGFLQRMDLCRKYAFGKMLVVGSEPPFKLKGLWLFRGQEVPKFVMDEVYDMELYEWTKVDISDEAQKERVNAMIEDQEPFEGEALLDAKCFK

SEQ ID NO: 34009 - protein, 370 aa, Zea mays subsp. mays
  peptide (1)..(370): Ceres Seq. ID no. 12342307
  misc_feature (209)..(317): Pfam Name: Pfam Description:  Elongation factor 1 gamma, conserved domain
  misc_feature (1)..(370): NCBI GI NO: 29367381 NR Description: elongation factor 1 gamma-like protein
  misc_feature (1)..(370): NCBI GI NO: 13626515 NR Description: Elongation factor 1-gamma
  misc_feature (1)..(370): NCBI GI NO: 29367403 NR Description: elongation factor 1 gamma-like protein
  misc_feature (1)..(370): NCBI GI NO: 13626392 NR Description: Elongation factor 1-gamma
  misc_feature (1)..(370): NCBI GI NO: 18958499 NR Description: elongation factor 1-gamma [Glycine max]
  misc_feature (1)..(370): NCBI GI NO: 14334818 NR Description: putative elongation factor 1B gamma
  misc_feature (1)..(370): NCBI GI NO: 15223649 NR Description: elongation factor 1B-gamma, putative
  misc_feature (1)..(370): NCBI GI NO: 18391048 NR Description: elongation factor 1B-gamma, putative
  misc_feature (23)..(370): NCBI GI NO: 19423960 NR Description: unknown protein [Arabidopsis thaliana]
  misc_feature (1)..(215): NCBI GI NO: 27545277 NR Description: eukaryotic translation elongation factor 1 gamma
MNPLGKVPVLETPDGPVFESNAIARYVARLKDDNPLFGSSRIEQAHVEQWMDFAATEVDPGVGWYLYPRLGYIPYAHTTEETAIASLKRSLGALNTHLALNTYLVGHSVTLADIVLTCNLYHGIARILTKSFTSDFPHVERYFWTMVNQPNFKKVIGEVKQAESVPPVLKKGVPPKESKAKDVKKETPKEAPKPKVVEVPAEEEAPKPKPKNPLDLLPPSKMVLDDWKRLYSNTKTNFREVAIKGFWDMYDPEGYSLWFCDYKYNDENTVSFVTLNKVGGFLQRMDLCRKYAFGKMLVVGSEPPFKLKGLWLFRGQEVPKFVMDEVYDMELYEWTKVDISDEAQKERVNAMIEDQEPFEGEALLDAKCFK

SEQ ID NO: 34010 - DNA, 1331 bp, Zea mays subsp. mays
  misc_feature (1)..(1331): Ceres Seq. ID no. 12343309
accggaccaaccaggacttggagcgtgcggcgtcggagttcgccggcggtgaggagcagaagaggaagggaaccaaacaaagatgggctgctccatctcggggctcaacgcgctctacgacgcggccacgggcggcggcgacgtctggatcaacgagcgccgcttccgcgtccttcgccagatcggcgagggcgggttcgccttcgtctacctcgtcagagagcaccagcccgcctccgatgcggcgttcgctaggcgtgaccccgcccacgtctcagaggatggaacgtatgccatgaagaaggtgctgatacagagcaaggagcagttggatctggtgagggaggagatccgtgtgtcgtccttattcaatcaccccaaccttctgccgcttcttgatcatgccataatagccgtgaagggagattggagccatgaagcatacctacttttccctgttcatctggatggtactttgtttgacaacgctaacatcatgctgtccagaagggaattctattccacagctgatgttctgcaaatattccagcagatgtgtgaagggctgaaacacatgcacagctttgatcctccatacgctcataatgatgttaagcctggtaatgttcttataacctggcgtaaaggacaagcacctgttgcaactttaatggattttggaagtgcaaggcctgcaagaaaggaaatccgttctcgttctgaggcactacagttgcaggaatgggccgctgagcattgctctgctccttaccgggcccctgaattatgggactgcccaagccatgccgatattgatgagaggacagacatctggtctctaggatgcactctttttgctatcatgtacaatgtttcaccatttgagtatgctcttggtgaatctggaggaagtctgcaacttgccattgtaaacgggcagttgaaatggccagcaggacccaaacctccttatcctgatgaacttcgccattttgttatctggatgcttcaacctgaagctgcaatgcgccctcacatttctgatgtggttcttcatgttgacaagctcattgcaaaatacttgccctagatcagcctggagttcctctcatttctttgttatacagtacagagccaatatgatgtaaaatgggcccatgcttgacgtcattcagtccttggataggctcaatattgattctttcgtagaactttcaggatattacatcagtctaatgtctgtggatctttgatactcatggagtcacggtgtcatgtaaaaatgtcaaactgaacatcaaagcagctatatgatatccttgcacttgggc

SEQ ID NO: 34011 - protein, 335 aa, Zea mays subsp. mays
  peptide (1)..(335): Ceres Seq. ID no. 12343310
  misc_feature (1)..(333): NCBI GI NO: 15241535 NR Description: serine/threonine protein kinase
  misc_feature (1)..(333): NCBI GI NO: 21593866 NR Description: serine/threonine protein kinase
  misc_feature (58)..(333): NCBI GI NO: 30682270 NR Description: serine/threonine protein kinase, putative
  misc_feature (1)..(30): NCBI GI NO: 30682270 NR Description: serine/threonine protein kinase, putative
  misc_feature (49)..(329): NCBI GI NO: 10640971 NR Description: F5-2 [Homo sapiens]
  misc_feature (49)..(329): NCBI GI NO: 4106342 NR Description: palmitylated serine/threonine kinase
  misc_feature (49)..(329): NCBI GI NO: 27465615 NR Description: serine/threonine kinase 16 [Rattus norvegicus]
  misc_feature (49)..(329): NCBI GI NO: 3372666 NR Description: myristilated and palmitylated serine-threoninekinase MPSK
  misc_feature (49)..(329): NCBI GI NO: 4505837 NR Description: serine/threonine kinase 16
  misc_feature (49)..(329): NCBI GI NO: 13626604 NR Description: SERINE/THREONINE PROTEIN KINASE 16
MGCSISGLNALYDAATGGGDVWINERRFRVLRQIGEGGFAFVYLVREHQPASDAAFARRDPAHVSEDGTYAMKKVLIQSKEQLDLVREEIRVSSLFNHPNLLPLLDHAIIAVKGDWSHEAYLLFPVHLDGTLFDNANIMLSRREFYSTADVLQIFQQMCEGLKHMHSFDPPYAHNDVKPGNVLITWRKGQAPVATLMDFGSARPARKEIRSRSEALQLQEWAAEHCSAPYRAPELWDCPSHADIDERTDIWSLGCTLFAIMYNVSPFEYALGESGGSLQLAIVNGQLKWPAGPKPPYPDELRHFVIWMLQPEAAMRPHISDVVLHVDKLIAKYLP

SEQ ID NO: 34012 - protein, 264 aa, Zea mays subsp. mays
  peptide (1)..(264): Ceres Seq. ID no. 12343311
  misc_feature (1)..(262): NCBI GI NO: 15241535 NR Description: serine/threonine protein kinase
  misc_feature (1)..(262): NCBI GI NO: 21593866 NR Description: serine/threonine protein kinase
  misc_feature (1)..(262): NCBI GI NO: 30682270 NR Description: serine/threonine protein kinase, putative
  misc_feature (1)..(258): NCBI GI NO: 10640971 NR Description: F5-2 [Homo sapiens]
  misc_feature (1)..(258): NCBI GI NO: 4106342 NR Description: palmitylated serine/threonine kinase
  misc_feature (1)..(258): NCBI GI NO: 27465615 NR Description: serine/threonine kinase 16 [Rattus norvegicus]
  misc_feature (1)..(258): NCBI GI NO: 3372666 NR Description: myristilated and palmitylated serine-threoninekinase MPSK
  misc_feature (1)..(258): NCBI GI NO: 4505837 NR Description: serine/threonine kinase 16
  misc_feature (1)..(258): NCBI GI NO: 13626604 NR Description: SERINE/THREONINE PROTEIN KINASE 16
  misc_feature (1)..(258): NCBI GI NO: 12803571 NR Description: serine/threonine kinase 16 [Homo sapiens]
MKKVLIQSKEQLDLVREEIRVSSLFNHPNLLPLLDHAIIAVKGDWSHEAYLLFPVHLDGTLFDNANIMLSRREFYSTADVLQIFQQMCEGLKHMHSFDPPYAHNDVKPGNVLITWRKGQAPVATLMDFGSARPARKEIRSRSEALQLQEWAAEHCSAPYRAPELWDCPSHADIDERTDIWSLGCTLFAIMYNVSPFEYALGESGGSLQLAIVNGQLKWPAGPKPPYPDELRHFVIWMLQPEAAMRPHISDVVLHVDKLIAKYLP

SEQ ID NO: 34013 - protein, 197 aa, Zea mays subsp. mays
  peptide (1)..(197): Ceres Seq. ID no. 12343312
  misc_feature (1)..(195): NCBI GI NO: 15241535 NR Description: serine/threonine protein kinase
  misc_feature (1)..(195): NCBI GI NO: 21593866 NR Description: serine/threonine protein kinase
  misc_feature (1)..(195): NCBI GI NO: 30682270 NR Description: serine/threonine protein kinase, putative
  misc_feature (1)..(191): NCBI GI NO: 10640971 NR Description: F5-2 [Homo sapiens]
  misc_feature (1)..(191): NCBI GI NO: 4106342 NR Description: palmitylated serine/threonine kinase
  misc_feature (1)..(191): NCBI GI NO: 27465615 NR Description: serine/threonine kinase 16 [Rattus norvegicus]
  misc_feature (1)..(191): NCBI GI NO: 3372666 NR Description: myristilated and palmitylated serine-threoninekinase MPSK
  misc_feature (1)..(191): NCBI GI NO: 4505837 NR Description: serine/threonine kinase 16
  misc_feature (1)..(191): NCBI GI NO: 13626604 NR Description: SERINE/THREONINE PROTEIN KINASE 16
  misc_feature (1)..(191): NCBI GI NO: 12803571 NR Description: serine/threonine kinase 16 [Homo sapiens]
MLSRREFYSTADVLQIFQQMCEGLKHMHSFDPPYAHNDVKPGNVLITWRKGQAPVATLMDFGSARPARKEIRSRSEALQLQEWAAEHCSAPYRAPELWDCPSHADIDERTDIWSLGCTLFAIMYNVSPFEYALGESGGSLQLAIVNGQLKWPAGPKPPYPDELRHFVIWMLQPEAAMRPHISDVVLHVDKLIAKYLP

SEQ ID NO: 34014 - DNA, 1047 bp, Zea mays subsp. mays
  misc_feature (1)..(1047): Ceres Seq. ID no. 12593638
gcacgagaccattacctagaacatcctaatcgaaaaatcacccctcgttgtcatctcatatcctgagccagagatcaaagaaaccagagggagcgaggcatggcagcaggcttgcaggtgtttggccagccggcgtctactgatgtctccagggttctgacatgcctgtttgagaagaaactggagttcgatcttgtccgcatcgatacgttcaagacgcatcacaagcttcccgagttcatcaggcttcgggatcctaatgggcaagtgaccttgaagcacggcgacaaaactctcgttgattcgagggacatctgccggtacgtctgcacccagtttccaaacgatggaaacaagagcctttacggatccggcgctctagaacgggcgtcgatagaacagtggcttcaggcggaggctcagaacttcgggccccccagctccgcgctcgtcttccagctggcgttcgtccctcacctcactcacctgggcgttcgtcaggaccctgccgtgatcgccgagaacgaggataagctgaagcaggtccttgatgtctacgacgagatactctcgaggaacgagtacctggctggcgacgagttcaccctggccgacctctcccacctcccgaactcgcactacatcgtgaacaccgagagaggaaggaagctcttcactaacaagaagaacgtggccaagtggtacgagaagctctcgaagcgcgagacgtggaagcaggtcgctaagatgcagaaggaacatcctggtgcgttcgagtgattgcttgtcttggggggagctgcgagtgcaccatcatgaatggcttcatcgtctgtgtcggtctggctctacagttcattttgttttgagtgatccattgtttaattcctcctatcagtgttgtcgtgtgcaccaaaaataatgtgaagcccagctgtgatgtatatgatccttttgctctaatctatcatgacgtataagctcgatctctgaccttgtacgcacagtattttttttactgatgatttcgatcgagacatacagtcg

SEQ ID NO: 34015 - protein, 226 aa, Zea mays subsp. mays
  peptide (1)..(226): Ceres Seq. ID no. 12593639
  misc_feature (1)..(226): NCBI GI NO: 11385469 NR Description: glutathione S-transferase GST 9 [Zea mays]
  misc_feature (1)..(226): NCBI GI NO: 11385475 NR Description: glutathione S-transferase GST 12 [Zea mays]
  misc_feature (1)..(226): NCBI GI NO: 11385477 NR Description: glutathione S-transferase GST 13 [Zea mays]
  misc_feature (1)..(226): NCBI GI NO: 22758269 NR Description: Putative glutathione S-transferase
  misc_feature (131)..(226): NCBI GI NO: 22758268 NR Description: Putative glutathione S-transferase
  misc_feature (1)..(75): NCBI GI NO: 22758268 NR Description: Putative glutathione S-transferase
  misc_feature (1)..(128): NCBI GI NO: 37536564 NR Description: putative glutathione S-transferase
  misc_feature (132)..(224): NCBI GI NO: 37536564 NR Description: putative glutathione S-transferase
  misc_feature (1)..(218): NCBI GI NO: 11177845 NR Description: putative glutathione S-transferase OsGSTF3
  misc_feature (1)..(218): NCBI GI NO: 22758267 NR Description: Putative glutathione S-transferase
MAAGLQVFGQPASTDVSRVLTCLFEKKLEFDLVRIDTFKTHHKLPEFIRLRDPNGQVTLKHGDKTLVDSRDICRYVCTQFPNDGNKSLYGSGALERASIEQWLQAEAQNFGPPSSALVFQLAFVPHLTHLGVRQDPAVIAENEDKLKQVLDVYDEILSRNEYLAGDEFTLADLSHLPNSHYIVNTERGRKLFTNKKNVAKWYEKLSKRETWKQVAKMQKEHPGAFE

SEQ ID NO: 34016 - DNA, 1318 bp, Zea mays subsp. mays
  misc_feature (1)..(1318): Ceres Seq. ID no. 12366785
actgtggaagaaccgttgagctgagccgagcagggagaaggacgcgagagcagcatggagacggcggagaggggcaccaccgtgtgcgtgaccggcgcggggggctttgtggcatcgtggctcgtcaagctcctcctctccaccggccgctacaccgtccggggtaccgtgcgtcatctcggtgatggcaagaatgcccatcttaagacactggaagatgccggggagaggctgcagttggtcaaggctgacatgctggactatggcagcgttgcgtccgcggtcgccggctgtcagggtgtcttccatgtcgcgagccctgtcccctccggcaaatcctccaaccctgaggaagatgtcattgctcctgctgtaactggcacactgaatgtgttgaaagcttgctatgaggccaaagcgaagagagttgttgtggtatcttcagtggctgctgtgttcaataatcctgactggcctaagggcgaggcctttactgaggatagctggtcagatggggaatattgcagaaaaaatgaggaatggtatttcctttctaaaacattggcagaacatgaggcttttgcttatgcagccaaaactgggctagacattgtaactatttgcccatcattggtaattggacctttgttgcaacctgcagtaaatacaagtattaaagtcttcctcagttatatcaaaggagatcaggagatagttaaagatggacccaaaaatcttgtggatgttcgtgatgtcgctggtgcccttctgttggcttacgaaaatctgcaggcatctggacgatacctctgcagctcaccagcaataagagtctctgatattgtaaacatactgaagaccgaatatccaacatacacttaccctcaaaaattcgttgaagcagaaggtagcaacacatacaacacggagaagcttcggaagctagggtggacctctaggcccatggaggaaaccctccgggacagcatcgaatgctacagagctttgggcatcctgaactgagcttcccttcagctttgggctttggctgctgctgctgctgctacttttcagcttctttcttcttcatgtaaacagtgaatcagaaattcagaatacgctggtataggaactagagaagtggatcatggaagatgctgatgctaaaaatgaatttggatactatccatcatttgtgcctgcgggattgagggcaaattaattaagtacttatatttgtaaatctggggccgtcgaactgaaccaacaatgaagaggtgaagaacaaatcgaagtggtagatgagtgcattgctgtg

SEQ ID NO: 34017 - protein, 322 aa, Zea mays subsp. mays
  peptide (1)..(322): Ceres Seq. ID no. 12366786
  misc_feature (10)..(315): Pfam Name: Pfam Description:  NAD dependent epimerase/dehydratase family
  misc_feature (1)..(316): NCBI GI NO: 15226135 NR Description: putative cinnamoyl-CoA reductase
  misc_feature (1)..(316): NCBI GI NO: 15226134 NR Description: putative cinnamoyl-CoA reductase
  misc_feature (10)..(321): NCBI GI NO: 15223068 NR Description: putative cinnamoyl-CoA reductase
  misc_feature (10)..(321): NCBI GI NO: 6554472 NR Description: putative cinnamoyl-CoA reductase; 14056-15506
  misc_feature (5)..(312): NCBI GI NO: 17978649 NR Description: cinnamoyl-CoA reductase [Pinus taeda]
  misc_feature (6)..(321): NCBI GI NO: 9998901 NR Description: cinnamoyl-CoA reductase
  misc_feature (6)..(321): NCBI GI NO: 40233135 NR Description: cinnamoyl CoA reductase [Populus tomentosa]
  misc_feature (6)..(321): NCBI GI NO: 2960364 NR Description: cinnamoyl CoA reductase
  misc_feature (7)..(321): NCBI GI NO: 7431406 NR Description: probable cinnamyl-alcohol dehydrogenase (EC1
  misc_feature (4)..(321): NCBI GI NO: 7431410 NR Description: cinnamoyl CoA reductase - maize
METAERGTTVCVTGAGGFVASWLVKLLLSTGRYTVRGTVRHLGDGKNAHLKTLEDAGERLQLVKADMLDYGSVASAVAGCQGVFHVASPVPSGKSSNPEEDVIAPAVTGTLNVLKACYEAKAKRVVVVSSVAAVFNNPDWPKGEAFTEDSWSDGEYCRKNEEWYFLSKTLAEHEAFAYAAKTGLDIVTICPSLVIGPLLQPAVNTSIKVFLSYIKGDQEIVKDGPKNLVDVRDVAGALLLAYENLQASGRYLCSSPAIRVSDIVNILKTEYPTYTYPQKFVEAEGSNTYNTEKLRKLGWTSRPMEETLRDSIECYRALGILN

SEQ ID NO: 34018 - protein, 256 aa, Zea mays subsp. mays
  peptide (1)..(256): Ceres Seq. ID no. 12366787
  misc_feature (1)..(249): Pfam Name: Pfam Description:  NAD dependent epimerase/dehydratase family
  misc_feature (1)..(250): NCBI GI NO: 15226135 NR Description: putative cinnamoyl-CoA reductase
  misc_feature (1)..(250): NCBI GI NO: 15226134 NR Description: putative cinnamoyl-CoA reductase
  misc_feature (1)..(255): NCBI GI NO: 15223068 NR Description: putative cinnamoyl-CoA reductase
  misc_feature (1)..(255): NCBI GI NO: 6554472 NR Description: putative cinnamoyl-CoA reductase; 14056-15506
  misc_feature (1)..(246): NCBI GI NO: 17978649 NR Description: cinnamoyl-CoA reductase [Pinus taeda]
  misc_feature (1)..(255): NCBI GI NO: 9998901 NR Description: cinnamoyl-CoA reductase
  misc_feature (1)..(255): NCBI GI NO: 40233135 NR Description: cinnamoyl CoA reductase [Populus tomentosa]
  misc_feature (1)..(255): NCBI GI NO: 2960364 NR Description: cinnamoyl CoA reductase
  misc_feature (1)..(255): NCBI GI NO: 7431406 NR Description: probable cinnamyl-alcohol dehydrogenase (EC1
  misc_feature (1)..(255): NCBI GI NO: 7431410 NR Description: cinnamoyl CoA reductase - maize
MLDYGSVASAVAGCQGVFHVASPVPSGKSSNPEEDVIAPAVTGTLNVLKACYEAKAKRVVVVSSVAAVFNNPDWPKGEAFTEDSWSDGEYCRKNEEWYFLSKTLAEHEAFAYAAKTGLDIVTICPSLVIGPLLQPAVNTSIKVFLSYIKGDQEIVKDGPKNLVDVRDVAGALLLAYENLQASGRYLCSSPAIRVSDIVNILKTEYPTYTYPQKFVEAEGSNTYNTEKLRKLGWTSRPMEETLRDSIECYRALGILN

SEQ ID NO: 34019 - DNA, 1494 bp, Zea mays subsp. mays
  misc_feature (1)..(1494): Ceres Seq. ID no. 12383105
atgctacgccaagcgcgcaattaaccctcactaaagggaacaaaagctggagctccaccgcggtggcggccgctctagaactagtggatcccccgggctgcaggaattcgcacgagaccattacctagaacatcctaatcaaaaagatcgaaacgaaaaggcagagagggagggatctccgtctccacgccgcgtcctcccgcacgaatccgcgctccggccaacgggccaagccctagccacccccgcccattcatggtgggcgggccgtgagatctctagggaggcttgtcggcttcgtcgggcgggaggggaggagatgggcgcccggaacagcgctgccgccacgccggtgctgctcaacgtgtacgaccttacggccgcgaacgattacctctactggctcggcttcggcgtcttccactccggaatcgaagtccatggcacggaatatgggtttggagcccacgactacccatccagtggtgtgtttgaggtggaatcaaagagttgccctggctttatctacagaagaacagtgtggctaggcacaacagacatgtctcaggaagaattccgctcgtttattgaaaaacttgcaggtgattatcatggcgacacatatcatttaattaacaagaactgcaatcacttcacagatgatgtctgccagaacttaactgggaaacccatcccttcctgggtgaataggcttgcaagagtagggtcagttttcgattgccttcttccagaaagcgtacaagtttctcctgtaggtcgtgtcccaacgagtcggcgaatatctgatgatgatttgtattcaatacattcaccaatggccgacaaagatgacaatgatgaggacgaggccaaacacctgctgccagctccatccaacgaccagctttctgtagatgtaccgccaaagctagcgaaagatcttctctgaaccactccatgttcataggcgcctaccatacttcaactcatatagccattggtgctaaagtgatcctcaagatggcttgacacagatagggattgggcatatttgattaaagatgaagctctaatttcttgtggcttaccagtttgcagtttcaccttgctgtctcatctcagcaaacagttgtcatctatggtagtagtggcatgattgttaccctgccatttagcacatctggaaattgccaatttggaatgtggggttccggtacctgttaggaatcaggactgtcgatgcttgttgagccccagtgttgaaggcacatactgtaacatgttactatcaaaaacagtgtacatgtacatggctaccgagtatttgccacgaatccaaatgagcgaatctctgttgggctgcttaagcgcctgtagtgacatggaacatctttttgttccgggctattgaacatcgaacattcgaacccaaccatgtggttctgtcgctgatgcctgttatgctgtaataatgtgagattactttttgctgtc

SEQ ID NO: 34020 - protein, 209 aa, Zea mays subsp. mays
  peptide (1)..(209): Ceres Seq. ID no. 12383106
  misc_feature (10)..(120): Pfam Name: DUF862 Pfam Description: Eukaryotic protein of unknown function
  misc_feature (1)..(120): NCBI GI NO: 14140145 NR Description: putative protein [Oryza sativa]
  misc_feature (161)..(209): NCBI GI NO: 14140145 NR Description: putative protein [Oryza sativa]
  misc_feature (1)..(199): NCBI GI NO: 38346173 NR Description: OSJNBa0079A21.20
  misc_feature (1)..(209): NCBI GI NO: 15238059 NR Description: putative protein; protein id: At5g47310.1
  misc_feature (7)..(207): NCBI GI NO: 30684058 NR Description: expressed protein [Arabidopsis thaliana]
  misc_feature (11)..(156): NCBI GI NO: 18401869 NR Description: expressed protein; protein id: At1g47740
  misc_feature (11)..(156): NCBI GI NO: 21593644 NR Description: unknown [Arabidopsis thaliana]
  misc_feature (2)..(155): NCBI GI NO: 18420889 NR Description: putative protein; protein id: At5g25170
  misc_feature (11)..(164): NCBI GI NO: 18412886 NR Description: expressed protein; protein id: At1g80690
  misc_feature (11)..(156): NCBI GI NO: 9802596 NR Description: T2E6.19 [Arabidopsis thaliana]
MGARNSAAATPVLLNVYDLTAANDYLYWLGFGVFHSGIEVHGTEYGFGAHDYPSSGVFEVESKSCPGFIYRRTVWLGTTDMSQEEFRSFIEKLAGDYHGDTYHLINKNCNHFTDDVCQNLTGKPIPSWVNRLARVGSVFDCLLPESVQVSPVGRVPTSRRISDDDLYSIHSPMADKDDNDEDEAKHLLPAPSNDQLSVDVPPKLAKDLL

SEQ ID NO: 34021 - protein, 129 aa, Zea mays subsp. mays
  peptide (1)..(129): Ceres Seq. ID no. 12383107
  misc_feature (1)..(40): NCBI GI NO: 14140145 NR Description: putative protein [Oryza sativa]
  misc_feature (81)..(129): NCBI GI NO: 14140145 NR Description: putative protein [Oryza sativa]
  misc_feature (1)..(119): NCBI GI NO: 38346173 NR Description: OSJNBa0079A21.20
  misc_feature (1)..(129): NCBI GI NO: 15238059 NR Description: putative protein; protein id: At5g47310.1
  misc_feature (1)..(127): NCBI GI NO: 30684058 NR Description: expressed protein [Arabidopsis thaliana]
  misc_feature (1)..(76): NCBI GI NO: 18401869 NR Description: expressed protein; protein id: At1g47740
  misc_feature (1)..(76): NCBI GI NO: 21593644 NR Description: unknown [Arabidopsis thaliana]
  misc_feature (1)..(75): NCBI GI NO: 18420889 NR Description: putative protein; protein id: At5g25170
  misc_feature (1)..(84): NCBI GI NO: 18412886 NR Description: expressed protein; protein id: At1g80690
  misc_feature (1)..(76): NCBI GI NO: 9802596 NR Description: T2E6.19 [Arabidopsis thaliana]
MSQEEFRSFIEKLAGDYHGDTYHLINKNCNHFTDDVCQNLTGKPIPSWVNRLARVGSVFDCLLPESVQVSPVGRVPTSRRISDDDLYSIHSPMADKDDNDEDEAKHLLPAPSNDQLSVDVPPKLAKDLL

SEQ ID NO: 34022 - DNA, 1140 bp, Zea mays subsp. mays
  misc_feature (1)..(1140): Ceres Seq. ID no. 12411567
aagaagagtggcaaacatgcactcaggcattggacttcggatggatgcaaatggcgaagccagtgatgaatttatatacagaagcaactgatggatcctacattgaggccaaggaaagtgccttggtgtggcaccatcaggatgctgacctaggctttggatcctcacaggcaaaggagatgcttgatcacctggaaagtgtactagcaaatgaaccagtctctgtcaagagtggccagttcattgttgaagtcaaaccacagggaataagcaagggaatagttgccgagaggatacttgcatcagtgaaggagagaggaaagcaggctgatttcttattgtgcatcggcgatgataggtctgatgaggacatgtttgaaaatattgctgatatcattgggaggaatttggttgctccaagaacagcactgtttgcgtgcactgtgggacaaaaaccaagcaaagccaaattctacctggatgatacattcgaagtggtcactatgctgagcgcactggcagatgccacaggtcctgaactggagactgattcggctgatgaatctgtcgcatatatctcatcacttgatattggtgacgaacaatcagaatccagtgataaaccagttgaagggtcttagccagttttctcttgcgttttcagaacatgatgattgtttcaatagtcaattctattctacacaattttctgatgggaactcaacgactaacaactggttctacgaatgctccagagtgaagcttctcaatctgctgtgctccaagttctccagttgggcaagatagtacagtctgttgctccaaggcgtagatccatatgttcatagctgacttacttggcacgttctttcactttctcattcctggttgaattaaaatgaaaacctcacagaagacaaagggagcgctgtttggctcattggctgaagtaatctggggggaggtataggagtggcgtatgtgaaaggagcctgtgcgcaggttgtgatatgattccttattaacacgacgttacaaagtggtgtcacttcttgaactaccagtagtaacaatcccaagagtgaggttcgaattgattaattaattgcttcaaagccagatctcggatggttttgctcc

SEQ ID NO: 34023 - protein, 212 aa, Zea mays subsp. mays
  peptide (1)..(212): Ceres Seq. ID no. 12411568
  misc_feature (1)..(163): Pfam Name: Pfam Description:  Trehalose-phosphatase
  misc_feature (1)..(211): NCBI GI NO: 34909526 NR Description: putative trehalose-6-phosphate synthase homolog
  misc_feature (1)..(188): NCBI GI NO: 34910846 NR Description: putative trehalose-6-phosphate synthase
  misc_feature (1)..(189): NCBI GI NO: 19568935 NR Description: putative trehalose synthase [Solanum tuberosum]
  misc_feature (1)..(176): NCBI GI NO: 15221478 NR Description: trehalose-6-phosphate synthase, putative
  misc_feature (1)..(191): NCBI GI NO: 27371966 NR Description: trehalose-6-phosphate synthase/phosphatase
  misc_feature (2)..(176): NCBI GI NO: 25347119 NR Description: hypothetical protein T23K23.13
  misc_feature (2)..(197): NCBI GI NO: 18414960 NR Description: trehalose-6-phosphate synthase like protein
  misc_feature (2)..(197): NCBI GI NO: 7488400 NR Description: trehalose-6-phosphate synthase homolog DL4920W -Arabidopsis thaliana
  misc_feature (1)..(193): NCBI GI NO: 7488401 NR Description: trehalose-6-phosphate synthase homolog F17O7
  misc_feature (1)..(193): NCBI GI NO: 30698024 NR Description: alpha
EEWQTCTQALDFGWMQMAKPVMNLYTEATDGSYIEAKESALVWHHQDADLGFGSSQAKEMLDHLESVLANEPVSVKSGQFIVEVKPQGISKGIVAERILASVKERGKQADFLLCIGDDRSDEDMFENIADIIGRNLVAPRTALFACTVGQKPSKAKFYLDDTFEVVTMLSALADATGPELETDSADESVAYISSLDIGDEQSESSDKPVEGS

SEQ ID NO: 34024 - protein, 198 aa, Zea mays subsp. mays
  peptide (1)..(198): Ceres Seq. ID no. 12411569
  misc_feature (1)..(149): Pfam Name: Pfam Description:  Trehalose-phosphatase
  misc_feature (1)..(197): NCBI GI NO: 34909526 NR Description: putative trehalose-6-phosphate synthase homolog
  misc_feature (1)..(174): NCBI GI NO: 34910846 NR Description: putative trehalose-6-phosphate synthase
  misc_feature (1)..(175): NCBI GI NO: 19568935 NR Description: putative trehalose synthase [Solanum tuberosum]
  misc_feature (1)..(162): NCBI GI NO: 15221478 NR Description: trehalose-6-phosphate synthase, putative
  misc_feature (1)..(177): NCBI GI NO: 27371966 NR Description: trehalose-6-phosphate synthase/phosphatase
  misc_feature (1)..(162): NCBI GI NO: 25347119 NR Description: hypothetical protein T23K23.13
  misc_feature (1)..(183): NCBI GI NO: 18414960 NR Description: trehalose-6-phosphate synthase like protein
  misc_feature (1)..(183): NCBI GI NO: 7488400 NR Description: trehalose-6-phosphate synthase homolog DL4920W -Arabidopsis thaliana
  misc_feature (1)..(179): NCBI GI NO: 7488401 NR Description: trehalose-6-phosphate synthase homolog F17O7
  misc_feature (1)..(179): NCBI GI NO: 30698024 NR Description: alpha
MQMAKPVMNLYTEATDGSYIEAKESALVWHHQDADLGFGSSQAKEMLDHLESVLANEPVSVKSGQFIVEVKPQGISKGIVAERILASVKERGKQADFLLCIGDDRSDEDMFENIADIIGRNLVAPRTALFACTVGQKPSKAKFYLDDTFEVVTMLSALADATGPELETDSADESVAYISSLDIGDEQSESSDKPVEGS

SEQ ID NO: 34025 - protein, 196 aa, Zea mays subsp. mays
  peptide (1)..(196): Ceres Seq. ID no. 12411570
  misc_feature (1)..(147): Pfam Name: Pfam Description:  Trehalose-phosphatase
  misc_feature (1)..(195): NCBI GI NO: 34909526 NR Description: putative trehalose-6-phosphate synthase homolog
  misc_feature (1)..(172): NCBI GI NO: 34910846 NR Description: putative trehalose-6-phosphate synthase
  misc_feature (1)..(173): NCBI GI NO: 19568935 NR Description: putative trehalose synthase [Solanum tuberosum]
  misc_feature (1)..(160): NCBI GI NO: 15221478 NR Description: trehalose-6-phosphate synthase, putative
  misc_feature (1)..(175): NCBI GI NO: 27371966 NR Description: trehalose-6-phosphate synthase/phosphatase
  misc_feature (1)..(160): NCBI GI NO: 25347119 NR Description: hypothetical protein T23K23.13
  misc_feature (1)..(181): NCBI GI NO: 18414960 NR Description: trehalose-6-phosphate synthase like protein
  misc_feature (1)..(181): NCBI GI NO: 7488400 NR Description: trehalose-6-phosphate synthase homolog DL4920W -Arabidopsis thaliana
  misc_feature (1)..(177): NCBI GI NO: 7488401 NR Description: trehalose-6-phosphate synthase homolog F17O7
  misc_feature (1)..(177): NCBI GI NO: 30698024 NR Description: alpha
MAKPVMNLYTEATDGSYIEAKESALVWHHQDADLGFGSSQAKEMLDHLESVLANEPVSVKSGQFIVEVKPQGISKGIVAERILASVKERGKQADFLLCIGDDRSDEDMFENIADIIGRNLVAPRTALFACTVGQKPSKAKFYLDDTFEVVTMLSALADATGPELETDSADESVAYISSLDIGDEQSESSDKPVEGS

SEQ ID NO: 34026 - DNA, 1495 bp, Zea mays subsp. mays
  misc_feature (1)..(1495): Ceres Seq. ID no. 12411561
ctggatggctaggcccaaccaaacacgacggcccacgggtgcacctgaggcggcgcacgttgccgactcggctgtctcgtcttccttgtgcttcgcgcactcgccgcccctgcgccctgcgggcagtctcttcttgccctttctcctgtgcgcagccgcggcggacccaatctcgcattctcgcgttccgagatactgttgttctttcagggagatagatagattccgactgctcgccattggggctgccttggccgcgtgccatccgtcgcttcgtcgagctgcgtgcgggggcgctcctcgtcctcctcacgatggggggctggaaccggtcgctgtacgtgacgggccaccgtgaccgctccgccggcgcttcgcgtactcctctgcctccgccttcgcctgattacggagacaagcaccagcaagtcccattatgggagagggaattctgccgccacgttggcgacatcacttgggagcgtttctgtgaaaacaagcagtatgttggacaattccataatcacgagccttgggatgattcagcggcatttgattgtttccagaacgcaaaggcaaggttctgggcgagctaccatggccagccttctgacattcctttgctggacgacccggatctgtacatcgacaaggtcgaccaccaatgcgaagtcgacccggagttggtagctgatctggatagcgtagggctaccgttcgagtcggatgataatcccgcctcagccaaagggtggaccaatgcttgggccaacaacaagtgcacccagaacgggtctggaaactgggacgccttcgtagaaaagccagctgaagtcagtaagtgggactccgaggccaatctcgcatccaacacgacttggggcggccaggccaatgtagcaacacctgaggcggtttggagaggccaatctttcagtaaatggggcaatgatagcaacaccagccggggtgttcctctggagaagccgagctggcgtggctgtagcaagaaccgctacacacccaacagctggagcagcaactttcatagcagaccatccgacaataggtaccagcagctggaggatccgagctacacttctgggactggaaggaaatggaatggcggcgacggcggctggtacgtcaagcagaggaaccaggaccaggggcagcaccagcagccgaggagtggcagctggcagcaggaccaaagaagaaggagcaggcagtggcgtccggtgcacagcagggctccctaaaacggtccggcgtcttgatctcgtggcgagactcgcaggtgtcttcttttgtgcagtcagttttcagctgctgctggcaaagtggtgcctgtaaatagatgttttttgttgttgttttgtttgagttgtatgctgcagctgctccttcgcagctgcgtccttactttgcttatggtgcaatgttaatatgttataatgttagttaatatggggagcatcacagtttttggttc

SEQ ID NO: 34027 - protein, 315 aa, Zea mays subsp. mays
  peptide (1)..(315): Ceres Seq. ID no. 12411562
  misc_feature (11)..(242): NCBI GI NO: 34908952 NR Description: P0691E06.28
  misc_feature (1)..(296): NCBI GI NO: 18414420 NR Description: putative protein; protein id: At5g03990
  misc_feature (39)..(296): NCBI GI NO: 11357869 NR Description: hypothetical protein F8F6
  misc_feature (1)..(308): NCBI GI NO: 30725308 NR Description: At3g51940 [Arabidopsis thaliana]
  misc_feature (1)..(308): NCBI GI NO: 30693555 NR Description: expressed protein [Arabidopsis thaliana]
  misc_feature (39)..(308): NCBI GI NO: 11357778 NR Description: hypothetical protein F4F15
MGGWNRSLYVTGHRDRSAGASRTPLPPPSPDYGDKHQQVPLWEREFCRHVGDITWERFCENKQYVGQFHNHEPWDDSAAFDCFQNAKARFWASYHGQPSDIPLLDDPDLYIDKVDHQCEVDPELVADLDSVGLPFESDDNPASAKGWTNAWANNKCTQNGSGNWDAFVEKPAEVSKWDSEANLASNTTWGGQANVATPEAVWRGQSFSKWGNDSNTSRGVPLEKPSWRGCSKNRYTPNSWSSNFHSRPSDNRYQQLEDPSYTSGTGRKWNGGDGGWYVKQRNQDQGQHQQPRSGSWQQDQRRRSRQWRPVHSRAP

SEQ ID NO: 34028 - DNA, 1745 bp, Zea mays subsp. mays
  misc_feature (1)..(1745): Ceres Seq. ID no. 12374204
gtccttccctccgcctccgcccccgcccactcctggcttccaccactcctgtcacctcttcccgcgccgacgcagccgccatggaccccgtctccacatgggggctaaccccgctcgcgggcgccgacccggagatctacgacctcctggagcgcgagaagcggcgccagcgtcgcggcatcgagctcatcgcctccgagaacttcacctccttcgccgtcatggaggcgctcggctccgcgctcactaacaagtactccgagggcatgcccggcgcccgctactacggcggcaacgacgtcatcgacgagatcgagaacctctgccggtcacgcgcgctcgctgccttccaccttgacgccgcgtcctggggcgtcaacgtgcagccctactcgggctcccccgccaacttcgccgcctacaccgcgctgctcaacccgcacgaccggatcatggggctcgaccttccctccggcggacacctcactcacgggtactacacggccggcggtaagaagatctccgccacctcgatctactttgagagcctgccgtacaaggtgagcgccgcaacggggtacatcgactacgagaagctcgaggagaaggcacttgacttccgccccaagctcatcatctgcggtggcagtgcgtacccgagggactgggattacgccaggctcagggccgtcgccgacaaggtcggggccctgctgctctgcgacatggcgcacatcagcgggctcgtcgccgcgcaggaagctgcaaatccttttgaatattgtgatgtggttaccacaaccacgcacaagtccctcagagggccaagggctggcatgatcttctacaggaaaggccctaagccccccaagaagggccagcctgagggtgctgtttatgattacgaagacaagatcaactttgcagtgttcccatctctccaaggtggccctcacaaccaccagattgctgcacttgctgttgctctacagcaaactatgtcgcctggcttcaaggcctatgcaaagcaagtgaaggccaatgctgttgcaattggaaactatctcatgagcaagggctacaagatggtgactgatggaactgagaaccaccttgttctctgggatctccgcccccttggcttgactggaaacaaggtcgaaaagctatgtgatctttgccacatcacattgaacaagaatgctgtcttcggtgacagcagtgcattgtctccgggtggtgtccgcattggcgcgccagcaatgacctcgaggggtctactggagaaggatttcgagcagattggggagttcctccaccaggcagtgaccatctgcctgaacatccagaaggagtacggcaagctcctcaaggacttcaacaagggcctggtgaacaacaaggacatcgagaacctcaaggtccaggtggagaagtttgccgactccttcgacatgcctgggttcacgcttgagagcatgaaatacaaggagtagacatgcctcccatgcgcggcaaggtcctcctgtaccgatgtctttccttgtggtggcgcagggtgccatggcactgcactgccgccacacttacgatgatgatggtgggttatggattttgtctacaatgtcagcaggataggctcacaattgccccctgccctccggtttggtcgcctctcaggttttcatttggtagttgttcgcagggaaccatatgagaattgcaatgtcaatcaggtgtttgcc

SEQ ID NO: 34029 - protein, 497 aa, Zea mays subsp. mays
  peptide (1)..(497): Ceres Seq. ID no. 12374205
  misc_feature (38)..(438): Pfam Name: Pfam Description:  Serine hydroxymethyltransferase
  misc_feature (27)..(497): NCBI GI NO: 15236375 NR Description: hydroxymethyltransferase; protein id: At4g13930
  misc_feature (27)..(497): NCBI GI NO: 21592544 NR Description: hydroxymethyltransferase [Arabidopsis thaliana]
  misc_feature (27)..(497): NCBI GI NO: 11762130 NR Description: AT4g13930 [Arabidopsis thaliana]
  misc_feature (27)..(494): NCBI GI NO: 15236371 NR Description: glycine hydroxymethyltransferase - like protein
  misc_feature (4)..(486): NCBI GI NO: 18400090 NR Description: putative hydroxymethyltransferase
  misc_feature (4)..(486): NCBI GI NO: 25286207 NR Description: probable hydroxymethyltransferase, 49598-47322
  misc_feature (4)..(486): NCBI GI NO: 21537165 NR Description: putative hydroxymethyltransferase
  misc_feature (11)..(490): NCBI GI NO: 15219182 NR Description: glycine hydroxymethyltransferase, putative
  misc_feature (38)..(496): NCBI GI NO: 17066746 NR Description: serine hydroxymethyltransferase
  misc_feature (2)..(497): NCBI GI NO: 462187 NR Description: SERINE HYDROXYMETHYLTRANSFERASE
PSLRLRPRPLLASTTPVTSSRADAAAMDPVSTWGLTPLAGADPEIYDLLEREKRRQRRGIELIASENFTSFAVMEALGSALTNKYSEGMPGARYYGGNDVIDEIENLCRSRALAAFHLDAASWGVNVQPYSGSPANFAAYTALLNPHDRIMGLDLPSGGHLTHGYYTAGGKKISATSIYFESLPYKVSAATGYIDYEKLEEKALDFRPKLIICGGSAYPRDWDYARLRAVADKVGALLLCDMAHISGLVAAQEAANPFEYCDVVTTTTHKSLRGPRAGMIFYRKGPKPPKKGQPEGAVYDYEDKINFAVFPSLQGGPHNHQIAALAVALQQTMSPGFKAYAKQVKANAVAIGNYLMSKGYKMVTDGTENHLVLWDLRPLGLTGNKVEKLCDLCHITLNKNAVFGDSSALSPGGVRIGAPAMTSRGLLEKDFEQIGEFLHQAVTICLNIQKEYGKLLKDFNKGLVNNKDIENLKVQVEKFADSFDMPGFTLESMKYKE

SEQ ID NO: 34030 - protein, 471 aa, Zea mays subsp. mays
  peptide (1)..(471): Ceres Seq. ID no. 12374206
  misc_feature (12)..(412): Pfam Name: Pfam Description:  Serine hydroxymethyltransferase
  misc_feature (1)..(471): NCBI GI NO: 15236375 NR Description: hydroxymethyltransferase; protein id: At4g13930
  misc_feature (1)..(471): NCBI GI NO: 21592544 NR Description: hydroxymethyltransferase [Arabidopsis thaliana]
  misc_feature (1)..(471): NCBI GI NO: 11762130 NR Description: AT4g13930 [Arabidopsis thaliana]
  misc_feature (1)..(468): NCBI GI NO: 15236371 NR Description: glycine hydroxymethyltransferase - like protein
  misc_feature (1)..(460): NCBI GI NO: 18400090 NR Description: putative hydroxymethyltransferase
  misc_feature (1)..(460): NCBI GI NO: 25286207 NR Description: probable hydroxymethyltransferase, 49598-47322
  misc_feature (1)..(460): NCBI GI NO: 21537165 NR Description: putative hydroxymethyltransferase
  misc_feature (1)..(464): NCBI GI NO: 15219182 NR Description: glycine hydroxymethyltransferase, putative
  misc_feature (12)..(470): NCBI GI NO: 17066746 NR Description: serine hydroxymethyltransferase
  misc_feature (1)..(471): NCBI GI NO: 462187 NR Description: SERINE HYDROXYMETHYLTRANSFERASE
MDPVSTWGLTPLAGADPEIYDLLEREKRRQRRGIELIASENFTSFAVMEALGSALTNKYSEGMPGARYYGGNDVIDEIENLCRSRALAAFHLDAASWGVNVQPYSGSPANFAAYTALLNPHDRIMGLDLPSGGHLTHGYYTAGGKKISATSIYFESLPYKVSAATGYIDYEKLEEKALDFRPKLIICGGSAYPRDWDYARLRAVADKVGALLLCDMAHISGLVAAQEAANPFEYCDVVTTTTHKSLRGPRAGMIFYRKGPKPPKKGQPEGAVYDYEDKINFAVFPSLQGGPHNHQIAALAVALQQTMSPGFKAYAKQVKANAVAIGNYLMSKGYKMVTDGTENHLVLWDLRPLGLTGNKVEKLCDLCHITLNKNAVFGDSSALSPGGVRIGAPAMTSRGLLEKDFEQIGEFLHQAVTICLNIQKEYGKLLKDFNKGLVNNKDIENLKVQVEKFADSFDMPGFTLESMKYKE

SEQ ID NO: 34031 - protein, 424 aa, Zea mays subsp. mays
  peptide (1)..(424): Ceres Seq. ID no. 12374207
  misc_feature (1)..(365): Pfam Name: Pfam Description:  Serine hydroxymethyltransferase
  misc_feature (1)..(424): NCBI GI NO: 15236375 NR Description: hydroxymethyltransferase; protein id: At4g13930
  misc_feature (1)..(424): NCBI GI NO: 21592544 NR Description: hydroxymethyltransferase [Arabidopsis thaliana]
  misc_feature (1)..(424): NCBI GI NO: 11762130 NR Description: AT4g13930 [Arabidopsis thaliana]
  misc_feature (1)..(421): NCBI GI NO: 15236371 NR Description: glycine hydroxymethyltransferase - like protein
  misc_feature (1)..(413): NCBI GI NO: 18400090 NR Description: putative hydroxymethyltransferase
  misc_feature (1)..(413): NCBI GI NO: 25286207 NR Description: probable hydroxymethyltransferase, 49598-47322
  misc_feature (1)..(413): NCBI GI NO: 21537165 NR Description: putative hydroxymethyltransferase
  misc_feature (1)..(417): NCBI GI NO: 15219182 NR Description: glycine hydroxymethyltransferase, putative
  misc_feature (1)..(423): NCBI GI NO: 17066746 NR Description: serine hydroxymethyltransferase
  misc_feature (1)..(424): NCBI GI NO: 462187 NR Description: SERINE HYDROXYMETHYLTRANSFERASE
MEALGSALTNKYSEGMPGARYYGGNDVIDEIENLCRSRALAAFHLDAASWGVNVQPYSGSPANFAAYTALLNPHDRIMGLDLPSGGHLTHGYYTAGGKKISATSIYFESLPYKVSAATGYIDYEKLEEKALDFRPKLIICGGSAYPRDWDYARLRAVADKVGALLLCDMAHISGLVAAQEAANPFEYCDVVTTTTHKSLRGPRAGMIFYRKGPKPPKKGQPEGAVYDYEDKINFAVFPSLQGGPHNHQIAALAVALQQTMSPGFKAYAKQVKANAVAIGNYLMSKGYKMVTDGTENHLVLWDLRPLGLTGNKVEKLCDLCHITLNKNAVFGDSSALSPGGVRIGAPAMTSRGLLEKDFEQIGEFLHQAVTICLNIQKEYGKLLKDFNKGLVNNKDIENLKVQVEKFADSFDMPGFTLESMKYKE

SEQ ID NO: 34032 - DNA, 1381 bp, Zea mays subsp. mays
  misc_feature (1)..(1381): Ceres Seq. ID no. 12351768
aaaaaacctctaccttctatgagccaagtaaagagagaagccgataaactgtgtttcacgtcccggcgatgagcccccgtgtggtcctcctcttcctcgccgccctccgcccctgcgccgccctcgtccgccttcactccaccactttttccttcactttccttgacgccccagcgcgctttggcccccgagtgagcggcgatgggatctgcggctccctgcgtgccgctgacccggccgaggcgtgtgagaccatcaaagaccgcggcggccgccgcggcgcgggcaggaaggctttcgtgctgatcgcgaggggcaactgcagctttgaggagaaggtgcgggcggcgcagcaagcggggttcgacgcctccatcgtgtacgacgatgaggagaaggccagcctttactccatggttggtgaatctgatggcatacacatacctgcgatatttgtttccaagatggctggtgaaacactaaagaagtttgccaggggtgaagatgaagagtgctgtattaactcgtcgatggatgagactgcagggacagtgttggtaatgtcatttgtgtcacttgttgtcatcatgtcagttcttgcttcttttctatttgctcgaaactgccgacttctacgccatggagttgataatcacccaccttacgtcaagaaacaagtggtggaaaagtttccctgctcagcgtacagtgctccctgttctagtgaagataatttccaggaagcttgtgcaatttgcttagaagactacaataatggtgatatgcttagacatctcccatgcaagcatgaatttcacaagatctgtattgattcttggctcacaaaatggggcatcttctgccctatatgcaagctagaagtaacattgggcgggtaggcacacttcattactgcatccaagtgctggcagttctattgaagattgttgatcttttgatccattgcgaggttcaatattcattttaatgattgatctttgagaatgaagtacagatctcagttcctcaggttgggccttgtagtgtgctactagactactgcgttcaggttaatatttcgatcatctgtttgatatccttgtttggtgtgtggaagagctcaaggagctctgctgctgataaatgtcagcacttctgttgcagtgtattgccctgtattcctagagaaattaggtgttgtgtgcaagcaaagtgtaatcgtaagtccaatgtaaaccccttttataccaggttacgttaccttgctcattttattttgtgggcacagataaatgctcgttaattaggcaggggttgatcttactctaaaaaattgtcctaaggctcagaaataacgatgtttgaagatgcatttgttgcg

SEQ ID NO: 34033 - protein, 276 aa, Zea mays subsp. mays
  peptide (1)..(276): Ceres Seq. ID no. 12351769
  misc_feature (42)..(142): Pfam Name: Pfam Description:  PA domain
  misc_feature (1)..(269): NCBI GI NO: 22330577 NR Description: unknown protein; protein id: At1g71980
  misc_feature (9)..(272): NCBI GI NO: 15239276 NR Description: ReMembR-H2 protein JR700 (gb|AAF32325
  misc_feature (28)..(269): NCBI GI NO: 25406132 NR Description: unknown protein F17M19.13
  misc_feature (6)..(275): NCBI GI NO: 38637053 NR Description: putative ReMembR-H2 protein
  misc_feature (5)..(269): NCBI GI NO: 6942149 NR Description: ReMembR-H2 protein JR702 [Arabidopsis thaliana]
  misc_feature (17)..(275): NCBI GI NO: 19071633 NR Description: putative integral membrane protein
  misc_feature (6)..(269): NCBI GI NO: 15219930 NR Description: putative RING zinc finger protein
  misc_feature (6)..(269): NCBI GI NO: 15219670 NR Description: integral membrane protein, putative
  misc_feature (40)..(269): NCBI GI NO: 15219668 NR Description: integral membrane protein, putative
  misc_feature (6)..(269): NCBI GI NO: 25403460 NR Description: protein F15O4.19 [imported] - Arabidopsis thaliana
MSPRVVLLFLAALRPCAALVRLHSTTFSFTFLDAPARFGPRVSGDGICGSLRAADPAEACETIKDRGGRRGAGRKAFVLIARGNCSFEEKVRAAQQAGFDASIVYDDEEKASLYSMVGESDGIHIPAIFVSKMAGETLKKFARGEDEECCINSSMDETAGTVLVMSFVSLVVIMSVLASFLFARNCRLLRHGVDNHPPYVKKQVVEKFPCSAYSAPCSSEDNFQEACAICLEDYNNGDMLRHLPCKHEFHKICIDSWLTKWGIFCPICKLEVTLGG

SEQ ID NO: 34034 - protein, 161 aa, Zea mays subsp. mays
  peptide (1)..(161): Ceres Seq. ID no. 12351770
  misc_feature (112)..(153): Pfam Name: RING finger Pfam Description: Zinc finger, C3HC4 type
  misc_feature (1)..(154): NCBI GI NO: 22330577 NR Description: unknown protein; protein id: At1g71980
  misc_feature (1)..(157): NCBI GI NO: 15239276 NR Description: ReMembR-H2 protein JR700 (gb|AAF32325
  misc_feature (1)..(154): NCBI GI NO: 25406132 NR Description: unknown protein F17M19.13
  misc_feature (1)..(160): NCBI GI NO: 38637053 NR Description: putative ReMembR-H2 protein
  misc_feature (1)..(154): NCBI GI NO: 6942149 NR Description: ReMembR-H2 protein JR702 [Arabidopsis thaliana]
  misc_feature (1)..(160): NCBI GI NO: 19071633 NR Description: putative integral membrane protein
  misc_feature (1)..(154): NCBI GI NO: 15219930 NR Description: putative RING zinc finger protein
  misc_feature (1)..(154): NCBI GI NO: 15219670 NR Description: integral membrane protein, putative
  misc_feature (1)..(154): NCBI GI NO: 15219668 NR Description: integral membrane protein, putative
  misc_feature (1)..(154): NCBI GI NO: 25403460 NR Description: protein F15O4.19 [imported] - Arabidopsis thaliana
MVGESDGIHIPAIFVSKMAGETLKKFARGEDEECCINSSMDETAGTVLVMSFVSLVVIMSVLASFLFARNCRLLRHGVDNHPPYVKKQVVEKFPCSAYSAPCSSEDNFQEACAICLEDYNNGDMLRHLPCKHEFHKICIDSWLTKWGIFCPICKLEVTLGG

SEQ ID NO: 34035 - protein, 144 aa, Zea mays subsp. mays
  peptide (1)..(144): Ceres Seq. ID no. 12351771
  misc_feature (95)..(136): Pfam Name: RING finger Pfam Description: Zinc finger, C3HC4 type
  misc_feature (1)..(137): NCBI GI NO: 22330577 NR Description: unknown protein; protein id: At1g71980
  misc_feature (1)..(140): NCBI GI NO: 15239276 NR Description: ReMembR-H2 protein JR700 (gb|AAF32325
  misc_feature (1)..(137): NCBI GI NO: 25406132 NR Description: unknown protein F17M19.13
  misc_feature (1)..(143): NCBI GI NO: 38637053 NR Description: putative ReMembR-H2 protein
  misc_feature (1)..(137): NCBI GI NO: 6942149 NR Description: ReMembR-H2 protein JR702 [Arabidopsis thaliana]
  misc_feature (1)..(143): NCBI GI NO: 19071633 NR Description: putative integral membrane protein
  misc_feature (1)..(137): NCBI GI NO: 15219930 NR Description: putative RING zinc finger protein
  misc_feature (1)..(137): NCBI GI NO: 15219670 NR Description: integral membrane protein, putative
  misc_feature (1)..(137): NCBI GI NO: 15219668 NR Description: integral membrane protein, putative
  misc_feature (1)..(137): NCBI GI NO: 25403460 NR Description: protein F15O4.19 [imported] - Arabidopsis thaliana
MAGETLKKFARGEDEECCINSSMDETAGTVLVMSFVSLVVIMSVLASFLFARNCRLLRHGVDNHPPYVKKQVVEKFPCSAYSAPCSSEDNFQEACAICLEDYNNGDMLRHLPCKHEFHKICIDSWLTKWGIFCPICKLEVTLGG

SEQ ID NO: 34036 - DNA, 1362 bp, Zea mays subsp. mays
  misc_feature (1)..(1362): Ceres Seq. ID no. 12342370
ctacctttcatatactaccagggtgaacatttctgaagaggatgttttatattggaattccaaaggttttcttccatcactaagcatagatcaaatccgcgatgtagcacgtgtatttgtaaatgggaagcttgcaggtagtaaagttggtcattgggtctcactgaatcaaccgcttcaattagttcaaggacttaatgagttgacattgttatcggagattgttggcttgcagaactatggtgctttcttggagaaggatggtgctggatttagaggtcaagtaaaactcactggcttgtcgaatggggatatcgaccttactaattctctttggacatatcagattggtttgaaaggtgagttttcaaggatctattctcctgagtatcaaggatctgctgagtggagtagcatgcagaatgatgacacagtttcacccttcacatggttcaagactatgtttgatgctccagaaggtaatggccctgttgccattgatcttgggagcatgggaaagggccaggcttgggtgaatgggcatctcattgggcgctattggtcactagttgcgccagagtccgggtgtccatcgtcatgcaactacgcaggaacatacagtgatagcaagtgccgatcgaactgtggaatcgctacacaaagctggtaccacataccacgcgaatggttgcaagagtcaggcaatttattggtactcttcgaggaaacagggggagacccatctcagatatcgctggaggttcattacaccaagacaatctgctcaaaaatatctgagacttactatcctcccctttctgcctggtcacgtgccgccaacggtcgcccctcagtaaatacggtagcaccagagcttcgcttgcagtgcgatgacgggcatgtgatctcgaagattacatttgcgagttacgggacccctacaggaggttgccagaacttctctgtagggaattgccatgcatcgactactctagacttggtggtagaggcctgcgaaggcaagaacagatgcgcgatcagtgttaccaacgaagtattcggagatccatgccgcaaagtcgtcaaggatttggcagttgaagccgagtgctccccgccatcggttaaccaagaacctcgatacgatatatgatcacggtactgtattgtggtgctcaggtcttggaagagctatggtggacgttgccgcagctttgcagggccgtgcacaatggtcctgcatcgttgtctcctatacctctgcacccatattgtatgtaaacagtgacctacatgtaaaaactaaagaagaggagggattgaaaagaaatgagatggaaaaagaataaagttgcttttgct

SEQ ID NO: 34037 - protein, 383 aa, Zea mays subsp. mays
  peptide (1)..(383): Ceres Seq. ID no. 12342371
  misc_feature (1)..(253): Pfam Name: Pfam Description:  Glycosyl hydrolases family 35
  misc_feature (1)..(373): NCBI GI NO: 7939617 NR Description: beta-galactosidase [Lycopersicon esculentum]
  misc_feature (1)..(372): NCBI GI NO: 7488064 NR Description: probable beta-galactosidase (EC 3
  misc_feature (1)..(372): NCBI GI NO: 14517399 NR Description: At2g32810/F24L7.5 [Arabidopsis thaliana]
  misc_feature (1)..(372): NCBI GI NO: 18403090 NR Description: glycosyl hydrolase family 35
  misc_feature (22)..(370): NCBI GI NO: 14970841 NR Description: beta-galactosidase [Fragaria x ananassa]
  misc_feature (1)..(371): NCBI GI NO: 6686888 NR Description: putative beta-galactosidase [Arabidopsis thaliana]
  misc_feature (1)..(371): NCBI GI NO: 25326167 NR Description: probable beta-galactosidase
  misc_feature (1)..(371): NCBI GI NO: 30683905 NR Description: glycosyl hydrolase family 35 (beta-galactosidase)
  misc_feature (1)..(371): NCBI GI NO: 7939623 NR Description: putative beta-galactosidase
  misc_feature (1)..(372): NCBI GI NO: 18419821 NR Description: glycosyl hydrolase family 35
YLSYTTRVNISEEDVLYWNSKGFLPSLSIDQIRDVARVFVNGKLAGSKVGHWVSLNQPLQLVQGLNELTLLSEIVGLQNYGAFLEKDGAGFRGQVKLTGLSNGDIDLTNSLWTYQIGLKGEFSRIYSPEYQGSAEWSSMQNDDTVSPFTWFKTMFDAPEGNGPVAIDLGSMGKGQAWVNGHLIGRYWSLVAPESGCPSSCNYAGTYSDSKCRSNCGIATQSWYHIPREWLQESGNLLVLFEETGGDPSQISLEVHYTKTICSKISETYYPPLSAWSRAANGRPSVNTVAPELRLQCDDGHVISKITFASYGTPTGGCQNFSVGNCHASTTLDLVVEACEGKNRCAISVTNEVFGDPCRKVVKDLAVEAECSPPSVNQEPRYDI

SEQ ID NO: 34038 - protein, 245 aa, Zea mays subsp. mays
  peptide (1)..(245): Ceres Seq. ID no. 12342372
  misc_feature (1)..(115): Pfam Name: Pfam Description:  Glycosyl hydrolases family 35
  misc_feature (1)..(235): NCBI GI NO: 7939617 NR Description: beta-galactosidase [Lycopersicon esculentum]
  misc_feature (1)..(234): NCBI GI NO: 7488064 NR Description: probable beta-galactosidase (EC 3
  misc_feature (1)..(234): NCBI GI NO: 18403090 NR Description: glycosyl hydrolase family 35
  misc_feature (1)..(234): NCBI GI NO: 14517399 NR Description: At2g32810/F24L7.5 [Arabidopsis thaliana]
  misc_feature (1)..(232): NCBI GI NO: 14970841 NR Description: beta-galactosidase [Fragaria x ananassa]
  misc_feature (1)..(233): NCBI GI NO: 6686888 NR Description: putative beta-galactosidase [Arabidopsis thaliana]
  misc_feature (1)..(233): NCBI GI NO: 30683905 NR Description: glycosyl hydrolase family 35 (beta-galactosidase)
  misc_feature (1)..(233): NCBI GI NO: 25326167 NR Description: probable beta-galactosidase
  misc_feature (1)..(233): NCBI GI NO: 7939623 NR Description: putative beta-galactosidase
  misc_feature (1)..(234): NCBI GI NO: 18419821 NR Description: glycosyl hydrolase family 35
MQNDDTVSPFTWFKTMFDAPEGNGPVAIDLGSMGKGQAWVNGHLIGRYWSLVAPESGCPSSCNYAGTYSDSKCRSNCGIATQSWYHIPREWLQESGNLLVLFEETGGDPSQISLEVHYTKTICSKISETYYPPLSAWSRAANGRPSVNTVAPELRLQCDDGHVISKITFASYGTPTGGCQNFSVGNCHASTTLDLVVEACEGKNRCAISVTNEVFGDPCRKVVKDLAVEAECSPPSVNQEPRYDI

SEQ ID NO: 34039 - protein, 230 aa, Zea mays subsp. mays
  peptide (1)..(230): Ceres Seq. ID no. 12342373
  misc_feature (1)..(100): Pfam Name: Pfam Description:  Glycosyl hydrolases family 35
  misc_feature (1)..(220): NCBI GI NO: 7939617 NR Description: beta-galactosidase [Lycopersicon esculentum]
  misc_feature (1)..(219): NCBI GI NO: 7488064 NR Description: probable beta-galactosidase (EC 3
  misc_feature (1)..(219): NCBI GI NO: 18403090 NR Description: glycosyl hydrolase family 35
  misc_feature (1)..(219): NCBI GI NO: 14517399 NR Description: At2g32810/F24L7.5 [Arabidopsis thaliana]
  misc_feature (1)..(217): NCBI GI NO: 14970841 NR Description: beta-galactosidase [Fragaria x ananassa]
  misc_feature (1)..(218): NCBI GI NO: 6686888 NR Description: putative beta-galactosidase [Arabidopsis thaliana]
  misc_feature (1)..(218): NCBI GI NO: 25326167 NR Description: probable beta-galactosidase
  misc_feature (1)..(218): NCBI GI NO: 30683905 NR Description: glycosyl hydrolase family 35 (beta-galactosidase)
  misc_feature (1)..(218): NCBI GI NO: 7939623 NR Description: putative beta-galactosidase
  misc_feature (1)..(219): NCBI GI NO: 18419821 NR Description: glycosyl hydrolase family 35
MFDAPEGNGPVAIDLGSMGKGQAWVNGHLIGRYWSLVAPESGCPSSCNYAGTYSDSKCRSNCGIATQSWYHIPREWLQESGNLLVLFEETGGDPSQISLEVHYTKTICSKISETYYPPLSAWSRAANGRPSVNTVAPELRLQCDDGHVISKITFASYGTPTGGCQNFSVGNCHASTTLDLVVEACEGKNRCAISVTNEVFGDPCRKVVKDLAVEAECSPPSVNQEPRYDI

SEQ ID NO: 34040 - DNA, 2068 bp, Zea mays subsp. mays
  misc_feature (1)..(2068): Ceres Seq. ID no. 12342374
aacaatccagttctcctttcgccggaatctgtccctcctccccctcctccccgcctctgcgggtactggaccaccgtggagcgggcattcatccaggctaggtccattccttcctttgctcgtaagtgaccctgatttttgctctacgagtttgtttcgtgctccattgaatctaaatcccactccgcatttgcggattcatgccctactactattacaacccctttcatccatccattcctcgactaggttctcttctccatcgcggaagctccacccgagttgacgccagaagagaatcggtgccctagggtgttctcgcagaattattttccagaagatttgcagatcgagtcgaaccctatgccccacgttaagcctgccgccggcctgcccccttaccaccaccgggcgctccctggccccgggcagggtccagttcccacgggacatgggatgatgcaccgggaggtccgtgatcagtacgggcccgctggggccgaggatgcacctaccaccgctggggcacgggcccgctccgttcccctacgacatgctgcctccgctgcccccaccggaggtcctggagcagaagcttgtggcacagcacggggagatgcagaagctggttatagagaacggccggcttgctgcaagccacgcctcgctgaggaaagagctagccgcggcgcagcaggagctgcagaggctgcaggcgcagggggaggccgcgaaagccgctgaggaggaggagatgaggggcctccttgacaaggttgggaagatggaggccgacctgaaggcccgtgagtccgtgaaggtggagctgcagcaggctcatgctgaggcgcagagccttgtggccatgaggcagaacatggtggcagacgtgcagaagctgagcaaggacctgcagaggaacctcggtgaggcacagcagctccccgcgctcttggctgaacgggatgttgcaaggcaagaaaatcagcatctcaggagtacttatgattacgaaaggaaactcagggtggatcactctgaatctttgcagacgatgaagaggaattatgactccatggttacggagcttgaaaaacttcgtgctgagttgagggacacatctaatcttgacaaaagtggttttttctacaatagcaccacccaaaaggccgatggtatatctagccatctttctgttggacaaattgcttatgatactggctatggaagtacacaggcaagggcaactcctaccggtctggcagacttaagtggagtccctggaggcgctggccttcgttctggattcgacccatcaagaggcaatgcatacgatggctctcatgttgccaatttcagctcttcaaaaactaggacccatgatgcatcaaggggtgccactggctttgactctctcaagggttctgggtatgatgcttcaaaggcgcatgtaactggacaggcgtcagctacagcggctcatgggggcattgctggttactacgggtccaatcaggcagcacatgcgtggggacaatctgcatcgccctacggatctgtacaggtgccaccatcctacgcatctgggtcaaacacatcctatggcgcagcagcagcagcagcagtgcgtccctatggttcagctcaggcgcaaccatcatatggacaaacgcaggcaccatctgcgtatgggcacacacagctaccatcatcctacagtctagcacaggcgcagtctcccttcaccgctgcgcaggggtcctcgccctatgggttggctgcgcagcctccagcctatggatctgggcgagcaggctccaatgctggcagttacgaagctcctcaaggacgtaaataagttcgcgccaaatttgcatacttggccacttgcgaaagagagctttgttacaccgagtccaaatcctttctgttgctacttaaaccttgtttaactgtgatgtcagaggaacctgttacagccgataaaacgattctctgtaaacgtattatcgtgaccgatgatgccgatgcatttttttgttcagtagagtaggccatttgggaacgc

SEQ ID NO: 34041 - protein, 450 aa, Zea mays subsp. mays
  peptide (1)..(450): Ceres Seq. ID no. 12342375
  misc_feature (69)..(450): NCBI GI NO: 5441873 NR Description: hypothetical protein
  misc_feature (1)..(401): NCBI GI NO: 5441873 NR Description: hypothetical protein
  misc_feature (1)..(241): NCBI GI NO: 25404669 NR Description: hypothetical protein F5A8.8
  misc_feature (1)..(241): NCBI GI NO: 30697468 NR Description: expressed protein [Arabidopsis thaliana]
  misc_feature (25)..(395): NCBI GI NO: 38605778 NR Description: OSJNBa0044K18.21
  misc_feature (1)..(245): NCBI GI NO: 9294396 NR Description: gb|AAD10662
  misc_feature (1)..(245): NCBI GI NO: 18400511 NR Description: expressed protein; protein id: At3g14750
  misc_feature (1)..(291): NCBI GI NO: 28876008 NR Description: hypothetical protein
  misc_feature (1)..(212): NCBI GI NO: 33146484 NR Description: myosin-like protein
  misc_feature (9)..(246): NCBI GI NO: 38175471 NR Description: myosin-like protein
MHLPPLGHGPAPFPYDMLPPLPPPEVLEQKLVAQHGEMQKLVIENGRLAASHASLRKELAAAQQELQRLQAQGEAAKAAEEEEMRGLLDKVGKMEADLKARESVKVELQQAHAEAQSLVAMRQNMVADVQKLSKDLQRNLGEAQQLPALLAERDVARQENQHLRSTYDYERKLRVDHSESLQTMKRNYDSMVTELEKLRAELRDTSNLDKSGFFYNSTTQKADGISSHLSVGQIAYDTGYGSTQARATPTGLADLSGVPGGAGLRSGFDPSRGNAYDGSHVANFSSSKTRTHDASRGATGFDSLKGSGYDASKAHVTGQASATAAHGGIAGYYGSNQAAHAWGQSASPYGSVQVPPSYASGSNTSYGAAAAAAVRPYGSAQAQPSYGQTQAPSAYGHTQLPSSYSLAQAQSPFTAAQGSSPYGLAAQPPAYGSGRAGSNAGSYEAPQGRK

SEQ ID NO: 34042 - protein, 434 aa, Zea mays subsp. mays
  peptide (1)..(434): Ceres Seq. ID no. 12342376
  misc_feature (53)..(434): NCBI GI NO: 5441873 NR Description: hypothetical protein
  misc_feature (1)..(385): NCBI GI NO: 5441873 NR Description: hypothetical protein
  misc_feature (1)..(225): NCBI GI NO: 25404669 NR Description: hypothetical protein F5A8.8
  misc_feature (1)..(225): NCBI GI NO: 30697468 NR Description: expressed protein [Arabidopsis thaliana]
  misc_feature (9)..(379): NCBI GI NO: 38605778 NR Description: OSJNBa0044K18.21
  misc_feature (1)..(229): NCBI GI NO: 9294396 NR Description: gb|AAD10662
  misc_feature (1)..(229): NCBI GI NO: 18400511 NR Description: expressed protein; protein id: At3g14750
  misc_feature (1)..(275): NCBI GI NO: 28876008 NR Description: hypothetical protein
  misc_feature (1)..(196): NCBI GI NO: 33146484 NR Description: myosin-like protein
  misc_feature (1)..(230): NCBI GI NO: 38175471 NR Description: myosin-like protein
MLPPLPPPEVLEQKLVAQHGEMQKLVIENGRLAASHASLRKELAAAQQELQRLQAQGEAAKAAEEEEMRGLLDKVGKMEADLKARESVKVELQQAHAEAQSLVAMRQNMVADVQKLSKDLQRNLGEAQQLPALLAERDVARQENQHLRSTYDYERKLRVDHSESLQTMKRNYDSMVTELEKLRAELRDTSNLDKSGFFYNSTTQKADGISSHLSVGQIAYDTGYGSTQARATPTGLADLSGVPGGAGLRSGFDPSRGNAYDGSHVANFSSSKTRTHDASRGATGFDSLKGSGYDASKAHVTGQASATAAHGGIAGYYGSNQAAHAWGQSASPYGSVQVPPSYASGSNTSYGAAAAAAVRPYGSAQAQPSYGQTQAPSAYGHTQLPSSYSLAQAQSPFTAAQGSSPYGLAAQPPAYGSGRAGSNAGSYEAPQGRK

SEQ ID NO: 34043 - protein, 413 aa, Zea mays subsp. mays
  peptide (1)..(413): Ceres Seq. ID no. 12342377
  misc_feature (32)..(413): NCBI GI NO: 5441873 NR Description: hypothetical protein
  misc_feature (1)..(364): NCBI GI NO: 5441873 NR Description: hypothetical protein
  misc_feature (1)..(204): NCBI GI NO: 25404669 NR Description: hypothetical protein F5A8.8
  misc_feature (1)..(204): NCBI GI NO: 30697468 NR Description: expressed protein [Arabidopsis thaliana]
  misc_feature (1)..(358): NCBI GI NO: 38605778 NR Description: OSJNBa0044K18.21
  misc_feature (1)..(208): NCBI GI NO: 9294396 NR Description: gb|AAD10662
  misc_feature (1)..(208): NCBI GI NO: 18400511 NR Description: expressed protein; protein id: At3g14750
  misc_feature (1)..(254): NCBI GI NO: 28876008 NR Description: hypothetical protein
  misc_feature (1)..(175): NCBI GI NO: 33146484 NR Description: myosin-like protein
  misc_feature (1)..(209): NCBI GI NO: 38175471 NR Description: myosin-like protein
MQKLVIENGRLAASHASLRKELAAAQQELQRLQAQGEAAKAAEEEEMRGLLDKVGKMEADLKARESVKVELQQAHAEAQSLVAMRQNMVADVQKLSKDLQRNLGEAQQLPALLAERDVARQENQHLRSTYDYERKLRVDHSESLQTMKRNYDSMVTELEKLRAELRDTSNLDKSGFFYNSTTQKADGISSHLSVGQIAYDTGYGSTQARATPTGLADLSGVPGGAGLRSGFDPSRGNAYDGSHVANFSSSKTRTHDASRGATGFDSLKGSGYDASKAHVTGQASATAAHGGIAGYYGSNQAAHAWGQSASPYGSVQVPPSYASGSNTSYGAAAAAAVRPYGSAQAQPSYGQTQAPSAYGHTQLPSSYSLAQAQSPFTAAQGSSPYGLAAQPPAYGSGRAGSNAGSYEAPQGRK

SEQ ID NO: 34044 - DNA, 1288 bp, Zea mays subsp. mays
  misc_feature (1)..(1288): Ceres Seq. ID no. 12353469
agccgcacaatccatccatccatctattctccagtccacccattccattccactaccgacgcccagaattcacgcgaacgcacacgcacccacacgacacatccagatgatgcttagggtttccccgtccccggccgccgcggtgccaacccagctctccggtgcgcccgcgacccctgctcccgtcgtcagggtggcggcgccgcgcggagtcgcctcgccgtccgctggcgccgcgtgcagggccgcgggcaaggggaaggaggtgctcagcggggtggtgttccagcccttcgaggagatcaagggggagctcgccctcgtgccccagtccccagacaagtcgctcgcgcgccacaagttcgtcgatgactgcgaggccgcactcaacgagcagatcaacgtggagtacaacgcctcgtatgcataccactccctcttcgcctatttcgaccgcgacaacgtggctctcaaaggatttgccaagttcttcaaggaatccagcgacgaggagagggagcacgctgaaaagctcatggagtaccagaacaaacgtggaggcagggtgaggctccaatcgattgtgacgcctttaaccgagtttgaccaccctgagaaaggagatgctctgtacgctatggagctggctctggccctggaaaagctggtcaatgaaaagctgcacaacctgcatggtgtggcaacaaggtgcaatgatcctcagctgacagacttcatcgagagtgagttcctcgaggagcagggtgaagccataaacaagatctccaagtatgtcgcccagctgaggagagtgggcaaggggcacggggtgtggcacttcgatcagatgctgcttgaggaagaggcctaaaaagaaggaacggacagatgaatgaaggaaacaagtgtgtaatgttgatcaggcggaggaataatgggtcaactgacaactctgggtcggtggatttgtagttggtttgggttttttagttgtagaacggtgttgcccccctcctagagagggatgaacacattatgcatgcgatgtgtcagttcggtcggtgctatgctcgttgggatttgattgtcggaaataaaacatgggtgatgaatgtgtaccctccctaatctatgtcttggtgatgaagttgagaaagctgcgggtgttgtaggtggatttgtagagttttttcttcagttggttaggttcgctgttgcctacctcatttgcccctcatcatcgccgtaatttatttatttataatataaaagatccagattttccccc

SEQ ID NO: 34045 - protein, 289 aa, Zea mays subsp. mays
  peptide (1)..(289): Ceres Seq. ID no. 12353470
  misc_feature (5)..(289): NCBI GI NO: 82687 NR Description: ferritin 1 precursor
  misc_feature (36)..(289): NCBI GI NO: 29840836 NR Description: Ferritin 1, chloroplast precursor (ZmFer1)
  misc_feature (36)..(289): NCBI GI NO: 1103628 NR Description: ferritin [Zea mays]
  misc_feature (6)..(289): NCBI GI NO: 82688 NR Description: ferritin 2 precursor (clone FM2) - maize
  misc_feature (36)..(289): NCBI GI NO: 29840837 NR Description: Ferritin 2, chloroplast precursor (ZmFer2)
  misc_feature (36)..(289): NCBI GI NO: 1103630 NR Description: ferritin [Zea mays]
  misc_feature (39)..(289): NCBI GI NO: 21686526 NR Description: ferritin [Oryza sativa (japonica cultivar-group)]
  misc_feature (39)..(289): NCBI GI NO: 21686528 NR Description: ferritin [Oryza sativa (japonica cultivar-group)]
  misc_feature (39)..(289): NCBI GI NO: 14091661 NR Description: ferritin [Oryza sativa]
  misc_feature (80)..(288): NCBI GI NO: 29839387 NR Description: Ferritin 3, chloroplast precursor (SFerH-3)
AAQSIHPSILQSTHSIPLPTPRIHANAHAPTRHIQMMLRVSPSPAAAVPTQLSGAPATPAPVVRVAAPRGVASPSAGAACRAAGKGKEVLSGVVFQPFEEIKGELALVPQSPDKSLARHKFVDDCEAALNEQINVEYNASYAYHSLFAYFDRDNVALKGFAKFFKESSDEEREHAEKLMEYQNKRGGRVRLQSIVTPLTEFDHPEKGDALYAMELALALEKLVNEKLHNLHGVATRCNDPQLTDFIESEFLEEQGEAINKISKYVAQLRRVGKGHGVWHFDQMLLEEEA

SEQ ID NO: 34046 - protein, 254 aa, Zea mays subsp. mays
  peptide (1)..(254): Ceres Seq. ID no. 12353471
  misc_feature (1)..(254): NCBI GI NO: 82687 NR Description: ferritin 1 precursor
  misc_feature (1)..(254): NCBI GI NO: 29840836 NR Description: Ferritin 1, chloroplast precursor (ZmFer1)
  misc_feature (1)..(254): NCBI GI NO: 1103628 NR Description: ferritin [Zea mays]
  misc_feature (1)..(254): NCBI GI NO: 82688 NR Description: ferritin 2 precursor (clone FM2) - maize
  misc_feature (1)..(254): NCBI GI NO: 29840837 NR Description: Ferritin 2, chloroplast precursor (ZmFer2)
  misc_feature (1)..(254): NCBI GI NO: 1103630 NR Description: ferritin [Zea mays]
  misc_feature (4)..(254): NCBI GI NO: 21686526 NR Description: ferritin [Oryza sativa (japonica cultivar-group)]
  misc_feature (4)..(254): NCBI GI NO: 21686528 NR Description: ferritin [Oryza sativa (japonica cultivar-group)]
  misc_feature (4)..(254): NCBI GI NO: 14091661 NR Description: ferritin [Oryza sativa]
  misc_feature (45)..(253): NCBI GI NO: 29839387 NR Description: Ferritin 3, chloroplast precursor (SFerH-3)
MMLRVSPSPAAAVPTQLSGAPATPAPVVRVAAPRGVASPSAGAACRAAGKGKEVLSGVVFQPFEEIKGELALVPQSPDKSLARHKFVDDCEAALNEQINVEYNASYAYHSLFAYFDRDNVALKGFAKFFKESSDEEREHAEKLMEYQNKRGGRVRLQSIVTPLTEFDHPEKGDALYAMELALALEKLVNEKLHNLHGVATRCNDPQLTDFIESEFLEEQGEAINKISKYVAQLRRVGKGHGVWHFDQMLLEEEA

SEQ ID NO: 34047 - protein, 253 aa, Zea mays subsp. mays
  peptide (1)..(253): Ceres Seq. ID no. 12353472
  misc_feature (1)..(253): NCBI GI NO: 82687 NR Description: ferritin 1 precursor
  misc_feature (1)..(253): NCBI GI NO: 29840836 NR Description: Ferritin 1, chloroplast precursor (ZmFer1)
  misc_feature (1)..(253): NCBI GI NO: 1103628 NR Description: ferritin [Zea mays]
  misc_feature (1)..(253): NCBI GI NO: 82688 NR Description: ferritin 2 precursor (clone FM2) - maize
  misc_feature (1)..(253): NCBI GI NO: 29840837 NR Description: Ferritin 2, chloroplast precursor (ZmFer2)
  misc_feature (1)..(253): NCBI GI NO: 1103630 NR Description: ferritin [Zea mays]
  misc_feature (3)..(253): NCBI GI NO: 21686526 NR Description: ferritin [Oryza sativa (japonica cultivar-group)]
  misc_feature (3)..(253): NCBI GI NO: 21686528 NR Description: ferritin [Oryza sativa (japonica cultivar-group)]
  misc_feature (3)..(253): NCBI GI NO: 14091661 NR Description: ferritin [Oryza sativa]
  misc_feature (44)..(252): NCBI GI NO: 29839387 NR Description: Ferritin 3, chloroplast precursor (SFerH-3)
MLRVSPSPAAAVPTQLSGAPATPAPVVRVAAPRGVASPSAGAACRAAGKGKEVLSGVVFQPFEEIKGELALVPQSPDKSLARHKFVDDCEAALNEQINVEYNASYAYHSLFAYFDRDNVALKGFAKFFKESSDEEREHAEKLMEYQNKRGGRVRLQSIVTPLTEFDHPEKGDALYAMELALALEKLVNEKLHNLHGVATRCNDPQLTDFIESEFLEEQGEAINKISKYVAQLRRVGKGHGVWHFDQMLLEEEA

SEQ ID NO: 34048 - DNA, 3391 bp, Zea mays subsp. mays
  misc_feature (1)..(3391): Ceres Seq. ID no. 12359662
aatcattcccctctgcagccgccggccctcagcaagcaagcaagggacagacgcggcggggatgggcagcggggtccgggcgctgatgcgccggaagcaggtagactccgagcggacgcgcgccgccggcagcgcccaccagctccgcaaggagctctccgtcacccagctcgtcgccatcggtgttgggtcgacgattggagctggcgtctacgtccttgttggcacagttgcgcgggagcattccgggccggcattgacgctttcatttctgatagccggaatagcagctgcgctttcagccttctgctatgcggagctggctagccgttgcccttcggcaggaagcgcctatcattattcgtacatctgcgttggcgaaggagttgcatggttgattggctgggctttgatacttgaatacacgattggtggatcagccgttgcccgtggcatttctcctaatctagccttattttttggaggacaggatagtctgccatggattttagcacgacatgagatcccatggcttgatgtcgttgtagatccttgtgcttctttcctcgttttcgtcgtcactggccttctctgtgtggggataaaagagagttcatttgtgcaaggagttgtgacggtcttaaattgctttgtgatgttatttgttatcatagccggtagctacatcggcttccaaacaggatgggttggctacaaggttgctggcggatttttcccttatggagcgaatggaatgcttgccgggtcagcaactgtcttcttcgcctacataggatttgattcagttgccagcacggctgaggaggtgaaaaatccacaacgagatctgccactgggaatcggaacagcattgtcgatttgctgttccttgtacatgttggtttcagttgttattgttggtctggtaccatactttgctatggacccagacacccctatttcatctgcttttgccaaacatgggatgcactgggcaatgtatcttgtaacaactggtgctgttcttgctctctgctcaaccttgatgggatctatattgccacagccaagaatattgatggccatggcacgagatggcctgctaccatcattcttctctgatgtccataagacgacacaagttccagtcaaaagcacagtagtgactggcatctgtgcagctgctcttgctttcttcatggatgtctctcaactggctggaatggttagtgtaggcacgctactcgcgttcactatagttgctgtgtccatcttgattcttagatacgttcctccagatgaggtacccctcccatcttccctgcaagcatcattccgcttgagccaagaaaatgacgaggaaaagctgaggggtacccttggagatgatgatcatgagcaaggctcagctgaaataagtgatgttgtagtaaaaccaatcactgaccccctgatcgagaagcagctatacgcaagcaatttgagtgaggcaaaacggcgtaagaccgcggcatgcagcatcacatctgtttgcataggggttctgatcctcacgacgtcagcctcggcaacattcttgcccttcccggtgagatgctccgtttgtgttttgggtggcatgctcctcctagctggtctgggcatgctctgctggattgaccaagatgatgggaggcactcctttggccactccggaggattcatctgtccgtttgttcccttgctgccggtaatgtgtatcctcataaatacatacttgttaataaatcttggtggcggcacgtggatgcgagtgggggtgtggctagtgatgggggtgttcgtctacattttctatggccgcacccacagctcgttgacggatgtcgtgtatgtccctgtggccgaggcgaatgagatatacgggtcatcctcttcgttagggtttgtggcgtaaagagagatggaaggagatgtttgttgaagcctatcttgagccagtcatggtacttctcacaaaaacctcaaagatcctgactggagcaggtacctgcttgagctattgtgttgcaggcatgggtttgaagaattcttcgacgttctgcacaagcttgttttcgtcatcttcgacaacagagccatgccgtcaaatgggcactttacctttcctgcctcacccccctaagtgtgagcagcaggtttcagctggtcactcatcgagctcctctctgcttttaagtggtgataccggtttagatgtggctgaacagtcagatgatctgaacgacttgctcaatctttcgggagatgcttctgatggcagcttccatggagaaaacaatgccttagcttttgacgaacagatggaatttcagttcctgtctgagcagctagaaattgccatcactgacaatgagaagaatcctcatttagatgacatatacggcacaccaccacagctgtcatcacttccagtatcatcttgctccaatcagaatctagggtcaccagttaaagtccagcttagctcatctcagtcatcttctagctctgcaacagctaacaagtcaagattgaggtggacacttgagcttcatgagcgttttgtggaggccgtgaaaaagcttgaaggtcctgaaaaagcaactcccaaaggtgtgctgaaactaatgaaggtagaaggtctaacaatttatcatgtgaagagccatctgcagaagtatcggcttgcaaaatatattcctgagcctaaagacgataagaaggcttcctcggaggataaaaaagcacaattaggaaagggcagcattgattcaagcaaaaacaagaatttacaagtggcagaagctctaaggatgcaaatagaggttcagaaacagcttcatgaacaattagaggtgcaaaggcagttgcagctacggatagaggaacatgcaagatacttgcagaaaatactagaagagcagcagaaggccggcaatgtgccactaaaagctccaaccaaagcacaagcaacaaagtcgtcacctgaatcgacgtcagacgagagaactgaatccgaggtagacaccatttctccgcggccacccaagaacaggaacccgggtgtagacgcagaatgcaaatcgccgggaaggatcaagcgaacgaaggttcaggctgatcttgaaaacgagggcctgtgttcatagcgagggctcatgttcgtagctgtgcgggctcgccagtgattttctgaacatttgcacttcccgttttagttcaggagctatttgttactgtttgtaacttgaacagccgtagtatctccagcgatctgttgatatcttggcgtgaattggacttgacatcttagccattgtattatatagtaattcgcctttggaatggaaatggaataggtttatgtttg

SEQ ID NO: 34049 - protein, 644 aa, Zea mays subsp. mays
  peptide (1)..(644): Ceres Seq. ID no. 12359663
  misc_feature (20)..(644): NCBI GI NO: 29244640 NR Description: putative cationic amino acid transporter
  misc_feature (25)..(634): NCBI GI NO: 30696198 NR Description: expressed protein [Arabidopsis thaliana]
  misc_feature (25)..(634): NCBI GI NO: 23306414 NR Description: Unknown protein [Arabidopsis thaliana]
  misc_feature (21)..(637): NCBI GI NO: 30693001 NR Description: cationic amino acid transporter -related protein
  misc_feature (21)..(637): NCBI GI NO: 10178213 NR Description: cationic amino acid transporter-like protein
  misc_feature (25)..(626): NCBI GI NO: 22330822 NR Description: putative cationic amino acid transporter
  misc_feature (25)..(626): NCBI GI NO: 6006869 NR Description: putative cationic amino acid transporter
  misc_feature (62)..(630): NCBI GI NO: 37534696 NR Description: putative cationic amino acid transporter -likeprotein
  misc_feature (183)..(617): NCBI GI NO: 6981556 NR Description: solute carrier family 7 member A1
  misc_feature (183)..(617): NCBI GI NO: 18181964 NR Description: ecotropic retrovirus receptor [Rattus norvegicus]
IIPLCSRRPSASKQGTDAAGMGSGVRALMRRKQVDSERTRAAGSAHQLRKELSVTQLVAIGVGSTIGAGVYVLVGTVAREHSGPALTLSFLIAGIAAALSAFCYAELASRCPSAGSAYHYSYICVGEGVAWLIGWALILEYTIGGSAVARGISPNLALFFGGQDSLPWILARHEIPWLDVVVDPCASFLVFVVTGLLCVGIKESSFVQGVVTVLNCFVMLFVIIAGSYIGFQTGWVGYKVAGGFFPYGANGMLAGSATVFFAYIGFDSVASTAEEVKNPQRDLPLGIGTALSICCSLYMLVSVVIVGLVPYFAMDPDTPISSAFAKHGMHWAMYLVTTGAVLALCSTLMGSILPQPRILMAMARDGLLPSFFSDVHKTTQVPVKSTVVTGICAAALAFFMDVSQLAGMVSVGTLLAFTIVAVSILILRYVPPDEVPLPSSLQASFRLSQENDEEKLRGTLGDDDHEQGSAEISDVVVKPITDPLIEKQLYASNLSEAKRRKTAACSITSVCIGVLILTTSASATFLPFPVRCSVCVLGGMLLLAGLGMLCWIDQDDGRHSFGHSGGFICPFVPLLPVMCILINTYLLINLGGGTWMRVGVWLVMGVFVYIFYGRTHSSLTDVVYVPVAEANEIYGSSSSLGFVA

SEQ ID NO: 34050 - protein, 624 aa, Zea mays subsp. mays
  peptide (1)..(624): Ceres Seq. ID no. 12359664
  misc_feature (1)..(624): NCBI GI NO: 29244640 NR Description: putative cationic amino acid transporter
  misc_feature (5)..(614): NCBI GI NO: 30696198 NR Description: expressed protein [Arabidopsis thaliana]
  misc_feature (5)..(614): NCBI GI NO: 23306414 NR Description: Unknown protein [Arabidopsis thaliana]
  misc_feature (1)..(617): NCBI GI NO: 30693001 NR Description: cationic amino acid transporter -related protein
  misc_feature (1)..(617): NCBI GI NO: 10178213 NR Description: cationic amino acid transporter-like protein
  misc_feature (5)..(606): NCBI GI NO: 22330822 NR Description: putative cationic amino acid transporter
  misc_feature (5)..(606): NCBI GI NO: 6006869 NR Description: putative cationic amino acid transporter
  misc_feature (42)..(610): NCBI GI NO: 37534696 NR Description: putative cationic amino acid transporter -likeprotein
  misc_feature (163)..(597): NCBI GI NO: 6981556 NR Description: solute carrier family 7 member A1
  misc_feature (163)..(597): NCBI GI NO: 18181964 NR Description: ecotropic retrovirus receptor [Rattus norvegicus]
MGSGVRALMRRKQVDSERTRAAGSAHQLRKELSVTQLVAIGVGSTIGAGVYVLVGTVAREHSGPALTLSFLIAGIAAALSAFCYAELASRCPSAGSAYHYSYICVGEGVAWLIGWALILEYTIGGSAVARGISPNLALFFGGQDSLPWILARHEIPWLDVVVDPCASFLVFVVTGLLCVGIKESSFVQGVVTVLNCFVMLFVIIAGSYIGFQTGWVGYKVAGGFFPYGANGMLAGSATVFFAYIGFDSVASTAEEVKNPQRDLPLGIGTALSICCSLYMLVSVVIVGLVPYFAMDPDTPISSAFAKHGMHWAMYLVTTGAVLALCSTLMGSILPQPRILMAMARDGLLPSFFSDVHKTTQVPVKSTVVTGICAAALAFFMDVSQLAGMVSVGTLLAFTIVAVSILILRYVPPDEVPLPSSLQASFRLSQENDEEKLRGTLGDDDHEQGSAEISDVVVKPITDPLIEKQLYASNLSEAKRRKTAACSITSVCIGVLILTTSASATFLPFPVRCSVCVLGGMLLLAGLGMLCWIDQDDGRHSFGHSGGFICPFVPLLPVMCILINTYLLINLGGGTWMRVGVWLVMGVFVYIFYGRTHSSLTDVVYVPVAEANEIYGSSSSLGFVA

SEQ ID NO: 34051 - protein, 616 aa, Zea mays subsp. mays
  peptide (1)..(616): Ceres Seq. ID no. 12359665
  misc_feature (1)..(616): NCBI GI NO: 29244640 NR Description: putative cationic amino acid transporter
  misc_feature (1)..(606): NCBI GI NO: 30696198 NR Description: expressed protein [Arabidopsis thaliana]
  misc_feature (1)..(606): NCBI GI NO: 23306414 NR Description: Unknown protein [Arabidopsis thaliana]
  misc_feature (1)..(609): NCBI GI NO: 30693001 NR Description: cationic amino acid transporter -related protein
  misc_feature (1)..(609): NCBI GI NO: 10178213 NR Description: cationic amino acid transporter-like protein
  misc_feature (1)..(598): NCBI GI NO: 22330822 NR Description: putative cationic amino acid transporter
  misc_feature (1)..(598): NCBI GI NO: 6006869 NR Description: putative cationic amino acid transporter
  misc_feature (34)..(602): NCBI GI NO: 37534696 NR Description: putative cationic amino acid transporter -likeprotein
  misc_feature (155)..(589): NCBI GI NO: 6981556 NR Description: solute carrier family 7 member A1
  misc_feature (155)..(589): NCBI GI NO: 18181964 NR Description: ecotropic retrovirus receptor [Rattus norvegicus]
MRRKQVDSERTRAAGSAHQLRKELSVTQLVAIGVGSTIGAGVYVLVGTVAREHSGPALTLSFLIAGIAAALSAFCYAELASRCPSAGSAYHYSYICVGEGVAWLIGWALILEYTIGGSAVARGISPNLALFFGGQDSLPWILARHEIPWLDVVVDPCASFLVFVVTGLLCVGIKESSFVQGVVTVLNCFVMLFVIIAGSYIGFQTGWVGYKVAGGFFPYGANGMLAGSATVFFAYIGFDSVASTAEEVKNPQRDLPLGIGTALSICCSLYMLVSVVIVGLVPYFAMDPDTPISSAFAKHGMHWAMYLVTTGAVLALCSTLMGSILPQPRILMAMARDGLLPSFFSDVHKTTQVPVKSTVVTGICAAALAFFMDVSQLAGMVSVGTLLAFTIVAVSILILRYVPPDEVPLPSSLQASFRLSQENDEEKLRGTLGDDDHEQGSAEISDVVVKPITDPLIEKQLYASNLSEAKRRKTAACSITSVCIGVLILTTSASATFLPFPVRCSVCVLGGMLLLAGLGMLCWIDQDDGRHSFGHSGGFICPFVPLLPVMCILINTYLLINLGGGTWMRVGVWLVMGVFVYIFYGRTHSSLTDVVYVPVAEANEIYGSSSSLGFVA

SEQ ID NO: 34052 - DNA, 1577 bp, Zea mays subsp. mays
  misc_feature (1)..(1577): Ceres Seq. ID no. 12408300
ataggaacacacgaatacgcgaccacacgttcacctcggccatgatccaccaacacagcagctccctccctgaaatctcattcccatgaatttccacacggccagcttctgcgcttccgcggcgataggcctcccaacagcccccaaaatatcggcttcgttggctactggtcgctttgcctgccgcagtgagagatgtctggagacctggaccttcagatctcctgctatctgccttcttgctgctacccccacacgctgcaccctcacagacaccatggatccgagctccgacatcatactcgacactccgttcttccgcatctacagcgaccgccgcatcgaccgcttggtcgggcaccgataccgtgccggccggctttgatcccgccaccggcgtcacctccaaagatgtcgttttagacagcaactccggcctctacgttcgcctgtacctcccggacacggctaccgggtctgaccactactccaagaaattccccgtgctagtctacttccacggcggcggctttgtcacccactcggcagcgtctccgccctatcagcccttcctcaacacccttgccgcgaaggccggcttgctcatcgtctccgtgaactaccgcctcgcgccagagcacccgcttccggcaggttacgaggactccttccgcgcgctcaagtgggcggcctctggaagcggggacccctggctatcacatcacggcgacctgggccgcatcttcctggccggggacagctccggcgggaactttgtccacaacgtcgctatgatggccgccgcgtcagagttgcaaatcgagggcgcggtcctcctgcacgccgggttcgctggcaagcagcgcatcgacggagagaaaccagagtcagtggcgctgacgcagaagctgtgggggatcgtgtgccccgaggcgacggacggcgtggacgacccgcggatgaaccccttggccgccgcggcgcccagcctgcgaaacctgccgtgcgagagggtgctcgtctgcgcggcagagctggactcgctgcgggcgaggaacagggcgtactacgacgccctcgcggcaagcgggtggggtggcacggtggagtggctcgagtctaagggcaagcagcacgccttcttcctctacgactccggctgcggcgaggccgtggagctcatggatcgactggtcgcgttctttgctgggaacttgaattcgtcatgtgtggatgtgaccacacatcacacgaccacatccggtgagaccctgagatgaatggaacaaacgaagatgcagctcattgctcaatcgaaataactgagctcagtcctcaaaacaatgaaaaaagaggaagaacagctgagatcggatccttgtactgatcagtttatgttatcgcttgggtcatcaatttctactagttgtgtgcccgtgcgttgcaacggaaacatataataccattgatagcttatgtacgttgggatgaacatcgacatatatctgaccggatcttcttcttccttggggatctggagaaaagcctgttcgaaagccaaacatgttaagacctgt

SEQ ID NO: 34053 - protein, 162 aa, Zea mays subsp. mays
  peptide (1)..(162): Ceres Seq. ID no. 12408301
  misc_feature (1)..(139): NCBI GI NO: 38344841 NR Description: OSJNBa0064H22.22
  misc_feature (1)..(144): NCBI GI NO: 18401743 NR Description: expressed protein; protein id: At1g47480
  misc_feature (1)..(144): NCBI GI NO: 21536771 NR Description: unknown [Arabidopsis thaliana]
  misc_feature (1)..(140): NCBI GI NO: 18086341 NR Description: AT3g48690/T8P19_200 [Arabidopsis thaliana]
  misc_feature (1)..(140): NCBI GI NO: 15228425 NR Description: putative protein; protein id: At3g48690
  misc_feature (1)..(141): NCBI GI NO: 15228426 NR Description: putative protein; protein id: At3g48700.1
  misc_feature (1)..(137): NCBI GI NO: 15227669 NR Description: putative esterase; protein id: At2g03550.1
  misc_feature (1)..(137): NCBI GI NO: 28393060 NR Description: putative esterase [Arabidopsis thaliana]
  misc_feature (1)..(161): NCBI GI NO: 34393323 NR Description: putative cell death associated protein
  misc_feature (1)..(140): NCBI GI NO: 21537287 NR Description: putative esterase [Arabidopsis thaliana]
MMAAASELQIEGAVLLHAGFAGKQRIDGEKPESVALTQKLWGIVCPEATDGVDDPRMNPLAAAAPSLRNLPCERVLVCAAELDSLRARNRAYYDALAASGWGGTVEWLESKGKQHAFFLYDSGCGEAVELMDRLVAFFAGNLNSSCVDVTTHHTTTSGETLR

SEQ ID NO: 34054 - protein, 161 aa, Zea mays subsp. mays
  peptide (1)..(161): Ceres Seq. ID no. 12408302
  misc_feature (1)..(138): NCBI GI NO: 38344841 NR Description: OSJNBa0064H22.22
  misc_feature (1)..(143): NCBI GI NO: 18401743 NR Description: expressed protein; protein id: At1g47480
  misc_feature (1)..(143): NCBI GI NO: 21536771 NR Description: unknown [Arabidopsis thaliana]
  misc_feature (1)..(139): NCBI GI NO: 18086341 NR Description: AT3g48690/T8P19_200 [Arabidopsis thaliana]
  misc_feature (1)..(139): NCBI GI NO: 15228425 NR Description: putative protein; protein id: At3g48690
  misc_feature (1)..(140): NCBI GI NO: 15228426 NR Description: putative protein; protein id: At3g48700.1
  misc_feature (1)..(136): NCBI GI NO: 15227669 NR Description: putative esterase; protein id: At2g03550.1
  misc_feature (1)..(136): NCBI GI NO: 28393060 NR Description: putative esterase [Arabidopsis thaliana]
  misc_feature (1)..(160): NCBI GI NO: 34393323 NR Description: putative cell death associated protein
  misc_feature (1)..(139): NCBI GI NO: 21537287 NR Description: putative esterase [Arabidopsis thaliana]
MAAASELQIEGAVLLHAGFAGKQRIDGEKPESVALTQKLWGIVCPEATDGVDDPRMNPLAAAAPSLRNLPCERVLVCAAELDSLRARNRAYYDALAASGWGGTVEWLESKGKQHAFFLYDSGCGEAVELMDRLVAFFAGNLNSSCVDVTTHHTTTSGETLR

SEQ ID NO: 34055 - protein, 106 aa, Zea mays subsp. mays
  peptide (1)..(106): Ceres Seq. ID no. 12408303
  misc_feature (1)..(83): NCBI GI NO: 38344841 NR Description: OSJNBa0064H22.22
  misc_feature (1)..(88): NCBI GI NO: 18401743 NR Description: expressed protein; protein id: At1g47480
  misc_feature (1)..(88): NCBI GI NO: 21536771 NR Description: unknown [Arabidopsis thaliana]
  misc_feature (1)..(84): NCBI GI NO: 18086341 NR Description: AT3g48690/T8P19_200 [Arabidopsis thaliana]
  misc_feature (1)..(84): NCBI GI NO: 15228425 NR Description: putative protein; protein id: At3g48690
  misc_feature (1)..(85): NCBI GI NO: 15228426 NR Description: putative protein; protein id: At3g48700.1
  misc_feature (1)..(81): NCBI GI NO: 15227669 NR Description: putative esterase; protein id: At2g03550.1
  misc_feature (1)..(81): NCBI GI NO: 28393060 NR Description: putative esterase [Arabidopsis thaliana]
  misc_feature (1)..(105): NCBI GI NO: 34393323 NR Description: putative cell death associated protein
  misc_feature (1)..(84): NCBI GI NO: 21537287 NR Description: putative esterase [Arabidopsis thaliana]
MNPLAAAAPSLRNLPCERVLVCAAELDSLRARNRAYYDALAASGWGGTVEWLESKGKQHAFFLYDSGCGEAVELMDRLVAFFAGNLNSSCVDVTTHHTTTSGETLR

SEQ ID NO: 34056 - DNA, 1153 bp, Zea mays subsp. mays
  misc_feature (1)..(1153): Ceres Seq. ID no. 12374047
agggtgattggggagcttgtcaaggtgctgaagattacacctgtacctgttgtgtttgcgtcgttttcgggagggccaaaagggtgcacatacaaggttttcagctgatcgagagaagatgtgaagggcaactaagcatggatgagtaccagctcgtacaagattgtctatgcggacaaatgtatgattcaagccctgtggattttgtcagtgacttgggcactcgcttcctcctcgatccaagtgtcctgaagatgtctgaacctcctcgtgtcttgtcatggatgactaagggcattgcctcaggtcttgatgttcttttcataaacaaatttgaagaacaacgtaaagattattgggaaacactatactcatcggtgcattttggtccaatactaatactctgctcagaggatgatcaacttgctacatattcagttgttcaaaattttggccagcatctgctagagcttggtggtgatgtgagcctaattaaatggcatagttctccgcatgtcggccactacaagcaccatcctgaggaatacagagctgctgtgacggagctcctaaagaaagcctcgacgctctacgcgagcagacgacaactcaacggacacgccgtgggcacaagcgagcacaccgacgcgcctgcatccacctccaagtccaacccacacagagatgccgcgagttctgtcggtcgtagcaggctgattcaagcaccggccgatccagccggccagtttccttccataccgagctccatggagtaccacgagagcagcagccaaggtccgccgcagccggagctgttcagcatgcccggcgtggagagctcgggcctgcgttgtgcggtgctggggcaggcgctgtacggtgtctgtgttccgaaggacgtagaagacggctgggacctcgcgccgccttccgcgtcgtcggatgcgttgtggggtgctgctgctgctgccgcgccgcctcgccgtggtagcttccgtccgatgagatgtgtacggcgctcgagattgtgatattgtgcgtgcgttttagtttaaaaattaaggtgagcaacaaatattgagaacggagggagtagtacgtattctctatacaaatcaatataaatatggtgatcgtaatggtctattcctct

SEQ ID NO: 34057 - protein, 342 aa, Zea mays subsp. mays
  peptide (1)..(342): Ceres Seq. ID no. 12374048
  misc_feature (23)..(304): Pfam Name: DUF829 Pfam Description: Eukaryotic protein of unknown function
  misc_feature (14)..(306): NCBI GI NO: 18397898 NR Description: unknown protein; protein id: At2g15695.1
  misc_feature (34)..(306): NCBI GI NO: 15241450 NR Description: putative protein; protein id: At5g44250
  misc_feature (14)..(306): NCBI GI NO: 25411656 NR Description: hypothetical protein At2g15690
GDWGACQGAEDYTCTCCVCVVFGRAKRVHIQGFQLIERRCEGQLSMDEYQLVQDCLCGQMYDSSPVDFVSDLGTRFLLDPSVLKMSEPPRVLSWMTKGIASGLDVLFINKFEEQRKDYWETLYSSVHFGPILILCSEDDQLATYSVVQNFGQHLLELGGDVSLIKWHSSPHVGHYKHHPEEYRAAVTELLKKASTLYASRRQLNGHAVGTSEHTDAPASTSKSNPHRDAASSVGRSRLIQAPADPAGQFPSIPSSMEYHESSSQGPPQPELFSMPGVESSGLRCAVLGQALYGVCVPKDVEDGWDLAPPSASSDALWGAAAAAAPPRRGSFRPMRCVRRSRL

SEQ ID NO: 34058 - protein, 297 aa, Zea mays subsp. mays
  peptide (1)..(297): Ceres Seq. ID no. 12374049
  misc_feature (1)..(259): Pfam Name: DUF829 Pfam Description: Eukaryotic protein of unknown function
  misc_feature (1)..(261): NCBI GI NO: 18397898 NR Description: unknown protein; protein id: At2g15695.1
  misc_feature (1)..(261): NCBI GI NO: 15241450 NR Description: putative protein; protein id: At5g44250
  misc_feature (1)..(261): NCBI GI NO: 25411656 NR Description: hypothetical protein At2g15690
MDEYQLVQDCLCGQMYDSSPVDFVSDLGTRFLLDPSVLKMSEPPRVLSWMTKGIASGLDVLFINKFEEQRKDYWETLYSSVHFGPILILCSEDDQLATYSVVQNFGQHLLELGGDVSLIKWHSSPHVGHYKHHPEEYRAAVTELLKKASTLYASRRQLNGHAVGTSEHTDAPASTSKSNPHRDAASSVGRSRLIQAPADPAGQFPSIPSSMEYHESSSQGPPQPELFSMPGVESSGLRCAVLGQALYGVCVPKDVEDGWDLAPPSASSDALWGAAAAAAPPRRGSFRPMRCVRRSRL

SEQ ID NO: 34059 - protein, 283 aa, Zea mays subsp. mays
  peptide (1)..(283): Ceres Seq. ID no. 12374050
  misc_feature (1)..(245): Pfam Name: DUF829 Pfam Description: Eukaryotic protein of unknown function
  misc_feature (1)..(247): NCBI GI NO: 18397898 NR Description: unknown protein; protein id: At2g15695.1
  misc_feature (1)..(247): NCBI GI NO: 15241450 NR Description: putative protein; protein id: At5g44250
  misc_feature (1)..(247): NCBI GI NO: 25411656 NR Description: hypothetical protein At2g15690
MYDSSPVDFVSDLGTRFLLDPSVLKMSEPPRVLSWMTKGIASGLDVLFINKFEEQRKDYWETLYSSVHFGPILILCSEDDQLATYSVVQNFGQHLLELGGDVSLIKWHSSPHVGHYKHHPEEYRAAVTELLKKASTLYASRRQLNGHAVGTSEHTDAPASTSKSNPHRDAASSVGRSRLIQAPADPAGQFPSIPSSMEYHESSSQGPPQPELFSMPGVESSGLRCAVLGQALYGVCVPKDVEDGWDLAPPSASSDALWGAAAAAAPPRRGSFRPMRCVRRSRL

SEQ ID NO: 34060 - DNA, 2075 bp, Zea mays subsp. mays
  misc_feature (1)..(2075): Ceres Seq. ID no. 12341294
gttttttccgttcatccatccatacgtttcgtttgttccacctgcgcaactgcgacggggataagtacgtcttccagatgacgacggcggcatggccgcggccacgcttcctcgtcctcccccagcctggattcctccgctcggtctgccacggcctctgcgcccgctgtctcttctgcttcctgctgctcctcgccttcgcctgcagctccagctccggacgggtggtggtcaccagcttgcctggcttcgacggcgacctccccttccacctcgaaacagggtgcgcgtgcccgcgtggcgtgtctactagtagtatcctccttcttcttcttcattcattcatcctggtggtgtactactagactactactagtagctcacgcgcgcggcacatgtagatgtagcctctaaccaccgttgctgccctgaaactcaaaacgaaggtacgtggaggtggaggaggacgccggcgtggagctcttctactacttcgtccaggccgagtccggcgccgccgccgccgccgatgacacccctttcctcttctggctcaccggcggcgaccgctgctccgtcttcagcggcctcgcctacgagatcggtcccatcagattcgtcctggaaccctacaacggcaccctgccgcgcctgcgatacaaccacaactcgtggtcaaaggtgtcacatatcctcttcgtcgattcaccggttggagctggattttccttctcgagagatcccaaaggctacgatgtcggagacatctcggcctcactgcagctacaggaattcctcatcaagtggttcagtgatcatcccgagtacctcgcgaatcctttctacattggcggggactcctatgtcggaaaaatcgtgccgttcctcaggcagatgatttcagaaggtattgaacttggaagaagacccttccctaacctcaaggtatgtccatcatacatttctctccggaatggaagatgctatatcgacgtgggatactagctagtctatatccaagaaattaattgtagtcggtcacttaggctgatgatatgcaggttctgaatttgtcatgatcagggctatctggtgggtaacccaatcacgggcgaaagtatagatttcacttccagagtgccctacgctcatggagtcggtatcatatcagatcaattgtatgagacgatattggggcattgccaaggagaggactacactagtcctgcaaacgctctgtgtgctcaggctctggacactttcaacaatctcatcaacgaagtccagaacgcccagatcttactggacacgtgcgtctacgcgtctcctgcgccaaacgttctcagcagaccggtggacggtggtagaaggatcctgagggcggcggggatgggaggaggggcgacgctgaaccatccgccagctcgtcctcggtttggctgcatcacctacggctactacctgtcgtatttctgggcgaacgatgaacgcactcgaacagctcttgggatcaagaagggaacagtggacgagtgggtgaggtgtcacgacgcagacctgccgtacacgatcgacctcaagagcgccatcaagtaccaccggaacctgacgtccagaggctaccgcgccctggtgtacagcggcgaccatgacctgctggtgccacacctgggcacccaggcatgggtcaggtccctcaacttccccgtcgtcgacgactggagggcgtggcatctcggtggccaagccgccgggttcacgataaattactcaaacaacatgacgttcgcgacgatcaaaggtggcgggcacacggcgccggagtacgagccggagaggtgtttcgccatgttcagccgctggatactcgaccgtccactctaatctccactcgtacattgccggattcttgcaccatgaccatgattgatggactgtgtggattgcagttcataggtggaataaaatggatgatttctgtgaatggataggtctgccaactaggcaactttgtgtaaattaactaggtctgtgtcagcgcgctttaacgtaatatatgcggggataaatcgtgc

SEQ ID NO: 34061 - protein, 164 aa, Zea mays subsp. mays
  peptide (1)..(164): Ceres Seq. ID no. 12341295
  misc_feature (18)..(159): Pfam Name: Pfam Description:  Serine carboxypeptidase
  misc_feature (1)..(164): NCBI GI NO: 28273379 NR Description: putative serine carboxypeptidase I
  misc_feature (1)..(159): NCBI GI NO: 28273383 NR Description: putative serine carboxypeptidase
  misc_feature (1)..(164): NCBI GI NO: 30682773 NR Description: serine carboxypeptidase -related
  misc_feature (1)..(164): NCBI GI NO: 15418807 NR Description: sinapoylglucose:choline sinapoyltransferase
  misc_feature (5)..(164): NCBI GI NO: 37530314 NR Description: putative serine carboxypeptidase
  misc_feature (18)..(164): NCBI GI NO: 15228300 NR Description: putative glucose acyltransferase
  misc_feature (20)..(164): NCBI GI NO: 9758992 NR Description: serine carboxypeptidase [Arabidopsis thaliana]
  misc_feature (18)..(164): NCBI GI NO: 15219429 NR Description: putative serine carboxypeptidase
  misc_feature (18)..(159): NCBI GI NO: 15219427 NR Description: putative serine carboxypeptidase
  misc_feature (18)..(164): NCBI GI NO: 8777303 NR Description: serine carboxypeptidase [Arabidopsis thaliana]
MGGGATLNHPPARPRFGCITYGYYLSYFWANDERTRTALGIKKGTVDEWVRCHDADLPYTIDLKSAIKYHRNLTSRGYRALVYSGDHDLLVPHLGTQAWVRSLNFPVVDDWRAWHLGGQAAGFTINYSNNMTFATIKGGGHTAPEYEPERCFAMFSRWILDRPL

SEQ ID NO: 34062 - protein, 122 aa, Zea mays subsp. mays
  peptide (1)..(122): Ceres Seq. ID no. 12341296
  misc_feature (1)..(122): NCBI GI NO: 11359723 NR Description: proteophosphoglycan, membrane-associated
  misc_feature (1)..(122): NCBI GI NO: 13592175 NR Description: ppg3 [Leishmania major]
  misc_feature (1)..(120): NCBI GI NO: 13592175 NR Description: ppg3 [Leishmania major]
  misc_feature (1)..(122): NCBI GI NO: 13592175 NR Description: ppg3 [Leishmania major]
  misc_feature (1)..(92): NCBI GI NO: 11359723 NR Description: proteophosphoglycan, membrane-associated
  misc_feature (1)..(120): NCBI GI NO: 13592175 NR Description: ppg3 [Leishmania major]
  misc_feature (1)..(120): NCBI GI NO: 13592175 NR Description: ppg3 [Leishmania major]
  misc_feature (1)..(120): NCBI GI NO: 13592175 NR Description: ppg3 [Leishmania major]
  misc_feature (1)..(120): NCBI GI NO: 13592175 NR Description: ppg3 [Leishmania major]
  misc_feature (1)..(120): NCBI GI NO: 13592175 NR Description: ppg3 [Leishmania major]
MTPLSSSGSPAATAAPSSAASPTRSVPSDSSWNPTTAPCRACDTTTTRGQRCHISSSSIHRLELDFPSREIPKATMSETSRPHCSYRNSSSSGSVIIPSTSRILSTLAGTPMSEKSCRSSGR

SEQ ID NO: 34063 - protein, 120 aa, Zea mays subsp. mays
  peptide (1)..(120): Ceres Seq. ID no. 12341297
  misc_feature (54)..(94): NCBI GI NO: 28273379 NR Description: putative serine carboxypeptidase I
  misc_feature (57)..(94): NCBI GI NO: 28273383 NR Description: putative serine carboxypeptidase
  misc_feature (60)..(94): NCBI GI NO: 30682773 NR Description: serine carboxypeptidase -related
  misc_feature (60)..(94): NCBI GI NO: 15418807 NR Description: sinapoylglucose:choline sinapoyltransferase
  misc_feature (55)..(94): NCBI GI NO: 37530314 NR Description: putative serine carboxypeptidase
  misc_feature (61)..(94): NCBI GI NO: 15228300 NR Description: putative glucose acyltransferase
  misc_feature (60)..(94): NCBI GI NO: 9758992 NR Description: serine carboxypeptidase [Arabidopsis thaliana]
  misc_feature (72)..(94): NCBI GI NO: 15219429 NR Description: putative serine carboxypeptidase
  misc_feature (76)..(94): NCBI GI NO: 15219427 NR Description: putative serine carboxypeptidase
  misc_feature (76)..(94): NCBI GI NO: 8777303 NR Description: serine carboxypeptidase [Arabidopsis thaliana]
FFRSSIHTFRLFHLRNCDGDKYVFQMTTAAWPRPRFLVLPQPGFLRSVCHGLCARCLFCFLLLLAFACSSSSGRVVVTSLPGFDGDLPFHLETGCACPRGVSTSSILLLLLHSFILVVYY

SEQ ID NO: 34064 - DNA, 1038 bp, Zea mays subsp. mays
  misc_feature (1)..(1038): Ceres Seq. ID no. 12353503
cggatatgatgatatgtgggctaagacaattcttgaaacttacgatgcagaggaagatgatggtaggtactctggtggatcctctcctgaatcaactggttctgttgaaacctccatatcgtcccattttggaggcatgaactatccatcactgttcagttcaaaaccgtcaagtcatggggcctcacaacaaacgatacgtgaagaaccaccctcatattcgacgtcagtactacagaggaaggaatcatttgaaaacccccttggagggggtggaggacgaagtttcggatcccacgaggatgaagataagagttctggtaaccctcagtctgggaaagctttgtatgacttcacagcaggcggtgatgatgagctgagtttaaactctggagaagaagtggagattgaatacgaggtcgatggttggtattatgtgaagaaaaggaggcctggaagggatggaaagatggcaggtctggttcctgttctgtatgtgagttcatgataacagccgtgtgtatcgtttcccacacttgtggaagctgtttggagttcatgggcttaacaaaaaggcacactggaatgctcccgagagatcttcgcataaactcgtgcccgtcgtataggcacgtggccttgtggaagcaggtcatatccagtcatcttggggttcgtatgatgctgcagtgctgttcctgggaaagatttacgtgttgatttgtctggacccacaccactagtcattcaattgattgttttttgttgctaaggtggagactcttcagaggttaaaccgttcatctgtgccattttgctgccgtctgtgttcaagaaggcaatttcgtcgtctccagttcgtgttgtgcgatatatattctagtaaaattgtagaggcatcatttccccggcatatattattttggtcgtgtatggtgtgattctggtggtaaaatagtgtcattaatgttgtgtatatttgtttccgggtggattacagagtatataactataagggggtgtttggtttaagaaatc

SEQ ID NO: 34065 - protein, 168 aa, Zea mays subsp. mays
  peptide (1)..(168): Ceres Seq. ID no. 12353504
  misc_feature (112)..(167): Pfam Name: Pfam Description:  SH3 domain
  misc_feature (18)..(168): NCBI GI NO: 34902004 NR Description: unknown protein
  misc_feature (1)..(167): NCBI GI NO: 15225702 NR Description: unknown protein; protein id: At2g07360.1
  misc_feature (1)..(167): NCBI GI NO: 29824397 NR Description: unknown protein [Arabidopsis thaliana]
GYDDMWAKTILETYDAEEDDGRYSGGSSPESTGSVETSISSHFGGMNYPSLFSSKPSSHGASQQTIREEPPSYSTSVLQRKESFENPLGGGGGRSFGSHEDEDKSSGNPQSGKALYDFTAGGDDELSLNSGEEVEIEYEVDGWYYVKKRRPGRDGKMAGLVPVLYVSS

SEQ ID NO: 34066 - protein, 164 aa, Zea mays subsp. mays
  peptide (1)..(164): Ceres Seq. ID no. 12353505
  misc_feature (108)..(163): Pfam Name: Pfam Description:  SH3 domain
  misc_feature (14)..(164): NCBI GI NO: 34902004 NR Description: unknown protein
  misc_feature (1)..(163): NCBI GI NO: 15225702 NR Description: unknown protein; protein id: At2g07360.1
  misc_feature (1)..(163): NCBI GI NO: 29824397 NR Description: unknown protein [Arabidopsis thaliana]
MWAKTILETYDAEEDDGRYSGGSSPESTGSVETSISSHFGGMNYPSLFSSKPSSHGASQQTIREEPPSYSTSVLQRKESFENPLGGGGGRSFGSHEDEDKSSGNPQSGKALYDFTAGGDDELSLNSGEEVEIEYEVDGWYYVKKRRPGRDGKMAGLVPVLYVSS

SEQ ID NO: 34067 - protein, 123 aa, Zea mays subsp. mays
  peptide (1)..(123): Ceres Seq. ID no. 12353506
  misc_feature (67)..(122): Pfam Name: Pfam Description:  SH3 domain
  misc_feature (1)..(123): NCBI GI NO: 34902004 NR Description: unknown protein
  misc_feature (1)..(122): NCBI GI NO: 15225702 NR Description: unknown protein; protein id: At2g07360.1
  misc_feature (1)..(122): NCBI GI NO: 29824397 NR Description: unknown protein [Arabidopsis thaliana]
MNYPSLFSSKPSSHGASQQTIREEPPSYSTSVLQRKESFENPLGGGGGRSFGSHEDEDKSSGNPQSGKALYDFTAGGDDELSLNSGEEVEIEYEVDGWYYVKKRRPGRDGKMAGLVPVLYVSS

SEQ ID NO: 34068 - DNA, 1160 bp, Zea mays subsp. mays
  misc_feature (1)..(1160): Ceres Seq. ID no. 12413910
acctccaccacctgccgcgccggccggcgagcctcttcctcttcctccggtcgctccccttcccatctccatcttgatttcgattctctggtggctgggaaagcctgcgagagcgcgataaccggaaagatctgagctgctgcaaccgatctccggcgccatggggttcctcgaggacttccaagccagtgttgaagcattgccatctatgctgcatcggaactattcattaatgcgagagttggataaaagtttgcatggtgtgcaactagaaaatgagcagcgctgtcaacaagaaatagaggacattaagcatggacttgaatctggaagtattacatatgacccagcaaaattgaaattttccgaagaagcaatggaggagcagaaacattgtgttagaattgctgacgagaaggtggctttagccactcagacttatgacttagttgatgctcacatccaacagctagatcagtttatgaggaagcttgaagaaatccggcaaggaaaagaggcagctgctgctgttactgcagggactgctgttgctactactgccactccaaccgtgaatgctggagcgacaactgctgatgctaatccgaagagtggacgatctggcgaaagaggcagagggggtcggaagaaggccaaggtacccacggagcagtcagtgccagtgccagtgccactgccacctattgacttagagttgcctgtggatcctaacgaaccgacatactgcctctgcaaccaagtcagctatggtgagatggtggcatgcgacaatcctaattgcaaaatcgagtggtatcactatggctgtgtgggcgtcaaggagcaacccaagggaaagtggtattgcccaaactgcatcggattccagaagaagcgaaaaggcaagtgatatgcagtccacaggctgctgtgctagtgtgtccttgcttgttaattgtgttgctgatgttgggtaacaaatgtagtagtagttgctgcctgtgacagtgcataccgttgtagatccagtgttctgtacatgttactcctccttcggtgctcgtagtttagggccatcaaccatttgttaacttcatggcctttttggcgattcatgccccttgtatgggtttcgcaatatcatgtctccttttcctggt

SEQ ID NO: 34069 - protein, 249 aa, Zea mays subsp. mays
  peptide (1)..(249): Ceres Seq. ID no. 12413911
  misc_feature (195)..(239): Pfam Name: Pfam Description:  PHD-finger
  misc_feature (1)..(249): NCBI GI NO: 29367421 NR Description: putative PHD-finger protein
  misc_feature (1)..(249): NCBI GI NO: 18404002 NR Description: PHD-finger protein, putative; protein id:At3g24010
  misc_feature (76)..(249): NCBI GI NO: 28393138 NR Description: putative PHD-finger protein [Arabidopsis thaliana]
  misc_feature (1)..(163): NCBI GI NO: 19921252 NR Description: CG9293-PA [Drosophila melanogaster]
  misc_feature (139)..(246): NCBI GI NO: 19921252 NR Description: CG9293-PA [Drosophila melanogaster]
  misc_feature (3)..(249): NCBI GI NO: 21313552 NR Description: RIKEN cDNA 1810018M11 [Mus musculus]
  misc_feature (3)..(246): NCBI GI NO: 26327491 NR Description: unnamed protein product [Mus musculus]
  misc_feature (3)..(246): NCBI GI NO: 19111152 NR Description: ING1-like protein
  misc_feature (3)..(246): NCBI GI NO: 34858458 NR Description: similar to ING1-like protein
  misc_feature (3)..(249): NCBI GI NO: 18644730 NR Description: p28 ING5 [Homo sapiens]
MGFLEDFQASVEALPSMLHRNYSLMRELDKSLHGVQLENEQRCQQEIEDIKHGLESGSITYDPAKLKFSEEAMEEQKHCVRIADEKVALATQTYDLVDAHIQQLDQFMRKLEEIRQGKEAAAAVTAGTAVATTATPTVNAGATTADANPKSGRSGERGRGGRKKAKVPTEQSVPVPVPLPPIDLELPVDPNEPTYCLCNQVSYGEMVACDNPNCKIEWYHYGCVGVKEQPKGKWYCPNCIGFQKKRKGK

SEQ ID NO: 34070 - protein, 233 aa, Zea mays subsp. mays
  peptide (1)..(233): Ceres Seq. ID no. 12413912
  misc_feature (179)..(223): Pfam Name: Pfam Description:  PHD-finger
  misc_feature (1)..(233): NCBI GI NO: 29367421 NR Description: putative PHD-finger protein
  misc_feature (1)..(233): NCBI GI NO: 18404002 NR Description: PHD-finger protein, putative; protein id:At3g24010
  misc_feature (60)..(233): NCBI GI NO: 28393138 NR Description: putative PHD-finger protein [Arabidopsis thaliana]
  misc_feature (1)..(147): NCBI GI NO: 19921252 NR Description: CG9293-PA [Drosophila melanogaster]
  misc_feature (123)..(230): NCBI GI NO: 19921252 NR Description: CG9293-PA [Drosophila melanogaster]
  misc_feature (1)..(233): NCBI GI NO: 21313552 NR Description: RIKEN cDNA 1810018M11 [Mus musculus]
  misc_feature (1)..(230): NCBI GI NO: 26327491 NR Description: unnamed protein product [Mus musculus]
  misc_feature (1)..(230): NCBI GI NO: 19111152 NR Description: ING1-like protein
  misc_feature (1)..(230): NCBI GI NO: 34858458 NR Description: similar to ING1-like protein
  misc_feature (1)..(233): NCBI GI NO: 18644730 NR Description: p28 ING5 [Homo sapiens]
MLHRNYSLMRELDKSLHGVQLENEQRCQQEIEDIKHGLESGSITYDPAKLKFSEEAMEEQKHCVRIADEKVALATQTYDLVDAHIQQLDQFMRKLEEIRQGKEAAAAVTAGTAVATTATPTVNAGATTADANPKSGRSGERGRGGRKKAKVPTEQSVPVPVPLPPIDLELPVDPNEPTYCLCNQVSYGEMVACDNPNCKIEWYHYGCVGVKEQPKGKWYCPNCIGFQKKRKGK

SEQ ID NO: 34071 - protein, 225 aa, Zea mays subsp. mays
  peptide (1)..(225): Ceres Seq. ID no. 12413913
  misc_feature (171)..(215): Pfam Name: Pfam Description:  PHD-finger
  misc_feature (1)..(225): NCBI GI NO: 29367421 NR Description: putative PHD-finger protein
  misc_feature (1)..(225): NCBI GI NO: 18404002 NR Description: PHD-finger protein, putative; protein id:At3g24010
  misc_feature (52)..(225): NCBI GI NO: 28393138 NR Description: putative PHD-finger protein [Arabidopsis thaliana]
  misc_feature (1)..(139): NCBI GI NO: 19921252 NR Description: CG9293-PA [Drosophila melanogaster]
  misc_feature (115)..(222): NCBI GI NO: 19921252 NR Description: CG9293-PA [Drosophila melanogaster]
  misc_feature (1)..(225): NCBI GI NO: 21313552 NR Description: RIKEN cDNA 1810018M11 [Mus musculus]
  misc_feature (1)..(222): NCBI GI NO: 26327491 NR Description: unnamed protein product [Mus musculus]
  misc_feature (1)..(222): NCBI GI NO: 19111152 NR Description: ING1-like protein
  misc_feature (1)..(222): NCBI GI NO: 34858458 NR Description: similar to ING1-like protein
  misc_feature (1)..(225): NCBI GI NO: 18644730 NR Description: p28 ING5 [Homo sapiens]
MRELDKSLHGVQLENEQRCQQEIEDIKHGLESGSITYDPAKLKFSEEAMEEQKHCVRIADEKVALATQTYDLVDAHIQQLDQFMRKLEEIRQGKEAAAAVTAGTAVATTATPTVNAGATTADANPKSGRSGERGRGGRKKAKVPTEQSVPVPVPLPPIDLELPVDPNEPTYCLCNQVSYGEMVACDNPNCKIEWYHYGCVGVKEQPKGKWYCPNCIGFQKKRKGK

SEQ ID NO: 34072 - DNA, 1009 bp, Zea mays subsp. mays
  misc_feature (1)..(1009): Ceres Seq. ID no. 12349674
aaaacatcaaccccaaccccaacgactccaagtcaagagagcggcaagagcacgtgccggccgccgatcaaatccaccgagcaatcgcgcgcggccgccgagctgccaaggcggcggcggcggtcggtcggtctgcgatatacgatggcggcggcctactacggaggtcctccggcggcgccggcggcgccggcccccgtggcggtggtgtccccgcagttctgtgcgccgtacgtggtgcccctgacggtgaccaagaaggccatcagcctctccgacggagacttcaccatcaccgacgccaacggcgccaccgtgctgcaggtcaagggcgccgtcttcagtatccgccaccgccgcgtcctccttgacgccgccggccagcccatcctcaccatgctggagaaggtattcagcatgcacaacagatgggaggtgttcagaggggacagctcgaacgagagcgacctgctcttcaccgcgaagaaatcctcgatattccagctgaagacggagatggacatcttcctggcctccaacaccgcgcagcaggcgtgcgacttcaagatcaagggcagctacttcgagaggtcgtgcgccttctacctcggcaactccagcagcatgatcgcccagatgaaccgccagtttaccgtcaccaatgtgctgcttggaagggacacgtttggcgtcactgtgttcccgcacgttgactacgtgttcgtcgctgctcttgttgtgatactggatgagattcatagggaacggtccgactgaggaacacaccacaccaccaagcttctccaccgttgctcgaccatgctatgcgcatgtatcatcatcactgcaggttattcttgtcaattatatatatactttccatgtatgtatgtaagtattaatgggttaatacactacctcccgatgtatttgttttatatatgtttgaatatagacataaaaaccaaacagctattattttgagatgaaaggagtactatttagtgtc

SEQ ID NO: 34073 - protein, 258 aa, Zea mays subsp. mays
  peptide (1)..(258): Ceres Seq. ID no. 12349675
  misc_feature (69)..(248): Pfam Name: DUF567 Pfam Description: Protein of unknown function
  misc_feature (57)..(258): NCBI GI NO: 27818079 NR Description: OSJNBa0086N05.7
  misc_feature (47)..(255): NCBI GI NO: 30679390 NR Description: expressed protein [Arabidopsis thaliana]
  misc_feature (56)..(249): NCBI GI NO: 9665105 NR Description: Hypothetical protein [Arabidopsis thaliana]
  misc_feature (66)..(258): NCBI GI NO: 17979321 NR Description: unknown protein [Arabidopsis thaliana]
  misc_feature (66)..(258): NCBI GI NO: 15225960 NR Description: unknown protein; protein id: At2g14560
  misc_feature (47)..(213): NCBI GI NO: 18413737 NR Description: expressed protein; protein id: At5g01750
  misc_feature (69)..(249): NCBI GI NO: 15217694 NR Description: unknown protein; protein id: At1g33840.1
  misc_feature (47)..(213): NCBI GI NO: 21553506 NR Description: unknown [Arabidopsis thaliana]
  misc_feature (56)..(217): NCBI GI NO: 25352417 NR Description: hypothetical protein T3M13
  misc_feature (69)..(253): NCBI GI NO: 15228906 NR Description: hypothetical protein; protein id: At3g16900.1
KTSTPTPTTPSQESGKSTCRPPIKSTEQSRAAAELPRRRRRSVGLRYTMAAAYYGGPPAAPAAPAPVAVVSPQFCAPYVVPLTVTKKAISLSDGDFTITDANGATVLQVKGAVFSIRHRRVLLDAAGQPILTMLEKVFSMHNRWEVFRGDSSNESDLLFTAKKSSIFQLKTEMDIFLASNTAQQACDFKIKGSYFERSCAFYLGNSSSMIAQMNRQFTVTNVLLGRDTFGVTVFPHVDYVFVAALVVILDEIHRERSD

SEQ ID NO: 34074 - protein, 210 aa, Zea mays subsp. mays
  peptide (1)..(210): Ceres Seq. ID no. 12349676
  misc_feature (21)..(200): Pfam Name: DUF567 Pfam Description: Protein of unknown function
  misc_feature (9)..(210): NCBI GI NO: 27818079 NR Description: OSJNBa0086N05.7
  misc_feature (1)..(207): NCBI GI NO: 30679390 NR Description: expressed protein [Arabidopsis thaliana]
  misc_feature (8)..(201): NCBI GI NO: 9665105 NR Description: Hypothetical protein [Arabidopsis thaliana]
  misc_feature (18)..(210): NCBI GI NO: 17979321 NR Description: unknown protein [Arabidopsis thaliana]
  misc_feature (18)..(210): NCBI GI NO: 15225960 NR Description: unknown protein; protein id: At2g14560
  misc_feature (1)..(165): NCBI GI NO: 18413737 NR Description: expressed protein; protein id: At5g01750
  misc_feature (21)..(201): NCBI GI NO: 15217694 NR Description: unknown protein; protein id: At1g33840.1
  misc_feature (1)..(165): NCBI GI NO: 21553506 NR Description: unknown [Arabidopsis thaliana]
  misc_feature (8)..(169): NCBI GI NO: 25352417 NR Description: hypothetical protein T3M13
  misc_feature (21)..(205): NCBI GI NO: 15228906 NR Description: hypothetical protein; protein id: At3g16900.1
MAAAYYGGPPAAPAAPAPVAVVSPQFCAPYVVPLTVTKKAISLSDGDFTITDANGATVLQVKGAVFSIRHRRVLLDAAGQPILTMLEKVFSMHNRWEVFRGDSSNESDLLFTAKKSSIFQLKTEMDIFLASNTAQQACDFKIKGSYFERSCAFYLGNSSSMIAQMNRQFTVTNVLLGRDTFGVTVFPHVDYVFVAALVVILDEIHRERSD

SEQ ID NO: 34075 - DNA, 1116 bp, Zea mays subsp. mays
  misc_feature (1)..(1116): Ceres Seq. ID no. 12367240
aacacacacattctgcgtggatttggctcgggggtcccgacagatctcagatgagagatctcgggcgttaggtttctggagcgtgctaatgaggtgctgatttggtgctgtgcagaatggaggcggaggagcgcgtggcggaggcgtcaagccgcagtacgggttccggccgacggagcccgcggggttcggcggcggcaggggcgatgcgaccaccgacatccctctggacaccatgaacgattcgaagggcaaggcgaaggagctgtctcagtgggagtcagatctcaggaggagggagtcggatatcaggaggagggaggaagctctcaagagcgctggggtgcccatggaggacaagaactggccgcctttcttcccaatcatccaccatgatattgccaatgagataccagcaaacgctcagaagttgcagtatcttgcgtttgcgagctggcttggtattgtgctttgcctcttttggaattttattgctgtcatagtctgttggatcagagggggagattctaaactatttttcctggctaccatctatggtatgcttggcatccctttgtcctacttgatgtggtatagacctctgtaccgagcaatgagaactgacagtgctttcagctttggatggtttttcctttgttacctgctccatattggtttttgcatatttgctgccattgctcctgcagttgtattccgtggaaaatcattaacgggtatactggcagcgatcgacaccttttctgatcatgcaatagttgggatcttttactttgtcggatttgccttgttttgcttggagacacttgtgagcatatgggttcttcagaaagtatacatgtacttcagagggcacaagtaggctatggaagcacttgcaatagtcaaccaactaccatctcatctgattgccatgtggttttgtatgttaggacaacgtatatttttccgtttgcattgtggagggtaagtacgactatatgtataattttcggtttgcatggtggagggtaaatacgactatattgtagcgtctctctcgactgatctgtttttaaccccaattctttgctcatatacaaattgtgctttgtatgc

SEQ ID NO: 34076 - protein, 214 aa, Zea mays subsp. mays
  peptide (1)..(214): Ceres Seq. ID no. 12367241
  misc_feature (40)..(214): Pfam Name: Pfam Description:  SCAMP family
  misc_feature (1)..(214): NCBI GI NO: 38347080 NR Description: OSJNBa0006A01.21
  misc_feature (1)..(214): NCBI GI NO: 15222550 NR Description: secretory carrier membrane protein, putative
  misc_feature (1)..(204): NCBI GI NO: 38567965 NR Description: OSJNBa0093F12.6
  misc_feature (1)..(212): NCBI GI NO: 15219893 NR Description: secretory carrier membrane protein
  misc_feature (1)..(214): NCBI GI NO: 15226410 NR Description: putative secretory carrier-associated membraneprotein
  misc_feature (1)..(212): NCBI GI NO: 3941289 NR Description: similarity to SCAMP37 [Pisum sativum]
  misc_feature (1)..(212): NCBI GI NO: 15220305 NR Description: secretory carrier membrane protein, putative
  misc_feature (1)..(214): NCBI GI NO: 7109232 NR Description: secretory carrier membrane protein [Oryza sativa]
  misc_feature (1)..(214): NCBI GI NO: 34899754 NR Description: putative secretory carrier membrane protein
  misc_feature (1)..(214): NCBI GI NO: 18379111 NR Description: expressed protein; protein id: At1g03550
MNDSKGKAKELSQWESDLRRRESDIRRREEALKSAGVPMEDKNWPPFFPIIHHDIANEIPANAQKLQYLAFASWLGIVLCLFWNFIAVIVCWIRGGDSKLFFLATIYGMLGIPLSYLMWYRPLYRAMRTDSAFSFGWFFLCYLLHIGFCIFAAIAPAVVFRGKSLTGILAAIDTFSDHAIVGIFYFVGFALFCLETLVSIWVLQKVYMYFRGHK

SEQ ID NO: 34077 - protein, 176 aa, Zea mays subsp. mays; identical to SEQ ID NO: 28266
  peptide (1)..(176): Ceres Seq. ID no. 12367242
  misc_feature (2)..(176): Pfam Name: Pfam Description:  SCAMP family
  misc_feature (1)..(176): NCBI GI NO: 38347080 NR Description: OSJNBa0006A01.21
  misc_feature (1)..(176): NCBI GI NO: 15222550 NR Description: secretory carrier membrane protein, putative
  misc_feature (1)..(166): NCBI GI NO: 38567965 NR Description: OSJNBa0093F12.6
  misc_feature (1)..(174): NCBI GI NO: 15219893 NR Description: secretory carrier membrane protein
  misc_feature (1)..(176): NCBI GI NO: 15226410 NR Description: putative secretory carrier-associated membraneprotein
  misc_feature (1)..(174): NCBI GI NO: 3941289 NR Description: similarity to SCAMP37 [Pisum sativum]
  misc_feature (1)..(174): NCBI GI NO: 15220305 NR Description: secretory carrier membrane protein, putative
  misc_feature (1)..(176): NCBI GI NO: 7109232 NR Description: secretory carrier membrane protein [Oryza sativa]
  misc_feature (1)..(176): NCBI GI NO: 34899754 NR Description: putative secretory carrier membrane protein
  misc_feature (1)..(176): NCBI GI NO: 18379111 NR Description: expressed protein; protein id: At1g03550

SEQ ID NO: 34078 - DNA, 1636 bp, Zea mays subsp. mays
  misc_feature (1)..(1636): Ceres Seq. ID no. 12372649
gcacgagaccattacctagaacatcctaatcgaaaagaccgatagaacacgaccttaggggttcagatcggatcggaagcttccataagtttccatcgggcgtcgccggtatggcgatccgcaaggggtcttcgtacgccgtcgcggcacttctcgcgctcgcctctgtcgccgccgtcgcaggggaggtcttcttccaggagaagttcgaagatggctgggaaagtaggtgggtcaagtctgagtggaagaaggatgagaacatggctggtgaatggaaccacacctcgggaaaatggaatggagatgccgaggacaaaggtattcaaacctccgaggattacaggttctatgccatttcagccgaataccctgagttcagcaacaaggataagaccctggtgctgcagttctctgtgaagcacgagcagaagcttgactgcggcggtggctacgtcaaattgctgggtggtggtgatgtagaccagaagaaatttggtggagacacatcttacagcattatgtttggaccagatatctgtgggtacagcaccaagaaggttcacactatcctgaccaaggatggcaagaaccacttgatcaagaaggatgtgccttgtgagactgatcagttgactcatgtttacactttgatcatccgtcctgatgcaacatacagcattctcattgataatgaagagaagcaaactggcagcatctacgagcattgggatattcttccccctaagaaaatcaaggacccagaggctaagaagcctgaggactgggatgacaaggagtacattcctgaccctgaggacaagaagccagagggctatgatgatattcccaaggaaattcctgaccctgatgctaagaagcctgaggactgggacgatgaggaagatggtgaatggactgcccctaccattcccaacccagaatacaagggaccatggaaacaaaagaaaatcaagaacccgaactaccagggtaaatggaaggcacctatgattgacaacccagattttaaggatgatccatacatttacgccttcgacagcttgaagtacattggcattgagctgtggcaggttaaatcgggcactctgtttgacaacatcatcatcactgatgaccctgcgttggccaagacttttgcagaggagacctggggcaagcacaaggaggcagaaaaggctgcttttgatgaggccgagaaaaagaaggaagaagaggatgccgccaagggtggggatgatgaggatgatgacctagaggatgaggaagacgatgagaaggcagacgaggacaaggccgactctgatgccgaggatagcaaggattctgatgatgagaagcagcacgacgagctctagatggcgaggatgatgtttcgcgccgctggcctagatttatcagctctgccactatgaagttctttttttttcccgtgaccaccaagaatgtagaacactgctaataagcagatggacagtttgggtcgccgtagcgctttgtagtcatttttcccattaaagccgataacactgaacaaggaggaaggatcttttgcccacgattgttatctccctttctgatgttaaatgtgagcctttgcggcgagtttaggttc

SEQ ID NO: 34079 - protein, 422 aa, Zea mays subsp. mays
  peptide (1)..(422): Ceres Seq. ID no. 12372650
  misc_feature (27)..(340): Pfam Name: Pfam Description:  Calreticulin family
  misc_feature (1)..(422): NCBI GI NO: 2119370 NR Description: calreticulin precursor - maize
  misc_feature (1)..(422): NCBI GI NO: 11131840 NR Description: Calreticulin precursor
  misc_feature (13)..(422): NCBI GI NO: 7441498 NR Description: calreticulin - barley (fragment)
  misc_feature (10)..(422): NCBI GI NO: 7441499 NR Description: calreticulin - barley (fragment)
  misc_feature (1)..(422): NCBI GI NO: 11131838 NR Description: Calreticulin precursor
  misc_feature (1)..(422): NCBI GI NO: 11131745 NR Description: Calreticulin precursor
  misc_feature (5)..(422): NCBI GI NO: 11131631 NR Description: Calreticulin precursor
  misc_feature (1)..(422): NCBI GI NO: 11131769 NR Description: Calreticulin precursor
  misc_feature (15)..(422): NCBI GI NO: 11131949 NR Description: Calreticulin precursor
  misc_feature (1)..(422): NCBI GI NO: 11131904 NR Description: Calreticulin precursor
MAIRKGSSYAVAALLALASVAAVAGEVFFQEKFEDGWESRWVKSEWKKDENMAGEWNHTSGKWNGDAEDKGIQTSEDYRFYAISAEYPEFSNKDKTLVLQFSVKHEQKLDCGGGYVKLLGGGDVDQKKFGGDTSYSIMFGPDICGYSTKKVHTILTKDGKNHLIKKDVPCETDQLTHVYTLIIRPDATYSILIDNEEKQTGSIYEHWDILPPKKIKDPEAKKPEDWDDKEYIPDPEDKKPEGYDDIPKEIPDPDAKKPEDWDDEEDGEWTAPTIPNPEYKGPWKQKKIKNPNYQGKWKAPMIDNPDFKDDPYIYAFDSLKYIGIELWQVKSGTLFDNIIITDDPALAKTFAEETWGKHKEAEKAAFDEAEKKKEEEDAAKGGDDEDDDLEDEEDDEKADEDKADSDAEDSKDSDDEKQHDEL

SEQ ID NO: 34080 - protein, 371 aa, Zea mays subsp. mays
  peptide (1)..(371): Ceres Seq. ID no. 12372651
  misc_feature (1)..(289): Pfam Name: Pfam Description:  Calreticulin family
  misc_feature (1)..(371): NCBI GI NO: 2119370 NR Description: calreticulin precursor - maize
  misc_feature (1)..(371): NCBI GI NO: 11131840 NR Description: Calreticulin precursor
  misc_feature (1)..(371): NCBI GI NO: 7441498 NR Description: calreticulin - barley (fragment)
  misc_feature (1)..(371): NCBI GI NO: 7441499 NR Description: calreticulin - barley (fragment)
  misc_feature (1)..(371): NCBI GI NO: 11131838 NR Description: Calreticulin precursor
  misc_feature (1)..(371): NCBI GI NO: 11131745 NR Description: Calreticulin precursor
  misc_feature (1)..(371): NCBI GI NO: 11131631 NR Description: Calreticulin precursor
  misc_feature (1)..(371): NCBI GI NO: 11131769 NR Description: Calreticulin precursor
  misc_feature (1)..(371): NCBI GI NO: 11131949 NR Description: Calreticulin precursor
  misc_feature (1)..(371): NCBI GI NO: 11131904 NR Description: Calreticulin precursor
MAGEWNHTSGKWNGDAEDKGIQTSEDYRFYAISAEYPEFSNKDKTLVLQFSVKHEQKLDCGGGYVKLLGGGDVDQKKFGGDTSYSIMFGPDICGYSTKKVHTILTKDGKNHLIKKDVPCETDQLTHVYTLIIRPDATYSILIDNEEKQTGSIYEHWDILPPKKIKDPEAKKPEDWDDKEYIPDPEDKKPEGYDDIPKEIPDPDAKKPEDWDDEEDGEWTAPTIPNPEYKGPWKQKKIKNPNYQGKWKAPMIDNPDFKDDPYIYAFDSLKYIGIELWQVKSGTLFDNIIITDDPALAKTFAEETWGKHKEAEKAAFDEAEKKKEEEDAAKGGDDEDDDLEDEEDDEKADEDKADSDAEDSKDSDDEKQHDEL

SEQ ID NO: 34081 - protein, 285 aa, Zea mays subsp. mays
  peptide (1)..(285): Ceres Seq. ID no. 12372652
  misc_feature (1)..(203): Pfam Name: Pfam Description:  Calreticulin family
  misc_feature (1)..(285): NCBI GI NO: 2119370 NR Description: calreticulin precursor - maize
  misc_feature (1)..(285): NCBI GI NO: 11131840 NR Description: Calreticulin precursor
  misc_feature (1)..(285): NCBI GI NO: 7441498 NR Description: calreticulin - barley (fragment)
  misc_feature (1)..(285): NCBI GI NO: 7441499 NR Description: calreticulin - barley (fragment)
  misc_feature (1)..(285): NCBI GI NO: 11131838 NR Description: Calreticulin precursor
  misc_feature (1)..(285): NCBI GI NO: 11131745 NR Description: Calreticulin precursor
  misc_feature (1)..(285): NCBI GI NO: 11131631 NR Description: Calreticulin precursor
  misc_feature (1)..(285): NCBI GI NO: 11131769 NR Description: Calreticulin precursor
  misc_feature (1)..(285): NCBI GI NO: 11131949 NR Description: Calreticulin precursor
  misc_feature (1)..(285): NCBI GI NO: 11131904 NR Description: Calreticulin precursor
MFGPDICGYSTKKVHTILTKDGKNHLIKKDVPCETDQLTHVYTLIIRPDATYSILIDNEEKQTGSIYEHWDILPPKKIKDPEAKKPEDWDDKEYIPDPEDKKPEGYDDIPKEIPDPDAKKPEDWDDEEDGEWTAPTIPNPEYKGPWKQKKIKNPNYQGKWKAPMIDNPDFKDDPYIYAFDSLKYIGIELWQVKSGTLFDNIIITDDPALAKTFAEETWGKHKEAEKAAFDEAEKKKEEEDAAKGGDDEDDDLEDEEDDEKADEDKADSDAEDSKDSDDEKQHDEL

SEQ ID NO: 34082 - DNA, 1203 bp, Zea mays subsp. mays; identical to SEQ ID NO: 25701
  misc_feature (1)..(1203): Ceres Seq. ID no. 12566771

SEQ ID NO: 34083 - protein, 160 aa, Zea mays subsp. mays; identical to SEQ ID NO: 25702
  peptide (1)..(160): Ceres Seq. ID no. 12566772
  misc_feature (1)..(154): Pfam Name: Pfam Description:  Uncharacterised protein family UPF0005
  misc_feature (1)..(160): NCBI GI NO: 18414455 NR Description: Expressed protein; protein id: At4g15470
  misc_feature (1)..(118): NCBI GI NO: 15810201 NR Description: AT4g15470/dl3775w [Arabidopsis thaliana]
  misc_feature (1)..(158): NCBI GI NO: 14626300 NR Description: putative receptor-associated protein
  misc_feature (1)..(155): NCBI GI NO: 34393841 NR Description: putative z-protein
  misc_feature (1)..(158): NCBI GI NO: 15229411 NR Description: putative protein; protein id: At3g63310.1
  misc_feature (1)..(157): NCBI GI NO: 15235466 NR Description: putative glutamate-/aspartate-binding peptide
  misc_feature (1)..(157): NCBI GI NO: 15218701 NR Description: putative glutamate/aspartate-binding peptide
  misc_feature (38)..(109): NCBI GI NO: 7485070 NR Description: hypothetical protein - Arabidopsis thaliana
  misc_feature (1)..(38): NCBI GI NO: 7485070 NR Description: hypothetical protein - Arabidopsis thaliana
  misc_feature (1)..(158): NCBI GI NO: 34393840 NR Description: putative z-protein

SEQ ID NO: 34084 - protein, 158 aa, Zea mays subsp. mays; identical to SEQ ID NO: 25703
  peptide (1)..(158): Ceres Seq. ID no. 12566773

SEQ ID NO: 34085 - protein, 138 aa, Zea mays subsp. mays; identical to SEQ ID NO: 25704
  peptide (1)..(138): Ceres Seq. ID no. 12566774
  misc_feature (30)..(63): NCBI GI NO: 18414455 NR Description: Expressed protein; protein id: At4g15470
  misc_feature (30)..(63): NCBI GI NO: 15810201 NR Description: AT4g15470/dl3775w [Arabidopsis thaliana]
  misc_feature (30)..(63): NCBI GI NO: 7485070 NR Description: hypothetical protein - Arabidopsis thaliana

SEQ ID NO: 34086 - DNA, 1563 bp, Zea mays subsp. mays
  misc_feature (1)..(1563): Ceres Seq. ID no. 12358091
accttcctccacggctccaccatcccctcccctgccctgcccccaccgccccgcttccttccgccttgctccgttgcttcctcccaccacagtccactccactcgccggccctgcagctcagtatttgactgagactggtggtggagctgctagcagcgagcctgctacttcctggtcctgacggtgcgttcagacctcagaccagtgccgacgacgagctgtgaggagagggcaaggaagcaagcctgtgaggaaggcggcgatggagaggtacgaggtgatcaaggacataggatcgggcaacttcggggtggccaagctggtccgggacgtcaggaccaaggagctcttcgccgtcaagttcatcgagcgggggatgaagattgatgagaatgtccaaagggagatcatgaaccacaggtcactgaggcatccaaacatagttaaatttaaggaggttgtgctaactcccacacatttggccatagttatggaatatgctgctggtggtgagctatttgaaaggatctgtaatgctggaagatttagtgaggatgaggcgagatttttcttccaacaactgatttcaggagttagttattgccactcaatgcaaatatgccatagagatttgaaactagaaaacactctcctggatgatagtatagcacctcggctaaagatatgtgattttggttactccaagtcctctgtgttgcactctcaaccaaaatcaactgtcgggacaccagcttacattgctcctgaggtccttgctagaaaggaatatgatggaaaggtcgccgatgtttggtcatgtggagttactctgtatgtgatgcttgttggtgcctatccctttgaggaccccgacgaaccgaagaatttccgcaagacgcttactcggattatcagcgtccagtacgcggttcctgattttgtccgagtttcaatggagtgcaggcatctgctgtctcggatctttgtggcgaaacctgagcaacggataaccatcccagagatcaagaaccacccatggttcttgaagaacctgcccatcgagatgaccgacgagtaccagatgaacctacagctagtcgacatgaatgtcccctcgcaaagcctggaggagatcatgtccatcatactggaggcccggaagcccggcgacgggctgaagcatgcgggacagctccccggccttgggagcatggagctggatgacattgatgttgacgacatagacgttgaggacagtggcgactttgtatgtgccttgtgacgcggttcaggctgtccggcaccgttgctgcggtggactctcccccactctcctggtctttgtgtcttgctgttattccatgttgtttgtttcagcgagctccgagctcccattttgttgttgtaatatcacatgttttgtgtaaccaaggtagtgacgctgtggataaataatagacgttatgtgttgtattcttgctgaattgttgttcagctccttctgtttgccctgtatgaactgggcagtttcatgagtaccacaatgtgtatgttgatggccc

SEQ ID NO: 34087 - protein, 339 aa, Zea mays subsp. mays; identical to SEQ ID NO: 23775
  peptide (1)..(339): Ceres Seq. ID no. 12358092
  misc_feature (4)..(260): Pfam Name: Pfam Description:  Protein kinase domain
  misc_feature (1)..(339): NCBI GI NO: 29164823 NR Description: abcisic acid-inducible protein kinanase
  misc_feature (1)..(339): NCBI GI NO: 14588571 NR Description: protein kinase HvPKABA1
  misc_feature (11)..(339): NCBI GI NO: 416564 NR Description: Abcisic acid-inducible protein kinase
  misc_feature (1)..(328): NCBI GI NO: 2055374 NR Description: serine-threonine protein kinase
  misc_feature (11)..(339): NCBI GI NO: 11138330 NR Description: putative serine/threonine kinase GDBrPK
  misc_feature (2)..(339): NCBI GI NO: 7446439 NR Description: probable serine/threonine-specific protein kinase
  misc_feature (1)..(339): NCBI GI NO: 481002 NR Description: protein kinase MCPK9 (EC 2
  misc_feature (2)..(339): NCBI GI NO: 18418337 NR Description: protein kinase - like protein
  misc_feature (1)..(331): NCBI GI NO: 15218270 NR Description: serine-threonine protein kinase, putative
  misc_feature (1)..(339): NCBI GI NO: 15240124 NR Description: protein kinase, 41K (EC 2

SEQ ID NO: 34088 - protein, 301 aa, Zea mays subsp. mays; identical to SEQ ID NO: 23776
  peptide (1)..(301): Ceres Seq. ID no. 12358093
  misc_feature (1)..(222): Pfam Name: Pfam Description:  Protein kinase domain
  misc_feature (1)..(301): NCBI GI NO: 29164823 NR Description: abcisic acid-inducible protein kinanase
  misc_feature (1)..(301): NCBI GI NO: 14588571 NR Description: protein kinase HvPKABA1
  misc_feature (1)..(301): NCBI GI NO: 416564 NR Description: Abcisic acid-inducible protein kinase
  misc_feature (1)..(290): NCBI GI NO: 2055374 NR Description: serine-threonine protein kinase
  misc_feature (1)..(301): NCBI GI NO: 11138330 NR Description: putative serine/threonine kinase GDBrPK
  misc_feature (1)..(301): NCBI GI NO: 7446439 NR Description: probable serine/threonine-specific protein kinase
  misc_feature (1)..(301): NCBI GI NO: 481002 NR Description: protein kinase MCPK9 (EC 2
  misc_feature (1)..(301): NCBI GI NO: 18418337 NR Description: protein kinase - like protein
  misc_feature (1)..(293): NCBI GI NO: 15218270 NR Description: serine-threonine protein kinase, putative
  misc_feature (1)..(301): NCBI GI NO: 15240124 NR Description: protein kinase, 41K (EC 2

SEQ ID NO: 34089 - protein, 290 aa, Zea mays subsp. mays; identical to SEQ ID NO: 23777
  peptide (1)..(290): Ceres Seq. ID no. 12358094
  misc_feature (1)..(211): Pfam Name: Pfam Description:  Protein kinase domain
  misc_feature (1)..(290): NCBI GI NO: 29164823 NR Description: abcisic acid-inducible protein kinanase
  misc_feature (1)..(290): NCBI GI NO: 14588571 NR Description: protein kinase HvPKABA1
  misc_feature (1)..(290): NCBI GI NO: 416564 NR Description: Abcisic acid-inducible protein kinase
  misc_feature (1)..(279): NCBI GI NO: 2055374 NR Description: serine-threonine protein kinase
  misc_feature (1)..(290): NCBI GI NO: 11138330 NR Description: putative serine/threonine kinase GDBrPK
  misc_feature (1)..(290): NCBI GI NO: 7446439 NR Description: probable serine/threonine-specific protein kinase
  misc_feature (1)..(290): NCBI GI NO: 481002 NR Description: protein kinase MCPK9 (EC 2
  misc_feature (1)..(290): NCBI GI NO: 18418337 NR Description: protein kinase - like protein
  misc_feature (1)..(282): NCBI GI NO: 15218270 NR Description: serine-threonine protein kinase, putative
  misc_feature (1)..(290): NCBI GI NO: 15240124 NR Description: protein kinase, 41K (EC 2

SEQ ID NO: 34090 - DNA, 1108 bp, Zea mays subsp. mays
  misc_feature (1)..(1108): Ceres Seq. ID no. 12414365
acacgcgtgcacgggcgggcaagcaccagaaaggaaaggcggaggccgcgcggcgggcccagctgcagccaagagcccactagtagtagtagtagctagttcaccaccgcctgcttgcctcctttactttgccatatttgctagcgtttcctggattggggacgcttccgtttcgggaagccgtgaagggatcggccacgacgatggtgcgggggaagacggagctgaagcggatagagaacgcgacgagccggcaggtgaccttctcgaagcgccgcaacgggctgctcaagaaggccttcgagctctccgtgctctgcgatgctgaggtcgggctcgtcgtcttctccccgcgcggcaagctctacgagttcgccagcgccgccagcctccagaaaacaattgaccgctacaggacatacacaagggaaaatgtcaataacaagactgttcaacaagatatacagcaagtcaaagcagatgccgtaagcttggcaagtagactcgaagccctagaaaagaccaaacgaatgtttctgggtgaaaatttagaagaatgctccattgaagaactgcataatctggaggttaaactggcgaagagccttcacgtcatcagagggaagaagacacaactgctggagcattcttctaaattttcacccagaaacattcgtaaggtcggcatgcgctacttccacaagtccgcaacaagttctactgccccgcggtcaacatcgagcgcctctggtcgatggtgcccgccgaaaaggcggcggaagccggcggcgacaaggccccgcagatcgacgtcacgcagttcggcttcttcaaggtgctcgggaagggggtgctgccgcccaagcccatcgtcgtcaaggccaagctcatctccaaggtcgccgagaagaagatcaaggccgccggcggcgccgtcgtgctcaccgcctagttttcagtccttattcgcctcttggttttgagatctatatctgaactagcagtctttcttgtctcacctatttgtgttaagaagacgtagtttttaaatccatggctccttcctgtttggacagtgctttcatatcaaatatttcaggtatattag

SEQ ID NO: 34091 - protein, 259 aa, Zea mays subsp. mays
  peptide (1)..(259): Ceres Seq. ID no. 12414366
  misc_feature (73)..(147): Pfam Name: Pfam Description:  K-box region
  misc_feature (1)..(147): NCBI GI NO: 12002139 NR Description: MADS box protein 1 [Zea mays]
  misc_feature (1)..(185): NCBI GI NO: 5051933 NR Description: MADS-box protein FDRMADS8 [Oryza sativa]
  misc_feature (1)..(147): NCBI GI NO: 5295990 NR Description: MADS box-like protein
  misc_feature (1)..(185): NCBI GI NO: 33621123 NR Description: transcription factor MADS56
  misc_feature (1)..(185): NCBI GI NO: 37536442 NR Description: putative transcription factor
  misc_feature (1)..(147): NCBI GI NO: 6635740 NR Description: agamous-like MADS box protein OPMADS1
  misc_feature (1)..(147): NCBI GI NO: 30171311 NR Description: MADS-box protein [Draba nemorosa var. hebecarpa]
  misc_feature (1)..(147): NCBI GI NO: 15225534 NR Description: MADS-box protein (AGL20); protein id: At2g45660
  misc_feature (1)..(147): NCBI GI NO: 30171309 NR Description: MADS-box protein [Cardamine flexuosa]
  misc_feature (1)..(147): NCBI GI NO: 40641816 NR Description: putative MADS-box transcription factor DEFH68
MVRGKTELKRIENATSRQVTFSKRRNGLLKKAFELSVLCDAEVGLVVFSPRGKLYEFASAASLQKTIDRYRTYTRENVNNKTVQQDIQQVKADAVSLASRLEALEKTKRMFLGENLEECSIEELHNLEVKLAKSLHVIRGKKTQLLEHSSKFSPRNIRKVGMRYFHKSATSSTAPRSTSSASGRWCPPKRRRKPAATRPRRSTSRSSASSRCSGRGCCRPSPSSSRPSSSPRSPRRRSRPPAAPSCSPPSFQSLFASWF

SEQ ID NO: 34092 - protein, 150 aa, Zea mays subsp. mays
  peptide (1)..(150): Ceres Seq. ID no. 12414367
  misc_feature (1)..(38): NCBI GI NO: 12002139 NR Description: MADS box protein 1 [Zea mays]
  misc_feature (1)..(76): NCBI GI NO: 5051933 NR Description: MADS-box protein FDRMADS8 [Oryza sativa]
  misc_feature (1)..(38): NCBI GI NO: 5295990 NR Description: MADS box-like protein
  misc_feature (1)..(76): NCBI GI NO: 33621123 NR Description: transcription factor MADS56
  misc_feature (1)..(76): NCBI GI NO: 37536442 NR Description: putative transcription factor
  misc_feature (1)..(38): NCBI GI NO: 6635740 NR Description: agamous-like MADS box protein OPMADS1
  misc_feature (1)..(38): NCBI GI NO: 30171311 NR Description: MADS-box protein [Draba nemorosa var. hebecarpa]
  misc_feature (1)..(38): NCBI GI NO: 15225534 NR Description: MADS-box protein (AGL20); protein id: At2g45660
  misc_feature (1)..(38): NCBI GI NO: 30171309 NR Description: MADS-box protein [Cardamine flexuosa]
  misc_feature (1)..(38): NCBI GI NO: 40641816 NR Description: putative MADS-box transcription factor DEFH68
MFLGENLEECSIEELHNLEVKLAKSLHVIRGKKTQLLEHSSKFSPRNIRKVGMRYFHKSATSSTAPRSTSSASGRWCPPKRRRKPAATRPRRSTSRSSASSRCSGRGCCRPSPSSSRPSSSPRSPRRRSRPPAAPSCSPPSFQSLFASWF

SEQ ID NO: 34093 - DNA, 1696 bp, Zea mays subsp. mays
  misc_feature (1)..(1696): Ceres Seq. ID no. 12360761
gcacgagaccattacctagaacatcctaatcgaaaagaacgcttccgccccgccgccaccttccccgctctcctccctccgctcgcctccgcttccgttccgcgccctgcccccggaaggcaagcaaagccctcgctacttgcggagcgtcgttggtcaaaccctagcacacgtacgagcaggccagccccgcccgctcccattcccaggccctcatccatggcggcgctctccgtgcccctccacgccgccgccggatcccgcgccgccgcggccgaccccgtcaaggttccgtgcgtgaggagcactggttcagcccatttcggccgcgccttcccctccgtcgcggtctcctctttggctgcgaggcacatcgagccgatgagagcgatagctacacaggcgccccctgccgtgccacaatatttgagtggcgagaagacaaagatcggcatcaacggctttgggcggattggcaggttggtcctgcgaattgcaactagcagagacgatattgaagttgtggctgtgaatgaccctttcgttgatgctaagtacatggcctatatgttcaagtatgactctactcatggcccgtttaaaggttctatttgtgttgtggatgattcaaccctggagatcaatgggaagaaggtcacaattacaagcaaaagagatcctgcagagattccatggggtaactttggggctgaatatgttgttgaatcttctggtgtctttacaacgactgataaagcatcagcacacttaaagggtggtgctaagaaagtggtgatatctgcaccatcagcagatgctcccatgtttgtagttggagttaatgagaatagctatgattcgaagatgaatgttgtttctaatgcaagttgcaccaccaactgccttgctccacttgccaaggttgtacatgaggaatttggcatcgtggagggccttatgacaactgttcatgccacaacagccacccagaagaccgttgatggtccttcaatgaaggattggagaggaggacgtggtgctggccaaaacataattcctagctccactggtgcagcaaaggctgttggaaaagttctgcctgagctgaatggaaagctcactggcatggccttccgagttccaacaccaaatgtctctgttgtggacttgacatgccggattgagaaaaacgcctcctatgatgatgtgaaagcagccatcaaggcggcatcagagggtgcactcaaaggtattcttggctacacagacgaggacgttgtttccaatgattttgttggtgattctaggtcaagcatctttgatgccaaggctggtatcggactgagctcttctttcatgaagcttgtgtcttggtatgacaacgagtggggctacagcaaccgggttctggatctgatcgcccacatggctctcgtcagtgccgccgccaagctctgatgtccgtactcgtttctccagtagtagcttagaaaaaaagactgcaattttgacggccattttctgttagctgttgtttggaataagatcaaatgctggaacacttcgaactcgcgcgagactggactcagatccatggcctgtattttagttgtagaagtgggcaaatttgcaccgtagtaccctggcatggttatatgcggaattgttgattgatgagtcgttgtacggtttgtcc

SEQ ID NO: 34094 - protein, 485 aa, Zea mays subsp. mays
  peptide (1)..(485): Ceres Seq. ID no. 12360762
  misc_feature (298)..(459): Pfam Name: Pfam Description:  Glyceraldehyde 3-phosphate dehydrogenase
  misc_feature (78)..(481): NCBI GI NO: 2129471 NR Description: glyceraldehyde-3-phosphate dehydrogenase
  misc_feature (78)..(481): NCBI GI NO: 2129472 NR Description: glyceraldehyde-3-phosphate dehydrogenase
  misc_feature (105)..(483): NCBI GI NO: 18072805 NR Description: glyceraldehyde-3-phosphate dehydrogenase
  misc_feature (102)..(482): NCBI GI NO: 27754473 NR Description: putative glyceraldehyde-3-phosphate dehydrogenase
  misc_feature (102)..(482): NCBI GI NO: 15219206 NR Description: putative glyceraldehyde-3-phosphate dehydrogenase
  misc_feature (102)..(482): NCBI GI NO: 21618027 NR Description: putative glyceraldehyde-3-phosphate dehydrogenase
  misc_feature (121)..(481): NCBI GI NO: 3059140 NR Description: NAD-dependent glyceraldehyde-3-phosphatedehydrogenase
  misc_feature (112)..(482): NCBI GI NO: 15219406 NR Description: glyceraldehyde-3-phosphate dehydrogenase, putative
  misc_feature (102)..(482): NCBI GI NO: 25284351 NR Description: hypothetical protein F3O9
  misc_feature (121)..(484): NCBI GI NO: 3059122 NR Description: glyeraldehyde-3-phosphate dehydrogenase
ARDHYLEHPNRKERFRPAATFPALLPPLASASVPRPAPGRQAKPSLLAERRWSNPSTRTSRPAPPAPIPRPSSMAALSVPLHAAAGSRAAAADPVKVPCVRSTGSAHFGRAFPSVAVSSLAARHIEPMRAIATQAPPAVPQYLSGEKTKIGINGFGRIGRLVLRIATSRDDIEVVAVNDPFVDAKYMAYMFKYDSTHGPFKGSICVVDDSTLEINGKKVTITSKRDPAEIPWGNFGAEYVVESSGVFTTTDKASAHLKGGAKKVVISAPSADAPMFVVGVNENSYDSKMNVVSNASCTTNCLAPLAKVVHEEFGIVEGLMTTVHATTATQKTVDGPSMKDWRGGRGAGQNIIPSSTGAAKAVGKVLPELNGKLTGMAFRVPTPNVSVVDLTCRIEKNASYDDVKAAIKAASEGALKGILGYTDEDVVSNDFVGDSRSSIFDAKAGIGLSSSFMKLVSWYDNEWGYSNRVLDLIAHMALVSAAAKL

SEQ ID NO: 34095 - protein, 412 aa, Zea mays subsp. mays; identical to SEQ ID NO: 23982
  peptide (1)..(412): Ceres Seq. ID no. 12360763
  misc_feature (225)..(386): Pfam Name: Pfam Description:  Glyceraldehyde 3-phosphate dehydrogenase
  misc_feature (5)..(408): NCBI GI NO: 2129471 NR Description: glyceraldehyde-3-phosphate dehydrogenase
  misc_feature (5)..(408): NCBI GI NO: 2129472 NR Description: glyceraldehyde-3-phosphate dehydrogenase
  misc_feature (32)..(410): NCBI GI NO: 18072805 NR Description: glyceraldehyde-3-phosphate dehydrogenase
  misc_feature (29)..(409): NCBI GI NO: 27754473 NR Description: putative glyceraldehyde-3-phosphate dehydrogenase
  misc_feature (29)..(409): NCBI GI NO: 15219206 NR Description: putative glyceraldehyde-3-phosphate dehydrogenase
  misc_feature (29)..(409): NCBI GI NO: 21618027 NR Description: putative glyceraldehyde-3-phosphate dehydrogenase
  misc_feature (48)..(408): NCBI GI NO: 3059140 NR Description: NAD-dependent glyceraldehyde-3-phosphatedehydrogenase
  misc_feature (39)..(409): NCBI GI NO: 15219406 NR Description: glyceraldehyde-3-phosphate dehydrogenase, putative
  misc_feature (29)..(409): NCBI GI NO: 25284351 NR Description: hypothetical protein F3O9
  misc_feature (48)..(411): NCBI GI NO: 3059122 NR Description: glyeraldehyde-3-phosphate dehydrogenase

SEQ ID NO: 34096 - protein, 358 aa, Zea mays subsp. mays; identical to SEQ ID NO: 23983
  peptide (1)..(358): Ceres Seq. ID no. 12360764
  misc_feature (171)..(332): Pfam Name: Pfam Description:  Glyceraldehyde 3-phosphate dehydrogenase
  misc_feature (1)..(354): NCBI GI NO: 2129471 NR Description: glyceraldehyde-3-phosphate dehydrogenase
  misc_feature (1)..(354): NCBI GI NO: 2129472 NR Description: glyceraldehyde-3-phosphate dehydrogenase
  misc_feature (1)..(356): NCBI GI NO: 18072805 NR Description: glyceraldehyde-3-phosphate dehydrogenase
  misc_feature (1)..(355): NCBI GI NO: 27754473 NR Description: putative glyceraldehyde-3-phosphate dehydrogenase
  misc_feature (1)..(355): NCBI GI NO: 15219206 NR Description: putative glyceraldehyde-3-phosphate dehydrogenase
  misc_feature (1)..(355): NCBI GI NO: 21618027 NR Description: putative glyceraldehyde-3-phosphate dehydrogenase
  misc_feature (1)..(354): NCBI GI NO: 3059140 NR Description: NAD-dependent glyceraldehyde-3-phosphatedehydrogenase
  misc_feature (1)..(355): NCBI GI NO: 15219406 NR Description: glyceraldehyde-3-phosphate dehydrogenase, putative
  misc_feature (1)..(355): NCBI GI NO: 25284351 NR Description: hypothetical protein F3O9
  misc_feature (1)..(357): NCBI GI NO: 3059122 NR Description: glyeraldehyde-3-phosphate dehydrogenase

SEQ ID NO: 34097 - DNA, 1756 bp, Zea mays subsp. mays
  misc_feature (1)..(1756): Ceres Seq. ID no. 12348840
agtttttgttcctgctcctcgcaccgcgcgccgccgacgccgcagccatgaacggtgacggcagcaaggaggacgccaacaggcgcctcgagtgggccaccttgaacctggagcgcggcgtcgtcgtgagcgagacgacgaagggcgacggcaatggcaatgcaggccggaaggcgccgataagcatcgtccggctcttcttggcctgcatggtctccggcggcatccagtacggctgggcgctgcagctctccctcctctcgccctactctcagactcttgggatctcgcacagctacgtgtctctgacatggatctgcgggcctatcgccggatttgtggtgcaacccatcgtgggctactacagcgaccggtgcacctcgaagatgggccggaggaggcccttcatcctcgcgggatgcatcatcatctgcctctctgtgttggtgatcgggttctcggcggacatcgggcggcgcctcggcgacaccaaggagcactgcagcacgttcaccggctcccgctggtccgccgccgccgtctacattgtcggattttggttccttgacttcgccaacaacacggtacagggaccggctcgcgcgatgatggccgacctggcagctggacagcacggccccaacgttggccaggcgatcttctccctgtggatggccctcggcagcgtgctcggatacttgtccggcgccaacgcgaaatggcacgactggctcccttggctcaaaaccgcggcgtgctgcgatgcgtgcgccaacctcaagggcgccttcttgactgcggtggtcctcattataatcagcatgtctgtcaccttgtggctcgccggcgaggagcggctcgacaaggaaagcgtcgacacctccggcggcgcgtgctccgcgttcatggatctcttcaagaccctcaagaagcttccgcctgccatgttcagcgtgctcgccgtcacggccgtcacatggctctcgtggttccccttcttccagtacaacaccgactggatgggccgggagatcttccacggcgagccgcagggcgcgggcggaaaggcggacctgtacgaagccggcgtccgcgagggcgccatcggcctcctattctgctccgtcgcgctcggtgtcacctccttcttcatccccaggctgtgccggaagctcacgtcccgggtcgtctggtccgtcagcagcctgatggtgttcgtcctcatgacggccatggtcgtcctcggcatggtctccatgaagggctacaggccctcgctcgccgcctccctctctggccccgaccactcgttcaagggcggcgccctcgccatcttcgcgctcatcggcatccctcaggccgtgctctacagcgtgccttgggccgtggcgtctgaggttgccaccgaggacggcggtggtcaaggtctcaccattggcgtcctcaacattgcaatcgtccttccacagctggtgatcgcgctgggcgcaggccccatcgacggcgccttcaacaaaggaaacaccccggccttcggcatcggcgccgccttcgcccttatctgcgcggtcctggcgctcatcctcctcccaaagacgagaggcgtctccaacgccaccgtcatggccggcgggcactgatctattatctatctccaggcaggcttgtcgcagcggctgaccggctgagagtagatcagaaattcagaatctgcttcttggtttcagccccacccgattaaggaggtgtttgattc

SEQ ID NO: 34098 - protein, 545 aa, Zea mays subsp. mays
  peptide (1)..(545): Ceres Seq. ID no. 12348841
  misc_feature (65)..(544): Pfam Name: and other Pfam Description: Sugar
  misc_feature (31)..(545): NCBI GI NO: 29467456 NR Description: sucrose transporter
  misc_feature (36)..(545): NCBI GI NO: 5771354 NR Description: Sucrose Transporter [Zea mays]
  misc_feature (34)..(545): NCBI GI NO: 9624451 NR Description: sucrose transporter [Oryza sativa subsp. indica]
  misc_feature (47)..(545): NCBI GI NO: 7489560 NR Description: probable sucrose transport protein - rice
  misc_feature (49)..(545): NCBI GI NO: 15718401 NR Description: sucrose transporter
  misc_feature (40)..(545): NCBI GI NO: 20152871 NR Description: sucrose transporter SUT1A [Triticum aestivum]
  misc_feature (40)..(545): NCBI GI NO: 7024415 NR Description: sucrose transporter 1
  misc_feature (49)..(545): NCBI GI NO: 16152148 NR Description: sucrose transporter [Oryza sativa subsp. indica]
  misc_feature (40)..(545): NCBI GI NO: 19548165 NR Description: sucrose transporter SUT1D [Triticum aestivum]
  misc_feature (40)..(545): NCBI GI NO: 20152873 NR Description: sucrose transporter SUT1B [Triticum aestivum]
FLFLLLAPRAADAAAMNGDGSKEDANRRLEWATLNLERGVVVSETTKGDGNGNAGRKAPISIVRLFLACMVSGGIQYGWALQLSLLSPYSQTLGISHSYVSLTWICGPIAGFVVQPIVGYYSDRCTSKMGRRRPFILAGCIIICLSVLVIGFSADIGRRLGDTKEHCSTFTGSRWSAAAVYIVGFWFLDFANNTVQGPARAMMADLAAGQHGPNVGQAIFSLWMALGSVLGYLSGANAKWHDWLPWLKTAACCDACANLKGAFLTAVVLIIISMSVTLWLAGEERLDKESVDTSGGACSAFMDLFKTLKKLPPAMFSVLAVTAVTWLSWFPFFQYNTDWMGREIFHGEPQGAGGKADLYEAGVREGAIGLLFCSVALGVTSFFIPRLCRKLTSRVVWSVSSLMVFVLMTAMVVLGMVSMKGYRPSLAASLSGPDHSFKGGALAIFALIGIPQAVLYSVPWAVASEVATEDGGGQGLTIGVLNIAIVLPQLVIALGAGPIDGAFNKGNTPAFGIGAAFALICAVLALILLPKTRGVSNATVMAGGH

SEQ ID NO: 34099 - protein, 530 aa, Zea mays subsp. mays
  peptide (1)..(530): Ceres Seq. ID no. 12348842
  misc_feature (50)..(529): Pfam Name: and other Pfam Description: Sugar
  misc_feature (16)..(530): NCBI GI NO: 29467456 NR Description: sucrose transporter
  misc_feature (21)..(530): NCBI GI NO: 5771354 NR Description: Sucrose Transporter [Zea mays]
  misc_feature (19)..(530): NCBI GI NO: 9624451 NR Description: sucrose transporter [Oryza sativa subsp. indica]
  misc_feature (32)..(530): NCBI GI NO: 7489560 NR Description: probable sucrose transport protein - rice
  misc_feature (34)..(530): NCBI GI NO: 15718401 NR Description: sucrose transporter
  misc_feature (25)..(530): NCBI GI NO: 20152871 NR Description: sucrose transporter SUT1A [Triticum aestivum]
  misc_feature (25)..(530): NCBI GI NO: 7024415 NR Description: sucrose transporter 1
  misc_feature (34)..(530): NCBI GI NO: 16152148 NR Description: sucrose transporter [Oryza sativa subsp. indica]
  misc_feature (25)..(530): NCBI GI NO: 19548165 NR Description: sucrose transporter SUT1D [Triticum aestivum]
  misc_feature (25)..(530): NCBI GI NO: 20152873 NR Description: sucrose transporter SUT1B [Triticum aestivum]
MNGDGSKEDANRRLEWATLNLERGVVVSETTKGDGNGNAGRKAPISIVRLFLACMVSGGIQYGWALQLSLLSPYSQTLGISHSYVSLTWICGPIAGFVVQPIVGYYSDRCTSKMGRRRPFILAGCIIICLSVLVIGFSADIGRRLGDTKEHCSTFTGSRWSAAAVYIVGFWFLDFANNTVQGPARAMMADLAAGQHGPNVGQAIFSLWMALGSVLGYLSGANAKWHDWLPWLKTAACCDACANLKGAFLTAVVLIIISMSVTLWLAGEERLDKESVDTSGGACSAFMDLFKTLKKLPPAMFSVLAVTAVTWLSWFPFFQYNTDWMGREIFHGEPQGAGGKADLYEAGVREGAIGLLFCSVALGVTSFFIPRLCRKLTSRVVWSVSSLMVFVLMTAMVVLGMVSMKGYRPSLAASLSGPDHSFKGGALAIFALIGIPQAVLYSVPWAVASEVATEDGGGQGLTIGVLNIAIVLPQLVIALGAGPIDGAFNKGNTPAFGIGAAFALICAVLALILLPKTRGVSNATVMAGGH

SEQ ID NO: 34100 - protein, 476 aa, Zea mays subsp. mays
  peptide (1)..(476): Ceres Seq. ID no. 12348843
  misc_feature (1)..(475): Pfam Name: and other Pfam Description: Sugar
  misc_feature (1)..(476): NCBI GI NO: 29467456 NR Description: sucrose transporter
  misc_feature (1)..(476): NCBI GI NO: 5771354 NR Description: Sucrose Transporter [Zea mays]
  misc_feature (1)..(476): NCBI GI NO: 9624451 NR Description: sucrose transporter [Oryza sativa subsp. indica]
  misc_feature (1)..(476): NCBI GI NO: 7489560 NR Description: probable sucrose transport protein - rice
  misc_feature (1)..(476): NCBI GI NO: 15718401 NR Description: sucrose transporter
  misc_feature (1)..(476): NCBI GI NO: 20152871 NR Description: sucrose transporter SUT1A [Triticum aestivum]
  misc_feature (1)..(476): NCBI GI NO: 7024415 NR Description: sucrose transporter 1
  misc_feature (1)..(476): NCBI GI NO: 16152148 NR Description: sucrose transporter [Oryza sativa subsp. indica]
  misc_feature (1)..(476): NCBI GI NO: 19548165 NR Description: sucrose transporter SUT1D [Triticum aestivum]
  misc_feature (1)..(476): NCBI GI NO: 20152873 NR Description: sucrose transporter SUT1B [Triticum aestivum]
MVSGGIQYGWALQLSLLSPYSQTLGISHSYVSLTWICGPIAGFVVQPIVGYYSDRCTSKMGRRRPFILAGCIIICLSVLVIGFSADIGRRLGDTKEHCSTFTGSRWSAAAVYIVGFWFLDFANNTVQGPARAMMADLAAGQHGPNVGQAIFSLWMALGSVLGYLSGANAKWHDWLPWLKTAACCDACANLKGAFLTAVVLIIISMSVTLWLAGEERLDKESVDTSGGACSAFMDLFKTLKKLPPAMFSVLAVTAVTWLSWFPFFQYNTDWMGREIFHGEPQGAGGKADLYEAGVREGAIGLLFCSVALGVTSFFIPRLCRKLTSRVVWSVSSLMVFVLMTAMVVLGMVSMKGYRPSLAASLSGPDHSFKGGALAIFALIGIPQAVLYSVPWAVASEVATEDGGGQGLTIGVLNIAIVLPQLVIALGAGPIDGAFNKGNTPAFGIGAAFALICAVLALILLPKTRGVSNATVMAGGH

SEQ ID NO: 34101 - DNA, 1299 bp, Zea mays subsp. mays
  misc_feature (1)..(1299): Ceres Seq. ID no. 12344579
attcttccactccacctcgcccgtggcccgtacccgtcgtcgtcgtccacacagccacaagctgctgctgctgctgcgcgtgcttcctcttcagttcagctgaggtagcggcgcctcacccatcccccccgctacatacacatatctccttcttcgaagaactcggtcctttgggagcgagcaggagcaggagcaggacaggaccaggaagatcattatcaggagaagctaggcggggatatggcgaacgctggcggcggggcggccggggaaggggagtggctcaaggtcgcccagctcagggccctcgtccaggaggaccaccgcgccaaggaggtggacaacctgacgctgcgtcggttcctgcgcgcgcgcggccacaacgtggacaaggcggccgccatgctgctcaagttcctcaggtggcgggcggaggcggcgcccggcggcggcaccgtgcgggaggagcaggtgcgcggggagctggagcaggacaagatctacatgggcggcgtcgacaggaccggccgccccatcatcgtcggcttgctcgccaagcactactccgccaaccgcgacatggcggagttcaagagttttgtggtctacttcttcgacaagatctgtgccaggatccccagagggcaggagaagttcctcgccatcatggatctcaagggctggggctacgcaaactgcgacgtccgggcctacatcgcggccattgagatcatgcagaactactacccggagcggctgggcaaggcgctgatgatcaacgtgccctacatcttcctcaaggtgtggaagacgatgatctaccccttcatcgacgccaacaccagggacaagttcgtgttcgtggatgacaagagcctgcgggagacgctgcggcgggagatcgacgagagccagctcccggagttccttggcgggaagatgcctctcgtctccctcaaggactacgcccagcagcctcagcccgtttgcgagtgagtctgtcgtagcgatggtggccggccggtgacgtgagcgacccaaagccgaaagctgattcgatctagactaagctaatacagcctacaagagggaggaagagaggccctacccgtggaattaagtcattagtttgtggtccaattcaataagaaagtaaatgtggtgtgtgaagatggtatggcattatcagtctttaatcccatattatacatttagatagaagaaaatcaacttatatgtggtagtgttccctactttttatatgagataaataaagggatacggagaatgctgcacgcc

SEQ ID NO: 34102 - protein, 251 aa, Zea mays subsp. mays
  peptide (1)..(251): Ceres Seq. ID no. 12344580
  misc_feature (86)..(235): Pfam Name: Pfam Description:  CRAL/TRIO domain
  misc_feature (1)..(244): NCBI GI NO: 34907052 NR Description: sec14 like protein
  misc_feature (1)..(244): NCBI GI NO: 2286121 NR Description: sec14 like protein [Oryza sativa]
  misc_feature (13)..(238): NCBI GI NO: 27573358 NR Description: putative phosphatidylinositol/phosphatidylcholinetransfer protein
  misc_feature (8)..(241): NCBI GI NO: 17226662 NR Description: polyphosphoinositide binding protein
  misc_feature (11)..(241): NCBI GI NO: 7488696 NR Description: polyphosphoinositide binding protein Ssh2
  misc_feature (11)..(241): NCBI GI NO: 15223439 NR Description: SEC14 cytosolic factor, putative
  misc_feature (49)..(241): NCBI GI NO: 19347976 NR Description: putative polyphosphoinositide binding protein
  misc_feature (31)..(249): NCBI GI NO: 30684014 NR Description: SEC14 cytosolic factor, putative
  misc_feature (31)..(249): NCBI GI NO: 25402783 NR Description: protein F10B6.22 [imported] - Arabidopsis thaliana
  misc_feature (11)..(232): NCBI GI NO: 7487607 NR Description: hypothetical protein T3F12
MANAGGGAAGEGEWLKVAQLRALVQEDHRAKEVDNLTLRRFLRARGHNVDKAAAMLLKFLRWRAEAAPGGGTVREEQVRGELEQDKIYMGGVDRTGRPIIVGLLAKHYSANRDMAEFKSFVVYFFDKICARIPRGQEKFLAIMDLKGWGYANCDVRAYIAAIEIMQNYYPERLGKALMINVPYIFLKVWKTMIYPFIDANTRDKFVFVDDKSLRETLRREIDESQLPEFLGGKMPLVSLKDYAQQPQPVCE

SEQ ID NO: 34103 - protein, 241 aa, Zea mays subsp. mays
  peptide (1)..(241): Ceres Seq. ID no. 12344581
SSTPPRPWPVPVVVVHTATSCCCCCACFLFSSAEVAAPHPSPPLHTHISFFEELGPLGASRSRSRTGPGRSLSGEARRGYGERWRRGGRGRGVAQGRPAQGPRPGGPPRQGGGQPDAASVPARARPQRGQGGRHAAQVPQVAGGGGARRRHRAGGAGARGAGAGQDLHGRRRQDRPPHHRRLARQALLRQPRHGGVQEFCGLLLRQDLCQDPQRAGEVPRHHGSQGLGLRKLRRPGLHRGH

SEQ ID NO: 34104 - protein, 197 aa, Zea mays subsp. mays
  peptide (1)..(197): Ceres Seq. ID no. 12344582
  misc_feature (32)..(181): Pfam Name: Pfam Description:  CRAL/TRIO domain
  misc_feature (1)..(190): NCBI GI NO: 34907052 NR Description: sec14 like protein
  misc_feature (1)..(190): NCBI GI NO: 2286121 NR Description: sec14 like protein [Oryza sativa]
  misc_feature (1)..(184): NCBI GI NO: 27573358 NR Description: putative phosphatidylinositol/phosphatidylcholinetransfer protein
  misc_feature (1)..(187): NCBI GI NO: 17226662 NR Description: polyphosphoinositide binding protein
  misc_feature (1)..(187): NCBI GI NO: 7488696 NR Description: polyphosphoinositide binding protein Ssh2
  misc_feature (1)..(187): NCBI GI NO: 15223439 NR Description: SEC14 cytosolic factor, putative
  misc_feature (1)..(187): NCBI GI NO: 19347976 NR Description: putative polyphosphoinositide binding protein
  misc_feature (1)..(195): NCBI GI NO: 30684014 NR Description: SEC14 cytosolic factor, putative
  misc_feature (1)..(195): NCBI GI NO: 25402783 NR Description: protein F10B6.22 [imported] - Arabidopsis thaliana
  misc_feature (1)..(178): NCBI GI NO: 7487607 NR Description: hypothetical protein T3F12
MLLKFLRWRAEAAPGGGTVREEQVRGELEQDKIYMGGVDRTGRPIIVGLLAKHYSANRDMAEFKSFVVYFFDKICARIPRGQEKFLAIMDLKGWGYANCDVRAYIAAIEIMQNYYPERLGKALMINVPYIFLKVWKTMIYPFIDANTRDKFVFVDDKSLRETLRREIDESQLPEFLGGKMPLVSLKDYAQQPQPVCE

SEQ ID NO: 34105 - DNA, 1770 bp, Zea mays subsp. mays
  misc_feature (1)..(1770): Ceres Seq. ID no. 12347178
acgaacacatagatccgcatcgtcgatccatccgtcctcctcccgacggtacgccagcctgccagagtccgacgcacgcctagggctcctggacacagcagagcccacgccttgactcgctccgttcgagtggagcgcacaggcaccggccggcgaccagagagggagcggatcgagggggctcggcttgagtggaggagatggaccgcaaggatgtcgggatcctcgccatggacatctacttcccgccctcctgcgtgcagcaggaagcacttgaggcccatgatggggcgagcaaagggaagtacaccattgggcttgggcaagattgcatggccttttgcagcgaggtggaggatgtcatctcaatgagtttgacggttgtcaattctctgctgaaaaaatacaagattgatcccaagctaattggtcgcttggaggtgggaagtgaaacagttatagacaaaagcaaatccatcaaaacttggctgatgcagatttttgaggaaagtgataatactgacattgaaggtgttgactccagcaatgcatgttatggtgggacagcagccctactgaattgtgtgaattgggtcgaaagtaactcctgggatggccgttatggtcttgtcgtttgcacggacagcgcggtttatgcggaaggaccagctcgtccaacaggaggtgctgctgctatagcaatgctcattggtcctaatgctccgatttccttcgagagcaaatatagagcttctcatatggctcatgtttatgatttctacaaacctgatcttgcaagtgaatatccggttgttgatggtaaattatcccaaacatgctacctgatggctcttgactcatgctacagacagttctgcaacaagtatgagaagattgcgggtaaacaattctcaatttcagatgcagaatattttgtgttccattctccatacaacaagctcgtgcagaagagttttgctcgactttactacaatgacttcatgcgcaactgcagctatgttgatgatgatgctaaagagaagctccagtccttttcaaatttgactggtgaagagagctaccagagtcgcgacttggaaaaggcctcacaacaggtcgcaaagcacctgtatggcatcaaagttcagccaacgactctgcttccgaaacagatcggcaacatgtatacggcatccctttatgctgcattggcatctgtgctatataacaagcatgatagtctgaatggacaaagaattgtgatgttctcttacggcagcggcttgacatccactatgttttcgttgaggctaaacaatggccagcatcccttcagtctatcaaacataggttcagttcttggtgtcaccgagaagcttcagtcaagacatgagaccttgcctgagaaattcgttgagacgctgaagctgatggaacaccgatacggcgcaaaagacttcgagacgagcagcgacacgagtctcctgcagccgggcacattctacctcaccaaggtggactccatgtaccggaggttctattcccagaagccggccgaggaaacaggcggcggtaaaaccaagtgctgcaacggcttcgcaaatggccactagtgggagtccgcgtgccgtttgaattgctacgtcgcccttctgtactgttgatcatcattctctgtgttttgatcatgcttgtggttagcgttttcaccctagggtgtttctgaaataatatattactagatatatccccatctgttacatcggggtc

SEQ ID NO: 34106 - protein, 470 aa, Zea mays subsp. mays
  peptide (1)..(470): Ceres Seq. ID no. 12347179
  misc_feature (4)..(450): Pfam Name: Pfam Description:  Hydroxymethylglutaryl-coenzyme A synthase
  misc_feature (2)..(465): NCBI GI NO: 34902200 NR Description: Putative hydroxymethylglutaryl coenzyme A synthase
  misc_feature (4)..(470): NCBI GI NO: 16417956 NR Description: hydroxymethylglutaryl coenzyme A synthase
  misc_feature (4)..(470): NCBI GI NO: 14916100 NR Description: hydroxymethylglutaryl coenzyme A synthase
  misc_feature (4)..(450): NCBI GI NO: 7799986 NR Description: HMG-CoA synthase [Brassica juncea]
  misc_feature (4)..(450): NCBI GI NO: 1143390 NR Description: hydroxymethylglutaryl-CoA synthase
  misc_feature (4)..(450): NCBI GI NO: 15234313 NR Description: hydroxymethylglutaryl-CoA synthase
  misc_feature (4)..(450): NCBI GI NO: 11192003 NR Description: HMG-CoA synthase [Brassica juncea]
  misc_feature (4)..(450): NCBI GI NO: 11192005 NR Description: HMG-CoA synthase [Brassica juncea]
  misc_feature (4)..(450): NCBI GI NO: 11192007 NR Description: HMG-CoA synthase [Brassica juncea]
  misc_feature (4)..(465): NCBI GI NO: 7436678 NR Description: hydroxymethylglutaryl-CoA synthase (EC 4
MDRKDVGILAMDIYFPPSCVQQEALEAHDGASKGKYTIGLGQDCMAFCSEVEDVISMSLTVVNSLLKKYKIDPKLIGRLEVGSETVIDKSKSIKTWLMQIFEESDNTDIEGVDSSNACYGGTAALLNCVNWVESNSWDGRYGLVVCTDSAVYAEGPARPTGGAAAIAMLIGPNAPISFESKYRASHMAHVYDFYKPDLASEYPVVDGKLSQTCYLMALDSCYRQFCNKYEKIAGKQFSISDAEYFVFHSPYNKLVQKSFARLYYNDFMRNCSYVDDDAKEKLQSFSNLTGEESYQSRDLEKASQQVAKHLYGIKVQPTTLLPKQIGNMYTASLYAALASVLYNKHDSLNGQRIVMFSYGSGLTSTMFSLRLNNGQHPFSLSNIGSVLGVTEKLQSRHETLPEKFVETLKLMEHRYGAKDFETSSDTSLLQPGTFYLTKVDSMYRRFYSQKPAEETGGGKTKCCNGFANGH

SEQ ID NO: 34107 - protein, 460 aa, Zea mays subsp. mays
  peptide (1)..(460): Ceres Seq. ID no. 12347180
  misc_feature (1)..(440): Pfam Name: Pfam Description:  Hydroxymethylglutaryl-coenzyme A synthase
  misc_feature (1)..(455): NCBI GI NO: 34902200 NR Description: Putative hydroxymethylglutaryl coenzyme A synthase
  misc_feature (1)..(460): NCBI GI NO: 16417956 NR Description: hydroxymethylglutaryl coenzyme A synthase
  misc_feature (1)..(460): NCBI GI NO: 14916100 NR Description: hydroxymethylglutaryl coenzyme A synthase
  misc_feature (1)..(440): NCBI GI NO: 7799986 NR Description: HMG-CoA synthase [Brassica juncea]
  misc_feature (1)..(440): NCBI GI NO: 1143390 NR Description: hydroxymethylglutaryl-CoA synthase
  misc_feature (1)..(440): NCBI GI NO: 15234313 NR Description: hydroxymethylglutaryl-CoA synthase
  misc_feature (1)..(440): NCBI GI NO: 11192003 NR Description: HMG-CoA synthase [Brassica juncea]
  misc_feature (1)..(440): NCBI GI NO: 11192005 NR Description: HMG-CoA synthase [Brassica juncea]
  misc_feature (1)..(440): NCBI GI NO: 11192007 NR Description: HMG-CoA synthase [Brassica juncea]
  misc_feature (1)..(455): NCBI GI NO: 7436678 NR Description: hydroxymethylglutaryl-CoA synthase (EC 4
MDIYFPPSCVQQEALEAHDGASKGKYTIGLGQDCMAFCSEVEDVISMSLTVVNSLLKKYKIDPKLIGRLEVGSETVIDKSKSIKTWLMQIFEESDNTDIEGVDSSNACYGGTAALLNCVNWVESNSWDGRYGLVVCTDSAVYAEGPARPTGGAAAIAMLIGPNAPISFESKYRASHMAHVYDFYKPDLASEYPVVDGKLSQTCYLMALDSCYRQFCNKYEKIAGKQFSISDAEYFVFHSPYNKLVQKSFARLYYNDFMRNCSYVDDDAKEKLQSFSNLTGEESYQSRDLEKASQQVAKHLYGIKVQPTTLLPKQIGNMYTASLYAALASVLYNKHDSLNGQRIVMFSYGSGLTSTMFSLRLNNGQHPFSLSNIGSVLGVTEKLQSRHETLPEKFVETLKLMEHRYGAKDFETSSDTSLLQPGTFYLTKVDSMYRRFYSQKPAEETGGGKTKCCNGFANGH

SEQ ID NO: 34108 - protein, 426 aa, Zea mays subsp. mays
  peptide (1)..(426): Ceres Seq. ID no. 12347181
  misc_feature (1)..(406): Pfam Name: Pfam Description:  Hydroxymethylglutaryl-coenzyme A synthase
  misc_feature (1)..(421): NCBI GI NO: 34902200 NR Description: Putative hydroxymethylglutaryl coenzyme A synthase
  misc_feature (1)..(426): NCBI GI NO: 16417956 NR Description: hydroxymethylglutaryl coenzyme A synthase
  misc_feature (1)..(426): NCBI GI NO: 14916100 NR Description: hydroxymethylglutaryl coenzyme A synthase
  misc_feature (1)..(406): NCBI GI NO: 7799986 NR Description: HMG-CoA synthase [Brassica juncea]
  misc_feature (1)..(406): NCBI GI NO: 1143390 NR Description: hydroxymethylglutaryl-CoA synthase
  misc_feature (1)..(406): NCBI GI NO: 15234313 NR Description: hydroxymethylglutaryl-CoA synthase
  misc_feature (1)..(406): NCBI GI NO: 11192003 NR Description: HMG-CoA synthase [Brassica juncea]
  misc_feature (1)..(406): NCBI GI NO: 11192005 NR Description: HMG-CoA synthase [Brassica juncea]
  misc_feature (1)..(406): NCBI GI NO: 11192007 NR Description: HMG-CoA synthase [Brassica juncea]
  misc_feature (1)..(421): NCBI GI NO: 7436678 NR Description: hydroxymethylglutaryl-CoA synthase (EC 4
MAFCSEVEDVISMSLTVVNSLLKKYKIDPKLIGRLEVGSETVIDKSKSIKTWLMQIFEESDNTDIEGVDSSNACYGGTAALLNCVNWVESNSWDGRYGLVVCTDSAVYAEGPARPTGGAAAIAMLIGPNAPISFESKYRASHMAHVYDFYKPDLASEYPVVDGKLSQTCYLMALDSCYRQFCNKYEKIAGKQFSISDAEYFVFHSPYNKLVQKSFARLYYNDFMRNCSYVDDDAKEKLQSFSNLTGEESYQSRDLEKASQQVAKHLYGIKVQPTTLLPKQIGNMYTASLYAALASVLYNKHDSLNGQRIVMFSYGSGLTSTMFSLRLNNGQHPFSLSNIGSVLGVTEKLQSRHETLPEKFVETLKLMEHRYGAKDFETSSDTSLLQPGTFYLTKVDSMYRRFYSQKPAEETGGGKTKCCNGFANGH

SEQ ID NO: 34109 - DNA, 831 bp, Zea mays subsp. mays
  misc_feature (1)..(831): Ceres Seq. ID no. 12345704
agaaaaagtacacctgtcgcgtaagcgtcctcaggcagcagctccccggtcgcggtctctgtctctctgaagggaaagctctgtttccccttcccggtgccggagtcggggaaggtcaccgcgggcgcgagccgatggacagcaacaacctcctggcggcgtggccggtcctggggccgggcgtcgccggcgccgtattcggcgcaggctggtggttttgggtcgacgccgtcgtctgcagcgccgccgccgtgccattcctccactacctcccagggttcttcgcctcgttcgccgcgctcatgttcaactgcgtcaaccgggaggacatcggcgatggctactactcaccgtacgacgactccgagtggagggtgaagctctggctttttatttcgtacgtggtgtcgtttgtttcgctggccggggcagtgggtttcttggttcaagatgcgcttacggatacggggccatctgcgtggactggcagtgctggcatcctgcagtgcgtgtttgtgttagtgagtgggctgatctactggacgtgccactctgaagattgacttaagaagtataggtatatatggccaaggaggaggaggatggagactgcttttctcagaagcgattgcttttccgtagtacgtttctggaggcacctttggaccgtgctttccgaaacgggtggaataaagagccattttctagttgtttcaagagagatgtagataagctgtactactattttacacgtgtttatagtcgtgtatcatgttgcttaaaactactttgtgaggtgttgttttggagcaagaaacttataggggtgct

SEQ ID NO: 34110 - protein, 186 aa, Zea mays subsp. mays
  peptide (1)..(186): Ceres Seq. ID no. 12345705
  misc_feature (49)..(184): Pfam Name: UPF0220 Pfam Description: Uncharacterised protein family
  misc_feature (49)..(185): NCBI GI NO: 18400231 NR Description: expressed protein; protein id: At1g36980
  misc_feature (49)..(147): NCBI GI NO: 25373092 NR Description: protein T32E20.29
  misc_feature (61)..(179): NCBI GI NO: 24657484 NR Description: CG15012-PB [Drosophila melanogaster]
  misc_feature (33)..(186): NCBI GI NO: 27732805 NR Description: similar to Small membrane protein 1
  misc_feature (33)..(186): NCBI GI NO: 34610239 NR Description: small membrane protein 1 [Mus musculus]
  misc_feature (62)..(186): NCBI GI NO: 7657595 NR Description: small membrane protein 1 [Homo sapiens]
  misc_feature (62)..(186): NCBI GI NO: 27882119 NR Description: Similar to small membrane protein 1 [Danio rerio]
KKYTCRVSVLRQQLPGRGLCLSEGKALFPLPGAGVGEGHRGREPMDSNNLLAAWPVLGPGVAGAVFGAGWWFWVDAVVCSAAAVPFLHYLPGFFASFAALMFNCVNREDIGDGYYSPYDDSEWRVKLWLFISYVVSFVSLAGAVGFLVQDALTDTGPSAWTGSAGILQCVFVLVSGLIYWTCHSED

SEQ ID NO: 34111 - protein, 142 aa, Zea mays subsp. mays
  peptide (1)..(142): Ceres Seq. ID no. 12345706
  misc_feature (5)..(140): Pfam Name: UPF0220 Pfam Description: Uncharacterised protein family
  misc_feature (5)..(141): NCBI GI NO: 18400231 NR Description: expressed protein; protein id: At1g36980
  misc_feature (5)..(103): NCBI GI NO: 25373092 NR Description: protein T32E20.29
  misc_feature (17)..(135): NCBI GI NO: 24657484 NR Description: CG15012-PB [Drosophila melanogaster]
  misc_feature (1)..(142): NCBI GI NO: 27732805 NR Description: similar to Small membrane protein 1
  misc_feature (1)..(142): NCBI GI NO: 34610239 NR Description: small membrane protein 1 [Mus musculus]
  misc_feature (18)..(142): NCBI GI NO: 7657595 NR Description: small membrane protein 1 [Homo sapiens]
  misc_feature (18)..(142): NCBI GI NO: 27882119 NR Description: Similar to small membrane protein 1 [Danio rerio]
MDSNNLLAAWPVLGPGVAGAVFGAGWWFWVDAVVCSAAAVPFLHYLPGFFASFAALMFNCVNREDIGDGYYSPYDDSEWRVKLWLFISYVVSFVSLAGAVGFLVQDALTDTGPSAWTGSAGILQCVFVLVSGLIYWTCHSED

SEQ ID NO: 34112 - DNA, 1129 bp, Zea mays subsp. mays
  misc_feature (1)..(1129): Ceres Seq. ID no. 12373395
acaatactagttgttcgttcccaccgcaagcaaagcattttcagccgccccaccgcagcagcagagaagaggccgccgccgccgcgaccaagagccgatggatccgaagatgacagaggtgacccagatgttcgcccgcttcaaggcggcctacacccgcaacgacctcgacgcctgcgtcaccctcctctcacagctcaaggtccatctcaccaaattccccagccttccgccctcatttgagcagacacctaaagccgtggaggagctcaaacttgcaagggacatttatgagcatgctgttgttttgagtgtgaaacttgaggaccaagatgcatttgaacgtgatttctgtcagctaaagccttattacatggatacatgtggcataattcccccctcaccagaggagtacccaattttgggactcaatcttctgaggctgttggttcagaatagaattgctgagttccatactgagctggagcttttacctgtcaaggcacttgagcacccttgcatcaagcatgctgtagagcttgagcaatccttcatggagggtgcctacaaccgagtgttaagcgctcggcaagctgtgccacatgagacctatgtttacttcatggaccttctcgccaagacagttagagatgagatcgctgggtgcagcgaaaaggggtatgattccctatctgtaagtgatgcaaaacaaatgcttatgttcagttctgaccaagatctgcacgagtacatcacagaggagcacccggaatgggagcttaagaacggtgccgtcttcttccagaaggcaaaggagtcacagccctacaaggagatcccatccttgcagctcatcaaccagacgctcagctatgcgagggagctggagcgtattgtatgatttaatttcacagtaatccctggttgatgtttatttctgtggtcacttggcatggcatgtactgtcctttacatttgagatcagctctgatcgcagctcatgtcaactctgatcaatctctgaagggcttgatctctgcggcattgtttcaccacattaactgcattgcttgaaagatgcctgtcatccattgctgctgttaacttttgatgggcttaatattgaatt

SEQ ID NO: 34113 - protein, 267 aa, Zea mays subsp. mays
  peptide (1)..(267): Ceres Seq. ID no. 12373396
  misc_feature (109)..(267): Pfam Name: Pfam Description:  26S proteasome non-ATPase regulatory subunit Nin1/mts3
  misc_feature (1)..(267): NCBI GI NO: 17297985 NR Description: 26S proteasome regulatory particle non-ATPase subunit12
  misc_feature (1)..(267): NCBI GI NO: 15217661 NR Description: 26S proteasome regulatory subunit
  misc_feature (109)..(267): NCBI GI NO: 15238267 NR Description: putative protein; protein id: At5g42040.1
  misc_feature (6)..(267): NCBI GI NO: 38372874 NR Description: Probable 26S proteasome non-ATPase regulatory subunit 8
  misc_feature (5)..(267): NCBI GI NO: 21357229 NR Description: CG4157-PA [Drosophila melanogaster]
  misc_feature (5)..(267): NCBI GI NO: 31206725 NR Description: ENSANGP00000010608 [Anopheles gambiae]
  misc_feature (11)..(267): NCBI GI NO: 13278567 NR Description: RIKEN cDNA 6720456J22 gene [Mus musculus]
  misc_feature (11)..(267): NCBI GI NO: 26371077 NR Description: unnamed protein product [Mus musculus]
  misc_feature (9)..(267): NCBI GI NO: 40787635 NR Description: Unknown (protein for IMAGE:6055235) [Homo sapiens]
  misc_feature (11)..(267): NCBI GI NO: 34855658 NR Description: similar to proteasome 26S non-ATPase subunit 8
MDPKMTEVTQMFARFKAAYTRNDLDACVTLLSQLKVHLTKFPSLPPSFEQTPKAVEELKLARDIYEHAVVLSVKLEDQDAFERDFCQLKPYYMDTCGIIPPSPEEYPILGLNLLRLLVQNRIAEFHTELELLPVKALEHPCIKHAVELEQSFMEGAYNRVLSARQAVPHETYVYFMDLLAKTVRDEIAGCSEKGYDSLSVSDAKQMLMFSSDQDLHEYITEEHPEWELKNGAVFFQKAKESQPYKEIPSLQLINQTLSYARELERIV

SEQ ID NO: 34114 - protein, 263 aa, Zea mays subsp. mays
  peptide (1)..(263): Ceres Seq. ID no. 12373397
  misc_feature (105)..(263): Pfam Name: Pfam Description:  26S proteasome non-ATPase regulatory subunit Nin1/mts3
  misc_feature (1)..(263): NCBI GI NO: 17297985 NR Description: 26S proteasome regulatory particle non-ATPase subunit12
  misc_feature (1)..(263): NCBI GI NO: 15217661 NR Description: 26S proteasome regulatory subunit
  misc_feature (105)..(263): NCBI GI NO: 15238267 NR Description: putative protein; protein id: At5g42040.1
  misc_feature (2)..(263): NCBI GI NO: 38372874 NR Description: Probable 26S proteasome non-ATPase regulatory subunit 8
  misc_feature (1)..(263): NCBI GI NO: 21357229 NR Description: CG4157-PA [Drosophila melanogaster]
  misc_feature (1)..(263): NCBI GI NO: 31206725 NR Description: ENSANGP00000010608 [Anopheles gambiae]
  misc_feature (7)..(263): NCBI GI NO: 13278567 NR Description: RIKEN cDNA 6720456J22 gene [Mus musculus]
  misc_feature (7)..(263): NCBI GI NO: 26371077 NR Description: unnamed protein product [Mus musculus]
  misc_feature (5)..(263): NCBI GI NO: 40787635 NR Description: Unknown (protein for IMAGE:6055235) [Homo sapiens]
  misc_feature (7)..(263): NCBI GI NO: 34855658 NR Description: similar to proteasome 26S non-ATPase subunit 8
MTEVTQMFARFKAAYTRNDLDACVTLLSQLKVHLTKFPSLPPSFEQTPKAVEELKLARDIYEHAVVLSVKLEDQDAFERDFCQLKPYYMDTCGIIPPSPEEYPILGLNLLRLLVQNRIAEFHTELELLPVKALEHPCIKHAVELEQSFMEGAYNRVLSARQAVPHETYVYFMDLLAKTVRDEIAGCSEKGYDSLSVSDAKQMLMFSSDQDLHEYITEEHPEWELKNGAVFFQKAKESQPYKEIPSLQLINQTLSYARELERIV

SEQ ID NO: 34115 - protein, 257 aa, Zea mays subsp. mays
  peptide (1)..(257): Ceres Seq. ID no. 12373398
  misc_feature (99)..(257): Pfam Name: Pfam Description:  26S proteasome non-ATPase regulatory subunit Nin1/mts3
  misc_feature (1)..(257): NCBI GI NO: 17297985 NR Description: 26S proteasome regulatory particle non-ATPase subunit12
  misc_feature (1)..(257): NCBI GI NO: 15217661 NR Description: 26S proteasome regulatory subunit
  misc_feature (99)..(257): NCBI GI NO: 15238267 NR Description: putative protein; protein id: At5g42040.1
  misc_feature (1)..(257): NCBI GI NO: 38372874 NR Description: Probable 26S proteasome non-ATPase regulatory subunit 8
  misc_feature (1)..(257): NCBI GI NO: 21357229 NR Description: CG4157-PA [Drosophila melanogaster]
  misc_feature (1)..(257): NCBI GI NO: 31206725 NR Description: ENSANGP00000010608 [Anopheles gambiae]
  misc_feature (1)..(257): NCBI GI NO: 13278567 NR Description: RIKEN cDNA 6720456J22 gene [Mus musculus]
  misc_feature (1)..(257): NCBI GI NO: 26371077 NR Description: unnamed protein product [Mus musculus]
  misc_feature (1)..(257): NCBI GI NO: 40787635 NR Description: Unknown (protein for IMAGE:6055235) [Homo sapiens]
  misc_feature (1)..(257): NCBI GI NO: 34855658 NR Description: similar to proteasome 26S non-ATPase subunit 8
MFARFKAAYTRNDLDACVTLLSQLKVHLTKFPSLPPSFEQTPKAVEELKLARDIYEHAVVLSVKLEDQDAFERDFCQLKPYYMDTCGIIPPSPEEYPILGLNLLRLLVQNRIAEFHTELELLPVKALEHPCIKHAVELEQSFMEGAYNRVLSARQAVPHETYVYFMDLLAKTVRDEIAGCSEKGYDSLSVSDAKQMLMFSSDQDLHEYITEEHPEWELKNGAVFFQKAKESQPYKEIPSLQLINQTLSYARELERIV

SEQ ID NO: 34116 - DNA, 1826 bp, Zea mays subsp. mays
  misc_feature (1)..(1826): Ceres Seq. ID no. 12411550
actacctcccaaactcgcgagcgagtcgaggctccaaccccggcacatcacaggaggaggaggacgacgcgcccaccatggccatggcgacggccctccgcaagctctccgccaacgctctgcgccgccagccgctctcccgcatcacgccgctctactacatggcgtcccttccggcgacggaggagagatccggaatcacctggactaagcagttgaacgcgccgctggaagaggtcgaccccgagattgctgacatcatcgagcacgagaaggcccgccaatggaagggtctggagctcatcccgtcggagaatttcacgtcggtgtcagtgatgcaggcagttgggtcggtaatgaccaacaagtacagcgaggggtaccctggcgcaagatactacgggggaaatgagtttattgatatggcagagtccttgtgtcagaaacgtgctttggaggctttccgtttggacccggcgaaatggggagtgaatgtgcaacctctatccggttcgcccgccaacttccatgtatacactgcactcttgaagccacatgaaaggatcatggctttggatcttcctcacggtggacatctttctcatggttaccagactgacactaagaagatatctgcaacttcaatattttttgagacaatgccttacagattggatgaaagcactggattgattgattacgatcagttgaagaaaagcgctgttctttttaggccaaagttgatcattgccggtgcaagtgcatatgctcggctatatgattatgaccgtatgcggaagatatgcaccaagcagaaggcaatacttctagcagacatggcacatattagtgggcttgttgcagctggtgttgttccatctccttttgattatgcagatgtagtgactaccactactcacaaatcactccgtgggccacgtggagccatgatcttttacaggaagggagtcaaagaaataaataaacaaggaaaagaggttatgtatgattttgaggacaaaatcaatgctgctgtctttcctggtctgcaaggtgggcctcataaccataccattactggcttggctgttgcgctcaaacaggcaactactccagaatacagagcttaccaagagcaagttatcagtaattgtgctaaatttgcgcagagcctgatttcaaaaggatatgaactcgtctctggtgggactgacaaccatttagttctggtgaatctcaagaataaggggatagatggttcaagggtggagaaggttttagaaagtgtgcatattgcagcaaacaagaacacagttcctggtgatgtttcagctatggtgccaggaggcatcaggatgggaaccccagcccttacgtcgagaggatttgttgaagaagatttcgctaaagttgctgacttcttcgatgcagcagtgaatctggccttgaagattaaggctgcaacgacaggtggaacaaagctgaaggactttgttgccactttgcaatctgatagcatccaagttgagattgcaaagcttcgccatgatgtagaggaatttgcaaaacaattcccaacaattggatttgagaaagagaccatgaaatacaagaactaatatctggatgacaagaagagaatgaggtcactcttcttgcagtaagcattcgaagcaagatgccacgatgattattgggagtttaaccatggtgtaatggcatcttatgttaaagagatgttggcaatttacagcatgtggaactttcgtcaatcatattgtagacacataccgcgagatgctatattgaccggacaattgcatttc

SEQ ID NO: 34117 - protein, 538 aa, Zea mays subsp. mays
  peptide (1)..(538): Ceres Seq. ID no. 12411551
  misc_feature (76)..(474): Pfam Name: Pfam Description:  Serine hydroxymethyltransferase
  misc_feature (1)..(538): NCBI GI NO: 31126793 NR Description: putative glycine hydroxymethyltransferase
  misc_feature (26)..(538): NCBI GI NO: 1707998 NR Description: SERINE HYDROXYMETHYLTRANSFERASE
  misc_feature (26)..(538): NCBI GI NO: 15235745 NR Description: glycine hydroxymethyltransferase like protein
  misc_feature (26)..(538): NCBI GI NO: 15809972 NR Description: AT4g37930/F20D10_50 [Arabidopsis thaliana]
  misc_feature (26)..(538): NCBI GI NO: 1346155 NR Description: Serine hydroxymethyltransferase 1
  misc_feature (26)..(538): NCBI GI NO: 1346156 NR Description: Serine hydroxymethyltransferase 2
  misc_feature (26)..(536): NCBI GI NO: 462187 NR Description: SERINE HYDROXYMETHYLTRANSFERASE
  misc_feature (28)..(537): NCBI GI NO: 30690394 NR Description: glycine hydroxymethyltransferase - like protein
  misc_feature (28)..(537): NCBI GI NO: 14334888 NR Description: putative glycine hydroxymethyltransferase
  misc_feature (28)..(537): NCBI GI NO: 30690400 NR Description: glycine hydroxymethyltransferase - like protein
YLPNSRASRGSNPGTSQEEEDDAPTMAMATALRKLSANALRRQPLSRITPLYYMASLPATEERSGITWTKQLNAPLEEVDPEIADIIEHEKARQWKGLELIPSENFTSVSVMQAVGSVMTNKYSEGYPGARYYGGNEFIDMAESLCQKRALEAFRLDPAKWGVNVQPLSGSPANFHVYTALLKPHERIMALDLPHGGHLSHGYQTDTKKISATSIFFETMPYRLDESTGLIDYDQLKKSAVLFRPKLIIAGASAYARLYDYDRMRKICTKQKAILLADMAHISGLVAAGVVPSPFDYADVVTTTTHKSLRGPRGAMIFYRKGVKEINKQGKEVMYDFEDKINAAVFPGLQGGPHNHTITGLAVALKQATTPEYRAYQEQVISNCAKFAQSLISKGYELVSGGTDNHLVLVNLKNKGIDGSRVEKVLESVHIAANKNTVPGDVSAMVPGGIRMGTPALTSRGFVEEDFAKVADFFDAAVNLALKIKAATTGGTKLKDFVATLQSDSIQVEIAKLRHDVEEFAKQFPTIGFEKETMKYKN

SEQ ID NO: 34118 - protein, 513 aa, Zea mays subsp. mays
  peptide (1)..(513): Ceres Seq. ID no. 12411552
  misc_feature (51)..(449): Pfam Name: Pfam Description:  Serine hydroxymethyltransferase
  misc_feature (1)..(513): NCBI GI NO: 31126793 NR Description: putative glycine hydroxymethyltransferase
  misc_feature (1)..(513): NCBI GI NO: 1707998 NR Description: SERINE HYDROXYMETHYLTRANSFERASE
  misc_feature (1)..(513): NCBI GI NO: 15235745 NR Description: glycine hydroxymethyltransferase like protein
  misc_feature (1)..(513): NCBI GI NO: 15809972 NR Description: AT4g37930/F20D10_50 [Arabidopsis thaliana]
  misc_feature (1)..(513): NCBI GI NO: 1346155 NR Description: Serine hydroxymethyltransferase 1
  misc_feature (1)..(513): NCBI GI NO: 1346156 NR Description: Serine hydroxymethyltransferase 2
  misc_feature (1)..(511): NCBI GI NO: 462187 NR Description: SERINE HYDROXYMETHYLTRANSFERASE
  misc_feature (3)..(512): NCBI GI NO: 30690394 NR Description: glycine hydroxymethyltransferase - like protein
  misc_feature (3)..(512): NCBI GI NO: 14334888 NR Description: putative glycine hydroxymethyltransferase
  misc_feature (3)..(512): NCBI GI NO: 30690400 NR Description: glycine hydroxymethyltransferase - like protein
MAMATALRKLSANALRRQPLSRITPLYYMASLPATEERSGITWTKQLNAPLEEVDPEIADIIEHEKARQWKGLELIPSENFTSVSVMQAVGSVMTNKYSEGYPGARYYGGNEFIDMAESLCQKRALEAFRLDPAKWGVNVQPLSGSPANFHVYTALLKPHERIMALDLPHGGHLSHGYQTDTKKISATSIFFETMPYRLDESTGLIDYDQLKKSAVLFRPKLIIAGASAYARLYDYDRMRKICTKQKAILLADMAHISGLVAAGVVPSPFDYADVVTTTTHKSLRGPRGAMIFYRKGVKEINKQGKEVMYDFEDKINAAVFPGLQGGPHNHTITGLAVALKQATTPEYRAYQEQVISNCAKFAQSLISKGYELVSGGTDNHLVLVNLKNKGIDGSRVEKVLESVHIAANKNTVPGDVSAMVPGGIRMGTPALTSRGFVEEDFAKVADFFDAAVNLALKIKAATTGGTKLKDFVATLQSDSIQVEIAKLRHDVEEFAKQFPTIGFEKETMKYKN

SEQ ID NO: 34119 - protein, 511 aa, Zea mays subsp. mays
  peptide (1)..(511): Ceres Seq. ID no. 12411553
  misc_feature (49)..(447): Pfam Name: Pfam Description:  Serine hydroxymethyltransferase
  misc_feature (1)..(511): NCBI GI NO: 31126793 NR Description: putative glycine hydroxymethyltransferase
  misc_feature (1)..(511): NCBI GI NO: 1707998 NR Description: SERINE HYDROXYMETHYLTRANSFERASE
  misc_feature (1)..(511): NCBI GI NO: 15235745 NR Description: glycine hydroxymethyltransferase like protein
  misc_feature (1)..(511): NCBI GI NO: 15809972 NR Description: AT4g37930/F20D10_50 [Arabidopsis thaliana]
  misc_feature (1)..(511): NCBI GI NO: 1346155 NR Description: Serine hydroxymethyltransferase 1
  misc_feature (1)..(511): NCBI GI NO: 1346156 NR Description: Serine hydroxymethyltransferase 2
  misc_feature (1)..(509): NCBI GI NO: 462187 NR Description: SERINE HYDROXYMETHYLTRANSFERASE
  misc_feature (1)..(510): NCBI GI NO: 30690394 NR Description: glycine hydroxymethyltransferase - like protein
  misc_feature (1)..(510): NCBI GI NO: 14334888 NR Description: putative glycine hydroxymethyltransferase
  misc_feature (1)..(510): NCBI GI NO: 30690400 NR Description: glycine hydroxymethyltransferase - like protein
MATALRKLSANALRRQPLSRITPLYYMASLPATEERSGITWTKQLNAPLEEVDPEIADIIEHEKARQWKGLELIPSENFTSVSVMQAVGSVMTNKYSEGYPGARYYGGNEFIDMAESLCQKRALEAFRLDPAKWGVNVQPLSGSPANFHVYTALLKPHERIMALDLPHGGHLSHGYQTDTKKISATSIFFETMPYRLDESTGLIDYDQLKKSAVLFRPKLIIAGASAYARLYDYDRMRKICTKQKAILLADMAHISGLVAAGVVPSPFDYADVVTTTTHKSLRGPRGAMIFYRKGVKEINKQGKEVMYDFEDKINAAVFPGLQGGPHNHTITGLAVALKQATTPEYRAYQEQVISNCAKFAQSLISKGYELVSGGTDNHLVLVNLKNKGIDGSRVEKVLESVHIAANKNTVPGDVSAMVPGGIRMGTPALTSRGFVEEDFAKVADFFDAAVNLALKIKAATTGGTKLKDFVATLQSDSIQVEIAKLRHDVEEFAKQFPTIGFEKETMKYKN

SEQ ID NO: 34120 - DNA, 1481 bp, Zea mays subsp. mays
  misc_feature (1)..(1481): Ceres Seq. ID no. 13493636
aaaatcgcccctgggcgagggggaagccggaggacgctgagggcgggcgaggccgccgtccccagatctcacttccgccgcccgcccgccccgcttttgttactactcttcttttgttcggattgagggaggaaggaaaggaggtgcttcaatatgaaggcgctcattcttgtcgggggttttggaacccgccttcggcctttgactcttagcttcccgaagccccttgtggattttgcaaacaagcccatgattctgcatcagatcgaagctttgaaagaagttggggtcacagaggtggttttggccatcaactaccgcccagaggtaatgattaatttcttgaaggactttgaggataaacttggcatcacaattacatgctcccaagagactgagcccttaggaactgctggccctcttgctctagcaagggacaagcttgcggatggatctggcgagccattctttgtcctcaacagcgatgtcataagcgaatacccatttgctgaactcatcaaatttcacaagtctcatggtggtgaggcaacaattatggtcactaaggtggatgaaccatctaaatatggtgttgtggttatggaggaggcaactggcagggtggaaaggtttgttgagaagccaaaaatatttgtgggcaacaagatcaatgctgggatttacttgcttaacccatctgtccttgaccgcattgaactgagaccaacatcaattgagaaagaggtcttccctcaaattgcagctgatcaacagctctatgcaatggtccttcctggtttttggatggatgttggtcagccaagagactacattactggattgcgtctttatctagactcgcttaggaagaaatcggctgccaggctagctgctggggcacatgttgttggcaacgtgctggtgcatgagagcgccaagattggagaaggttgcctgatcggtcctgatgtcgcaattggacctggatgtgtcgtggaggatggcgtgaggctttcccgctgcactgtcatgcgtggtgtgcgtatcaagaagcatgcctgcatctcgaacagcattatcgggtggcactcaactgttggacaatgggcacggatagagaatatgaccatcctgggcgaggatgttcatgtgtgtgacgaggtatacagcaatggcggtgttgttctcccacataaagagatcaagtcaagcattttgaagcctgagatcgtcatgtgagagttctccagttttaactacagtacattcttaagttcttcgactaagtgaggattgcagatccccttttataagtgatatctattggtatctttggcctaattcaaacagcttcagacatgttcgcttgctaaactgttgacaatgtatccttgttctttgttgaaaagttttgtacttgtagtgtcaatcatatttcacaagtggttgtcatataatactgagggaggttttggaccccc

SEQ ID NO: 34121 - protein, 361 aa, Zea mays subsp. mays
  peptide (1)..(361): Ceres Seq. ID no. 13493637
  misc_feature (2)..(236): Pfam Name: Pfam Description:  Nucleotidyl transferase
  misc_feature (1)..(361): NCBI GI NO: 40253523 NR Description: putative GDP-mannose pyrophosphorylase
  misc_feature (1)..(361): NCBI GI NO: 34908274 NR Description: putative GDP-mannose pyrophosphorylase
  misc_feature (1)..(361): NCBI GI NO: 34902046 NR Description: COG1208
  misc_feature (1)..(361): NCBI GI NO: 15225553 NR Description: GDP-mannose  pyrophosphorylase
  misc_feature (1)..(361): NCBI GI NO: 4103324 NR Description: GDP-mannose pyrophosphorylase [Solanum tuberosum]
  misc_feature (1)..(361): NCBI GI NO: 13509287 NR Description: GDP-mannose pyrophosphorylase
  misc_feature (1)..(361): NCBI GI NO: 14971013 NR Description: GDP-D-mannose pyrophosphorylase
  misc_feature (1)..(361): NCBI GI NO: 15233308 NR Description: GDP-mannose pyrophosphorylase, putative
  misc_feature (1)..(345): NCBI GI NO: 25317396 NR Description: GDP-mannose pyrophosphorylase like protein
  misc_feature (22)..(345): NCBI GI NO: 15234771 NR Description: GDP-mannose pyrophosphorylase, putative
MKALILVGGFGTRLRPLTLSFPKPLVDFANKPMILHQIEALKEVGVTEVVLAINYRPEVMINFLKDFEDKLGITITCSQETEPLGTAGPLALARDKLADGSGEPFFVLNSDVISEYPFAELIKFHKSHGGEATIMVTKVDEPSKYGVVVMEEATGRVERFVEKPKIFVGNKINAGIYLLNPSVLDRIELRPTSIEKEVFPQIAADQQLYAMVLPGFWMDVGQPRDYITGLRLYLDSLRKKSAARLAAGAHVVGNVLVHESAKIGEGCLIGPDVAIGPGCVVEDGVRLSRCTVMRGVRIKKHACISNSIIGWHSTVGQWARIENMTILGEDVHVCDEVYSNGGVVLPHKEIKSSILKPEIVM

SEQ ID NO: 34122 - protein, 329 aa, Zea mays subsp. mays
  peptide (1)..(329): Ceres Seq. ID no. 13493638
  misc_feature (1)..(204): Pfam Name: Pfam Description:  Nucleotidyl transferase
  misc_feature (1)..(329): NCBI GI NO: 40253523 NR Description: putative GDP-mannose pyrophosphorylase
  misc_feature (1)..(329): NCBI GI NO: 34908274 NR Description: putative GDP-mannose pyrophosphorylase
  misc_feature (1)..(329): NCBI GI NO: 34902046 NR Description: COG1208
  misc_feature (1)..(329): NCBI GI NO: 15225553 NR Description: GDP-mannose  pyrophosphorylase
  misc_feature (1)..(329): NCBI GI NO: 4103324 NR Description: GDP-mannose pyrophosphorylase [Solanum tuberosum]
  misc_feature (1)..(329): NCBI GI NO: 13509287 NR Description: GDP-mannose pyrophosphorylase
  misc_feature (1)..(329): NCBI GI NO: 14971013 NR Description: GDP-D-mannose pyrophosphorylase
  misc_feature (1)..(329): NCBI GI NO: 15233308 NR Description: GDP-mannose pyrophosphorylase, putative
  misc_feature (1)..(313): NCBI GI NO: 25317396 NR Description: GDP-mannose pyrophosphorylase like protein
  misc_feature (1)..(313): NCBI GI NO: 15234771 NR Description: GDP-mannose pyrophosphorylase, putative
MILHQIEALKEVGVTEVVLAINYRPEVMINFLKDFEDKLGITITCSQETEPLGTAGPLALARDKLADGSGEPFFVLNSDVISEYPFAELIKFHKSHGGEATIMVTKVDEPSKYGVVVMEEATGRVERFVEKPKIFVGNKINAGIYLLNPSVLDRIELRPTSIEKEVFPQIAADQQLYAMVLPGFWMDVGQPRDYITGLRLYLDSLRKKSAARLAAGAHVVGNVLVHESAKIGEGCLIGPDVAIGPGCVVEDGVRLSRCTVMRGVRIKKHACISNSIIGWHSTVGQWARIENMTILGEDVHVCDEVYSNGGVVLPHKEIKSSILKPEIVM

SEQ ID NO: 34123 - protein, 302 aa, Zea mays subsp. mays
  peptide (1)..(302): Ceres Seq. ID no. 13493639
  misc_feature (1)..(177): Pfam Name: Pfam Description:  Nucleotidyl transferase
  misc_feature (1)..(302): NCBI GI NO: 40253523 NR Description: putative GDP-mannose pyrophosphorylase
  misc_feature (1)..(302): NCBI GI NO: 34908274 NR Description: putative GDP-mannose pyrophosphorylase
  misc_feature (1)..(302): NCBI GI NO: 34902046 NR Description: COG1208
  misc_feature (1)..(302): NCBI GI NO: 15225553 NR Description: GDP-mannose  pyrophosphorylase
  misc_feature (1)..(302): NCBI GI NO: 4103324 NR Description: GDP-mannose pyrophosphorylase [Solanum tuberosum]
  misc_feature (1)..(302): NCBI GI NO: 13509287 NR Description: GDP-mannose pyrophosphorylase
  misc_feature (1)..(302): NCBI GI NO: 14971013 NR Description: GDP-D-mannose pyrophosphorylase
  misc_feature (1)..(302): NCBI GI NO: 15233308 NR Description: GDP-mannose pyrophosphorylase, putative
  misc_feature (1)..(286): NCBI GI NO: 25317396 NR Description: GDP-mannose pyrophosphorylase like protein
  misc_feature (1)..(286): NCBI GI NO: 15234771 NR Description: GDP-mannose pyrophosphorylase, putative
MINFLKDFEDKLGITITCSQETEPLGTAGPLALARDKLADGSGEPFFVLNSDVISEYPFAELIKFHKSHGGEATIMVTKVDEPSKYGVVVMEEATGRVERFVEKPKIFVGNKINAGIYLLNPSVLDRIELRPTSIEKEVFPQIAADQQLYAMVLPGFWMDVGQPRDYITGLRLYLDSLRKKSAARLAAGAHVVGNVLVHESAKIGEGCLIGPDVAIGPGCVVEDGVRLSRCTVMRGVRIKKHACISNSIIGWHSTVGQWARIENMTILGEDVHVCDEVYSNGGVVLPHKEIKSSILKPEIVM

SEQ ID NO: 34124 - DNA, 1426 bp, Zea mays subsp. mays
  misc_feature (1)..(1426): Ceres Seq. ID no. 12347763
aatccgttcagcggtcagcggaacatgatacggtctgcgcccttccaagcaatcacatcttcttccccgttataaatcgctcactcgctatcgtcggctacctgtatcctggcgacacccaacagcctgcttgccgcgcttgcattgaggggagttcggggagcggccggtgcggaaggaatcgacacagagttcagttcacatggctgctgaatcagagaacggcaactgcaaagcttgggcagcgagagatccttctggagttctctcaccacacagttttaaccgcagagcagtgcaaagcggcgatgtttcgctgaagatcatatactgtggagtctgttatgcagacgttgcttggacgcggaataagctcaatgattcaaaatatcctttggttcctgggcatgagatagctggagttgtaactcaggttggtgcagatgtcaaaggctttaaagtgggtgaccatgtaggtgttggaacatatgtgaactcttgccgtgattgtgagaactgcaatatctctctagacaaccattgcccaaaagcagtttatactttcaatggcattgatacagatggaactgtcacaaaggggggttactccactcacattgtagtccatgaaaggtattgcttcaaaatacccgatggctaccctttggcgaaggcagcacctcttctgtgtgctggaataaccgtgtatactccaatgatgcgacacaacatgaaccaacctggaaagtcacttggggtcattggtcttggtggtctgggtcacatggctgtgaaatttggtaaagcatttggtcttaaggtcacagttttcagtacaagtgaatcaaagagagatgaagccatcaacctccttggagcagataattttgttatatcatcagacacacagcaaatggagtccctgaagaactccctgcacttcataattgacactgcttccggtgaccatccatttgatccgtatttctctctccttaaggttggtggtgtgatgacattggtaggttttccaagtgagatcaaaatgcatcctgcaagccttatacttggtgcgcggaccttgtctggcagtgttgttggaggtataaaagacatccaagaaatggttaacttctgtgcagccaacaatatctatccggagattgagatcattaagatagattatatcaacgaggctctcgcgaggcttgttaatcgagatgtgaaataccgctttgtaatcgacatcgagaactccttcaagtagcgtgctagtgcacatgctctcgtctttctgttagtgttcaacagttcaagagctattacaaatgtgagtcatgccaaataaacttgatgtaaacaaccataattgaacagcaaggggaaacaggtatattgtgataatgaagtcgctctatgaatatcc

SEQ ID NO: 34125 - protein, 354 aa, Zea mays subsp. mays
  peptide (1)..(354): Ceres Seq. ID no. 12347764
  misc_feature (1)..(354): NCBI GI NO: 37532016 NR Description: putative cinnamyl alcohol dehydrogenase
  misc_feature (2)..(354): NCBI GI NO: 15218564 NR Description: putative cinnamyl-alcohol dehydrogenase
  misc_feature (14)..(352): NCBI GI NO: 19849248 NR Description: cinnamyl alcohol dehydrogenase [Lolium perenne]
  misc_feature (13)..(353): NCBI GI NO: 10720088 NR Description: Probable mannitol dehydrogenase
  misc_feature (13)..(354): NCBI GI NO: 10720090 NR Description: Probable mannitol dehydrogenase
  misc_feature (13)..(352): NCBI GI NO: 22475166 NR Description: putative sinapyl alcohol dehydrogenase
  misc_feature (13)..(352): NCBI GI NO: 14279694 NR Description: sinapyl alcohol dehydrogenase
  misc_feature (24)..(352): NCBI GI NO: 37534606 NR Description: putative cinnamyl alcohol dehydrogenase
  misc_feature (1)..(354): NCBI GI NO: 7430935 NR Description: probable cinnamyl-alcohol dehydrogenase (EC1
  misc_feature (13)..(352): NCBI GI NO: 3913193 NR Description: Probable mannitol dehydrogenase 1
MAAESENGNCKAWAARDPSGVLSPHSFNRRAVQSGDVSLKIIYCGVCYADVAWTRNKLNDSKYPLVPGHEIAGVVTQVGADVKGFKVGDHVGVGTYVNSCRDCENCNISLDNHCPKAVYTFNGIDTDGTVTKGGYSTHIVVHERYCFKIPDGYPLAKAAPLLCAGITVYTPMMRHNMNQPGKSLGVIGLGGLGHMAVKFGKAFGLKVTVFSTSESKRDEAINLLGADNFVISSDTQQMESLKNSLHFIIDTASGDHPFDPYFSLLKVGGVMTLVGFPSEIKMHPASLILGARTLSGSVVGGIKDIQEMVNFCAANNIYPEIEIIKIDYINEALARLVNRDVKYRFVIDIENSFK

SEQ ID NO: 34126 - protein, 183 aa, Zea mays subsp. mays
  peptide (1)..(183): Ceres Seq. ID no. 12347765
  misc_feature (1)..(183): NCBI GI NO: 37532016 NR Description: putative cinnamyl alcohol dehydrogenase
  misc_feature (1)..(183): NCBI GI NO: 15218564 NR Description: putative cinnamyl-alcohol dehydrogenase
  misc_feature (1)..(181): NCBI GI NO: 19849248 NR Description: cinnamyl alcohol dehydrogenase [Lolium perenne]
  misc_feature (1)..(182): NCBI GI NO: 10720088 NR Description: Probable mannitol dehydrogenase
  misc_feature (1)..(183): NCBI GI NO: 10720090 NR Description: Probable mannitol dehydrogenase
  misc_feature (1)..(181): NCBI GI NO: 22475166 NR Description: putative sinapyl alcohol dehydrogenase
  misc_feature (1)..(181): NCBI GI NO: 14279694 NR Description: sinapyl alcohol dehydrogenase
  misc_feature (1)..(181): NCBI GI NO: 37534606 NR Description: putative cinnamyl alcohol dehydrogenase
  misc_feature (1)..(183): NCBI GI NO: 7430935 NR Description: probable cinnamyl-alcohol dehydrogenase (EC1
  misc_feature (1)..(181): NCBI GI NO: 3913193 NR Description: Probable mannitol dehydrogenase 1
MMRHNMNQPGKSLGVIGLGGLGHMAVKFGKAFGLKVTVFSTSESKRDEAINLLGADNFVISSDTQQMESLKNSLHFIIDTASGDHPFDPYFSLLKVGGVMTLVGFPSEIKMHPASLILGARTLSGSVVGGIKDIQEMVNFCAANNIYPEIEIIKIDYINEALARLVNRDVKYRFVIDIENSFK

SEQ ID NO: 34127 - protein, 182 aa, Zea mays subsp. mays
  peptide (1)..(182): Ceres Seq. ID no. 12347766
  misc_feature (1)..(182): NCBI GI NO: 37532016 NR Description: putative cinnamyl alcohol dehydrogenase
  misc_feature (1)..(182): NCBI GI NO: 15218564 NR Description: putative cinnamyl-alcohol dehydrogenase
  misc_feature (1)..(180): NCBI GI NO: 19849248 NR Description: cinnamyl alcohol dehydrogenase [Lolium perenne]
  misc_feature (1)..(181): NCBI GI NO: 10720088 NR Description: Probable mannitol dehydrogenase
  misc_feature (1)..(182): NCBI GI NO: 10720090 NR Description: Probable mannitol dehydrogenase
  misc_feature (1)..(180): NCBI GI NO: 22475166 NR Description: putative sinapyl alcohol dehydrogenase
  misc_feature (1)..(180): NCBI GI NO: 14279694 NR Description: sinapyl alcohol dehydrogenase
  misc_feature (1)..(180): NCBI GI NO: 37534606 NR Description: putative cinnamyl alcohol dehydrogenase
  misc_feature (1)..(182): NCBI GI NO: 7430935 NR Description: probable cinnamyl-alcohol dehydrogenase (EC1
  misc_feature (1)..(180): NCBI GI NO: 3913193 NR Description: Probable mannitol dehydrogenase 1
MRHNMNQPGKSLGVIGLGGLGHMAVKFGKAFGLKVTVFSTSESKRDEAINLLGADNFVISSDTQQMESLKNSLHFIIDTASGDHPFDPYFSLLKVGGVMTLVGFPSEIKMHPASLILGARTLSGSVVGGIKDIQEMVNFCAANNIYPEIEIIKIDYINEALARLVNRDVKYRFVIDIENSFK

SEQ ID NO: 34128 - DNA, 946 bp, Zea mays subsp. mays
  misc_feature (1)..(946): Ceres Seq. ID no. 12340618
atctggtccttgattactcgtcctttttgcttggtgcctgtgtatatcgtcgccccggccgcttgagctagcttcctctagtgctcgctctcgtcgtcgatcggttgtttgcatagcccacggcgagccgaagcaatgtcgtcggcgcccctgcagatcgcgccggtgccggagcatgtgtgctacgtgcactgcaacttctgcaacacaattctcgcggtcagtgtcccgagtcacagcatgctgaacatcgtcacagtccgttgtgggcactgcactagcctgctgtcggtgaacttgagaggactcatccaatcacttcctgtccagaaccaccactactcccagcagcaggagaatttcaccgtccaaaatatgggttttactgaaaattaccctgagtacgcaccttcgtaccgcatgccaacgacgctgtcagtgaaaggtgatctggatcatatgctgcacgtgcgcgctccagagaagaggcagcgtgttccttcagcatataacagatttattaaggaggagatacgaaggattaaagcatgtaacccggacataagccatagggaagccttcagcactgcagcaaagaattgggcacattttccgaatattcattttggtctagggccctgtgaaagtagcaacaatcttgatgaggccaccggtgcaatgtgccatccccagaaagtccaagatctctactaagacctatatcagcactgccctttgtttcctcttagttctggactagttggtgagtgccatatatatatgcatgagtgtgatatgatcatgaggtaaggaattatgattaagatgatatatatgtacgagatgaacatgcccctaggttcatgaaagactaaataaggatcgtcatctcaccatgttatcataggtagtaactattgtttgaaataaattatcctttgtgtgc

SEQ ID NO: 34129 - protein, 192 aa, Zea mays subsp. mays
  peptide (1)..(192): Ceres Seq. ID no. 12340619
  misc_feature (7)..(166): Pfam Name: Pfam Description:  YABBY protein
  misc_feature (7)..(192): NCBI GI NO: 11280864 NR Description: hypothetical protein 2 [imported] - rice
  misc_feature (1)..(59): NCBI GI NO: 37551421 NR Description: FIL-like protein [Triticum aestivum]
  misc_feature (113)..(168): NCBI GI NO: 37551421 NR Description: FIL-like protein [Triticum aestivum]
  misc_feature (113)..(168): NCBI GI NO: 32330681 NR Description: yabby10 protein [Zea mays]
  misc_feature (9)..(59): NCBI GI NO: 32330681 NR Description: yabby10 protein [Zea mays]
  misc_feature (13)..(166): NCBI GI NO: 4928751 NR Description: YABBY2 [Arabidopsis thaliana]
  misc_feature (13)..(166): NCBI GI NO: 30683176 NR Description: expressed protein [Arabidopsis thaliana]
  misc_feature (13)..(100): NCBI GI NO: 38605890 NR Description: OSJNBb0020O11.2
  misc_feature (113)..(168): NCBI GI NO: 38605890 NR Description: OSJNBb0020O11.2
  misc_feature (113)..(168): NCBI GI NO: 37535908 NR Description: hypothetical protein
MSSAPLQIAPVPEHVCYVHCNFCNTILAVSVPSHSMLNIVTVRCGHCTSLLSVNLRGLIQSLPVQNHHYSQQQENFTVQNMGFTENYPEYAPSYRMPTTLSVKGDLDHMLHVRAPEKRQRVPSAYNRFIKEEIRRIKACNPDISHREAFSTAAKNWAHFPNIHFGLGPCESSNNLDEATGAMCHPQKVQDLY

SEQ ID NO: 34130 - protein, 157 aa, Zea mays subsp. mays
  peptide (1)..(157): Ceres Seq. ID no. 12340620
  misc_feature (1)..(131): Pfam Name: Pfam Description:  YABBY protein
  misc_feature (1)..(157): NCBI GI NO: 11280864 NR Description: hypothetical protein 2 [imported] - rice
  misc_feature (1)..(24): NCBI GI NO: 37551421 NR Description: FIL-like protein [Triticum aestivum]
  misc_feature (78)..(133): NCBI GI NO: 37551421 NR Description: FIL-like protein [Triticum aestivum]
  misc_feature (78)..(133): NCBI GI NO: 32330681 NR Description: yabby10 protein [Zea mays]
  misc_feature (1)..(24): NCBI GI NO: 32330681 NR Description: yabby10 protein [Zea mays]
  misc_feature (1)..(131): NCBI GI NO: 4928751 NR Description: YABBY2 [Arabidopsis thaliana]
  misc_feature (1)..(131): NCBI GI NO: 30683176 NR Description: expressed protein [Arabidopsis thaliana]
  misc_feature (1)..(65): NCBI GI NO: 38605890 NR Description: OSJNBb0020O11.2
  misc_feature (78)..(133): NCBI GI NO: 38605890 NR Description: OSJNBb0020O11.2
  misc_feature (78)..(133): NCBI GI NO: 37535908 NR Description: hypothetical protein
MLNIVTVRCGHCTSLLSVNLRGLIQSLPVQNHHYSQQQENFTVQNMGFTENYPEYAPSYRMPTTLSVKGDLDHMLHVRAPEKRQRVPSAYNRFIKEEIRRIKACNPDISHREAFSTAAKNWAHFPNIHFGLGPCESSNNLDEATGAMCHPQKVQDLY

SEQ ID NO: 34131 - protein, 112 aa, Zea mays subsp. mays
  peptide (1)..(112): Ceres Seq. ID no. 12340621
  misc_feature (1)..(86): Pfam Name: Pfam Description:  YABBY protein
  misc_feature (1)..(112): NCBI GI NO: 11280864 NR Description: hypothetical protein 2 [imported] - rice
  misc_feature (33)..(88): NCBI GI NO: 37551421 NR Description: FIL-like protein [Triticum aestivum]
  misc_feature (33)..(88): NCBI GI NO: 32330681 NR Description: yabby10 protein [Zea mays]
  misc_feature (1)..(86): NCBI GI NO: 4928751 NR Description: YABBY2 [Arabidopsis thaliana]
  misc_feature (1)..(86): NCBI GI NO: 30683176 NR Description: expressed protein [Arabidopsis thaliana]
  misc_feature (1)..(20): NCBI GI NO: 38605890 NR Description: OSJNBb0020O11.2
  misc_feature (33)..(88): NCBI GI NO: 38605890 NR Description: OSJNBb0020O11.2
  misc_feature (33)..(88): NCBI GI NO: 37535908 NR Description: hypothetical protein
  misc_feature (33)..(88): NCBI GI NO: 32330679 NR Description: yabby9 protein [Zea mays]
  misc_feature (1)..(86): NCBI GI NO: 11280863 NR Description: hypothetical protein [imported] - rice
MGFTENYPEYAPSYRMPTTLSVKGDLDHMLHVRAPEKRQRVPSAYNRFIKEEIRRIKACNPDISHREAFSTAAKNWAHFPNIHFGLGPCESSNNLDEATGAMCHPQKVQDLY

SEQ ID NO: 34132 - DNA, 1804 bp, Zea mays subsp. mays
  misc_feature (1)..(1804): Ceres Seq. ID no. 12407383
atcccaccagttccccaattccatttctccatccatgacagctcgccatttccccacctgttcctacgctaccgccacctaaaaaaattccaggcactatccatttcaatcttgctcaaaggtcatttcattccggccggtgccttttttaggccgattggagggaaggctggtctgtgttttgttttcctgctgcctcttgggcgagttgaatttgggcgcctcttgctccaggcagtattttatcgagctagagtctggtacccggcgattcttgcttggtccaggcgccaaggcgaggaattgggcctagctccagctcaaatctgtgccttgttgcagacagaaggatttctgcatgggcgaccataactaagatgtgagattgggtggcgtcagctcggctggtgggtgattcttggtgcgtacacagacacatccctggaggcttgagctgatttggcgaggaggacagtgcaggagagagatgtctttcaggagcctgattcaggacatgaaggacgagttcgggagcatctcgcggcacagcctgcggtcccggtctcaccgctccgccgggaacgcggcgcgggcggcggcggcgggaccgtcggaggcgatggatcagagctgctggtcgcagctgccccccgagctcctgcgggaggtgctggtgaggatcgaggcatcggagagctggtggccagcgcgcaaggacgtggtgtcaggcgccggcgtctgccggacctggaggggcatcatgaaggaggccgtgcgcgtcccggaggtgtcagggaagctcacgttccccatctcacttaagcagcctggcccaagggatggcactcttaaatgtttcatcaggaggaatcgaactactcagacatattatctgtatattggattgacagaagcattggctgatgatgggaagtttctacttgctgcacgcaagtgtcgtaagcccacctgcacagactacctaatttctcttgataaggttgatatgtcaaagggaagcagcacctatattggcaagctaagatcaaacttccttggaacaaagttcactgtctatgatgctcatccaccatatgatggagctgcggtctcaaagagtcgctctgcacgtgtggttggtttgaagcaggtctcccctagagttccggctggaaattatcccgtttcacatatttcttacgagctgaatgttctgggctccagaggtccaagaaggatgaactgtgttatggattccatccctgcatcagctgttaaggaaggagggaaaactcctacacagactgaatttccacttagcagccttgactctttcccatcatttccattcttcagatctaaatcagctcggatagacagttcaacgtcgcaatcatccagtcagagggaagataggttggtgctgaagaacaagtctcctaggtggcacgaacaactgcagtgttggtgcctgaatttccgtgggcgggtcactgttgcctcggttaaaaacttccagttggtggcttctgaggacaatggaccagagagccaagagagtgacaaggtgattctccaattcggaaagatcggaaaagacttgttcaccatggactacggttatccaatatcggcatttcaagcttttgcaatttgtctgagcagttttgatacaaaaattgcctgcgaatgaggcaaggtgatttttttcccttctctattccccttgcttgtattatggacatgcagtaaaattttattaaacatgcaatttccaatgtcaaggatgattggatgaagctct

SEQ ID NO: 34133 - protein, 401 aa, Zea mays subsp. mays
  peptide (1)..(401): Ceres Seq. ID no. 12407384
  misc_feature (114)..(401): Pfam Name: Pfam Description:  Tub family
  misc_feature (1)..(401): NCBI GI NO: 34899264 NR Description: contains ESTsAU068695
  misc_feature (1)..(401): NCBI GI NO: 25409071 NR Description: probable Tub family protein
  misc_feature (1)..(401): NCBI GI NO: 30690823 NR Description: F-box containing tubby family protein
  misc_feature (1)..(306): NCBI GI NO: 5777631 NR Description: CAA303719.1 protein [Oryza sativa]
  misc_feature (348)..(401): NCBI GI NO: 5777631 NR Description: CAA303719.1 protein [Oryza sativa]
  misc_feature (307)..(348): NCBI GI NO: 5777631 NR Description: CAA303719.1 protein [Oryza sativa]
  misc_feature (1)..(306): NCBI GI NO: 32480039 NR Description: OSJNBa0039K24.2
  misc_feature (348)..(401): NCBI GI NO: 32480039 NR Description: OSJNBa0039K24.2
  misc_feature (307)..(348): NCBI GI NO: 32480039 NR Description: OSJNBa0039K24.2
  misc_feature (22)..(401): NCBI GI NO: 22326885 NR Description: F-box containing tubby family protein
MSFRSLIQDMKDEFGSISRHSLRSRSHRSAGNAARAAAAGPSEAMDQSCWSQLPPELLREVLVRIEASESWWPARKDVVSGAGVCRTWRGIMKEAVRVPEVSGKLTFPISLKQPGPRDGTLKCFIRRNRTTQTYYLYIGLTEALADDGKFLLAARKCRKPTCTDYLISLDKVDMSKGSSTYIGKLRSNFLGTKFTVYDAHPPYDGAAVSKSRSARVVGLKQVSPRVPAGNYPVSHISYELNVLGSRGPRRMNCVMDSIPASAVKEGGKTPTQTEFPLSSLDSFPSFPFFRSKSARIDSSTSQSSSQREDRLVLKNKSPRWHEQLQCWCLNFRGRVTVASVKNFQLVASEDNGPESQESDKVILQFGKIGKDLFTMDYGYPISAFQAFAICLSSFDTKIACE

SEQ ID NO: 34134 - protein, 392 aa, Zea mays subsp. mays
  peptide (1)..(392): Ceres Seq. ID no. 12407385
  misc_feature (105)..(392): Pfam Name: Pfam Description:  Tub family
  misc_feature (1)..(392): NCBI GI NO: 34899264 NR Description: contains ESTsAU068695
  misc_feature (1)..(392): NCBI GI NO: 25409071 NR Description: probable Tub family protein
  misc_feature (1)..(392): NCBI GI NO: 30690823 NR Description: F-box containing tubby family protein
  misc_feature (1)..(297): NCBI GI NO: 5777631 NR Description: CAA303719.1 protein [Oryza sativa]
  misc_feature (339)..(392): NCBI GI NO: 5777631 NR Description: CAA303719.1 protein [Oryza sativa]
  misc_feature (298)..(339): NCBI GI NO: 5777631 NR Description: CAA303719.1 protein [Oryza sativa]
  misc_feature (1)..(297): NCBI GI NO: 32480039 NR Description: OSJNBa0039K24.2
  misc_feature (339)..(392): NCBI GI NO: 32480039 NR Description: OSJNBa0039K24.2
  misc_feature (298)..(339): NCBI GI NO: 32480039 NR Description: OSJNBa0039K24.2
  misc_feature (13)..(392): NCBI GI NO: 22326885 NR Description: F-box containing tubby family protein
MKDEFGSISRHSLRSRSHRSAGNAARAAAAGPSEAMDQSCWSQLPPELLREVLVRIEASESWWPARKDVVSGAGVCRTWRGIMKEAVRVPEVSGKLTFPISLKQPGPRDGTLKCFIRRNRTTQTYYLYIGLTEALADDGKFLLAARKCRKPTCTDYLISLDKVDMSKGSSTYIGKLRSNFLGTKFTVYDAHPPYDGAAVSKSRSARVVGLKQVSPRVPAGNYPVSHISYELNVLGSRGPRRMNCVMDSIPASAVKEGGKTPTQTEFPLSSLDSFPSFPFFRSKSARIDSSTSQSSSQREDRLVLKNKSPRWHEQLQCWCLNFRGRVTVASVKNFQLVASEDNGPESQESDKVILQFGKIGKDLFTMDYGYPISAFQAFAICLSSFDTKIACE

SEQ ID NO: 34135 - protein, 357 aa, Zea mays subsp. mays
  peptide (1)..(357): Ceres Seq. ID no. 12407386
  misc_feature (70)..(357): Pfam Name: Pfam Description:  Tub family
  misc_feature (1)..(357): NCBI GI NO: 34899264 NR Description: contains ESTsAU068695
  misc_feature (1)..(357): NCBI GI NO: 25409071 NR Description: probable Tub family protein
  misc_feature (1)..(357): NCBI GI NO: 30690823 NR Description: F-box containing tubby family protein
  misc_feature (1)..(262): NCBI GI NO: 5777631 NR Description: CAA303719.1 protein [Oryza sativa]
  misc_feature (304)..(357): NCBI GI NO: 5777631 NR Description: CAA303719.1 protein [Oryza sativa]
  misc_feature (263)..(304): NCBI GI NO: 5777631 NR Description: CAA303719.1 protein [Oryza sativa]
  misc_feature (1)..(262): NCBI GI NO: 32480039 NR Description: OSJNBa0039K24.2
  misc_feature (304)..(357): NCBI GI NO: 32480039 NR Description: OSJNBa0039K24.2
  misc_feature (263)..(304): NCBI GI NO: 32480039 NR Description: OSJNBa0039K24.2
  misc_feature (1)..(357): NCBI GI NO: 22326885 NR Description: F-box containing tubby family protein
MDQSCWSQLPPELLREVLVRIEASESWWPARKDVVSGAGVCRTWRGIMKEAVRVPEVSGKLTFPISLKQPGPRDGTLKCFIRRNRTTQTYYLYIGLTEALADDGKFLLAARKCRKPTCTDYLISLDKVDMSKGSSTYIGKLRSNFLGTKFTVYDAHPPYDGAAVSKSRSARVVGLKQVSPRVPAGNYPVSHISYELNVLGSRGPRRMNCVMDSIPASAVKEGGKTPTQTEFPLSSLDSFPSFPFFRSKSARIDSSTSQSSSQREDRLVLKNKSPRWHEQLQCWCLNFRGRVTVASVKNFQLVASEDNGPESQESDKVILQFGKIGKDLFTMDYGYPISAFQAFAICLSSFDTKIACE

SEQ ID NO: 34136 - DNA, 1434 bp, Zea mays subsp. mays
  misc_feature (1)..(1434): Ceres Seq. ID no. 12359666
agcgccaccaagagttgatccacccaggccagccacccgcccgtcccccggcggcggagatggcgaggaacgaggcggcggccgcggccgcgccgggcgtcgacttccaccttcccgacgagatcctggccgtgatccccaccgacccgtacgagcagctggacgtggcgcgcaagatcacctccatggccatcgcctcccgcgtctcccgcctcgaggccgacgctgcgcgcctccgccgtgacctcgccgaccgtgaccgcgccgaggccgacctccgcgcctgcctcgccgactccgacgcgcgcctgccgccgctctcgacgagaacgcgaagctggcgaaggaaagggactcgctcgcggcgacggtcaaaaagctgaccaggaatttggcgaagttggaggcttttaagaaacaattgatgaaatcattaagtgaagataatctattgcaactgtctgaaaccagtcaagatcacaacgcagaagatttgacagctcgagtcccattttggaaagatgaagtttcgagcagtaacacttcttcagatgcctccagcagatctacaatgactgaatccgtccatggcggaggataccagttctcgatcacaccatatatgcctccaaaattaactcctggctcaacaactatgatttcgtcctctagtggttctccccgagcttattcaactggcccaccctctcccaagttcttatctggtccgacatcacctgcaaaagctcgatctgagggccaattggcattttcatcatggcaaggatcatcaagtcatcagtattcagcacctacctctcctccccaacgccactcattcacagagcggccacgtatagatgggaaggaattcttccgacaagcacggacaagactttcgtatgagcaatttggagcatttttggccaatatcaaggagttcaatgctcagaaacaatcacgggaggacaccctgtcaaaagcagaagagatttttggaacagaacacaatgatctgtacatttctttccagaatatgcttagccgaaactaatcatgaaaatttgtcagaagtagtattttctctcaaaatcaagcagggtaggttctgttggaataaacgatgtccttccgtaggttctcaaagatcacattgtagagatatgtatataggccaccttaattcgaggtgttcgttctcaataatttggagctgtgacttaaaagcggaaatctcatagcatacattcactcattccctgaaattcaaggcttcctgcttgtctttctgctgtaaatccggatgcagatctcttgagctattaaggtgccttccctagttccctttgtagaaagctgtataaaactgccctttgccgttcttctaactgccaagggtacacggaatggatatgatcacggtgcattcgttgt

SEQ ID NO: 34137 - protein, 209 aa, Zea mays subsp. mays
  peptide (1)..(209): Ceres Seq. ID no. 12359667
  misc_feature (1)..(209): NCBI GI NO: 38344261 NR Description: OSJNBa0008M17.14
  misc_feature (1)..(207): NCBI GI NO: 15222835 NR Description: hypothetical protein; protein id: At1g56080.1
  misc_feature (1)..(209): NCBI GI NO: 30684901 NR Description: expressed protein [Arabidopsis thaliana]
  misc_feature (1)..(209): NCBI GI NO: 18414476 NR Description: Expressed protein; protein id: At4g15545
  misc_feature (1)..(181): NCBI GI NO: 7485048 NR Description: hypothetical protein - Arabidopsis thaliana
  misc_feature (1)..(135): NCBI GI NO: 34909876 NR Description: B1143G03.2
  misc_feature (1)..(55): NCBI GI NO: 23613663 NR Description: hypothetical protein, conserved
  misc_feature (146)..(209): NCBI GI NO: 23613663 NR Description: hypothetical protein, conserved
  misc_feature (1)..(96): NCBI GI NO: 25404089 NR Description: hypothetical protein T6H22.12
  misc_feature (1)..(67): NCBI GI NO: 23489944 NR Description: hypothetical protein [Plasmodium yoelii yoelii]
MKSLSEDNLLQLSETSQDHNAEDLTARVPFWKDEVSSSNTSSDASSRSTMTESVHGGGYQFSITPYMPPKLTPGSTTMISSSSGSPRAYSTGPPSPKFLSGPTSPAKARSEGQLAFSSWQGSSSHQYSAPTSPPQRHSFTERPRIDGKEFFRQARTRLSYEQFGAFLANIKEFNAQKQSREDTLSKAEEIFGTEHNDLYISFQNMLSRN

SEQ ID NO: 34138 - protein, 160 aa, Zea mays subsp. mays
  peptide (1)..(160): Ceres Seq. ID no. 12359668
  misc_feature (1)..(160): NCBI GI NO: 38344261 NR Description: OSJNBa0008M17.14
  misc_feature (1)..(158): NCBI GI NO: 15222835 NR Description: hypothetical protein; protein id: At1g56080.1
  misc_feature (1)..(160): NCBI GI NO: 30684901 NR Description: expressed protein [Arabidopsis thaliana]
  misc_feature (1)..(160): NCBI GI NO: 18414476 NR Description: Expressed protein; protein id: At4g15545
  misc_feature (1)..(132): NCBI GI NO: 7485048 NR Description: hypothetical protein - Arabidopsis thaliana
  misc_feature (1)..(86): NCBI GI NO: 34909876 NR Description: B1143G03.2
  misc_feature (97)..(160): NCBI GI NO: 23613663 NR Description: hypothetical protein, conserved
  misc_feature (1)..(47): NCBI GI NO: 25404089 NR Description: hypothetical protein T6H22.12
  misc_feature (1)..(18): NCBI GI NO: 23489944 NR Description: hypothetical protein [Plasmodium yoelii yoelii]
  misc_feature (97)..(160): NCBI GI NO: 23489944 NR Description: hypothetical protein [Plasmodium yoelii yoelii]
MTESVHGGGYQFSITPYMPPKLTPGSTTMISSSSGSPRAYSTGPPSPKFLSGPTSPAKARSEGQLAFSSWQGSSSHQYSAPTSPPQRHSFTERPRIDGKEFFRQARTRLSYEQFGAFLANIKEFNAQKQSREDTLSKAEEIFGTEHNDLYISFQNMLSRN

SEQ ID NO: 34139 - protein, 143 aa, Zea mays subsp. mays
  peptide (1)..(143): Ceres Seq. ID no. 12359669
  misc_feature (1)..(143): NCBI GI NO: 38344261 NR Description: OSJNBa0008M17.14
  misc_feature (1)..(141): NCBI GI NO: 15222835 NR Description: hypothetical protein; protein id: At1g56080.1
  misc_feature (1)..(143): NCBI GI NO: 30684901 NR Description: expressed protein [Arabidopsis thaliana]
  misc_feature (1)..(143): NCBI GI NO: 18414476 NR Description: Expressed protein; protein id: At4g15545
  misc_feature (1)..(115): NCBI GI NO: 7485048 NR Description: hypothetical protein - Arabidopsis thaliana
  misc_feature (1)..(69): NCBI GI NO: 34909876 NR Description: B1143G03.2
  misc_feature (80)..(143): NCBI GI NO: 23613663 NR Description: hypothetical protein, conserved
  misc_feature (1)..(30): NCBI GI NO: 25404089 NR Description: hypothetical protein T6H22.12
  misc_feature (80)..(143): NCBI GI NO: 23489944 NR Description: hypothetical protein [Plasmodium yoelii yoelii]
  misc_feature (1)..(91): NCBI GI NO: 34909876 NR Description: B1143G03.2
MPPKLTPGSTTMISSSSGSPRAYSTGPPSPKFLSGPTSPAKARSEGQLAFSSWQGSSSHQYSAPTSPPQRHSFTERPRIDGKEFFRQARTRLSYEQFGAFLANIKEFNAQKQSREDTLSKAEEIFGTEHNDLYISFQNMLSRN

SEQ ID NO: 34140 - DNA, 1439 bp, Zea mays subsp. mays
  misc_feature (1)..(1439): Ceres Seq. ID no. 12351772
ctatgggctttgtggccgccctgtcggaaaacccgcgcaagaaaagagaaacccgcaagccgcccgcgcagaccatcgccccgttgccacggtcaaattcgtcggcgtttggtgccgcggcgtgactgtccgccggtcgcggcgcgcgtcctgcctggttggatcccttcggacttccgcagattcccgcgcgggggtgtttgatttggatgagaggagcgcggcggcgggatggggaccccttcgcagggctcggcggccgtgacggcggcccgggtcgacctctgcgcgctcgacctcatgcctgtctttgccaaggagatgatcgccggcggcgtcgccggcgccttctccaaaaccgccatcgcgccgctcgagcgcgtcaagatattgctgcagaccagaacaaatgagtttgggtctcttggagttctcaaatcattgaagaaactgagacaacttgatggagtcatggggttttacaaaggaaatggtgccagtgtgatgagaattgttccttatgctgcattacatttcatggcatatgagcggtaccggtgttggattttgaataactgtccctcactgggaacagggcctttagtagatcttttagccggttcagcatcagggggaactgctgtattgtgtacttatcccttggatttggcccggactaagcttgcctttcaggtcaatagttcagatgaactcagcagagctttgaaaaggggaagtccccagccagcatatggaggaatcattgatgtctttagatgtgtttactcagaaggtggagtgcgggctctttaccgaggtgtaggtccaacactcatggggatacttccttatgctggtcttaagttctacatatatgaagggctgaaggtacatgtaccagaagattacagaagttctgtaacattgaagctgtcatgtggtgctgctgctggtttatttggacagactctgacatatccattagatgttgtcaggaggcagatgcaggttcaaaatcagcaacaacatgaacaatttggtgccccacgaataacgggcacattccagggtcttgtgtccattaaacaaacacagggttggaaacaattatttgctggcttgagcctcaattacatcaaggtggtgccttcagtggccattggtttcaccgcatatgacaccatgaagcatttgctgaagatacctccaagagagaagaataaggtctgagcatggtcctgcttgaaattttggccgctcaattctgcagctagcagaaaagcactgcttctttctaaggcatgggagtgccgtatgaagcttacaatagaatgaagcagcctcgcccgcaattctgttacctagtactaattgcgttgtgtcacgtgatagcttatgtacctgacatattctttcattctaattttcctcattcatct

SEQ ID NO: 34141 - protein, 332 aa, Zea mays subsp. mays
  peptide (1)..(332): Ceres Seq. ID no. 12351773
  misc_feature (1)..(329): NCBI GI NO: 20161078 NR Description: putative mitochondrial carrier
  misc_feature (1)..(331): NCBI GI NO: 15223820 NR Description: mitochondrial carrier protein family
  misc_feature (1)..(331): NCBI GI NO: 7527717 NR Description: T5E21.6 [Arabidopsis thaliana]
  misc_feature (21)..(329): NCBI GI NO: 15236140 NR Description: mitochondrial carrier protein family
  misc_feature (126)..(329): NCBI GI NO: 34910456 NR Description: P0456F08.3
  misc_feature (4)..(325): NCBI GI NO: 34394749 NR Description: putative mitochondrial carrier protein
  misc_feature (185)..(331): NCBI GI NO: 20260324 NR Description: putative mitochondrial carrier protein
  misc_feature (29)..(324): NCBI GI NO: 27544933 NR Description: hypothetical protein MGC39851 [Homo sapiens]
  misc_feature (29)..(324): NCBI GI NO: 28277902 NR Description: Similar to RIKEN cDNA 3110021G18 gene
  misc_feature (29)..(324): NCBI GI NO: 30424808 NR Description: RIKEN cDNA 3110021G18 [Mus musculus]
MGTPSQGSAAVTAARVDLCALDLMPVFAKEMIAGGVAGAFSKTAIAPLERVKILLQTRTNEFGSLGVLKSLKKLRQLDGVMGFYKGNGASVMRIVPYAALHFMAYERYRCWILNNCPSLGTGPLVDLLAGSASGGTAVLCTYPLDLARTKLAFQVNSSDELSRALKRGSPQPAYGGIIDVFRCVYSEGGVRALYRGVGPTLMGILPYAGLKFYIYEGLKVHVPEDYRSSVTLKLSCGAAAGLFGQTLTYPLDVVRRQMQVQNQQQHEQFGAPRITGTFQGLVSIKQTQGWKQLFAGLSLNYIKVVPSVAIGFTAYDTMKHLLKIPPREKNKV

SEQ ID NO: 34142 - protein, 309 aa, Zea mays subsp. mays
  peptide (1)..(309): Ceres Seq. ID no. 12351774
  misc_feature (1)..(306): NCBI GI NO: 20161078 NR Description: putative mitochondrial carrier
  misc_feature (1)..(308): NCBI GI NO: 15223820 NR Description: mitochondrial carrier protein family
  misc_feature (1)..(308): NCBI GI NO: 7527717 NR Description: T5E21.6 [Arabidopsis thaliana]
  misc_feature (1)..(306): NCBI GI NO: 15236140 NR Description: mitochondrial carrier protein family
  misc_feature (103)..(306): NCBI GI NO: 34910456 NR Description: P0456F08.3
  misc_feature (1)..(302): NCBI GI NO: 34394749 NR Description: putative mitochondrial carrier protein
  misc_feature (162)..(308): NCBI GI NO: 20260324 NR Description: putative mitochondrial carrier protein
  misc_feature (6)..(301): NCBI GI NO: 27544933 NR Description: hypothetical protein MGC39851 [Homo sapiens]
  misc_feature (6)..(301): NCBI GI NO: 28277902 NR Description: Similar to RIKEN cDNA 3110021G18 gene
  misc_feature (6)..(301): NCBI GI NO: 30424808 NR Description: RIKEN cDNA 3110021G18 [Mus musculus]
MPVFAKEMIAGGVAGAFSKTAIAPLERVKILLQTRTNEFGSLGVLKSLKKLRQLDGVMGFYKGNGASVMRIVPYAALHFMAYERYRCWILNNCPSLGTGPLVDLLAGSASGGTAVLCTYPLDLARTKLAFQVNSSDELSRALKRGSPQPAYGGIIDVFRCVYSEGGVRALYRGVGPTLMGILPYAGLKFYIYEGLKVHVPEDYRSSVTLKLSCGAAAGLFGQTLTYPLDVVRRQMQVQNQQQHEQFGAPRITGTFQGLVSIKQTQGWKQLFAGLSLNYIKVVPSVAIGFTAYDTMKHLLKIPPREKNKV

SEQ ID NO: 34143 - protein, 302 aa, Zea mays subsp. mays
  peptide (1)..(302): Ceres Seq. ID no. 12351775
  misc_feature (1)..(299): NCBI GI NO: 20161078 NR Description: putative mitochondrial carrier
  misc_feature (1)..(301): NCBI GI NO: 15223820 NR Description: mitochondrial carrier protein family
  misc_feature (1)..(301): NCBI GI NO: 7527717 NR Description: T5E21.6 [Arabidopsis thaliana]
  misc_feature (1)..(299): NCBI GI NO: 15236140 NR Description: mitochondrial carrier protein family
  misc_feature (96)..(299): NCBI GI NO: 34910456 NR Description: P0456F08.3
  misc_feature (1)..(295): NCBI GI NO: 34394749 NR Description: putative mitochondrial carrier protein
  misc_feature (155)..(301): NCBI GI NO: 20260324 NR Description: putative mitochondrial carrier protein
  misc_feature (1)..(294): NCBI GI NO: 27544933 NR Description: hypothetical protein MGC39851 [Homo sapiens]
  misc_feature (1)..(294): NCBI GI NO: 28277902 NR Description: Similar to RIKEN cDNA 3110021G18 gene
  misc_feature (1)..(294): NCBI GI NO: 30424808 NR Description: RIKEN cDNA 3110021G18 [Mus musculus]
MIAGGVAGAFSKTAIAPLERVKILLQTRTNEFGSLGVLKSLKKLRQLDGVMGFYKGNGASVMRIVPYAALHFMAYERYRCWILNNCPSLGTGPLVDLLAGSASGGTAVLCTYPLDLARTKLAFQVNSSDELSRALKRGSPQPAYGGIIDVFRCVYSEGGVRALYRGVGPTLMGILPYAGLKFYIYEGLKVHVPEDYRSSVTLKLSCGAAAGLFGQTLTYPLDVVRRQMQVQNQQQHEQFGAPRITGTFQGLVSIKQTQGWKQLFAGLSLNYIKVVPSVAIGFTAYDTMKHLLKIPPREKNKV

SEQ ID NO: 34144 - DNA, 1292 bp, Zea mays subsp. mays
  misc_feature (1)..(1292): Ceres Seq. ID no. 12341218
aatcctccgggaaccatttgcgcggctacgattcgctcctgcaactgcagcatagaaagtgacgtcgccgtcgccgcattcgcgccgccctgggctccgtccaactaccgttgcaaacccaggcttgcctgacaccagaagctgctcccctctccgatccagcggcgccctgttcgactgcggcggcggcggctaccatcccgatccggtggcgccccggccttgctcgattcctacagctgctatccttttctacctgcggcgccctgctccactctagtggctgctcccctcccaatctgagccccgagatgcctgagtccagggacggcaggagtgaggacctagctgacctttctggtggtgttggtggtggagggttctttatcaggagggtggcctcgccgggagccctagcggtgaggggtgtcaggaagccgttggcgcggcgttatatttcaccctcgaggaacaaggagaacctgctgccggtttgggcgttgagggtcacaccgacaaagaggagcccgcttcctggatggtaccccaggacgccgctccgtgatattacggccattgcaaaggctattcagagaagtcgttcaaggattgctgcagctcagcagcgaagccaaaggatcgagcagtcttcacaatctgtgaacgtgactactccagcacaagcagagcaggatgctcacattgctgaagcctcccatgctgttgcatctggctccggctcaactgaaagagaagctgtagcaaaccctgctactgttttggctgatgacaatttgaatgtgtcttctttgccagcagaaggctcattgaatactccatccaaaccaatggatcctgcccttgctgacaagaaactttccggttcaatagagaaggtagagaagttggtgaggaaaaacctgaagcgaacatcgagggctgcccaggcctccaggagggccacccaaaggcgcaatcttatgtccatgcgatgaatttattgctgtactttgctgggggaagagaaagtccacttcaggcttgtcctccttcctcttgtctgtgctgctcttcttccaatacttgccgtggcgtgatgctcacggccattccttgttcccttctcgaggacaagaatatggaagccattggctctctgcttgaggttctaggactgcagctactagtgtgaggtgtgatctggttcatgctattgctgatgtatgcatacttttctgtgtatccctgtgggccgttgaacaaataaaatctttaatttacttttctgccgc

SEQ ID NO: 34145 - protein, 227 aa, Zea mays subsp. mays
  peptide (1)..(227): Ceres Seq. ID no. 12341219
  misc_feature (1)..(227): NCBI GI NO: 38344815 NR Description: OSJNBb0022F23.8
  misc_feature (17)..(227): NCBI GI NO: 15227912 NR Description: hypothetical protein; protein id: At2g42260.1
MPESRDGRSEDLADLSGGVGGGGFFIRRVASPGALAVRGVRKPLARRYISPSRNKENLLPVWALRVTPTKRSPLPGWYPRTPLRDITAIAKAIQRSRSRIAAAQQRSQRIEQSSQSVNVTTPAQAEQDAHIAEASHAVASGSGSTEREAVANPATVLADDNLNVSSLPAEGSLNTPSKPMDPALADKKLSGSIEKVEKLVRKNLKRTSRAAQASRRATQRRNLMSMR

SEQ ID NO: 34146 - DNA, 1418 bp, Zea mays subsp. mays; identical to SEQ ID NO: 31511
  misc_feature (1)..(1418): Ceres Seq. ID no. 12411535

SEQ ID NO: 34147 - protein, 185 aa, Zea mays subsp. mays; identical to SEQ ID NO: 31512
  peptide (1)..(185): Ceres Seq. ID no. 12411536
  misc_feature (92)..(180): Pfam Name: Pfam Description:  Aspartate/ornithine carbamoyltransferase
  misc_feature (44)..(180): NCBI GI NO: 9453916 NR Description: aspartate carbamoyl transferase
  misc_feature (90)..(180): NCBI GI NO: 3914501 NR Description: Aspartate carbamoyltransferase 3
  misc_feature (90)..(180): NCBI GI NO: 3914503 NR Description: Aspartate carbamoyltransferase 2
  misc_feature (91)..(180): NCBI GI NO: 21535795 NR Description: aspartate carbamoyltransferase [Solanum tuberosum]
  misc_feature (91)..(180): NCBI GI NO: 15231112 NR Description: aspartate carbamoyltransferase precursor
  misc_feature (91)..(180): NCBI GI NO: 1076293 NR Description: aspartate carbamoyltransferase (EC 2
  misc_feature (90)..(180): NCBI GI NO: 3914502 NR Description: Aspartate carbamoyltransferase 1
  misc_feature (91)..(180): NCBI GI NO: 15215706 NR Description: AT3g20330/MQC12_8 [Arabidopsis thaliana]
  misc_feature (132)..(180): NCBI GI NO: 479713 NR Description: aspartate carbamoyltransferase (EC 2
  misc_feature (132)..(180): NCBI GI NO: 397385 NR Description: aspartate carbamoyltransferase

SEQ ID NO: 34148 - protein, 116 aa, Zea mays subsp. mays; identical to SEQ ID NO: 31513
  peptide (1)..(116): Ceres Seq. ID no. 12411537
  misc_feature (1)..(113): Pfam Name: Pfam Description:  Aspartate/ornithine carbamoyltransferase
  misc_feature (1)..(115): NCBI GI NO: 9453916 NR Description: aspartate carbamoyl transferase
  misc_feature (1)..(115): NCBI GI NO: 3914501 NR Description: Aspartate carbamoyltransferase 3
  misc_feature (1)..(115): NCBI GI NO: 3914503 NR Description: Aspartate carbamoyltransferase 2
  misc_feature (1)..(115): NCBI GI NO: 21535795 NR Description: aspartate carbamoyltransferase [Solanum tuberosum]
  misc_feature (1)..(115): NCBI GI NO: 15231112 NR Description: aspartate carbamoyltransferase precursor
  misc_feature (1)..(115): NCBI GI NO: 1076293 NR Description: aspartate carbamoyltransferase (EC 2
  misc_feature (1)..(115): NCBI GI NO: 3914502 NR Description: Aspartate carbamoyltransferase 1
  misc_feature (1)..(115): NCBI GI NO: 15215706 NR Description: AT3g20330/MQC12_8 [Arabidopsis thaliana]
  misc_feature (1)..(115): NCBI GI NO: 479713 NR Description: aspartate carbamoyltransferase (EC 2
  misc_feature (1)..(115): NCBI GI NO: 397385 NR Description: aspartate carbamoyltransferase

SEQ ID NO: 34149 - DNA, 1811 bp, Zea mays subsp. mays; identical to SEQ ID NO: 25732
  misc_feature (1)..(1811): Ceres Seq. ID no. 12423991

SEQ ID NO: 34150 - protein, 568 aa, Zea mays subsp. mays; identical to SEQ ID NO: 25733
  peptide (1)..(568): Ceres Seq. ID no. 12423992
  misc_feature (278)..(568): Pfam Name: Pfam Description:  Enolase, C-terminal TIM barrel domain
  misc_feature (140)..(568): NCBI GI NO: 15221107 NR Description: putative enolase; protein id: At1g74030
  misc_feature (139)..(568): NCBI GI NO: 1169533 NR Description: Enolase
  misc_feature (140)..(568): NCBI GI NO: 119354 NR Description: Enolase
  misc_feature (140)..(568): NCBI GI NO: 17536383 NR Description: Enolase (46.6 kD) [Caenorhabditis elegans]
  misc_feature (140)..(568): NCBI GI NO: 21392248 NR Description: SD23356p [Drosophila melanogaster]
  misc_feature (140)..(568): NCBI GI NO: 24580914 NR Description: Enolase CG17654-PB
  misc_feature (140)..(568): NCBI GI NO: 8919731 NR Description: enolase [Spinacia oleracea]
  misc_feature (140)..(568): NCBI GI NO: 119351 NR Description: Enolase
  misc_feature (139)..(568): NCBI GI NO: 105934 NR Description: phosphopyruvate hydratase (EC 4
  misc_feature (137)..(568): NCBI GI NO: 1169534 NR Description: Enolase

SEQ ID NO: 34151 - protein, 476 aa, Zea mays subsp. mays; identical to SEQ ID NO: 25734
  peptide (1)..(476): Ceres Seq. ID no. 12423993
  misc_feature (186)..(476): Pfam Name: Pfam Description:  Enolase, C-terminal TIM barrel domain
  misc_feature (48)..(476): NCBI GI NO: 15221107 NR Description: putative enolase; protein id: At1g74030
  misc_feature (47)..(476): NCBI GI NO: 1169533 NR Description: Enolase
  misc_feature (48)..(476): NCBI GI NO: 119354 NR Description: Enolase
  misc_feature (48)..(476): NCBI GI NO: 17536383 NR Description: Enolase (46.6 kD) [Caenorhabditis elegans]
  misc_feature (48)..(476): NCBI GI NO: 21392248 NR Description: SD23356p [Drosophila melanogaster]
  misc_feature (48)..(476): NCBI GI NO: 24580914 NR Description: Enolase CG17654-PB
  misc_feature (48)..(476): NCBI GI NO: 8919731 NR Description: enolase [Spinacia oleracea]
  misc_feature (48)..(476): NCBI GI NO: 119351 NR Description: Enolase
  misc_feature (47)..(476): NCBI GI NO: 105934 NR Description: phosphopyruvate hydratase (EC 4
  misc_feature (45)..(476): NCBI GI NO: 1169534 NR Description: Enolase

SEQ ID NO: 34152 - protein, 339 aa, Zea mays subsp. mays; identical to SEQ ID NO: 25735
  peptide (1)..(339): Ceres Seq. ID no. 12423994
  misc_feature (49)..(339): Pfam Name: Pfam Description:  Enolase, C-terminal TIM barrel domain
  misc_feature (1)..(339): NCBI GI NO: 15221107 NR Description: putative enolase; protein id: At1g74030
  misc_feature (1)..(339): NCBI GI NO: 1169533 NR Description: Enolase
  misc_feature (1)..(339): NCBI GI NO: 119354 NR Description: Enolase
  misc_feature (1)..(339): NCBI GI NO: 17536383 NR Description: Enolase (46.6 kD) [Caenorhabditis elegans]
  misc_feature (1)..(339): NCBI GI NO: 21392248 NR Description: SD23356p [Drosophila melanogaster]
  misc_feature (1)..(339): NCBI GI NO: 24580914 NR Description: Enolase CG17654-PB
  misc_feature (1)..(339): NCBI GI NO: 8919731 NR Description: enolase [Spinacia oleracea]
  misc_feature (1)..(339): NCBI GI NO: 119351 NR Description: Enolase
  misc_feature (1)..(339): NCBI GI NO: 105934 NR Description: phosphopyruvate hydratase (EC 4
  misc_feature (1)..(339): NCBI GI NO: 1169534 NR Description: Enolase

SEQ ID NO: 34153 - DNA, 981 bp, Zea mays subsp. mays
  misc_feature (1)..(981): Ceres Seq. ID no. 12414361
gttccctcgccatccgccgccgccgccatgccgggcttcgctcagcgtctcgcggggcatcccgtggcggagcatcgcgaggcaaggcctctcccgcgtgttcctggtggcgaaggcctactgcttgatccacgtcgtcaacgaccacctctgctcggtgaccttagtgcggggcgccagcatgctgccgtccctgaacctggcgggcgacgcggtggcggtggacagggtcagcgtgaggctcggccgggtcgcgccgggggacatcgtgctgatgatctcccccgaggacccgcgcaagtcggtcgtcaagcgcgtcgtcgggatgcagggggactccgtcacctaccttgtcgaccccggcaaaagcgactcctccagaaccgtcgtggtaccgcaagatcatgtctgggtgcagggtgacaatatctttgcttctaacgattcgaggcaatttggagctgtgccttatgggctgattacagggaagatcttttgccgggtttggccgccagagagttttggcgcaattgatgacgcaacgaagcagtcttaacgctgaggaggagccgaggagcacatggacccatattgtttgctcgcgcccagagattctatctataacatactgcaggggggcccttccttgagctcgagagctttcgacgacctaccgcagcgcatttctacagcgaagcaaagagcgttgtgtgtcttgattgatgtcccgtgtttttttatagttttggtgtgtgacaagttctgaaacccgtgtttttatagttttggtgtgtgacaggttccgagatagttttttttgttttgttttttggtgatagtgcaagcctgggtttgcaactacactacaacttcacatgcttattcgaaacatttgaactgatttgtcagtcctcgttttgcagaagggcgtgtttgtttgtttatccatgtccatgtcaaaacacacgacgattattgtcc

SEQ ID NO: 34154 - protein, 184 aa, Zea mays subsp. mays
  peptide (1)..(184): Ceres Seq. ID no. 12414362
  misc_feature (25)..(131): Pfam Name: Pfam Description:  Signal peptidase I
  misc_feature (19)..(131): NCBI GI NO: 23928440 NR Description: hypothetical protein [Zea mays]
  misc_feature (131)..(167): NCBI GI NO: 23928440 NR Description: hypothetical protein [Zea mays]
  misc_feature (19)..(167): NCBI GI NO: 22208508 NR Description: unknown protein [Sorghum bicolor]
  misc_feature (22)..(177): NCBI GI NO: 30695525 NR Description: expressed protein [Arabidopsis thaliana]
  misc_feature (22)..(181): NCBI GI NO: 25518432 NR Description: hypothetical protein F5O8.3 - Arabidopsis thaliana
  misc_feature (22)..(167): NCBI GI NO: 22329754 NR Description: polygalacturonase, putative; protein id:At1g23470
  misc_feature (22)..(167): NCBI GI NO: 15220621 NR Description: hypothetical protein; protein id: At1g29960.1
  misc_feature (22)..(154): NCBI GI NO: 8778577 NR Description: F28C11.10 [Arabidopsis thaliana]
  misc_feature (26)..(169): NCBI GI NO: 4680499 NR Description: hypothetical protein [Oryza sativa]
  misc_feature (29)..(170): NCBI GI NO: 19113018 NR Description: putative mitochondrial membrane protease subunit 2
FPRHPPPPPCRASLSVSRGIPWRSIARQGLSRVFLVAKAYCLIHVVNDHLCSVTLVRGASMLPSLNLAGDAVAVDRVSVRLGRVAPGDIVLMISPEDPRKSVVKRVVGMQGDSVTYLVDPGKSDSSRTVVVPQDHVWVQGDNIFASNDSRQFGAVPYGLITGKIFCRVWPPESFGAIDDATKQS

SEQ ID NO: 34155 - protein, 140 aa, Zea mays subsp. mays
  peptide (1)..(140): Ceres Seq. ID no. 12414363
VPSPSAAAAMPGFAQRLAGHPVAEHREARPLPRVPGGEGLLLDPRRQRPPLLGDLSAGRQHAAVPEPGGRRGGGGQGQREARPGRAGGHRADDLPRGPAQVGRQARRRDAGGLRHLPCRPRQKRLLQNRRGTARSCLGAG

SEQ ID NO: 34156 - protein, 131 aa, Zea mays subsp. mays
  peptide (1)..(131): Ceres Seq. ID no. 12414364
MPGFAQRLAGHPVAEHREARPLPRVPGGEGLLLDPRRQRPPLLGDLSAGRQHAAVPEPGGRRGGGGQGQREARPGRAGGHRADDLPRGPAQVGRQARRRDAGGLRHLPCRPRQKRLLQNRRGTARSCLGAG

SEQ ID NO: 34157 - DNA, 1408 bp, Zea mays subsp. mays
  misc_feature (1)..(1408): Ceres Seq. ID no. 12414737
aacgacctgcctgccttgctcttgccctgtgagcagcggcgtgcgatcgatcgaggcagtcgtagtaataagccaacaaacaaaccggccggaacgccatgctggaggagtacaaaccgtgtgcggccatggtggtgacgcagtgcatctacgccgctctagcgctcttgtccaaggcggcgttcaccggcggcatgagccccctggtgttcgtcgtctacaggcaggccgtcgccaccattgtactcgtccccgtcgtcatcgcggccaacaggaagaagatgaaggagatgacgacgggccttggactgacgggcttctcgctggtcttcgtcgcctcccttgtcgggggcaacggtgaaccagtgcatgtactaccaaggggtgaatctgggctcgtcgtcgatggcaacggccatgaccaacttgatccccgccatcaccttcgtcatggcggcatcagtcggcctagagagggtggaggccaggaggccgaggagcctggccaagatcttcggcacggccgtctgcgtgagcggcgccatggccatggctttcttcaagggcccgaagctgctcggcgacggcccgaacgctctccagctcctcctccacgcgggcggcggcggcaggtgggtggccggcgcgctcttcctcgtgggcagcagctcctgctggtcgctctggctcatcctgcaggtgcccatctgcaagtcgtacgtggagccgctggctctgtcggcgtggatgtgcgtcctgtccacgctccagtccgcgctgctcgtctccttcctcctgccggaccccagcgcctggaggatccactcgctcttcgagctctcctgctgcgtcttctcgggcgtgttcgggtccggcgtcacgttctacctgcagtcgtggtgcatctccgtgaggggcccgctctactccgccatgttcaacccgctctgcaccgtgatcaccaccgtgttcgccgccgccgtcctccgcgaagagctgcacgtcggcagcttgctgggcgcgatcgccgtcatcgcggggctgtacgtggtgctgtggggcaaagcgggcgacgccaacaagggcggggtggagccagagcaccactcggacgatctggagaagacgtcatcagcgcggtcggatcccaattcgacggccggcgtcggcagtggcatcgccgagcccctcctggcgggcggcgatccaacggagaagtagatgggattttgctgctcttcaagtgttctgtgcgtgcgcgcgcggtgttttcagggtcggtatgctagtgctactgtaacagtgccgtcccagttttgtcatgtacactagtggcagcttcaaatgactccgtgctgccgatgtgtattatccgcacaattttgttaagcaacgcggcgtccccgtc

SEQ ID NO: 34158 - protein, 396 aa, Zea mays subsp. mays
  peptide (1)..(396): Ceres Seq. ID no. 12414738
  misc_feature (10)..(84): NCBI GI NO: 15234742 NR Description: nodulin-like protein; protein id: At4g30420.1
  misc_feature (2)..(84): NCBI GI NO: 15234371 NR Description: Medicago nodulin N21-like protein
  misc_feature (1)..(90): NCBI GI NO: 28932880 NR Description: nodulin-like protein [Gossypium hirsutum]
  misc_feature (1)..(90): NCBI GI NO: 28932732 NR Description: putative nodulin protein [Gossypium hirsutum]
  misc_feature (1)..(86): NCBI GI NO: 30680708 NR Description: nodulin MtN21 family protein
  misc_feature (2)..(86): NCBI GI NO: 7486870 NR Description: hypothetical protein T12G13
  misc_feature (2)..(81): NCBI GI NO: 34894436 NR Description: putative CAA303720.1 protein
  misc_feature (10)..(79): NCBI GI NO: 18410867 NR Description: nodulin-like protein; protein id: At1g75500
  misc_feature (1)..(69): NCBI GI NO: 15219448 NR Description: nodulin protein, putative; protein id: At1g44800
  misc_feature (1)..(82): NCBI GI NO: 34894456 NR Description: putative MtN21
MLEEYKPCAAMVVTQCIYAALALLSKAAFTGGMSPLVFVVYRQAVATIVLVPVVIAANRKKMKEMTTGLGLTGFSLVFVASLVGGNGEPVHVLPRGESGLVVDGNGHDQLDPRHHLRHGGISRPREGGGQEAEEPGQDLRHGRLRERRHGHGFLQGPEAARRRPERSPAPPPRGRRRQVGGRRALPRGQQLLLVALAHPAGAHLQVVRGAAGSVGVDVRPVHAPVRAARLLPPAGPQRLEDPLALRALLLRLLGRVRVRRHVLPAVVVHLREGPALLRHVQPALHRDHHRVRRRRPPRRAARRQLAGRDRRHRGAVRGAVGQSGRRQQGRGGARAPLGRSGEDVISAVGSQFDGRRRQWHRRAPPGGRRSNGEVDGILLLFKCSVRARAVFSGSVC

SEQ ID NO: 34159 - protein, 386 aa, Zea mays subsp. mays
  peptide (1)..(386): Ceres Seq. ID no. 12414739
  misc_feature (1)..(74): NCBI GI NO: 15234742 NR Description: nodulin-like protein; protein id: At4g30420.1
  misc_feature (1)..(74): NCBI GI NO: 15234371 NR Description: Medicago nodulin N21-like protein
  misc_feature (1)..(80): NCBI GI NO: 28932880 NR Description: nodulin-like protein [Gossypium hirsutum]
  misc_feature (1)..(80): NCBI GI NO: 28932732 NR Description: putative nodulin protein [Gossypium hirsutum]
  misc_feature (1)..(76): NCBI GI NO: 30680708 NR Description: nodulin MtN21 family protein
  misc_feature (1)..(76): NCBI GI NO: 7486870 NR Description: hypothetical protein T12G13
  misc_feature (1)..(71): NCBI GI NO: 34894436 NR Description: putative CAA303720.1 protein
  misc_feature (1)..(69): NCBI GI NO: 18410867 NR Description: nodulin-like protein; protein id: At1g75500
  misc_feature (1)..(59): NCBI GI NO: 15219448 NR Description: nodulin protein, putative; protein id: At1g44800
  misc_feature (1)..(72): NCBI GI NO: 34894456 NR Description: putative MtN21
MVVTQCIYAALALLSKAAFTGGMSPLVFVVYRQAVATIVLVPVVIAANRKKMKEMTTGLGLTGFSLVFVASLVGGNGEPVHVLPRGESGLVVDGNGHDQLDPRHHLRHGGISRPREGGGQEAEEPGQDLRHGRLRERRHGHGFLQGPEAARRRPERSPAPPPRGRRRQVGGRRALPRGQQLLLVALAHPAGAHLQVVRGAAGSVGVDVRPVHAPVRAARLLPPAGPQRLEDPLALRALLLRLLGRVRVRRHVLPAVVVHLREGPALLRHVQPALHRDHHRVRRRRPPRRAARRQLAGRDRRHRGAVRGAVGQSGRRQQGRGGARAPLGRSGEDVISAVGSQFDGRRRQWHRRAPPGGRRSNGEVDGILLLFKCSVRARAVFSGSVC

SEQ ID NO: 34160 - protein, 364 aa, Zea mays subsp. mays
  peptide (1)..(364): Ceres Seq. ID no. 12414740
  misc_feature (1)..(52): NCBI GI NO: 15234742 NR Description: nodulin-like protein; protein id: At4g30420.1
  misc_feature (1)..(52): NCBI GI NO: 15234371 NR Description: Medicago nodulin N21-like protein
  misc_feature (1)..(58): NCBI GI NO: 28932880 NR Description: nodulin-like protein [Gossypium hirsutum]
  misc_feature (1)..(58): NCBI GI NO: 28932732 NR Description: putative nodulin protein [Gossypium hirsutum]
  misc_feature (1)..(54): NCBI GI NO: 30680708 NR Description: nodulin MtN21 family protein
  misc_feature (1)..(54): NCBI GI NO: 7486870 NR Description: hypothetical protein T12G13
  misc_feature (1)..(49): NCBI GI NO: 34894436 NR Description: putative CAA303720.1 protein
  misc_feature (1)..(47): NCBI GI NO: 18410867 NR Description: nodulin-like protein; protein id: At1g75500
  misc_feature (1)..(37): NCBI GI NO: 15219448 NR Description: nodulin protein, putative; protein id: At1g44800
  misc_feature (1)..(50): NCBI GI NO: 34894456 NR Description: putative MtN21
MSPLVFVVYRQAVATIVLVPVVIAANRKKMKEMTTGLGLTGFSLVFVASLVGGNGEPVHVLPRGESGLVVDGNGHDQLDPRHHLRHGGISRPREGGGQEAEEPGQDLRHGRLRERRHGHGFLQGPEAARRRPERSPAPPPRGRRRQVGGRRALPRGQQLLLVALAHPAGAHLQVVRGAAGSVGVDVRPVHAPVRAARLLPPAGPQRLEDPLALRALLLRLLGRVRVRRHVLPAVVVHLREGPALLRHVQPALHRDHHRVRRRRPPRRAARRQLAGRDRRHRGAVRGAVGQSGRRQQGRGGARAPLGRSGEDVISAVGSQFDGRRRQWHRRAPPGGRRSNGEVDGILLLFKCSVRARAVFSGSVC

SEQ ID NO: 34161 - protein, 283 aa, Zea mays subsp. mays
  peptide (1)..(283): Ceres Seq. ID no. 12414741
  misc_feature (102)..(230): Pfam Name: Pfam Description:  Integral membrane protein DUF6
  misc_feature (1)..(283): NCBI GI NO: 15234742 NR Description: nodulin-like protein; protein id: At4g30420.1
  misc_feature (1)..(275): NCBI GI NO: 15234371 NR Description: Medicago nodulin N21-like protein
  misc_feature (1)..(232): NCBI GI NO: 28932880 NR Description: nodulin-like protein [Gossypium hirsutum]
  misc_feature (1)..(232): NCBI GI NO: 28932732 NR Description: putative nodulin protein [Gossypium hirsutum]
  misc_feature (1)..(235): NCBI GI NO: 30680708 NR Description: nodulin MtN21 family protein
  misc_feature (1)..(235): NCBI GI NO: 7486870 NR Description: hypothetical protein T12G13
  misc_feature (1)..(241): NCBI GI NO: 34894436 NR Description: putative CAA303720.1 protein
  misc_feature (1)..(275): NCBI GI NO: 18410867 NR Description: nodulin-like protein; protein id: At1g75500
  misc_feature (1)..(235): NCBI GI NO: 15219448 NR Description: nodulin protein, putative; protein id: At1g44800
  misc_feature (1)..(233): NCBI GI NO: 34894456 NR Description: putative MtN21
MYYQGVNLGSSSMATAMTNLIPAITFVMAASVGLERVEARRPRSLAKIFGTAVCVSGAMAMAFFKGPKLLGDGPNALQLLLHAGGGGRWVAGALFLVGSSSCWSLWLILQVPICKSYVEPLALSAWMCVLSTLQSALLVSFLLPDPSAWRIHSLFELSCCVFSGVFGSGVTFYLQSWCISVRGPLYSAMFNPLCTVITTVFAAAVLREELHVGSLLGAIAVIAGLYVVLWGKAGDANKGGVEPEHHSDDLEKTSSARSDPNSTAGVGSGIAEPLLAGGDPTEK

SEQ ID NO: 34162 - DNA, 472 bp, Zea mays subsp. mays
  misc_feature (1)..(472): Ceres Seq. ID no. 12403917
aaacccatcgcagggcattctcgagcatagcttctctgcctctctctcccctcctctcctctcgtccactcctttgtccaaagcttcgagatggctcagcagcagaaggtggtggtcagggttccaaccatgacagatgacaagatcaagcagaaggccatcgaagctgttgcggacatttacggtattgactccatagcagcggatctgaaggagaacaagatgaccatcataggcgagatggatgcagtagcgattgccaagaagttaaagaagattggaaagattgacattgtgtctgttggacctgcaaaagaagaaaagaaggaagaaaagaaagaggagaaaaaggaggaaaagaaagaagagaagaaagaggagaagaaagaagagaagaaagaagagaagaaagaagaaaagaagtgataaacctataaaacatatatatcatcgcatggcctcacttatctcc

SEQ ID NO: 34163 - protein, 111 aa, Zea mays subsp. mays
  peptide (1)..(111): Ceres Seq. ID no. 12403918
  misc_feature (1)..(111): Pfam Name: Pfam Description:  Ubiquitin carboxyl-terminal hydrolase
  misc_feature (1)..(107): NCBI GI NO: 37535864 NR Description: hypothetical protein
  misc_feature (5)..(107): NCBI GI NO: 18420713 NR Description: expressed protein; protein id: At5g23760
  misc_feature (5)..(107): NCBI GI NO: 21554550 NR Description: unknown [Arabidopsis thaliana]
  misc_feature (5)..(107): NCBI GI NO: 26452654 NR Description: unknown protein [Arabidopsis thaliana]
  misc_feature (5)..(111): NCBI GI NO: 13543783 NR Description: Unknown (protein for MGC:7642) [Mus musculus]
  misc_feature (40)..(107): NCBI GI NO: 10176843 NR Description: gene_id:MRO11.20~unknown protein
  misc_feature (1)..(111): NCBI GI NO: 25517980 NR Description: F22L4.5 protein - Arabidopsis thaliana
  misc_feature (5)..(111): NCBI GI NO: 15223416 NR Description: expressed protein; protein id: At1g01490
  misc_feature (5)..(111): NCBI GI NO: 29124977 NR Description: unknown [Populus tremuloides]
  misc_feature (5)..(108): NCBI GI NO: 37536388 NR Description: hypothetical protein
MAQQQKVVVRVPTMTDDKIKQKAIEAVADIYGIDSIAADLKENKMTIIGEMDAVAIAKKLKKIGKIDIVSVGPAKEEKKEEKKEEKKEEKKEEKKEEKKEEKKEEKKEEKK

SEQ ID NO: 34164 - protein, 98 aa, Zea mays subsp. mays
  peptide (1)..(98): Ceres Seq. ID no. 12403919
  misc_feature (1)..(98): Pfam Name: Pfam Description:  Ubiquitin carboxyl-terminal hydrolase
  misc_feature (1)..(94): NCBI GI NO: 37535864 NR Description: hypothetical protein
  misc_feature (1)..(94): NCBI GI NO: 18420713 NR Description: expressed protein; protein id: At5g23760
  misc_feature (1)..(94): NCBI GI NO: 21554550 NR Description: unknown [Arabidopsis thaliana]
  misc_feature (1)..(94): NCBI GI NO: 26452654 NR Description: unknown protein [Arabidopsis thaliana]
  misc_feature (1)..(98): NCBI GI NO: 13543783 NR Description: Unknown (protein for MGC:7642) [Mus musculus]
  misc_feature (27)..(94): NCBI GI NO: 10176843 NR Description: gene_id:MRO11.20~unknown protein
  misc_feature (1)..(98): NCBI GI NO: 25517980 NR Description: F22L4.5 protein - Arabidopsis thaliana
  misc_feature (1)..(98): NCBI GI NO: 15223416 NR Description: expressed protein; protein id: At1g01490
  misc_feature (1)..(98): NCBI GI NO: 29124977 NR Description: unknown [Populus tremuloides]
  misc_feature (1)..(95): NCBI GI NO: 37536388 NR Description: hypothetical protein
MTDDKIKQKAIEAVADIYGIDSIAADLKENKMTIIGEMDAVAIAKKLKKIGKIDIVSVGPAKEEKKEEKKEEKKEEKKEEKKEEKKEEKKEEKKEEKK

SEQ ID NO: 34165 - protein, 67 aa, Zea mays subsp. mays
  peptide (1)..(67): Ceres Seq. ID no. 12403920
  misc_feature (1)..(67): Pfam Name: Pfam Description:  Ubiquitin carboxyl-terminal hydrolase
  misc_feature (1)..(63): NCBI GI NO: 37535864 NR Description: hypothetical protein
  misc_feature (1)..(63): NCBI GI NO: 18420713 NR Description: expressed protein; protein id: At5g23760
  misc_feature (1)..(63): NCBI GI NO: 21554550 NR Description: unknown [Arabidopsis thaliana]
  misc_feature (1)..(63): NCBI GI NO: 26452654 NR Description: unknown protein [Arabidopsis thaliana]
  misc_feature (1)..(67): NCBI GI NO: 13543783 NR Description: Unknown (protein for MGC:7642) [Mus musculus]
  misc_feature (1)..(63): NCBI GI NO: 10176843 NR Description: gene_id:MRO11.20~unknown protein
  misc_feature (1)..(67): NCBI GI NO: 25517980 NR Description: F22L4.5 protein - Arabidopsis thaliana
  misc_feature (1)..(67): NCBI GI NO: 15223416 NR Description: expressed protein; protein id: At1g01490
  misc_feature (1)..(67): NCBI GI NO: 29124977 NR Description: unknown [Populus tremuloides]
  misc_feature (1)..(64): NCBI GI NO: 37536388 NR Description: hypothetical protein
MTIIGEMDAVAIAKKLKKIGKIDIVSVGPAKEEKKEEKKEEKKEEKKEEKKEEKKEEKKEEKKEEKK

SEQ ID NO: 34166 - DNA, 729 bp, Zea mays subsp. mays
  misc_feature (1)..(729): Ceres Seq. ID no. 12404622
atcaacaacagccctacaacttactgcttgctctagctagctagctgctcccggcccatatctactacacaagtaggctagcagcagcagcagcaatggcctcggtgacgaggttcccggccgtggccctcgtcctgctgctcgccgccagcgccttcctggccagcgaggtggcggcgtgcggcggctgcccgaaaccaactcctcctccatcgccaccaccgccgtcgcccaccagcacgccgtgccctccgccgccgtccagctccggcggcaagtgccccaagaacgcgctgaaactgggcgtgtgcgccaacgtgctgggcctcgtcaaggtgtccatcggcaaggtgcccaccgactcgtgctgcccactgctggacgggctcgccgacctggaggccgccgtctgcctctgcaccgcgctcaaggccaacgtgctcggcgtcaacctcgacgtccccgtcaagctcaccctgctcctcaactactgcgggaagagcgtccctcagggcttcctgtgcgcctaatatatatactagtggctagttcgtcactagcttcagttgccatgcatatttgtgattcttcttctttccttctagttcaccactgtatgtacgagcctcctccggatgttttctttggtattgccttctcttctactcttctcctaacttgcttgcattatacattgcgtgagcatgataatatataaatcattgggtg

SEQ ID NO: 34167 - protein, 144 aa, Zea mays subsp. mays
  peptide (1)..(144): Ceres Seq. ID no. 12404623
  misc_feature (62)..(143): Pfam Name: Pfam Description:  Protease inhibitor/seed storage/LTP family
  misc_feature (13)..(144): NCBI GI NO: 4240033 NR Description: ZmGR1a [Zea mays]
  misc_feature (13)..(144): NCBI GI NO: 4240035 NR Description: ZmGR1b [Zea mays]
  misc_feature (11)..(143): NCBI GI NO: 1084461 NR Description: root-specific protein RCc3 - rice
  misc_feature (11)..(144): NCBI GI NO: 481236 NR Description: hypothetical protein - Madagascar periwinkle
  misc_feature (11)..(144): NCBI GI NO: 7484770 NR Description: extensin like protein - black poplar
  misc_feature (11)..(144): NCBI GI NO: 4454097 NR Description: hybrid proline-rich protein [Catharanthus roseus]
  misc_feature (11)..(143): NCBI GI NO: 38345485 NR Description: OSJNBa0010H02.23
  misc_feature (1)..(143): NCBI GI NO: 15221484 NR Description: similar to 14KD proline-rich protein DC2
  misc_feature (11)..(143): NCBI GI NO: 38345484 NR Description: OSJNBa0010H02.22
  misc_feature (1)..(143): NCBI GI NO: 629597 NR Description: proline-rich protein - rape
MASVTRFPAVALVLLLAASAFLASEVAACGGCPKPTPPPSPPPPSPTSTPCPPPPSSSGGKCPKNALKLGVCANVLGLVKVSIGKVPTDSCCPLLDGLADLEAAVCLCTALKANVLGVNLDVPVKLTLLLNYCGKSVPQGFLCA

SEQ ID NO: 34168 - DNA, 1250 bp, Zea mays subsp. mays
  misc_feature (1)..(1250): Ceres Seq. ID no. 12414528
gtccatccatcgtctcgtccccgcctgccattcgcgagcatccaaagctgtagttgctgcaaagctctcgcaaaatcctactcccaccgccgactcgaacagtcgaacctcggctcccctcctccccaatccgtcatcttccttctacacttgtttctgcgggagcgggagagaaggcaccagggaggccgcccccgtcacccatagccaaagtcacgcgccaccaaactttgttctctcacccagtcgctttcgcgttcagcgcgagccgagcccagccggtgggtcggtcgctgaaggcggagccataaaggcgtcggcgacggcaggatgatgagcggcagatcgggcggcagggacggcgaggcggccggccccgtcatcaggatcagggtttcccacggagccaccttccgcgaggtcgtcgtgccggcgcaggctaccttcggtgagttgaagaggatccttgttcagactactggcttggagcctgagaggcagaggctcttcttccgtgggaaggagaagagtgacagagagttcctgcacgcggcaggtgttaaggatggcgcgaagttgcttctgcttgagaagcctgcccctgccaacatagagcagaaggttgagcctgtgattatggatgagagcgtgatgaaggcatgtgaggctgttgctcgtgttagagctgaagttgataggctgtctgctaaggtgtgtgacttggagaagaatgtgcttgcagggagaaaagttgatgataaagaatttgtcgtcttgacggaactgcttatgatacagctgctgaaactcgatggcatagaagctgaaggagaagcaagggcacagaggaaggctgaggtccgccgagttcagtcccttgtggagaccttggataagctgaaggcaagaaatgcgaaccctttcagcgatcataacaacgctgtttcagtgacgacgcagtgggagacgtttgagaacggtatgggcagcttgagcgctcccccgccccacgttccttcggagcaagttaacactaactgggagcagcagttcgactaggctcagctgaagctgttgatgtatcgtgagatcggtatgggcattccttttcccaggcagcgaggtgttttgtgtatatgcaccgcgtttggtgcctttggtgtcctaactgcctgtgaatgttaccagatcatcataccatactaccatgtggattgcattgcaccgctcattgagggccatgtttcgct

SEQ ID NO: 34169 - protein, 242 aa, Zea mays subsp. mays
  peptide (1)..(242): Ceres Seq. ID no. 12414529
  misc_feature (110)..(191): Pfam Name: Pfam Description:  BAG domain
  misc_feature (40)..(242): NCBI GI NO: 34907972 NR Description: P0446G04.18
  misc_feature (1)..(40): NCBI GI NO: 34907972 NR Description: P0446G04.18
  misc_feature (13)..(242): NCBI GI NO: 15231035 NR Description: putative protein; protein id: At3g51780
  misc_feature (13)..(242): NCBI GI NO: 19699283 NR Description: At3g51780/ORF3 [Arabidopsis thaliana]
  misc_feature (13)..(242): NCBI GI NO: 21554254 NR Description: unknown [Arabidopsis thaliana]
  misc_feature (1)..(195): NCBI GI NO: 25553557 NR Description: OSJNBa0038F22.4
  misc_feature (1)..(195): NCBI GI NO: 34898024 NR Description: ESTs AU082174
  misc_feature (1)..(215): NCBI GI NO: 6624711 NR Description: hypothetical protein
  misc_feature (1)..(195): NCBI GI NO: 15242267 NR Description: putative protein; protein id: At5g52060.1
  misc_feature (1)..(215): NCBI GI NO: 38344334 NR Description: OSJNBa0058K23.16
MMSGRSGGRDGEAAGPVIRIRVSHGATFREVVVPAQATFGELKRILVQTTGLEPERQRLFFRGKEKSDREFLHAAGVKDGAKLLLLEKPAPANIEQKVEPVIMDESVMKACEAVARVRAEVDRLSAKVCDLEKNVLAGRKVDDKEFVVLTELLMIQLLKLDGIEAEGEARAQRKAEVRRVQSLVETLDKLKARNANPFSDHNNAVSVTTQWETFENGMGSLSAPPPHVPSEQVNTNWEQQFD

SEQ ID NO: 34170 - protein, 241 aa, Zea mays subsp. mays
  peptide (1)..(241): Ceres Seq. ID no. 12414530
  misc_feature (109)..(190): Pfam Name: Pfam Description:  BAG domain
  misc_feature (39)..(241): NCBI GI NO: 34907972 NR Description: P0446G04.18
  misc_feature (1)..(39): NCBI GI NO: 34907972 NR Description: P0446G04.18
  misc_feature (12)..(241): NCBI GI NO: 15231035 NR Description: putative protein; protein id: At3g51780
  misc_feature (12)..(241): NCBI GI NO: 21554254 NR Description: unknown [Arabidopsis thaliana]
  misc_feature (12)..(241): NCBI GI NO: 19699283 NR Description: At3g51780/ORF3 [Arabidopsis thaliana]
  misc_feature (1)..(194): NCBI GI NO: 25553557 NR Description: OSJNBa0038F22.4
  misc_feature (1)..(194): NCBI GI NO: 34898024 NR Description: ESTs AU082174
  misc_feature (1)..(214): NCBI GI NO: 6624711 NR Description: hypothetical protein
  misc_feature (1)..(194): NCBI GI NO: 15242267 NR Description: putative protein; protein id: At5g52060.1
  misc_feature (1)..(214): NCBI GI NO: 38344334 NR Description: OSJNBa0058K23.16
MSGRSGGRDGEAAGPVIRIRVSHGATFREVVVPAQATFGELKRILVQTTGLEPERQRLFFRGKEKSDREFLHAAGVKDGAKLLLLEKPAPANIEQKVEPVIMDESVMKACEAVARVRAEVDRLSAKVCDLEKNVLAGRKVDDKEFVVLTELLMIQLLKLDGIEAEGEARAQRKAEVRRVQSLVETLDKLKARNANPFSDHNNAVSVTTQWETFENGMGSLSAPPPHVPSEQVNTNWEQQFD

SEQ ID NO: 34171 - protein, 140 aa, Zea mays subsp. mays
  peptide (1)..(140): Ceres Seq. ID no. 12414531
  misc_feature (8)..(89): Pfam Name: Pfam Description:  BAG domain
  misc_feature (1)..(140): NCBI GI NO: 34907972 NR Description: P0446G04.18
  misc_feature (1)..(140): NCBI GI NO: 15231035 NR Description: putative protein; protein id: At3g51780
  misc_feature (1)..(140): NCBI GI NO: 19699283 NR Description: At3g51780/ORF3 [Arabidopsis thaliana]
  misc_feature (1)..(140): NCBI GI NO: 21554254 NR Description: unknown [Arabidopsis thaliana]
  misc_feature (1)..(93): NCBI GI NO: 25553557 NR Description: OSJNBa0038F22.4
  misc_feature (1)..(93): NCBI GI NO: 34898024 NR Description: ESTs AU082174
  misc_feature (1)..(113): NCBI GI NO: 6624711 NR Description: hypothetical protein
  misc_feature (1)..(93): NCBI GI NO: 15242267 NR Description: putative protein; protein id: At5g52060.1
  misc_feature (1)..(113): NCBI GI NO: 38344334 NR Description: OSJNBa0058K23.16
  misc_feature (1)..(113): NCBI GI NO: 21537107 NR Description: unknown [Arabidopsis thaliana]
MDESVMKACEAVARVRAEVDRLSAKVCDLEKNVLAGRKVDDKEFVVLTELLMIQLLKLDGIEAEGEARAQRKAEVRRVQSLVETLDKLKARNANPFSDHNNAVSVTTQWETFENGMGSLSAPPPHVPSEQVNTNWEQQFD

SEQ ID NO: 34172 - DNA, 627 bp, Zea mays subsp. mays
  misc_feature (1)..(627): Ceres Seq. ID no. 12336893
agaaaaaccctacagttcatccctctcgacgcgccgccgccgtctcgccgctgcccacccagattgacggctccaattggcgcccatggcggaagaaaccaacataaaaaaggaggaagaggagttcagcaccggtcctctctcggtgctcatgatgagcgtcaagaataatacccaggttcttatcaactgccggaacaacaagaagttgcttggtcgcgtgcgagccttcgatcggcactgcaacatggttcttgagaatgttcgtgagatgtggaccgaggtaccgaagaccggtaaaggcaagaagaaggctctcccggtgaacaaggacaggttcataagcaagatgttcctccgcggggattcggtcatcatcgtcctcaggaacccgaaatgagtaccctgtacacgtagagagtctgtttgctagcagtacgttgtgctattgggtgtaaggtgtatgccaaatgctcaaagcatgggagtgtaagtcgcggcagaattcgctatgtgtgttgatggtgggggattcagcttaaggcaggatgctagggctggattttgcttcttgtagcagacttgaacaggatgcttctttgatgtatcgacagaccccactgcttg

SEQ ID NO: 34173 - protein, 104 aa, Zea mays subsp. mays
  peptide (1)..(104): Ceres Seq. ID no. 12336894
  misc_feature (22)..(101): Pfam Name: Pfam Description:  LSM domain
  misc_feature (1)..(104): NCBI GI NO: 30690747 NR Description: small nuclear ribonucleo protein D2 -related
  misc_feature (1)..(104): NCBI GI NO: 18407411 NR Description: putative small nuclear ribonucleoprotein D2
  misc_feature (1)..(104): NCBI GI NO: 21554692 NR Description: small nuclear ribonucleoprotein-like protein
  misc_feature (1)..(103): NCBI GI NO: 4759158 NR Description: small nuclear ribonucleoprotein polypeptide D2
  misc_feature (1)..(104): NCBI GI NO: 31230450 NR Description: ENSANGP00000002741 [Anopheles gambiae]
  misc_feature (1)..(103): NCBI GI NO: 26337731 NR Description: unnamed protein product [Mus musculus]
  misc_feature (1)..(103): NCBI GI NO: 21357623 NR Description: CG1249-PA [Drosophila melanogaster]
  misc_feature (1)..(103): NCBI GI NO: 22203734 NR Description: small nuclear ribonucleoprotein D2-like protein
  misc_feature (1)..(103): NCBI GI NO: 27677236 NR Description: similar to Small nuclear ribonucleoprotein Sm D2
  misc_feature (1)..(103): NCBI GI NO: 34881247 NR Description: similar to SNF2/RAD54 family protein
MAEETNIKKEEEEFSTGPLSVLMMSVKNNTQVLINCRNNKKLLGRVRAFDRHCNMVLENVREMWTEVPKTGKGKKKALPVNKDRFISKMFLRGDSVIIVLRNPK

SEQ ID NO: 34174 - protein, 82 aa, Zea mays subsp. mays
  peptide (1)..(82): Ceres Seq. ID no. 12336895
  misc_feature (1)..(79): Pfam Name: Pfam Description:  LSM domain
  misc_feature (1)..(82): NCBI GI NO: 30690747 NR Description: small nuclear ribonucleo protein D2 -related
  misc_feature (1)..(82): NCBI GI NO: 18407411 NR Description: putative small nuclear ribonucleoprotein D2
  misc_feature (1)..(82): NCBI GI NO: 21554692 NR Description: small nuclear ribonucleoprotein-like protein
  misc_feature (1)..(81): NCBI GI NO: 4759158 NR Description: small nuclear ribonucleoprotein polypeptide D2
  misc_feature (1)..(82): NCBI GI NO: 31230450 NR Description: ENSANGP00000002741 [Anopheles gambiae]
  misc_feature (1)..(81): NCBI GI NO: 26337731 NR Description: unnamed protein product [Mus musculus]
  misc_feature (1)..(81): NCBI GI NO: 21357623 NR Description: CG1249-PA [Drosophila melanogaster]
  misc_feature (1)..(81): NCBI GI NO: 22203734 NR Description: small nuclear ribonucleoprotein D2-like protein
  misc_feature (1)..(81): NCBI GI NO: 27677236 NR Description: similar to Small nuclear ribonucleoprotein Sm D2
  misc_feature (1)..(81): NCBI GI NO: 34881247 NR Description: similar to SNF2/RAD54 family protein
MMSVKNNTQVLINCRNNKKLLGRVRAFDRHCNMVLENVREMWTEVPKTGKGKKKALPVNKDRFISKMFLRGDSVIIVLRNPK

SEQ ID NO: 34175 - protein, 81 aa, Zea mays subsp. mays; identical to SEQ ID NO: 12232
  peptide (1)..(81): Ceres Seq. ID no. 12336896
  misc_feature (1)..(78): Pfam Name: Pfam Description:  LSM domain
  misc_feature (1)..(81): NCBI GI NO: 30690747 NR Description: small nuclear ribonucleo protein D2 -related
  misc_feature (1)..(81): NCBI GI NO: 18407411 NR Description: putative small nuclear ribonucleoprotein D2
  misc_feature (1)..(81): NCBI GI NO: 21554692 NR Description: small nuclear ribonucleoprotein-like protein
  misc_feature (1)..(80): NCBI GI NO: 4759158 NR Description: small nuclear ribonucleoprotein polypeptide D2
  misc_feature (1)..(81): NCBI GI NO: 31230450 NR Description: ENSANGP00000002741 [Anopheles gambiae]
  misc_feature (1)..(80): NCBI GI NO: 26337731 NR Description: unnamed protein product [Mus musculus]
  misc_feature (1)..(80): NCBI GI NO: 21357623 NR Description: CG1249-PA [Drosophila melanogaster]
  misc_feature (1)..(80): NCBI GI NO: 22203734 NR Description: small nuclear ribonucleoprotein D2-like protein
  misc_feature (1)..(80): NCBI GI NO: 27677236 NR Description: similar to Small nuclear ribonucleoprotein Sm D2
  misc_feature (1)..(80): NCBI GI NO: 34881247 NR Description: similar to SNF2/RAD54 family protein

SEQ ID NO: 34176 - DNA, 1224 bp, Zea mays subsp. mays
  misc_feature (1)..(1224): Ceres Seq. ID no. 12365098
ccccaaagtttcgaacaaaagtccacaaatccccttcgccgtctccggcgagccccgcccctcatcgccgccgcgccaaagagacagtgagaggggggatggatcagtccatcagaaccgcatgcgagttcctctcgtcggtgctaaaccacgctgagtcctcgtcccgcgagctcgccgacgccgtctcccaacgccccgtccacctcgagatggcgaggacctcgttcctgcagaagctggagcacagggtggaggcgtcggccgccgacttgcagcacatcgagtccatcgccctcgacaccgtctccttcgaggagctcctcggccactgcggcgaggcgctcaaagtctacgcgcgccacgccgacgccctccagtcgcacctcgcttcctttggctacgagcccccggacgcacaacaccccgagatcgatgtggatgtggaagatggagatgtcgggaaggttggggaccctggagatagatgcctcagcgtgtcgcgttcagtgctcaggtcgggtaagcggcggtttgatagccacagcgatgcgatatttgaagagtcactgaaggatcttgggttttcagatgcttgtctagccactctttcttctgaaggcgcacattatggtgagagcccaaagaagctttacaagaatgctgaaagtactgatgatggcgaaaagatcatgaatgaagctgaaattatgactcccctaaatgaaagaaatggtcaaggtaattcttttgaaggagtgataagggcatcaaaggaggattatgagcaactccctccttatatgaagagtctagcatcatgggaggagttgcaggagggaatatccaaactaaattcatacttgggtggtgacaagttgcaggggagtgttgctttgaaccaggaccgtgttgcagagataggattggggcgcaaaggaagagcctgtttgctgatgctgttgcgactcaatcagctaactatggagacagttgatggctctaccttttacaccctgtgcaagaacaacgtgtagcctgatactgctactgctacagcgtgtcatgcttaagttttcctttttcttttcgtatgtcgagtctggctagaatattgtatcatgttgatgtagcactcgatctcagctcaaaatattgtttttttctgagcagttctggtcatgtgatcttcattccaaccatgaaataaagtgtgtttgaggc

SEQ ID NO: 34177 - protein, 344 aa, Zea mays subsp. mays
  peptide (1)..(344): Ceres Seq. ID no. 12365099
  misc_feature (33)..(337): NCBI GI NO: 30681522 NR Description: expressed protein [Arabidopsis thaliana]
  misc_feature (258)..(337): NCBI GI NO: 10178115 NR Description: gene_id:F15M7.12~unknown protein
PKFRTKVHKSPSPSPASPAPHRRRAKETVRGGMDQSIRTACEFLSSVLNHAESSSRELADAVSQRPVHLEMARTSFLQKLEHRVEASAADLQHIESIALDTVSFEELLGHCGEALKVYARHADALQSHLASFGYEPPDAQHPEIDVDVEDGDVGKVGDPGDRCLSVSRSVLRSGKRRFDSHSDAIFEESLKDLGFSDACLATLSSEGAHYGESPKKLYKNAESTDDGEKIMNEAEIMTPLNERNGQGNSFEGVIRASKEDYEQLPPYMKSLASWEELQEGISKLNSYLGGDKLQGSVALNQDRVAEIGLGRKGRACLLMLLRLNQLTMETVDGSTFYTLCKNNV

SEQ ID NO: 34178 - protein, 312 aa, Zea mays subsp. mays
  peptide (1)..(312): Ceres Seq. ID no. 12365100
  misc_feature (1)..(305): NCBI GI NO: 30681522 NR Description: expressed protein [Arabidopsis thaliana]
  misc_feature (226)..(305): NCBI GI NO: 10178115 NR Description: gene_id:F15M7.12~unknown protein
MDQSIRTACEFLSSVLNHAESSSRELADAVSQRPVHLEMARTSFLQKLEHRVEASAADLQHIESIALDTVSFEELLGHCGEALKVYARHADALQSHLASFGYEPPDAQHPEIDVDVEDGDVGKVGDPGDRCLSVSRSVLRSGKRRFDSHSDAIFEESLKDLGFSDACLATLSSEGAHYGESPKKLYKNAESTDDGEKIMNEAEIMTPLNERNGQGNSFEGVIRASKEDYEQLPPYMKSLASWEELQEGISKLNSYLGGDKLQGSVALNQDRVAEIGLGRKGRACLLMLLRLNQLTMETVDGSTFYTLCKNNV

SEQ ID NO: 34179 - protein, 274 aa, Zea mays subsp. mays
  peptide (1)..(274): Ceres Seq. ID no. 12365101
  misc_feature (1)..(267): NCBI GI NO: 30681522 NR Description: expressed protein [Arabidopsis thaliana]
  misc_feature (188)..(267): NCBI GI NO: 10178115 NR Description: gene_id:F15M7.12~unknown protein
MARTSFLQKLEHRVEASAADLQHIESIALDTVSFEELLGHCGEALKVYARHADALQSHLASFGYEPPDAQHPEIDVDVEDGDVGKVGDPGDRCLSVSRSVLRSGKRRFDSHSDAIFEESLKDLGFSDACLATLSSEGAHYGESPKKLYKNAESTDDGEKIMNEAEIMTPLNERNGQGNSFEGVIRASKEDYEQLPPYMKSLASWEELQEGISKLNSYLGGDKLQGSVALNQDRVAEIGLGRKGRACLLMLLRLNQLTMETVDGSTFYTLCKNNV

SEQ ID NO: 34180 - DNA, 1423 bp, Zea mays subsp. mays
  misc_feature (1)..(1423): Ceres Seq. ID no. 12343924
aaaggcccatcaaccgagagccttcgtcttccttctctcatcctttgctcctcttcaaacgctcgagaaagagagagagactaaatcctccctcgaaaccctagcatagccactgccttcccgcacgctaggaaggggaagatatgggcgccgaggaggacgccgctgcacgccgcgagcgtctccgcgccctccgtgccgccaaggacctcctctccaccctacggcgccccaaccccttccaccgacggagaacaccaaaatggcaaccatgatatggcagaagagccagaattaccaggtcatcaggatgcacctggtgaggctgctaaagaggatggtagccccactgaggaggccgaagaggttgaagatgatggtgagcttccagccatgaagttcagaaactaccttccccatgatgaacaacttcgaggaggcaagctggctccagtgtctcttcccaagtttgaagacccaattagtgccgaaactgcagagccaaaggaagtggagaacctttttggaaacatagcaccaaagaatccaaattgggatctgaaacgtgatgtgcagaagagaattgataaactggaaaggcgcacgcagaaagcgttggctgagattgcattggaacagcagagggagaaggaagccttggaggaatctcaagattgaccgacctgtataagtgaccagtgactcatgctggttggtccctcgagcagacgtcattatcttatttagataatgtaatgtactttgggatgctctgtgtatctaccatcttgggatgtactgaattgagtttgggacgtgtatctacctaccatcttgtattgtcagctcaaggatgtagcaaactagtagcaacttcaaaaaatgagatgtagcagtcctgttctgttagacggacctggtcaaacttgcaggttacatccatgggccgccaattcacgccatccgccatatatgcctaggatctgttcataacccttcatttgttcgtatattgtaatcaaaagttacccgccgtgtgtctacaacgtgtcgtcgcaatggacgcagcaggtgcctgcctattcattcattcataccgttttggtcgtcgagaggtgcgttcaataagttactagtccagtgtccgttataggggagtccggtagtgtccgttataggggagtccggtattattattattattgtttcatcttcttcttcgccctttctctgggtaataattgggttacttggaaactgttgatcagtgggtcagttagaatgtgaactggttgttgctgggtaagtatgtggtttgttggtatattgagtctggggacagagagtgaggtcctgatctgcttgtaacagtacctgctttggttttgtgattgctatatactgaaacccaaatccctctgtt

SEQ ID NO: 34181 - protein, 133 aa, Zea mays subsp. mays
  peptide (1)..(133): Ceres Seq. ID no. 12343925
  misc_feature (19)..(129): NCBI GI NO: 18397111 NR Description: expressed protein; protein id: At3g05070
  misc_feature (1)..(133): NCBI GI NO: 21389497 NR Description: hypothetical protein MGC23918 [Homo sapiens]
  misc_feature (1)..(133): NCBI GI NO: 21756313 NR Description: unnamed protein product [Homo sapiens]
  misc_feature (1)..(133): NCBI GI NO: 20072383 NR Description: Similar to RIKEN cDNA 2700094L05 gene
  misc_feature (1)..(126): NCBI GI NO: 34866382 NR Description: similar to hypothetical protein MGC23918
  misc_feature (11)..(133): NCBI GI NO: 20874062 NR Description: similar to hypothetical protein MGC23918
  misc_feature (1)..(133): NCBI GI NO: 33469009 NR Description: RIKEN cDNA 2700094L05 [Mus musculus]
  misc_feature (26)..(132): NCBI GI NO: 24651238 NR Description: CG15525-PA [Drosophila melanogaster]
  misc_feature (29)..(132): NCBI GI NO: 21430888 NR Description: SD23244p [Drosophila melanogaster]
  misc_feature (26)..(124): NCBI GI NO: 39581407 NR Description: Hypothetical protein CBG22501
MAEEPELPGHQDAPGEAAKEDGSPTEEAEEVEDDGELPAMKFRNYLPHDEQLRGGKLAPVSLPKFEDPISAETAEPKEVENLFGNIAPKNPNWDLKRDVQKRIDKLERRTQKALAEIALEQQREKEALEESQD

SEQ ID NO: 34182 - protein, 94 aa, Zea mays subsp. mays
  peptide (1)..(94): Ceres Seq. ID no. 12343926
  misc_feature (1)..(90): NCBI GI NO: 18397111 NR Description: expressed protein; protein id: At3g05070
  misc_feature (1)..(94): NCBI GI NO: 21389497 NR Description: hypothetical protein MGC23918 [Homo sapiens]
  misc_feature (1)..(94): NCBI GI NO: 21756313 NR Description: unnamed protein product [Homo sapiens]
  misc_feature (1)..(94): NCBI GI NO: 20072383 NR Description: Similar to RIKEN cDNA 2700094L05 gene
  misc_feature (1)..(87): NCBI GI NO: 34866382 NR Description: similar to hypothetical protein MGC23918
  misc_feature (1)..(94): NCBI GI NO: 20874062 NR Description: similar to hypothetical protein MGC23918
  misc_feature (1)..(94): NCBI GI NO: 33469009 NR Description: RIKEN cDNA 2700094L05 [Mus musculus]
  misc_feature (1)..(93): NCBI GI NO: 24651238 NR Description: CG15525-PA [Drosophila melanogaster]
  misc_feature (1)..(93): NCBI GI NO: 21430888 NR Description: SD23244p [Drosophila melanogaster]
  misc_feature (1)..(85): NCBI GI NO: 39581407 NR Description: Hypothetical protein CBG22501
MKFRNYLPHDEQLRGGKLAPVSLPKFEDPISAETAEPKEVENLFGNIAPKNPNWDLKRDVQKRIDKLERRTQKALAEIALEQQREKEALEESQD

SEQ ID NO: 34183 - DNA, 795 bp, Zea mays subsp. mays
  misc_feature (1)..(795): Ceres Seq. ID no. 12350319
aacgtccagattgggaattccatcacgcctcgtcctctccgtcccgaccagaatcatcgcttcttcctgctccggcgatatccgccgccgcctgcggtccggcagagatgggaagcacttcctctatgctcacccaatacgatatcgaggaggtccaggaccattgtaaccacgcattctcgcagcaggagatcgtatcgctgtaccaccgcttctgccagctcgaccgtaacggtggtggcttcgtctccgctgacgagttcatgtcggtccctgagttcgccgtaaatcccctctcccagaggctcctgaggatgctggatgggctcaacttcaaggagtttgtagcatttttgtcagcttttagcccccgcacaagcctgcagcaaaagattgaatttattttcagggtttatgatactgactgcaacgggaaggttgcttttgatgacatcttgagcatcttgcgagatctgacaggttcatttatgacagagcaacagagacagaaagtcttgattcatgtgttagaagaagctggatacacaaaagattcacattttacactcccagactttatgaagattattggcaattctgagctcaagatggaggttgaagttcctattgactaaaaacctaacaagcatcatctagttgcttcaggcctgtatcttcatttgtgttaaattaagtagatggtatatttatatccttgcaactcaaatcatgatcagagatgtaattaaggaaacatatgtacctgctatttggaggtttagttggctcgcactc

SEQ ID NO: 34184 - protein, 210 aa, Zea mays subsp. mays
  peptide (1)..(210): Ceres Seq. ID no. 12350320
  misc_feature (66)..(94): Pfam Name: Pfam Description:  EF hand
  misc_feature (36)..(210): NCBI GI NO: 16550928 NR Description: calcineurin-like protein [Eucalyptus grandis]
  misc_feature (36)..(210): NCBI GI NO: 18401887 NR Description: expressed protein; protein id: At3g18430
  misc_feature (36)..(210): NCBI GI NO: 21592761 NR Description: calcineurin-like protein [Arabidopsis thaliana]
  misc_feature (36)..(207): NCBI GI NO: 1168750 NR Description: Calcineurin B subunit
  misc_feature (36)..(200): NCBI GI NO: 13445166 NR Description: calcineurin B [Dictyostelium discoideum]
  misc_feature (109)..(207): NCBI GI NO: 17566934 NR Description: Calcium binding protein P22 like family member
  misc_feature (36)..(123): NCBI GI NO: 17566934 NR Description: Calcium binding protein P22 like family member
  misc_feature (109)..(207): NCBI GI NO: 39593284 NR Description: Hypothetical protein CBG09544
  misc_feature (36)..(123): NCBI GI NO: 39593284 NR Description: Hypothetical protein CBG09544
  misc_feature (36)..(205): NCBI GI NO: 3929338 NR Description: Calcineurin B subunit
RPDWEFHHASSSPSRPESSLLPAPAISAAACGPAEMGSTSSMLTQYDIEEVQDHCNHAFSQQEIVSLYHRFCQLDRNGGGFVSADEFMSVPEFAVNPLSQRLLRMLDGLNFKEFVAFLSAFSPRTSLQQKIEFIFRVYDTDCNGKVAFDDILSILRDLTGSFMTEQQRQKVLIHVLEEAGYTKDSHFTLPDFMKIIGNSELKMEVEVPID

SEQ ID NO: 34185 - protein, 175 aa, Zea mays subsp. mays
  peptide (1)..(175): Ceres Seq. ID no. 12350321
  misc_feature (31)..(59): Pfam Name: Pfam Description:  EF hand
  misc_feature (1)..(175): NCBI GI NO: 16550928 NR Description: calcineurin-like protein [Eucalyptus grandis]
  misc_feature (1)..(175): NCBI GI NO: 18401887 NR Description: expressed protein; protein id: At3g18430
  misc_feature (1)..(175): NCBI GI NO: 21592761 NR Description: calcineurin-like protein [Arabidopsis thaliana]
  misc_feature (1)..(172): NCBI GI NO: 1168750 NR Description: Calcineurin B subunit
  misc_feature (1)..(165): NCBI GI NO: 13445166 NR Description: calcineurin B [Dictyostelium discoideum]
  misc_feature (74)..(172): NCBI GI NO: 17566934 NR Description: Calcium binding protein P22 like family member
  misc_feature (1)..(88): NCBI GI NO: 17566934 NR Description: Calcium binding protein P22 like family member
  misc_feature (74)..(172): NCBI GI NO: 39593284 NR Description: Hypothetical protein CBG09544
  misc_feature (1)..(88): NCBI GI NO: 39593284 NR Description: Hypothetical protein CBG09544
  misc_feature (1)..(170): NCBI GI NO: 3929338 NR Description: Calcineurin B subunit
MGSTSSMLTQYDIEEVQDHCNHAFSQQEIVSLYHRFCQLDRNGGGFVSADEFMSVPEFAVNPLSQRLLRMLDGLNFKEFVAFLSAFSPRTSLQQKIEFIFRVYDTDCNGKVAFDDILSILRDLTGSFMTEQQRQKVLIHVLEEAGYTKDSHFTLPDFMKIIGNSELKMEVEVPID

SEQ ID NO: 34186 - protein, 169 aa, Zea mays subsp. mays
  peptide (1)..(169): Ceres Seq. ID no. 12350322
  misc_feature (25)..(53): Pfam Name: Pfam Description:  EF hand
  misc_feature (1)..(169): NCBI GI NO: 16550928 NR Description: calcineurin-like protein [Eucalyptus grandis]
  misc_feature (1)..(169): NCBI GI NO: 18401887 NR Description: expressed protein; protein id: At3g18430
  misc_feature (1)..(169): NCBI GI NO: 21592761 NR Description: calcineurin-like protein [Arabidopsis thaliana]
  misc_feature (1)..(166): NCBI GI NO: 1168750 NR Description: Calcineurin B subunit
  misc_feature (1)..(159): NCBI GI NO: 13445166 NR Description: calcineurin B [Dictyostelium discoideum]
  misc_feature (68)..(166): NCBI GI NO: 17566934 NR Description: Calcium binding protein P22 like family member
  misc_feature (1)..(82): NCBI GI NO: 17566934 NR Description: Calcium binding protein P22 like family member
  misc_feature (68)..(166): NCBI GI NO: 39593284 NR Description: Hypothetical protein CBG09544
  misc_feature (1)..(82): NCBI GI NO: 39593284 NR Description: Hypothetical protein CBG09544
  misc_feature (1)..(164): NCBI GI NO: 3929338 NR Description: Calcineurin B subunit
MLTQYDIEEVQDHCNHAFSQQEIVSLYHRFCQLDRNGGGFVSADEFMSVPEFAVNPLSQRLLRMLDGLNFKEFVAFLSAFSPRTSLQQKIEFIFRVYDTDCNGKVAFDDILSILRDLTGSFMTEQQRQKVLIHVLEEAGYTKDSHFTLPDFMKIIGNSELKMEVEVPID

SEQ ID NO: 34187 - DNA, 743 bp, Zea mays subsp. mays
  misc_feature (1)..(743): Ceres Seq. ID no. 12404618
atttttcttccgcacgcatccctcgccgcctcgcgcctgcaccggagaatcggtcccattgcccgcgaacctgcgtgtgtgaggtatcgaacaccccaagatggcaactttcgcctcaccactcctctgcaacttcatggccatcgaacagaagaacgcgcctcagctgaccaacagcagaaagccgtccctgcgcctgagcttcccaacgacaaggagcatgccaacattgccgttgccgtgcttcagagcgaggccagactggcgcgtcgccgccgtctacaaggtgaagctcatcggccccgaaggacaggagagcgtgatccaagtgccagaggacagctacatcctggacgcggccgaggaggccggtatagacctgccctactcctgccgcgctggtgcgtgctccacgtgcgccggcaaggtgctggagggctccgtcgaccaggcggaccagtcgttcctggacgacgcgcaggtcggtgccgggtatgcgctcacctgcgtcgcgtacccgacgtctgactgcgtcatccagacgcacagggaggccgacctgtactaggcagcccagtcccacgcgtaaccggatcaacgactgtgcacttccatagctcccattcggattcgatcttgagttcttgacactgattcgcacttgtgcttttgtccttgcaggtagctggaactagtagtgcattctttaatcgttattgttcaagtgtaggttgctttggttt

SEQ ID NO: 34188 - protein, 175 aa, Zea mays subsp. mays
  peptide (1)..(175): Ceres Seq. ID no. 12404619
IFLPHASLAASRLHRRIGPIAREPACVRYRTPQDGNFRLTTPLQLHGHRTEERASADQQQKAVPAPELPNDKEHANIAVAVLQSEARLARRRRLQGEAHRPRRTGERDPSARGQLHPGRGRGGRYRPALLLPRWCVLHVRRQGAGGLRRPGGPVVPGRRAGRCRVCAHLRRVPDV

SEQ ID NO: 34189 - protein, 155 aa, Zea mays subsp. mays
  peptide (1)..(155): Ceres Seq. ID no. 12404620
  misc_feature (63)..(142): Pfam Name: Pfam Description:  2Fe-2S iron-sulfur cluster binding domain
  misc_feature (13)..(155): NCBI GI NO: 38346336 NR Description: OSJNBa0073L04.7
  misc_feature (2)..(155): NCBI GI NO: 119958 NR Description: Ferredoxin III, chloroplast precursor (Fd III)
  misc_feature (1)..(155): NCBI GI NO: 40714664 NR Description: putative ferredoxin
  misc_feature (34)..(154): NCBI GI NO: 2129915 NR Description: ferredoxin
  misc_feature (59)..(155): NCBI GI NO: 65771 NR Description: ferredoxin [2Fe-2S] - Fischerella sp
  misc_feature (59)..(155): NCBI GI NO: 3334451 NR Description: Ferredoxin
  misc_feature (22)..(155): NCBI GI NO: 15225888 NR Description: putative ferredoxin; protein id: At2g27510
  misc_feature (59)..(155): NCBI GI NO: 11467348 NR Description: ferredoxin [Cyanophora paradoxa]
  misc_feature (59)..(155): NCBI GI NO: 1421549 NR Description: Iron-Sulfur Protein Mol_id: 1
  misc_feature (59)..(155): NCBI GI NO: 16331399 NR Description: ferredoxin [Synechocystis sp. PCC 6803]
MATFASPLLCNFMAIEQKNAPQLTNSRKPSLRLSFPTTRSMPTLPLPCFRARPDWRVAAVYKVKLIGPEGQESVIQVPEDSYILDAAEEAGIDLPYSCRAGACSTCAGKVLEGSVDQADQSFLDDAQVGAGYALTCVAYPTSDCVIQTHREADLY

SEQ ID NO: 34190 - protein, 143 aa, Zea mays subsp. mays
  peptide (1)..(143): Ceres Seq. ID no. 12404621
  misc_feature (51)..(130): Pfam Name: Pfam Description:  2Fe-2S iron-sulfur cluster binding domain
  misc_feature (1)..(143): NCBI GI NO: 38346336 NR Description: OSJNBa0073L04.7
  misc_feature (1)..(143): NCBI GI NO: 119958 NR Description: Ferredoxin III, chloroplast precursor (Fd III)
  misc_feature (1)..(143): NCBI GI NO: 40714664 NR Description: putative ferredoxin
  misc_feature (22)..(142): NCBI GI NO: 2129915 NR Description: ferredoxin
  misc_feature (47)..(143): NCBI GI NO: 65771 NR Description: ferredoxin [2Fe-2S] - Fischerella sp
  misc_feature (47)..(143): NCBI GI NO: 3334451 NR Description: Ferredoxin
  misc_feature (10)..(143): NCBI GI NO: 15225888 NR Description: putative ferredoxin; protein id: At2g27510
  misc_feature (47)..(143): NCBI GI NO: 11467348 NR Description: ferredoxin [Cyanophora paradoxa]
  misc_feature (47)..(143): NCBI GI NO: 1421549 NR Description: Iron-Sulfur Protein Mol_id: 1
  misc_feature (47)..(143): NCBI GI NO: 16331399 NR Description: ferredoxin [Synechocystis sp. PCC 6803]
MAIEQKNAPQLTNSRKPSLRLSFPTTRSMPTLPLPCFRARPDWRVAAVYKVKLIGPEGQESVIQVPEDSYILDAAEEAGIDLPYSCRAGACSTCAGKVLEGSVDQADQSFLDDAQVGAGYALTCVAYPTSDCVIQTHREADLY

SEQ ID NO: 34191 - DNA, 910 bp, Zea mays subsp. mays
  misc_feature (1)..(910): Ceres Seq. ID no. 12368950
aacacgctaccgtctcacagccgtaaacgcccctcccggatcccgctagttcgccaccgccgcccgcccgcccgccgttcgcctcatcatggccgcctcgtcgaccgccacctccgtccacgacttcatcgtcaaggatgcgagcggcaaagacgttgacctcagcacctacaaggggaaggttcttctcattgttaacgtcgcatcccagtgtggcttaaccaactccaactacactgagctggcccagctctatgagaagtacaaggaccaaggctttgaaatcctggctttcccatgcaaccagtttggtgggcaggagcctggtaccaatgaggagattgtccagtttgcctgcacacgcttcaaggctgagtaccccatcttcgacaaggttgatgtcaacggtagcaatgctgcgcccatctacaagttcttgaaatctagcaaaggtggccttttcggcgacagcatcaagtggaacttttccaagttcttggttgacaaggagggacgtgttgtggatcgctatgctccaaccacttcacccctgagcattgagaaggatatcaagaagctgcttgggagctcttaatcagtatctgggtgcaaagctgtagaaaaacatgtatcaacaatgccctgagcgataaaatatatgataagttgtattaataaagtattgtcgtacttgagaggttgcagtatctgctctatttcccttgcatacactccgtacttgtatatccccttcggagctgatttggtgacccgggatcccaggaggatcggaggggattgagaaggaaattagttgatttcccccttaatccccttcaatcctcccgggatccccttgtcaccaaatcagccctcgaatgaattccaatgctgtatcagtttgctaccc

SEQ ID NO: 34192 - protein, 168 aa, Zea mays subsp. mays
  peptide (1)..(168): Ceres Seq. ID no. 12368951
  misc_feature (9)..(118): Pfam Name: Pfam Description:  Glutathione peroxidase
  misc_feature (1)..(167): NCBI GI NO: 22268405 NR Description: putative glutathione peroxidase [Zea mays]
  misc_feature (1)..(168): NCBI GI NO: 21360380 NR Description: glutathione peroxidase 1 [Oryza sativa]
  misc_feature (1)..(168): NCBI GI NO: 34334012 NR Description: cytosolic glutathione peroxidase
  misc_feature (2)..(168): NCBI GI NO: 27544804 NR Description: phospholipid hydroperoxide glutathione peroxidase-like
  misc_feature (2)..(168): NCBI GI NO: 6179600 NR Description: GPX12Hv, glutathione peroxidase-like protein
  misc_feature (1)..(168): NCBI GI NO: 38345591 NR Description: OSJNBb0012E24.9
  misc_feature (1)..(165): NCBI GI NO: 6179604 NR Description: glutathione peroxidase-like protein GPX54Hv
  misc_feature (1)..(166): NCBI GI NO: 20138157 NR Description: Probable phospholipid hydroperoxide glutathioneperoxidase
  misc_feature (1)..(166): NCBI GI NO: 30681827 NR Description: glutathione peroxidase, putative
  misc_feature (3)..(165): NCBI GI NO: 544437 NR Description: Probable phospholipid hydroperoxide glutathioneperoxidase
MAASSTATSVHDFIVKDASGKDVDLSTYKGKVLLIVNVASQCGLTNSNYTELAQLYEKYKDQGFEILAFPCNQFGGQEPGTNEEIVQFACTRFKAEYPIFDKVDVNGSNAAPIYKFLKSSKGGLFGDSIKWNFSKFLVDKEGRVVDRYAPTTSPLSIEKDIKKLLGSS

SEQ ID NO: 34193 - DNA, 1202 bp, Zea mays subsp. mays
  misc_feature (1)..(1202): Ceres Seq. ID no. 12350843
ttagcaaagcgtacatccctccaacaaaccttgagttgagagaggagagaggagagaggagacagcaagcgacacaacacagaggtaaccggctcacgcctgtctcggtggccgtgggcaatcatggccactgtgggacagtccggggccctgaggagggtcaccgtgcactacgccaactcgcccacaggcagcacggtggcagaggtgagctttgacgaccttgacgacgagctgctcctgtttgtgctcgccgatcttcttcctggccaggaaggtttacaccagtcgatcttggaaggaacatacaacaaccaggagaaccacatgagaggtgcagcacccagtgcaccatatggttattcacggccagaggaataccgtgcagagagcagcactgctgcagcagcagcaactggttctaggaattcaggcatggatgaacagatcgcctcggacttcgagtacgccaagcagctgcagcaggagatggaggacctcagcgtcaaagacgaagacgacaacgatatcagctgcgtgccgtctccatctgactctgacgatgagcacgagcatcatgacgaagaggaagaggctgacaggcaggaggacggtgatggtgatgatggtccagacaacatgacttatgagcaaggacaggcacttgtagaatctgtggggactgagtacagaggtctatccgatgagctcatctcctacctgcagtcatggaagtacaagtcttcagggctcttctcccggaaaacaaaccatgaagactgcccgatctgcctgtccactttcagaaaccgggaaaccatgataacgttgccgtgcaggcatcactaccacgcagcttgtgtcaccagatggctcaaggtcaacaagacatgccctgtatgcaaatacgaactgtttggaccttcctaggatccgaccacgtcgacgatggagctgagaagataatgatgatgacgacgacaacgacagatggttgtgtcatctgctctctttttttagcgccaagaaaactggaaatgaaaaagggaaatcaatccgaaaggagaatagaaattaggaagtataggtagaatatctctcttgccagtgactatgtatttgttgtgcgatgaattaagcatacctcgtgctatttatgatgtattggatttttttatatataagaacttccccgtggaatc

SEQ ID NO: 34194 - protein, 268 aa, Zea mays subsp. mays
  peptide (1)..(268): Ceres Seq. ID no. 12350844
  misc_feature (220)..(260): Pfam Name: RING finger Pfam Description: Zinc finger, C3HC4 type
  misc_feature (1)..(268): NCBI GI NO: 34898016 NR Description: ESTs C26000
  misc_feature (11)..(266): NCBI GI NO: 38567912 NR Description: OSJNBa0088I22.8
  misc_feature (126)..(268): NCBI GI NO: 22331928 NR Description: putative protein; protein id: At3g63530.1
  misc_feature (102)..(264): NCBI GI NO: 21536693 NR Description: unknown [Arabidopsis thaliana]
  misc_feature (102)..(264): NCBI GI NO: 18402411 NR Description: expressed protein; protein id: At3g19910
  misc_feature (84)..(268): NCBI GI NO: 10334499 NR Description: hypothetical protein [Cicer arietinum]
  misc_feature (88)..(260): NCBI GI NO: 15232746 NR Description: zinc-finger protein-like protein
  misc_feature (171)..(261): NCBI GI NO: 11358785 NR Description: RING-H2 finger protein RHG1a
  misc_feature (62)..(261): NCBI GI NO: 1076498 NR Description: RING finger protein Pzf - soybean (fragment)
  misc_feature (184)..(264): NCBI GI NO: 34911538 NR Description: P0421H07.18
MATVGQSGALRRVTVHYANSPTGSTVAEVSFDDLDDELLLFVLADLLPGQEGLHQSILEGTYNNQENHMRGAAPSAPYGYSRPEEYRAESSTAAAAATGSRNSGMDEQIASDFEYAKQLQQEMEDLSVKDEDDNDISCVPSPSDSDDEHEHHDEEEEADRQEDGDGDDGPDNMTYEQGQALVESVGTEYRGLSDELISYLQSWKYKSSGLFSRKTNHEDCPICLSTFRNRETMITLPCRHHYHAACVTRWLKVNKTCPVCKYELFGPS

SEQ ID NO: 34195 - protein, 200 aa, Zea mays subsp. mays
  peptide (1)..(200): Ceres Seq. ID no. 12350845
  misc_feature (152)..(192): Pfam Name: RING finger Pfam Description: Zinc finger, C3HC4 type
  misc_feature (1)..(200): NCBI GI NO: 34898016 NR Description: ESTs C26000
  misc_feature (1)..(198): NCBI GI NO: 38567912 NR Description: OSJNBa0088I22.8
  misc_feature (58)..(200): NCBI GI NO: 22331928 NR Description: putative protein; protein id: At3g63530.1
  misc_feature (34)..(196): NCBI GI NO: 21536693 NR Description: unknown [Arabidopsis thaliana]
  misc_feature (34)..(196): NCBI GI NO: 18402411 NR Description: expressed protein; protein id: At3g19910
  misc_feature (16)..(200): NCBI GI NO: 10334499 NR Description: hypothetical protein [Cicer arietinum]
  misc_feature (20)..(192): NCBI GI NO: 15232746 NR Description: zinc-finger protein-like protein
  misc_feature (103)..(193): NCBI GI NO: 11358785 NR Description: RING-H2 finger protein RHG1a
  misc_feature (1)..(193): NCBI GI NO: 1076498 NR Description: RING finger protein Pzf - soybean (fragment)
  misc_feature (116)..(196): NCBI GI NO: 34911538 NR Description: P0421H07.18
MRGAAPSAPYGYSRPEEYRAESSTAAAAATGSRNSGMDEQIASDFEYAKQLQQEMEDLSVKDEDDNDISCVPSPSDSDDEHEHHDEEEEADRQEDGDGDDGPDNMTYEQGQALVESVGTEYRGLSDELISYLQSWKYKSSGLFSRKTNHEDCPICLSTFRNRETMITLPCRHHYHAACVTRWLKVNKTCPVCKYELFGPS

SEQ ID NO: 34196 - protein, 164 aa, Zea mays subsp. mays
  peptide (1)..(164): Ceres Seq. ID no. 12350846
  misc_feature (116)..(156): Pfam Name: RING finger Pfam Description: Zinc finger, C3HC4 type
  misc_feature (1)..(164): NCBI GI NO: 34898016 NR Description: ESTs C26000
  misc_feature (1)..(162): NCBI GI NO: 38567912 NR Description: OSJNBa0088I22.8
  misc_feature (22)..(164): NCBI GI NO: 22331928 NR Description: putative protein; protein id: At3g63530.1
  misc_feature (1)..(160): NCBI GI NO: 21536693 NR Description: unknown [Arabidopsis thaliana]
  misc_feature (1)..(160): NCBI GI NO: 18402411 NR Description: expressed protein; protein id: At3g19910
  misc_feature (1)..(164): NCBI GI NO: 10334499 NR Description: hypothetical protein [Cicer arietinum]
  misc_feature (1)..(156): NCBI GI NO: 15232746 NR Description: zinc-finger protein-like protein
  misc_feature (67)..(157): NCBI GI NO: 11358785 NR Description: RING-H2 finger protein RHG1a
  misc_feature (1)..(157): NCBI GI NO: 1076498 NR Description: RING finger protein Pzf - soybean (fragment)
  misc_feature (80)..(160): NCBI GI NO: 34911538 NR Description: P0421H07.18
MDEQIASDFEYAKQLQQEMEDLSVKDEDDNDISCVPSPSDSDDEHEHHDEEEEADRQEDGDGDDGPDNMTYEQGQALVESVGTEYRGLSDELISYLQSWKYKSSGLFSRKTNHEDCPICLSTFRNRETMITLPCRHHYHAACVTRWLKVNKTCPVCKYELFGPS

SEQ ID NO: 34197 - DNA, 1795 bp, Zea mays subsp. mays
  misc_feature (1)..(1795): Ceres Seq. ID no. 12411527
acagaacagggagggaggtagagaggactagaggagtcggagcctcggaggagggagagggcgaagagtagggggaaccaaatcttggaggggaaacgtagagttctttcgtggaggaagcgggtgcaactggaggagggtagaggtagctcaatagatctactgctgtcgggggagttaatgcaaagctgagttgctgcacgttggctttcttcagagatggcttcagctggtgtagccccatctgggtacaaaaacagcagcagcactagcattggtgccgagaagttgcaagatcagatgaacgagctaaagattagagatgataaggaagttgaagcaaccataattaatgggaaagggactgaaactgggcacataattgtcaccactactggtggcaagaatggtcaaccaaaacagacagtgagctacatggctgagcgcattgtaggtcaaggttcttttgggattgtcttccaggctaagtgtttggagacgggtgagactgttgccataaagaaggttcttcaggataagcgttacaagaaccgtgagttgcagaccatgcgccttcttgaccaccctaatgttgttgctttgaagcattgcttcttttcaactactgagaaggatgagctttatctgaacttggtccttgagtatgtgccggagacagttcatcgagttgtgaagcatcacaacaagatgaaccaacgcatgccacttatttatgtgaagctgtatatgtaccagatatgtagggcattggcttacattcatggcactattggtgtctgccacagagatattaagccacaaaaccttctggtgaacccacacacccaccagcttaaactatgtgactttggcagtgcaaaagttctggtcaagggggaaccaaacatatcgtacatctgctcccgatactatagggctccagagctcatatttggtgccactgagtataccacagcgattgacatttggtctgctggatgtgttcttgctgagcttatgctagggcagcctttgtttccgggtgaaagtggtgtggaccaacttgtcgaaatcatcaaggtcctcggtacgccaacaagggaagaaattaaatgcatgaacccaaattacacagagtttaagttcccacaaatcaaagcacacccatggcacaaggtattccacaaaaggatgccgccagaagctgttgatctggtctctcggctactccagtactccccaaatctgagatgcactgctatggaggcacttgttcacccattctttgatgagcttcgagatcctaatactcgccttccaaatggtcgctttttgccaccactattcaatttcaagcctcacgaacttaaaggagtcccatcagacattgtcgcgaaattgattccagaacatgcaaagaagcaatgctcctatgttggattgtgaaatgaccgcgccttgagactggaacctgtggttgcaactgtgcatttcccctgggatgtttgacgatctgaggcatgcgagcctgttgttgaagatgcaaggttacgtacttgtacgacaatgtgacctgtgtagctgagtagtctatgtcgcagtgacatgtaacggcaccccccttcctactaactgacgcttactcgagattgccatagttgatcttgtaatttgttatagagcagtatgaatgtatttatggtagcttgaatctatgtatggattcacttcgtttttccatgttcccttgtctccagacccagattgctaccgtattgtttcagaattcctagcc

SEQ ID NO: 34198 - protein, 408 aa, Zea mays subsp. mays
  peptide (1)..(408): Ceres Seq. ID no. 12411528
  misc_feature (72)..(356): Pfam Name: Pfam Description:  Protein kinase domain
  misc_feature (1)..(407): NCBI GI NO: 481018 NR Description: protein kinase MSK-3 (EC 2.7.1.-)
  misc_feature (1)..(407): NCBI GI NO: 11182434 NR Description: GLYCOGEN SYNTHASE KINASE-3 HOMOLOG MSK-3
  misc_feature (1)..(408): NCBI GI NO: 18421039 NR Description: shaggy-like kinase alpha; protein id: At5g26751
  misc_feature (1)..(408): NCBI GI NO: 11133532 NR Description: Shaggy-related protein kinase NtK-1
  misc_feature (1)..(408): NCBI GI NO: 15230058 NR Description: shaggy related protein kinase, ASK-GAMMA
  misc_feature (1)..(408): NCBI GI NO: 541901 NR Description: protein kinase ASK-alpha (EC 2.7.1.-)
  misc_feature (1)..(408): NCBI GI NO: 21553877 NR Description: shaggy related protein kinase ASK-GAMMA
  misc_feature (1)..(408): NCBI GI NO: 2398519 NR Description: shaggy-like kinase alpha [Arabidopsis thaliana]
  misc_feature (1)..(408): NCBI GI NO: 22326813 NR Description: protein kinase MSK-3 - like; protein id:At5g14640
  misc_feature (1)..(408): NCBI GI NO: 24637171 NR Description: GSK-3-like protein MsK4 [Medicago sativa]
MASAGVAPSGYKNSSSTSIGAEKLQDQMNELKIRDDKEVEATIINGKGTETGHIIVTTTGGKNGQPKQTVSYMAERIVGQGSFGIVFQAKCLETGETVAIKKVLQDKRYKNRELQTMRLLDHPNVVALKHCFFSTTEKDELYLNLVLEYVPETVHRVVKHHNKMNQRMPLIYVKLYMYQICRALAYIHGTIGVCHRDIKPQNLLVNPHTHQLKLCDFGSAKVLVKGEPNISYICSRYYRAPELIFGATEYTTAIDIWSAGCVLAELMLGQPLFPGESGVDQLVEIIKVLGTPTREEIKCMNPNYTEFKFPQIKAHPWHKVFHKRMPPEAVDLVSRLLQYSPNLRCTAMEALVHPFFDELRDPNTRLPNGRFLPPLFNFKPHELKGVPSDIVAKLIPEHAKKQCSYVGL

SEQ ID NO: 34199 - protein, 381 aa, Zea mays subsp. mays
  peptide (1)..(381): Ceres Seq. ID no. 12411529
  misc_feature (45)..(329): Pfam Name: Pfam Description:  Protein kinase domain
  misc_feature (1)..(380): NCBI GI NO: 481018 NR Description: protein kinase MSK-3 (EC 2.7.1.-)
  misc_feature (1)..(380): NCBI GI NO: 11182434 NR Description: GLYCOGEN SYNTHASE KINASE-3 HOMOLOG MSK-3
  misc_feature (1)..(381): NCBI GI NO: 18421039 NR Description: shaggy-like kinase alpha; protein id: At5g26751
  misc_feature (1)..(381): NCBI GI NO: 11133532 NR Description: Shaggy-related protein kinase NtK-1
  misc_feature (1)..(381): NCBI GI NO: 15230058 NR Description: shaggy related protein kinase, ASK-GAMMA
  misc_feature (1)..(381): NCBI GI NO: 541901 NR Description: protein kinase ASK-alpha (EC 2.7.1.-)
  misc_feature (1)..(381): NCBI GI NO: 21553877 NR Description: shaggy related protein kinase ASK-GAMMA
  misc_feature (1)..(381): NCBI GI NO: 2398519 NR Description: shaggy-like kinase alpha [Arabidopsis thaliana]
  misc_feature (1)..(381): NCBI GI NO: 22326813 NR Description: protein kinase MSK-3 - like; protein id:At5g14640
  misc_feature (1)..(381): NCBI GI NO: 24637171 NR Description: GSK-3-like protein MsK4 [Medicago sativa]
MNELKIRDDKEVEATIINGKGTETGHIIVTTTGGKNGQPKQTVSYMAERIVGQGSFGIVFQAKCLETGETVAIKKVLQDKRYKNRELQTMRLLDHPNVVALKHCFFSTTEKDELYLNLVLEYVPETVHRVVKHHNKMNQRMPLIYVKLYMYQICRALAYIHGTIGVCHRDIKPQNLLVNPHTHQLKLCDFGSAKVLVKGEPNISYICSRYYRAPELIFGATEYTTAIDIWSAGCVLAELMLGQPLFPGESGVDQLVEIIKVLGTPTREEIKCMNPNYTEFKFPQIKAHPWHKVFHKRMPPEAVDLVSRLLQYSPNLRCTAMEALVHPFFDELRDPNTRLPNGRFLPPLFNFKPHELKGVPSDIVAKLIPEHAKKQCSYVGL

SEQ ID NO: 34200 - protein, 336 aa, Zea mays subsp. mays
  peptide (1)..(336): Ceres Seq. ID no. 12411530
  misc_feature (1)..(284): Pfam Name: Pfam Description:  Protein kinase domain
  misc_feature (1)..(335): NCBI GI NO: 481018 NR Description: protein kinase MSK-3 (EC 2.7.1.-)
  misc_feature (1)..(335): NCBI GI NO: 11182434 NR Description: GLYCOGEN SYNTHASE KINASE-3 HOMOLOG MSK-3
  misc_feature (1)..(336): NCBI GI NO: 18421039 NR Description: shaggy-like kinase alpha; protein id: At5g26751
  misc_feature (1)..(336): NCBI GI NO: 11133532 NR Description: Shaggy-related protein kinase NtK-1
  misc_feature (1)..(336): NCBI GI NO: 15230058 NR Description: shaggy related protein kinase, ASK-GAMMA
  misc_feature (1)..(336): NCBI GI NO: 541901 NR Description: protein kinase ASK-alpha (EC 2.7.1.-)
  misc_feature (1)..(336): NCBI GI NO: 21553877 NR Description: shaggy related protein kinase ASK-GAMMA
  misc_feature (1)..(336): NCBI GI NO: 2398519 NR Description: shaggy-like kinase alpha [Arabidopsis thaliana]
  misc_feature (1)..(336): NCBI GI NO: 22326813 NR Description: protein kinase MSK-3 - like; protein id:At5g14640
  misc_feature (1)..(336): NCBI GI NO: 24637171 NR Description: GSK-3-like protein MsK4 [Medicago sativa]
MAERIVGQGSFGIVFQAKCLETGETVAIKKVLQDKRYKNRELQTMRLLDHPNVVALKHCFFSTTEKDELYLNLVLEYVPETVHRVVKHHNKMNQRMPLIYVKLYMYQICRALAYIHGTIGVCHRDIKPQNLLVNPHTHQLKLCDFGSAKVLVKGEPNISYICSRYYRAPELIFGATEYTTAIDIWSAGCVLAELMLGQPLFPGESGVDQLVEIIKVLGTPTREEIKCMNPNYTEFKFPQIKAHPWHKVFHKRMPPEAVDLVSRLLQYSPNLRCTAMEALVHPFFDELRDPNTRLPNGRFLPPLFNFKPHELKGVPSDIVAKLIPEHAKKQCSYVGL

SEQ ID NO: 34201 - DNA, 1412 bp, Zea mays subsp. mays
  misc_feature (1)..(1412): Ceres Seq. ID no. 12358726
aaacaaatgatgatccatcgatagtggctgaggtgacagctctccaagtttcgtctgttcgctcgtggtggaaattccgctgagcgagcgagcgagcgaatcctcctcttcccagccccggcgtgaggagcgccggcgatgtcgaccggcggcaggaagatgaggacggcgtgcgtgaccggaggaaacgggtatatcgcctcggcgctcatcaaggtgctgctggagaagggctacgccgtcaagacgacggtcaggaaccctgatgacatggagaagaactcccacctcaaggacctgcaggcgctcgggtccttggaggtcttccgcgccgacctggacgaagacggcagcttcgatgacgccgtcgccggctgcgactacgccttcctggtcgccgctccggtgaacctccacacgaagaaccccgaggaagaaatgatcgagccggccgtcaggggaactctgaacgtgatgcggtcgtgcgtgaaggcgggcacggtgaggcgcgtggtcctgacctcgtcggcggccgcggtcaccaccaggccgcagctgcaaggcgatgggcacgtgctggacgaggagtcctggtccgacgtcgagtacctcagagcccacaagcctgcaggcccctgggggtacccggtgtccaaggtgctcctggagaaggaggcgagcaggttcgcggaggagcacggcatcggcctcgtcaccgtctgccccggcctcaccgtgggcgccgcgccgggccccgaccgcccgcaccaggcgtccccaactgcctctcccttctatccggcgacgaagccgcgttcgccgtgctggacgccatcgagagcgccaccgggtgcctgccgctggtccacgtcgacgacgtctgccgcgccgagctgttcgccgccgaggagggcgcggccgcgaggaggtacgtctgctgcggcctcaacacgaccgtcgccgagctcgcgcgtttcctggcggacaagtacccgcagtacggcgtcaaaacgaacctgctctccggcgagcggcttgagaagccgagagtgtgtctgtcgtccgcgaagctggtgaaggaaggtttcgagttcaggtacaggacgttggatgacatatacgacgacatggtcgagtacggcaaggccctgggaatcctgcccgacttgtgatgctgcttcctctgctctcgggccggcgatcaggagttcaggactggactttaaaccgtccgacaaaataagtctatttatgctgctactgtgcccaaccgtaattggaccttaaaaaatgtcattacaaacaatcaactgtgtcaagaaaaattgtctatgttttgctttttttttttggtctactcagaaccgtttgtctgactagtaatttctacctcaatcttccatcggaaaccc

SEQ ID NO: 34202 - protein, 312 aa, Zea mays subsp. mays
  peptide (1)..(312): Ceres Seq. ID no. 12358727
  misc_feature (13)..(154): Pfam Name: Pfam Description:  3-beta hydroxysteroid dehydrogenase/ isomerase family
  misc_feature (1)..(207): NCBI GI NO: 39546249 NR Description: OSJNBa0089N06.19
  misc_feature (9)..(204): NCBI GI NO: 39546252 NR Description: OSJNBa0089N06.22
  misc_feature (1)..(206): NCBI GI NO: 39546251 NR Description: OSJNBa0089N06.21
  misc_feature (43)..(206): NCBI GI NO: 39546254 NR Description: OSJNBa0089N06.24
  misc_feature (1)..(27): NCBI GI NO: 39546254 NR Description: OSJNBa0089N06.24
  misc_feature (9)..(209): NCBI GI NO: 27966032 NR Description: anthocyanidin reductase [Medicago truncatula]
  misc_feature (3)..(217): NCBI GI NO: 6689826 NR Description: DFR-like protein [Arabidopsis thaliana]
  misc_feature (3)..(217): NCBI GI NO: 15220598 NR Description: dihydroflavonol 4-reductase, putative
  misc_feature (1)..(167): NCBI GI NO: 32489686 NR Description: OSJNBa0089N06.26
  misc_feature (10)..(209): NCBI GI NO: 30230341 NR Description: putative dihydroflavonol 4-reductase
MSTGGRKMRTACVTGGNGYIASALIKVLLEKGYAVKTTVRNPDDMEKNSHLKDLQALGSLEVFRADLDEDGSFDDAVAGCDYAFLVAAPVNLHTKNPEEEMIEPAVRGTLNVMRSCVKAGTVRRVVLTSSAAAVTTRPQLQGDGHVLDEESWSDVEYLRAHKPAGPWGYPVSKVLLEKEASRFAEEHGIGLVTVCPGLTVGAAPGPDRPHQASPTASPFYPATKPRSPCWTPSRAPPGACRWSTSTTSAAPSCSPPRRARPRGGTSAAASTRPSPSSRVSWRTSTRSTASKRTCSPASGLRSRECVCRPRSW

SEQ ID NO: 34203 - protein, 305 aa, Zea mays subsp. mays
  peptide (1)..(305): Ceres Seq. ID no. 12358728
  misc_feature (6)..(147): Pfam Name: Pfam Description:  3-beta hydroxysteroid dehydrogenase/ isomerase family
  misc_feature (1)..(200): NCBI GI NO: 39546249 NR Description: OSJNBa0089N06.19
  misc_feature (2)..(197): NCBI GI NO: 39546252 NR Description: OSJNBa0089N06.22
  misc_feature (1)..(199): NCBI GI NO: 39546251 NR Description: OSJNBa0089N06.21
  misc_feature (36)..(199): NCBI GI NO: 39546254 NR Description: OSJNBa0089N06.24
  misc_feature (1)..(20): NCBI GI NO: 39546254 NR Description: OSJNBa0089N06.24
  misc_feature (2)..(202): NCBI GI NO: 27966032 NR Description: anthocyanidin reductase [Medicago truncatula]
  misc_feature (1)..(210): NCBI GI NO: 6689826 NR Description: DFR-like protein [Arabidopsis thaliana]
  misc_feature (1)..(210): NCBI GI NO: 15220598 NR Description: dihydroflavonol 4-reductase, putative
  misc_feature (1)..(160): NCBI GI NO: 32489686 NR Description: OSJNBa0089N06.26
  misc_feature (3)..(202): NCBI GI NO: 30230341 NR Description: putative dihydroflavonol 4-reductase
MRTACVTGGNGYIASALIKVLLEKGYAVKTTVRNPDDMEKNSHLKDLQALGSLEVFRADLDEDGSFDDAVAGCDYAFLVAAPVNLHTKNPEEEMIEPAVRGTLNVMRSCVKAGTVRRVVLTSSAAAVTTRPQLQGDGHVLDEESWSDVEYLRAHKPAGPWGYPVSKVLLEKEASRFAEEHGIGLVTVCPGLTVGAAPGPDRPHQASPTASPFYPATKPRSPCWTPSRAPPGACRWSTSTTSAAPSCSPPRRARPRGGTSAAASTRPSPSSRVSWRTSTRSTASKRTCSPASGLRSRECVCRPRSW

SEQ ID NO: 34204 - protein, 268 aa, Zea mays subsp. mays
  peptide (1)..(268): Ceres Seq. ID no. 12358729
  misc_feature (1)..(110): Pfam Name: Pfam Description:  3-beta hydroxysteroid dehydrogenase/ isomerase family
  misc_feature (1)..(163): NCBI GI NO: 39546249 NR Description: OSJNBa0089N06.19
  misc_feature (1)..(160): NCBI GI NO: 39546252 NR Description: OSJNBa0089N06.22
  misc_feature (1)..(162): NCBI GI NO: 39546251 NR Description: OSJNBa0089N06.21
  misc_feature (1)..(162): NCBI GI NO: 39546254 NR Description: OSJNBa0089N06.24
  misc_feature (1)..(165): NCBI GI NO: 27966032 NR Description: anthocyanidin reductase [Medicago truncatula]
  misc_feature (1)..(173): NCBI GI NO: 6689826 NR Description: DFR-like protein [Arabidopsis thaliana]
  misc_feature (1)..(173): NCBI GI NO: 15220598 NR Description: dihydroflavonol 4-reductase, putative
  misc_feature (1)..(123): NCBI GI NO: 32489686 NR Description: OSJNBa0089N06.26
  misc_feature (1)..(165): NCBI GI NO: 30230341 NR Description: putative dihydroflavonol 4-reductase
  misc_feature (1)..(157): NCBI GI NO: 1706374 NR Description: DIHYDROFLAVONOL-4-REDUCTASE
MEKNSHLKDLQALGSLEVFRADLDEDGSFDDAVAGCDYAFLVAAPVNLHTKNPEEEMIEPAVRGTLNVMRSCVKAGTVRRVVLTSSAAAVTTRPQLQGDGHVLDEESWSDVEYLRAHKPAGPWGYPVSKVLLEKEASRFAEEHGIGLVTVCPGLTVGAAPGPDRPHQASPTASPFYPATKPRSPCWTPSRAPPGACRWSTSTTSAAPSCSPPRRARPRGGTSAAASTRPSPSSRVSWRTSTRSTASKRTCSPASGLRSRECVCRPRSW

SEQ ID NO: 34205 - DNA, 991 bp, Zea mays subsp. mays
  misc_feature (1)..(991): Ceres Seq. ID no. 12407888
gtgtccactgttcagtcggctcgagtaacaacagcaatagaatgggtggcggcggcgggagcccggcagcgagcggcgggagcagcagcagcgaggatgacggagacgccgcgtggaaggcagccattgactccatcgcgtccgttgggttcagcgtcccttcgtccaacggcgtggcgaaggcagcctctagcggcagccgcgaggtgaacaaccgcgctgatctggaagagccgcgtgaggggaagccaaagagtcctgggcttaagctgtaccaggtcaaggtaagaaacatgttggatgatatgttagagaaaaatctcgaaatagtcaaagctccgtgcttgaacttagtagaccccatggaaacaggaggaggaataaagttatttaaaaaagcaccacctggtattagcatggattctacggataaatggcacgtgcaactcaagcgaccaagaatcgtgcctggggtagaggtcgatgagaaatcaaagaagttccggcatatgctccggtctgttgttgtcgacggcagtgacatagttgtttctgcaaagaaagcatctgagagatcattggctagattggaagtgagagaagctgcagcaaaggcaaaagccaagagggaggaagaaagggtgcaggaactaaagaaggttaggggagagaaatggcttccttctgttgctagacaaatgaaggaggaaaaggcttgggagctgcgaaggcagagttccttttctaaggtcttaatcaattgtaataaaacgaaatacagtcaggatttttttgtgatttttacttgatctgtgagcgaacactgggtctttcaccttgtcatccaatgggttctgctccttggtgaaatctcccaccagccagtaaagaactgggttgttttcataatatatgcttttgctatgcagcctctgctgttgtaaggaattgcattgttatcttatatcactgtatggtgatgtttaacttt

SEQ ID NO: 34206 - protein, 268 aa, Zea mays subsp. mays
  peptide (1)..(268): Ceres Seq. ID no. 12407889
  misc_feature (24)..(236): NCBI GI NO: 21593080 NR Description: unknown [Arabidopsis thaliana]
  misc_feature (24)..(236): NCBI GI NO: 15229629 NR Description: putative protein; protein id: At3g49890
VHCSVGSSNNSNRMGGGGGSPAASGGSSSSEDDGDAAWKAAIDSIASVGFSVPSSNGVAKAASSGSREVNNRADLEEPREGKPKSPGLKLYQVKVRNMLDDMLEKNLEIVKAPCLNLVDPMETGGGIKLFKKAPPGISMDSTDKWHVQLKRPRIVPGVEVDEKSKKFRHMLRSVVVDGSDIVVSAKKASERSLARLEVREAAAKAKAKREEERVQELKKVRGEKWLPSVARQMKEEKAWELRRQSSFSKVLINCNKTKYSQDFFVIFT

SEQ ID NO: 34207 - protein, 255 aa, Zea mays subsp. mays
  peptide (1)..(255): Ceres Seq. ID no. 12407890
  misc_feature (11)..(223): NCBI GI NO: 21593080 NR Description: unknown [Arabidopsis thaliana]
  misc_feature (11)..(223): NCBI GI NO: 15229629 NR Description: putative protein; protein id: At3g49890
MGGGGGSPAASGGSSSSEDDGDAAWKAAIDSIASVGFSVPSSNGVAKAASSGSREVNNRADLEEPREGKPKSPGLKLYQVKVRNMLDDMLEKNLEIVKAPCLNLVDPMETGGGIKLFKKAPPGISMDSTDKWHVQLKRPRIVPGVEVDEKSKKFRHMLRSVVVDGSDIVVSAKKASERSLARLEVREAAAKAKAKREEERVQELKKVRGEKWLPSVARQMKEEKAWELRRQSSFSKVLINCNKTKYSQDFFVIFT

SEQ ID NO: 34208 - protein, 171 aa, Zea mays subsp. mays
  peptide (1)..(171): Ceres Seq. ID no. 12407891
  misc_feature (1)..(139): NCBI GI NO: 21593080 NR Description: unknown [Arabidopsis thaliana]
  misc_feature (1)..(139): NCBI GI NO: 15229629 NR Description: putative protein; protein id: At3g49890
MLDDMLEKNLEIVKAPCLNLVDPMETGGGIKLFKKAPPGISMDSTDKWHVQLKRPRIVPGVEVDEKSKKFRHMLRSVVVDGSDIVVSAKKASERSLARLEVREAAAKAKAKREEERVQELKKVRGEKWLPSVARQMKEEKAWELRRQSSFSKVLINCNKTKYSQDFFVIFT

SEQ ID NO: 34209 - DNA, 1494 bp, Zea mays subsp. mays
  misc_feature (1)..(1494): Ceres Seq. ID no. 12342482
agcgttgttaaaaccagtgccattagccatcctagccttcaccctcgcggagaagaagaaagaaaccacctcacctcaagaacagctagctgcaaggataaaaaaaaacaaagctgctgatctatatataataattaggctttgcagtgtcttgttttggagagcaaaggatcatcgtcaagtgatggccaagtcaggggcgctagaacttgctcggagcaccggagggtcgcttagcaaggaccaagtcaaatccgccgttgatcagtatgtcaaataccacgacctccatggaggcaaacaagaatcaaggaagtcaaattacaccgatttggcaaacaagtactatgatcttgtcactggcttttacgaatatggatggggcgactcattccatcttgctggcggatatccgggtgagacttcccgtgaagccattaagcggcaccagcattttttggcactacaattggggctcaagaagggtatgaaggttttggatgtgggatgtggaattgggggacctttaatagaaatcgccagattcagctcaacatcgataactggactgaacaacaatgactaccacatctcaaggggcaaggagctcattttttcagcaggtttgagtgagcaatgctgcttcttgaagggggacttcatggacatgccaatatctgataacacctttgatgcggcctatgcaatacagactacatgtcatgcaccagatgcacaaggcgtctatagtgaggtctaccgtgtgctgaaacctgggcagtattttgcactggatgaatggtgcttgaccgaccgatttgatcccaacaacgccaagcatttggccatcaaggctgagattgagctcggtgatggcctacctgacatccgtaccactcgccaatgtgtccaagctatgaaagatgcaggatttgaggtcgtttttgcaaaggatcttgctcaagtttttccttgcccgtggtaccgggtgatggatcccacctacttttcatgggctcacttccaatgcacacgcccaggacggatcgtcacccgtgcaattgtcaatacactagagttcctccgtattgccccagcaggcagcatgggagcctacaacgtcctgatgagtgcctctgatggccttctaaaaggtggccgggaaggtatcttcacagcgaccttcttcgtcctgggccgcaagcctctcaaggaagttgatatagtaagcctctcaagaaagttgatatagtgaacggcggcgtcctttgagctgcaagattagtatggggctgtactcataagagctatgaatcatggccaacgtgttctgtgccgaggtgtgtttactggattgtcttatgggttatggcccttgcgctgtgtgctggcctgctgggtcatgttcccgcagtagcctgtatctgcttgtcagcttgtgtgctgtgtactatgcactatctgaataaaaatgcagttttacgcattgttatt

SEQ ID NO: 34210 - protein, 416 aa, Zea mays subsp. mays
  peptide (1)..(416): Ceres Seq. ID no. 12342483
  misc_feature (124)..(323): Pfam Name: Pfam Description:  ubiE/COQ5 methyltransferase family
  misc_feature (62)..(405): NCBI GI NO: 7443716 NR Description: sterol 24-C-methyltransferase (EC 2
  misc_feature (62)..(405): NCBI GI NO: 7443715 NR Description: sterol 24-C-methyltransferase (EC 2
  misc_feature (62)..(405): NCBI GI NO: 34393309 NR Description: cycloartenol-C24-methyltransferase
  misc_feature (85)..(408): NCBI GI NO: 30103006 NR Description: putative endosperm C-24 sterol methyltransferase
  misc_feature (62)..(405): NCBI GI NO: 3560531 NR Description: cycloartenol-C24-methyltransferase
  misc_feature (62)..(405): NCBI GI NO: 3560474 NR Description: S-adenosyl-methionine-sterol-C- methyltransferase
  misc_feature (89)..(405): NCBI GI NO: 7489677 NR Description: probable sterol 24-C-methyltransferase (EC2
  misc_feature (89)..(405): NCBI GI NO: 1872473 NR Description: delta-24-sterol methyltransferase
  misc_feature (63)..(402): NCBI GI NO: 7443720 NR Description: probable sterol 24-C-methyltransferase (EC2
  misc_feature (62)..(405): NCBI GI NO: 7443719 NR Description: sterol 24-C-methyltransferase (EC 2
ALLKPVPLAILAFTLAEKKKETTSPQEQLAARIKKNKAADLYIIIRLCSVLFWRAKDHRQVMAKSGALELARSTGGSLSKDQVKSAVDQYVKYHDLHGGKQESRKSNYTDLANKYYDLVTGFYEYGWGDSFHLAGGYPGETSREAIKRHQHFLALQLGLKKGMKVLDVGCGIGGPLIEIARFSSTSITGLNNNDYHISRGKELIFSAGLSEQCCFLKGDFMDMPISDNTFDAAYAIQTTCHAPDAQGVYSEVYRVLKPGQYFALDEWCLTDRFDPNNAKHLAIKAEIELGDGLPDIRTTRQCVQAMKDAGFEVVFAKDLAQVFPCPWYRVMDPTYFSWAHFQCTRPGRIVTRAIVNTLEFLRIAPAGSMGAYNVLMSASDGLLKGGREGIFTATFFVLGRKPLKEVDIVSLSRKLI

SEQ ID NO: 34211 - protein, 355 aa, Zea mays subsp. mays
  peptide (1)..(355): Ceres Seq. ID no. 12342484
  misc_feature (63)..(262): Pfam Name: Pfam Description:  ubiE/COQ5 methyltransferase family
  misc_feature (1)..(344): NCBI GI NO: 7443716 NR Description: sterol 24-C-methyltransferase (EC 2
  misc_feature (1)..(344): NCBI GI NO: 7443715 NR Description: sterol 24-C-methyltransferase (EC 2
  misc_feature (1)..(344): NCBI GI NO: 34393309 NR Description: cycloartenol-C24-methyltransferase
  misc_feature (24)..(347): NCBI GI NO: 30103006 NR Description: putative endosperm C-24 sterol methyltransferase
  misc_feature (1)..(344): NCBI GI NO: 3560531 NR Description: cycloartenol-C24-methyltransferase
  misc_feature (1)..(344): NCBI GI NO: 3560474 NR Description: S-adenosyl-methionine-sterol-C- methyltransferase
  misc_feature (28)..(344): NCBI GI NO: 7489677 NR Description: probable sterol 24-C-methyltransferase (EC2
  misc_feature (28)..(344): NCBI GI NO: 1872473 NR Description: delta-24-sterol methyltransferase
  misc_feature (2)..(341): NCBI GI NO: 7443720 NR Description: probable sterol 24-C-methyltransferase (EC2
  misc_feature (1)..(344): NCBI GI NO: 7443719 NR Description: sterol 24-C-methyltransferase (EC 2
MAKSGALELARSTGGSLSKDQVKSAVDQYVKYHDLHGGKQESRKSNYTDLANKYYDLVTGFYEYGWGDSFHLAGGYPGETSREAIKRHQHFLALQLGLKKGMKVLDVGCGIGGPLIEIARFSSTSITGLNNNDYHISRGKELIFSAGLSEQCCFLKGDFMDMPISDNTFDAAYAIQTTCHAPDAQGVYSEVYRVLKPGQYFALDEWCLTDRFDPNNAKHLAIKAEIELGDGLPDIRTTRQCVQAMKDAGFEVVFAKDLAQVFPCPWYRVMDPTYFSWAHFQCTRPGRIVTRAIVNTLEFLRIAPAGSMGAYNVLMSASDGLLKGGREGIFTATFFVLGRKPLKEVDIVSLSRKLI

SEQ ID NO: 34212 - protein, 254 aa, Zea mays subsp. mays
  peptide (1)..(254): Ceres Seq. ID no. 12342485
  misc_feature (1)..(161): Pfam Name: Pfam Description:  ubiE/COQ5 methyltransferase family
  misc_feature (1)..(243): NCBI GI NO: 7443716 NR Description: sterol 24-C-methyltransferase (EC 2
  misc_feature (1)..(243): NCBI GI NO: 7443715 NR Description: sterol 24-C-methyltransferase (EC 2
  misc_feature (1)..(243): NCBI GI NO: 34393309 NR Description: cycloartenol-C24-methyltransferase
  misc_feature (1)..(246): NCBI GI NO: 30103006 NR Description: putative endosperm C-24 sterol methyltransferase
  misc_feature (1)..(243): NCBI GI NO: 3560531 NR Description: cycloartenol-C24-methyltransferase
  misc_feature (1)..(243): NCBI GI NO: 3560474 NR Description: S-adenosyl-methionine-sterol-C- methyltransferase
  misc_feature (1)..(243): NCBI GI NO: 7489677 NR Description: probable sterol 24-C-methyltransferase (EC2
  misc_feature (1)..(243): NCBI GI NO: 1872473 NR Description: delta-24-sterol methyltransferase
  misc_feature (1)..(240): NCBI GI NO: 7443720 NR Description: probable sterol 24-C-methyltransferase (EC2
  misc_feature (1)..(243): NCBI GI NO: 7443719 NR Description: sterol 24-C-methyltransferase (EC 2
MKVLDVGCGIGGPLIEIARFSSTSITGLNNNDYHISRGKELIFSAGLSEQCCFLKGDFMDMPISDNTFDAAYAIQTTCHAPDAQGVYSEVYRVLKPGQYFALDEWCLTDRFDPNNAKHLAIKAEIELGDGLPDIRTTRQCVQAMKDAGFEVVFAKDLAQVFPCPWYRVMDPTYFSWAHFQCTRPGRIVTRAIVNTLEFLRIAPAGSMGAYNVLMSASDGLLKGGREGIFTATFFVLGRKPLKEVDIVSLSRKLI

SEQ ID NO: 34213 - DNA, 729 bp, Zea mays subsp. mays
  misc_feature (1)..(729): Ceres Seq. ID no. 12454766
aatctccctcctcctctccgccctcgccccctcgccctcgcccgcctgtttaaacctgactgtctataacttaccgccggtccgcacccgcccaccgtccctgtccccttccccgtctaagcactcggatcctctgccgccgcgatgagctactacggccagcagcagccgcccgtcagcgcgccgccggaagggtttatcccgggaaggacgcgtacccgccgccgggctacccgcccgcgggatatcctccgccggcgcagggctacccaccgcagggctacccgccgcagggctaccctccgcagcaggggtatccgcagcagggatacccgccgcagtactcgcagccgccgccgccgccccgccagcagcagagcagcgggccctctttcatggagggatgcttggccgccctttgttgctgctgcctattggaagcctgcttctgagatctaagctgcgcacaacttgttctagaaacaccacttcaatttgcacggttgatataactggggattggcttgttagcgaagaaccgaagataccatgggttcttatgcaaatcacagttctcctagttctttctatcgttctgattgtccgttgcgatgtttggtgtacctagtagtatcttaattatataccttacactgtttacctatccaatggaattcttggtctagctaacattgtgagattatgtcacttttctcgttctctgtagtg

SEQ ID NO: 34214 - protein, 104 aa, Zea mays subsp. mays
  peptide (1)..(104): Ceres Seq. ID no. 12454767
  misc_feature (20)..(97): Pfam Name: Pfam Description:  TT viral orf 1
MSYYGQQQPPVSAPPEGFIPGRTRTRRRATRPRDILRRRRATHRRATRRRATLRSRGIRSRDTRRSTRSRRRRPASSRAAGPLSWRDAWPPFVAAAYWKPASEI

SEQ ID NO: 34215 - protein, 74 aa, Zea mays subsp. mays
  peptide (1)..(74): Ceres Seq. ID no. 12454768
MLGRPLLLLPIGSLLLRSKLRTTCSRNTTSICTVDITGDWLVSEEPKIPWVLMQITVLLVLSIVLIVRCDVWCT

SEQ ID NO: 34216 - DNA, 1228 bp, Zea mays subsp. mays
  misc_feature (1)..(1228): Ceres Seq. ID no. 12353510
gagacttgagacagagacgcaggagcgcggaggaaaaggaggcccagaccaccgacggggaaaaaaacatcacgaacaccgttctccatagcgggagtagtgaggaacgaaagagagggggcggcctagggcttcgattccgcagccatggacgccgctgacgtgtggggccgctcatcgtcctcgtcttcttcgtccgccgccgccgcgaggcgcctgcaggcgcgctacgatctgtacatggggatcgacgacgcggacgccggcttggacgaggtgacggagccgcgcggcggggcggagtcctacaactgccccttctgcggcgaggacttcgactttgtcggcctctgctgtcacatcgacgacgagcatgccgttgaggctaagagcggggcatgccccatctgtgctacaagggtcggaatggacttgataggacatttgactatgcaacatggaagttatttcaagatgcaacgcaggcgcagagtccgaaaagtatcttctgggtcccattctttattatctttgttgagaaaggacttgagaaatggcagtttgcagtcatttctcggtggatcatcctatgtatccaatcctcctgctgcagcaccagatccatttgtgtcatctttaatttgtactttgcctgtggctgaaccatccaaagatttacattccgactcatctgacaataactttttgctaaataaattcccagatgaaaagcctgtagagagggctgaaccatcattgtcggagaaagatcagaaggaaagggttcaaaggagcaaattcgtccgagggcttgtgctctcgacaatatttgatgatgataacttgtaaagggggtcatcaaacttgataacagcatcacaatagttaaggaacacgaagagaatcatcagactctgctgctgttgtcgtgatcacacaagaggcccatctaagttcgtatatgtacggatggaatatttatgcatgtatgtatttatgtttatctccctgcatttacccttagtgcaacagggtggtaggggacggttgtagtattccaaatttatgtatcaaataaatgaggacactgtccttggggtgcaattgtgtatataatataataatagggagctactcgccatgatttaggatattttatttaactgttgtaataatatgcagtgttttgtatgatgaccccatttttttatatataactgttcatttt

SEQ ID NO: 34217 - protein, 233 aa, Zea mays subsp. mays
  peptide (1)..(233): Ceres Seq. ID no. 12353511
  misc_feature (14)..(227): Pfam Name: Di19 Pfam Description: Drought induced 19 protein
  misc_feature (1)..(230): NCBI GI NO: 25992529 NR Description: fiber protein Fb2 [Gossypium barbadense]
  misc_feature (7)..(231): NCBI GI NO: 18377875 NR Description: AT3g06760/F3E22_10 [Arabidopsis thaliana]
  misc_feature (10)..(230): NCBI GI NO: 28393233 NR Description: unknown protein [Arabidopsis thaliana]
  misc_feature (16)..(230): NCBI GI NO: 13937216 NR Description: AT5g49230/K21P3_11 [Arabidopsis thaliana]
  misc_feature (24)..(230): NCBI GI NO: 15028023 NR Description: unknown protein [Arabidopsis thaliana]
  misc_feature (16)..(230): NCBI GI NO: 15239827 NR Description: drought-induced protein Di19-like protein
  misc_feature (10)..(230): NCBI GI NO: 15240426 NR Description: drought-induced protein - like
  misc_feature (24)..(230): NCBI GI NO: 1076316 NR Description: drought-induced protein Di19
  misc_feature (7)..(231): NCBI GI NO: 15230782 NR Description: unknown protein; protein id: At3g06760.1
  misc_feature (24)..(230): NCBI GI NO: 30696095 NR Description: drought-induced protein -related
MDAADVWGRSSSSSSSSAAAARRLQARYDLYMGIDDADAGLDEVTEPRGGAESYNCPFCGEDFDFVGLCCHIDDEHAVEAKSGACPICATRVGMDLIGHLTMQHGSYFKMQRRRRVRKVSSGSHSLLSLLRKDLRNGSLQSFLGGSSYVSNPPAAAPDPFVSSLICTLPVAEPSKDLHSDSSDNNFLLNKFPDEKPVERAEPSLSEKDQKERVQRSKFVRGLVLSTIFDDDNL

SEQ ID NO: 34218 - protein, 202 aa, Zea mays subsp. mays
  peptide (1)..(202): Ceres Seq. ID no. 12353512
  misc_feature (1)..(196): Pfam Name: Di19 Pfam Description: Drought induced 19 protein
  misc_feature (1)..(199): NCBI GI NO: 25992529 NR Description: fiber protein Fb2 [Gossypium barbadense]
  misc_feature (1)..(200): NCBI GI NO: 18377875 NR Description: AT3g06760/F3E22_10 [Arabidopsis thaliana]
  misc_feature (1)..(199): NCBI GI NO: 28393233 NR Description: unknown protein [Arabidopsis thaliana]
  misc_feature (1)..(199): NCBI GI NO: 13937216 NR Description: AT5g49230/K21P3_11 [Arabidopsis thaliana]
  misc_feature (1)..(199): NCBI GI NO: 15028023 NR Description: unknown protein [Arabidopsis thaliana]
  misc_feature (1)..(199): NCBI GI NO: 15239827 NR Description: drought-induced protein Di19-like protein
  misc_feature (1)..(199): NCBI GI NO: 15240426 NR Description: drought-induced protein - like
  misc_feature (1)..(199): NCBI GI NO: 1076316 NR Description: drought-induced protein Di19
  misc_feature (1)..(200): NCBI GI NO: 15230782 NR Description: unknown protein; protein id: At3g06760.1
  misc_feature (1)..(199): NCBI GI NO: 30696095 NR Description: drought-induced protein -related
MGIDDADAGLDEVTEPRGGAESYNCPFCGEDFDFVGLCCHIDDEHAVEAKSGACPICATRVGMDLIGHLTMQHGSYFKMQRRRRVRKVSSGSHSLLSLLRKDLRNGSLQSFLGGSSYVSNPPAAAPDPFVSSLICTLPVAEPSKDLHSDSSDNNFLLNKFPDEKPVERAEPSLSEKDQKERVQRSKFVRGLVLSTIFDDDNL

SEQ ID NO: 34219 - protein, 140 aa, Zea mays subsp. mays
  peptide (1)..(140): Ceres Seq. ID no. 12353513
  misc_feature (1)..(134): Pfam Name: Di19 Pfam Description: Drought induced 19 protein
  misc_feature (1)..(137): NCBI GI NO: 25992529 NR Description: fiber protein Fb2 [Gossypium barbadense]
  misc_feature (1)..(138): NCBI GI NO: 18377875 NR Description: AT3g06760/F3E22_10 [Arabidopsis thaliana]
  misc_feature (1)..(137): NCBI GI NO: 28393233 NR Description: unknown protein [Arabidopsis thaliana]
  misc_feature (1)..(137): NCBI GI NO: 13937216 NR Description: AT5g49230/K21P3_11 [Arabidopsis thaliana]
  misc_feature (1)..(137): NCBI GI NO: 15028023 NR Description: unknown protein [Arabidopsis thaliana]
  misc_feature (1)..(137): NCBI GI NO: 15239827 NR Description: drought-induced protein Di19-like protein
  misc_feature (1)..(137): NCBI GI NO: 15240426 NR Description: drought-induced protein - like
  misc_feature (1)..(137): NCBI GI NO: 1076316 NR Description: drought-induced protein Di19
  misc_feature (1)..(138): NCBI GI NO: 15230782 NR Description: unknown protein; protein id: At3g06760.1
  misc_feature (1)..(137): NCBI GI NO: 30696095 NR Description: drought-induced protein -related
MDLIGHLTMQHGSYFKMQRRRRVRKVSSGSHSLLSLLRKDLRNGSLQSFLGGSSYVSNPPAAAPDPFVSSLICTLPVAEPSKDLHSDSSDNNFLLNKFPDEKPVERAEPSLSEKDQKERVQRSKFVRGLVLSTIFDDDNL

SEQ ID NO: 34220 - DNA, 1292 bp, Zea mays subsp. mays
  misc_feature (1)..(1292): Ceres Seq. ID no. 12408296
ggttcacacatggcttccttgttgcgctggaaggacaagtacgtgaaggagaggctgcagggcctgtcctgctcctcggcggccgccacctccgtcgtcccctccaatggccgcgccatcgaccggcactctccgcacctccgggaccctcaccggcgtctcccgccaccggtgcccaagccacccagacccagctctagtttcagtactaccaaagattcgtcctcctcctcctacaagcagcggcagcagatttgccacttcgacgtcgatggcaaagacaaaaggaagaataagaagaagaagagcacagcagcagcagccgctggtagtggtagctcgccgtcggagcataggagaaacggcaaggagaaggcgctgcagctgcagcaggtgagccccgcgagctcgtcccggttcctgctcaactcctccaggctcatgatgcagtccgacgacgaaaccactgccgtcgactccctgccgccacttccgtccccgcggcggccctccttcgttgacgccgccgccgaggacgacacagacacattccccagcagccacggcgatgccgcgtcgccggctgttccgtcaagaaggcctcagctcgtggcgccggcgccgccactggaattattcgctgagccgtctgcatcaggcgcaggctcctcctcctcttcgtcgtcagagataactggaggccatgtcgtcgccgccgctgacaacactgtcgtggtgagatcatgttccacgagaacagggcagcaccaggtagtggttttgagggtatctctgcactgcaaggggtgcgctggcaaggtgaagaagcacctctccaagatggaaggcgttacttctttcgacatcgacatcgcgacgaagaaggtgacggtggtgggagatgtgacgccgctaggcgtcctcaacagcatctccaaggtcaagagcgcccagttctggcctgactctcgctcctctttctctacgccaccgcgtgcctctgcctccttctgagctgcccactagcttcgtcacaaacttaatggttgggacgccaacacggtggtctttcaaatatatagttccttttttctccatattatcgatcgaggaaaatatatatatttgcacaatccaatcaaaagttcctctaccacaaaagatgcattatacaaaatttaactttaactatatatataggcgtctttttatgttttgaagctcgttgtaataagattatgaaagtataatgtatattttcaattttattaaatacaaaaatagggggaccc

SEQ ID NO: 34221 - protein, 337 aa, Zea mays subsp. mays
  peptide (1)..(337): Ceres Seq. ID no. 12408297
  misc_feature (26)..(322): NCBI GI NO: 11358213 NR Description: hypothetical protein T22P11
  misc_feature (26)..(322): NCBI GI NO: 18413973 NR Description: putative protein; protein id: At5g02600
  misc_feature (200)..(337): NCBI GI NO: 34906086 NR Description: P0459B04.21
  misc_feature (255)..(320): NCBI GI NO: 29124116 NR Description: unknown protein
  misc_feature (210)..(331): NCBI GI NO: 30683975 NR Description: copper-binding protein family
  misc_feature (192)..(334): NCBI GI NO: 22331770 NR Description: putative protein; protein id: At3g53530
  misc_feature (212)..(320): NCBI GI NO: 23092567 NR Description: hypothetical protein [Arabidopsis thaliana]
  misc_feature (212)..(320): NCBI GI NO: 30687119 NR Description: expressed protein [Arabidopsis thaliana]
  misc_feature (192)..(334): NCBI GI NO: 11280705 NR Description: hypothetical protein F4P12
  misc_feature (263)..(331): NCBI GI NO: 25339461 NR Description: hypothetical protein At2g28660
GSHMASLLRWKDKYVKERLQGLSCSSAAATSVVPSNGRAIDRHSPHLRDPHRRLPPPVPKPPRPSSSFSTTKDSSSSSYKQRQQICHFDVDGKDKRKNKKKKSTAAAAAGSGSSPSEHRRNGKEKALQLQQVSPASSSRFLLNSSRLMMQSDDETTAVDSLPPLPSPRRPSFVDAAAEDDTDTFPSSHGDAASPAVPSRRPQLVAPAPPLELFAEPSASGAGSSSSSSSEITGGHVVAAADNTVVVRSCSTRTGQHQVVVLRVSLHCKGCAGKVKKHLSKMEGVTSFDIDIATKKVTVVGDVTPLGVLNSISKVKSAQFWPDSRSSFSTPPRASASF

SEQ ID NO: 34222 - protein, 334 aa, Zea mays subsp. mays
  peptide (1)..(334): Ceres Seq. ID no. 12408298
  misc_feature (23)..(319): NCBI GI NO: 11358213 NR Description: hypothetical protein T22P11
  misc_feature (23)..(319): NCBI GI NO: 18413973 NR Description: putative protein; protein id: At5g02600
  misc_feature (197)..(334): NCBI GI NO: 34906086 NR Description: P0459B04.21
  misc_feature (252)..(317): NCBI GI NO: 29124116 NR Description: unknown protein
  misc_feature (207)..(328): NCBI GI NO: 30683975 NR Description: copper-binding protein family
  misc_feature (189)..(331): NCBI GI NO: 22331770 NR Description: putative protein; protein id: At3g53530
  misc_feature (209)..(317): NCBI GI NO: 23092567 NR Description: hypothetical protein [Arabidopsis thaliana]
  misc_feature (209)..(317): NCBI GI NO: 30687119 NR Description: expressed protein [Arabidopsis thaliana]
  misc_feature (189)..(331): NCBI GI NO: 11280705 NR Description: hypothetical protein F4P12
  misc_feature (260)..(328): NCBI GI NO: 25339461 NR Description: hypothetical protein At2g28660
MASLLRWKDKYVKERLQGLSCSSAAATSVVPSNGRAIDRHSPHLRDPHRRLPPPVPKPPRPSSSFSTTKDSSSSSYKQRQQICHFDVDGKDKRKNKKKKSTAAAAAGSGSSPSEHRRNGKEKALQLQQVSPASSSRFLLNSSRLMMQSDDETTAVDSLPPLPSPRRPSFVDAAAEDDTDTFPSSHGDAASPAVPSRRPQLVAPAPPLELFAEPSASGAGSSSSSSSEITGGHVVAAADNTVVVRSCSTRTGQHQVVVLRVSLHCKGCAGKVKKHLSKMEGVTSFDIDIATKKVTVVGDVTPLGVLNSISKVKSAQFWPDSRSSFSTPPRASASF

SEQ ID NO: 34223 - protein, 190 aa, Zea mays subsp. mays
  peptide (1)..(190): Ceres Seq. ID no. 12408299
  misc_feature (1)..(175): NCBI GI NO: 11358213 NR Description: hypothetical protein T22P11
  misc_feature (1)..(175): NCBI GI NO: 18413973 NR Description: putative protein; protein id: At5g02600
  misc_feature (53)..(190): NCBI GI NO: 34906086 NR Description: P0459B04.21
  misc_feature (108)..(173): NCBI GI NO: 29124116 NR Description: unknown protein
  misc_feature (63)..(184): NCBI GI NO: 30683975 NR Description: copper-binding protein family
  misc_feature (45)..(187): NCBI GI NO: 22331770 NR Description: putative protein; protein id: At3g53530
  misc_feature (65)..(173): NCBI GI NO: 23092567 NR Description: hypothetical protein [Arabidopsis thaliana]
  misc_feature (65)..(173): NCBI GI NO: 30687119 NR Description: expressed protein [Arabidopsis thaliana]
  misc_feature (45)..(187): NCBI GI NO: 11280705 NR Description: hypothetical protein F4P12
  misc_feature (116)..(184): NCBI GI NO: 25339461 NR Description: hypothetical protein At2g28660
MMQSDDETTAVDSLPPLPSPRRPSFVDAAAEDDTDTFPSSHGDAASPAVPSRRPQLVAPAPPLELFAEPSASGAGSSSSSSSEITGGHVVAAADNTVVVRSCSTRTGQHQVVVLRVSLHCKGCAGKVKKHLSKMEGVTSFDIDIATKKVTVVGDVTPLGVLNSISKVKSAQFWPDSRSSFSTPPRASASF

SEQ ID NO: 34224 - DNA, 1013 bp, Zea mays subsp. mays
  misc_feature (1)..(1013): Ceres Seq. ID no. 12342385
aaagtaactaaccatattggccgtgcgtccgtggctttgcatctgcaaccccgcccgatcaatcttcctcgttccgccgctccctcgcctccggcagcgaggtgaggccaccgatcggaccttccctagcggcggcgcctaccaacctcaaggagcgatggctctgtctgcgacgctacggatttctcttagcgtcgcgttctttggggttctggcgttcgtgcttggtgtcatcgccgaaaacaaaaagcctgcttccgggactcctatcctaggaaaggatgtcgtcatctgcacgtttccaagtgatccgactcttgcgatggggagcctgtccattgtggcacttgtggtagctgccatcgtaggccatgttgccatcttctttccatactcgggcaagtcagttcctcgtggagcgctgtttcaaagcaccagcttgacagtgttctttgttgttgctgagcttgtctcagccctggctcttgcaatgtcgctgtgggcaactgtcaccgagggtcttcaccgcagcaagaacatccaccacgacatggactaccagtgccctactgccaagaccggcctgttcggcggcgccgctttcctcgcccttgacgctgctctcttctggcttgtttgccagatgctggccctcaatgcaagggctgactaccttgacgaggatgacggcaagggagaatatggccagatttatgctgctcaagtcgatgatggctcgaaggtctgagcctatgtggtcatgctcggcagggttctatgattagtgtcatttggctacattatgccatcaacaaagtcgctttagctctcagtaaatttgtatataagttgcaaagtcttacataaggctggtggttattgcactttcgtgtttcagtgtgatcgataaacagtatctcagtacaatcggtttgctatgccccttggcgaacttgtccttgagttttctggtgtctgaatggcactataatataatatactccctctgtttc

SEQ ID NO: 34225 - protein, 196 aa, Zea mays subsp. mays
  peptide (1)..(196): Ceres Seq. ID no. 12342386
  misc_feature (1)..(195): NCBI GI NO: 8099143 NR Description: hypothetical protein [Oryza sativa]
  misc_feature (1)..(191): NCBI GI NO: 15235839 NR Description: putative protein; protein id: At4g31130
MALSATLRISLSVAFFGVLAFVLGVIAENKKPASGTPILGKDVVICTFPSDPTLAMGSLSIVALVVAAIVGHVAIFFPYSGKSVPRGALFQSTSLTVFFVVAELVSALALAMSLWATVTEGLHRSKNIHHDMDYQCPTAKTGLFGGAAFLALDAALFWLVCQMLALNARADYLDEDDGKGEYGQIYAAQVDDGSKV

SEQ ID NO: 34226 - protein, 141 aa, Zea mays subsp. mays
  peptide (1)..(141): Ceres Seq. ID no. 12342387
  misc_feature (1)..(140): NCBI GI NO: 8099143 NR Description: hypothetical protein [Oryza sativa]
  misc_feature (1)..(136): NCBI GI NO: 15235839 NR Description: putative protein; protein id: At4g31130
MGSLSIVALVVAAIVGHVAIFFPYSGKSVPRGALFQSTSLTVFFVVAELVSALALAMSLWATVTEGLHRSKNIHHDMDYQCPTAKTGLFGGAAFLALDAALFWLVCQMLALNARADYLDEDDGKGEYGQIYAAQVDDGSKV

SEQ ID NO: 34227 - DNA, 1376 bp, Zea mays subsp. mays
  misc_feature (1)..(1376): Ceres Seq. ID no. 12404602
aaaatcaactcgagcaaagcagctagctagctagcgctagtaccatcgtgcgagtgtgagcaagctactgagagatctcggaacgtttgcttgacagcttgagtaggtaaataatctatggcgcgccgacagtggagcagcggcggcctcgcggtcgcggtgctcgccgtgctgtcgtccgtgctcatctgctcatggggccacccggtgccgggcgggcacggcggcgggctccccctgcagccgcacttctacggccacgcgtgcccgcagatggaggccatcgtggggtccctcgtggcgaaggcgcacgcggaggacccgcgcatggcggcgtccctgctgcggatgcacttccacgactgcttcgtgcaggggctgcgacgcctccgtgctgctggacgccgacggcagcggcaggttcgtcaccgagaagcggtccaaccccaacaaggactcgctccgggggttcgaggtcatcgacgagatcaaggccgcgctggagcacgcctgcccgcacaccgtctcctgcgccgacatcgtcgccgtcgccgccagggactccgtcgtcctgaccggcggacctggctgggaggtgccactggggaggagggactcgctgacggccagcctgagcggctccaacaacctcatccctgctcccaacgactccctccccaccatcatcggcaagttcgccaaccaaggcctcgacatcgtcgacctcgtcgcactctcaggggggcacaccatcggcgactcgcggtgcgtgagcttccggcagcggctgtacggccagaacaacaacgggcaggtggaccggacgctgaacccggcgtacgcggcggagctgcggggccggtgcccgccggtcgggcggcgaccagaacctgttcgcgctggacctggtgacccagttccggttcgacaaccagtactaccacaacatcctggccatgaacgggctgctcagctccgacgagatcctgctcacgcagagccgcgagaccatggacctcgtccaccgctacgccgccgaccagggcctcttcttcgaccacttcgccaagtccatggtcaagatgggcaacatctcgccgctcaccgggagcgccggcgagatcaggcacaactgcaggagggtcaaccacttctagcttccatggagtggccatccgtgcagtggtgttcttgctttggtttcatttctggatgcatgcgtcatctttcatacttggatttaagtgtgcagtagtcgtaaatgattggaatttctgttttagtttggtgcccattcgatctcgagtcgattttcactcatgtaatttgcaaatcttgtacgaagaaatgatccaataaaattcagcatttgtgtc

SEQ ID NO: 34228 - protein, 264 aa, Zea mays subsp. mays
  peptide (1)..(264): Ceres Seq. ID no. 12404603
  misc_feature (12)..(87): NCBI GI NO: 34913714 NR Description: putative peroxidase
  misc_feature (15)..(87): NCBI GI NO: 7453853 NR Description: peroxidase prx14 precursor [Spinacia oleracea]
  misc_feature (11)..(87): NCBI GI NO: 7453855 NR Description: peroxidase prx15 precursor [Spinacia oleracea]
  misc_feature (41)..(87): NCBI GI NO: 7658147 NR Description: peroxidase [Asparagus officinalis]
  misc_feature (15)..(87): NCBI GI NO: 34903044 NR Description: unnamed protein product
  misc_feature (11)..(87): NCBI GI NO: 25044849 NR Description: peroxidase [Ananas comosus]
  misc_feature (11)..(87): NCBI GI NO: 15239370 NR Description: peroxidase, putative; protein id: At5g66390.1
  misc_feature (11)..(87): NCBI GI NO: 1402918 NR Description: peroxidase [Arabidopsis thaliana]
  misc_feature (37)..(87): NCBI GI NO: 7453851 NR Description: peroxidase prx13 precursor [Spinacia oleracea]
  misc_feature (37)..(87): NCBI GI NO: 15234394 NR Description: peroxidase, putative; protein id: At4g36430
MARRQWSSGGLAVAVLAVLSSVLICSWGHPVPGGHGGGLPLQPHFYGHACPQMEAIVGSLVAKAHAEDPRMAASLLRMHFHDCFVQGLRRLRAAGRRRQRQVRHREAVQPQQGLAPGVRGHRRDQGRAGARLPAHRLLRRHRRRRRQGLRRPDRRTWLGGATGEEGLADGQPERLQQPHPCSQRLPPHHHRQVRQPRPRHRRPRRTLRGAHHRRLAVRELPAAAVRPEQQRAGGPDAEPGVRGGAAGPVPAGRAATRTCSRWTW

SEQ ID NO: 34229 - protein, 212 aa, Zea mays subsp. mays
  peptide (1)..(212): Ceres Seq. ID no. 12404604
  misc_feature (1)..(35): NCBI GI NO: 34913714 NR Description: putative peroxidase
  misc_feature (1)..(35): NCBI GI NO: 7453853 NR Description: peroxidase prx14 precursor [Spinacia oleracea]
  misc_feature (1)..(35): NCBI GI NO: 7453855 NR Description: peroxidase prx15 precursor [Spinacia oleracea]
  misc_feature (1)..(35): NCBI GI NO: 7658147 NR Description: peroxidase [Asparagus officinalis]
  misc_feature (1)..(35): NCBI GI NO: 34903044 NR Description: unnamed protein product
  misc_feature (1)..(35): NCBI GI NO: 25044849 NR Description: peroxidase [Ananas comosus]
  misc_feature (1)..(35): NCBI GI NO: 15239370 NR Description: peroxidase, putative; protein id: At5g66390.1
  misc_feature (1)..(35): NCBI GI NO: 1402918 NR Description: peroxidase [Arabidopsis thaliana]
  misc_feature (1)..(35): NCBI GI NO: 7453851 NR Description: peroxidase prx13 precursor [Spinacia oleracea]
  misc_feature (1)..(35): NCBI GI NO: 15234394 NR Description: peroxidase, putative; protein id: At4g36430
MEAIVGSLVAKAHAEDPRMAASLLRMHFHDCFVQGLRRLRAAGRRRQRQVRHREAVQPQQGLAPGVRGHRRDQGRAGARLPAHRLLRRHRRRRRQGLRRPDRRTWLGGATGEEGLADGQPERLQQPHPCSQRLPPHHHRQVRQPRPRHRRPRRTLRGAHHRRLAVRELPAAAVRPEQQRAGGPDAEPGVRGGAAGPVPAGRAATRTCSRWTW

SEQ ID NO: 34230 - protein, 194 aa, Zea mays subsp. mays
  peptide (1)..(194): Ceres Seq. ID no. 12404605
  misc_feature (1)..(17): NCBI GI NO: 34913714 NR Description: putative peroxidase
  misc_feature (1)..(17): NCBI GI NO: 7453853 NR Description: peroxidase prx14 precursor [Spinacia oleracea]
  misc_feature (1)..(17): NCBI GI NO: 7453855 NR Description: peroxidase prx15 precursor [Spinacia oleracea]
  misc_feature (1)..(17): NCBI GI NO: 7658147 NR Description: peroxidase [Asparagus officinalis]
  misc_feature (1)..(17): NCBI GI NO: 34903044 NR Description: unnamed protein product
  misc_feature (1)..(17): NCBI GI NO: 25044849 NR Description: peroxidase [Ananas comosus]
  misc_feature (1)..(17): NCBI GI NO: 15239370 NR Description: peroxidase, putative; protein id: At5g66390.1
  misc_feature (1)..(17): NCBI GI NO: 1402918 NR Description: peroxidase [Arabidopsis thaliana]
  misc_feature (1)..(17): NCBI GI NO: 7453851 NR Description: peroxidase prx13 precursor [Spinacia oleracea]
  misc_feature (1)..(17): NCBI GI NO: 15234394 NR Description: peroxidase, putative; protein id: At4g36430
MAASLLRMHFHDCFVQGLRRLRAAGRRRQRQVRHREAVQPQQGLAPGVRGHRRDQGRAGARLPAHRLLRRHRRRRRQGLRRPDRRTWLGGATGEEGLADGQPERLQQPHPCSQRLPPHHHRQVRQPRPRHRRPRRTLRGAHHRRLAVRELPAAAVRPEQQRAGGPDAEPGVRGGAAGPVPAGRAATRTCSRWTW

SEQ ID NO: 34231 - DNA, 978 bp, Zea mays subsp. mays
  misc_feature (1)..(978): Ceres Seq. ID no. 12579117
aattgacagatcccgcaatactcacagggccctcttctctcatctctcactccctcgctccgtctaccagtaccaccacgtccctcctcgtcgacgatctcgtagcggcggcgcacatggcgagcgacggcgcggcggctacgccagcgaaggttaccccaaagaaggccaatctcctcgacccgcactccatcaagcaccttctcgacgagaccatctccgaggtcgtgaagagtaagggctacaccgaggacacgcggctgggcaactggaagctggggatcggagccgccgtgattgctgtcgccctcctcgctcagttttaccccaagaagttcccgcagaaccgcgatttcctccttggctgcatcgccctgtatgtggtgctgaatgtggtgctgctgatccttagctacaccaaggagaaggatgccatcctattcacgcaccctcctatgggttctttcagcagcactggcctcactatttcttctaaattaccaagattctcggacatgtacactctcacaatagcaagtgcggatccacagtctatctctgcaaacaagccagttcatttcactaagagcgtaacaaagtggtttacaaaggaaggagttcttgtggagggcctgttctggaaggatgtcgagaagctgattgatgactacaacagtgagcgcaagagtaaatgaattggtagctcgtgtctctggccatctggggagacatcgctgtctagagaaatccgtcaaagtttagcttaatctgaacaggcatttttgctatactgtaccggttgaccagtgaatgaatgatgttctagacattaactttggttccaagctttctgtcgtgtccatggataactatccgtccgaatcctagaaacgtggtccgtgcttgtaacctgtttgttctggtgcttccatacgccggagcagattttgaagagaaatgaaacaaatcgttaaatcg

SEQ ID NO: 34232 - protein, 230 aa, Zea mays subsp. mays
  peptide (1)..(230): Ceres Seq. ID no. 12579118
  misc_feature (39)..(230): NCBI GI NO: 38344552 NR Description: OSJNBa0027P08.20
  misc_feature (54)..(230): NCBI GI NO: 30688096 NR Description: expressed protein [Arabidopsis thaliana]
  misc_feature (54)..(230): NCBI GI NO: 34365647 NR Description: At4g04200 [Arabidopsis thaliana]
  misc_feature (153)..(230): NCBI GI NO: 15233420 NR Description: hypothetical protein; protein id: At4g04200.1
  misc_feature (54)..(84): NCBI GI NO: 15233420 NR Description: hypothetical protein; protein id: At4g04200.1
  misc_feature (54)..(126): NCBI GI NO: 25408649 NR Description: hypothetical protein At2g39960
  misc_feature (48)..(230): NCBI GI NO: 31240525 NR Description: ENSANGP00000021231 [Anopheles gambiae]
LTDPAILTGPSSLISHSLAPSTSTTTSLLVDDLVAAAHMASDGAAATPAKVTPKKANLLDPHSIKHLLDETISEVVKSKGYTEDTRLGNWKLGIGAAVIAVALLAQFYPKKFPQNRDFLLGCIALYVVLNVVLLILSYTKEKDAILFTHPPMGSFSSTGLTISSKLPRFSDMYTLTIASADPQSISANKPVHFTKSVTKWFTKEGVLVEGLFWKDVEKLIDDYNSERKSK

SEQ ID NO: 34233 - protein, 192 aa, Zea mays subsp. mays
  peptide (1)..(192): Ceres Seq. ID no. 12579119
  misc_feature (1)..(192): NCBI GI NO: 38344552 NR Description: OSJNBa0027P08.20
  misc_feature (16)..(192): NCBI GI NO: 30688096 NR Description: expressed protein [Arabidopsis thaliana]
  misc_feature (16)..(192): NCBI GI NO: 34365647 NR Description: At4g04200 [Arabidopsis thaliana]
  misc_feature (115)..(192): NCBI GI NO: 15233420 NR Description: hypothetical protein; protein id: At4g04200.1
  misc_feature (16)..(46): NCBI GI NO: 15233420 NR Description: hypothetical protein; protein id: At4g04200.1
  misc_feature (16)..(88): NCBI GI NO: 25408649 NR Description: hypothetical protein At2g39960
  misc_feature (10)..(192): NCBI GI NO: 31240525 NR Description: ENSANGP00000021231 [Anopheles gambiae]
MASDGAAATPAKVTPKKANLLDPHSIKHLLDETISEVVKSKGYTEDTRLGNWKLGIGAAVIAVALLAQFYPKKFPQNRDFLLGCIALYVVLNVVLLILSYTKEKDAILFTHPPMGSFSSTGLTISSKLPRFSDMYTLTIASADPQSISANKPVHFTKSVTKWFTKEGVLVEGLFWKDVEKLIDDYNSERKSK

SEQ ID NO: 34234 - DNA, 766 bp, Zea mays subsp. mays
  misc_feature (1)..(766): Ceres Seq. ID no. 12345783
acagtcgcctccttcctgcgccgccgccgccgccgccgctaccaccgcctcgcggccgcctgcggctccgcgtttccgcacggatttggtgaaggtttcttgaggctgagaacatggtgctgaagacggaactttgccgcttcagcggccagaagatttatcctgggaaaggcattagatttatccgtgctgattctcaggtcttcctttttgccaactcgaaatgcaagcgctacttccacaaccgcctgaagcctgcaaagcttacctggacagcaatgtacaggaagcagcacaagaaggatatccatgctgaagcggtaaagaagaggcgccgcgccaccaagaagccatactccaggtcaattgtgggtgcttccttggaagtaatccagaagaagagagctgagaagccagaggtccgcgatgctgctagagaagctgctcttcgtgagatcaaggagcgcatcaagaagaccaaggatgagaagaaagcgaagaaggcggaggtgagcaagtcccagaagacgcagacaaagggtgcggtccagaagggttccaagggccccaagttgggcggcggtggtgggaagcgctgaaagaacttagtgtcgtttctcgacattgcagtcgttccttagccaaagccactttcgtagaacctgtgttgaatttgcaagacttattcaagcgttgcttgtgcgtgctaaataccatggcaagagaacggatttatatttatgcctgaaaaaaaatgaccgttcat

SEQ ID NO: 34235 - protein, 161 aa, Zea mays subsp. mays; identical to SEQ ID NO: 23397
  peptide (1)..(161): Ceres Seq. ID no. 12345784
  misc_feature (3)..(73): Pfam Name: Pfam Description:  Ribosomal protein L24e
  misc_feature (1)..(161): NCBI GI NO: 1710521 NR Description: 60S RIBOSOMAL PROTEIN L24
  misc_feature (4)..(161): NCBI GI NO: 34900364 NR Description: putative 60S ribosomal protein L24
  misc_feature (1)..(160): NCBI GI NO: 6094040 NR Description: 60S ribosomal protein L24
  misc_feature (1)..(156): NCBI GI NO: 10180025 NR Description: 60S ribosomal protein L24 [Prunus avium]
  misc_feature (1)..(161): NCBI GI NO: 18404176 NR Description: 60S ribosomal protein L24; protein id: At2g36620
  misc_feature (1)..(161): NCBI GI NO: 15231730 NR Description: 60S ribosomal protein - like; protein id:At3g53020
  misc_feature (5)..(161): NCBI GI NO: 25295112 NR Description: 60S ribosomal protein L24
  misc_feature (3)..(150): NCBI GI NO: 19075214 NR Description: 60s ribosomal protein L24
  misc_feature (3)..(150): NCBI GI NO: 19115030 NR Description: 60S ribosomal protein L24
  misc_feature (10)..(154): NCBI GI NO: 40741063 NR Description: conserved hypothetical protein

SEQ ID NO: 34236 - protein, 106 aa, Zea mays subsp. mays; identical to SEQ ID NO: 23398
  peptide (1)..(106): Ceres Seq. ID no. 12345785
  misc_feature (1)..(106): NCBI GI NO: 1710521 NR Description: 60S RIBOSOMAL PROTEIN L24
  misc_feature (1)..(106): NCBI GI NO: 34900364 NR Description: putative 60S ribosomal protein L24
  misc_feature (1)..(105): NCBI GI NO: 6094040 NR Description: 60S ribosomal protein L24
  misc_feature (1)..(101): NCBI GI NO: 10180025 NR Description: 60S ribosomal protein L24 [Prunus avium]
  misc_feature (1)..(106): NCBI GI NO: 18404176 NR Description: 60S ribosomal protein L24; protein id: At2g36620
  misc_feature (1)..(106): NCBI GI NO: 15231730 NR Description: 60S ribosomal protein - like; protein id:At3g53020
  misc_feature (1)..(106): NCBI GI NO: 25295112 NR Description: 60S ribosomal protein L24
  misc_feature (1)..(95): NCBI GI NO: 19075214 NR Description: 60s ribosomal protein L24
  misc_feature (1)..(95): NCBI GI NO: 19115030 NR Description: 60S ribosomal protein L24
  misc_feature (1)..(99): NCBI GI NO: 40741063 NR Description: conserved hypothetical protein

SEQ ID NO: 34237 - DNA, 733 bp, Zea mays subsp. mays
  misc_feature (1)..(733): Ceres Seq. ID no. 12404215
agatcccgccgcgcgtctccttccgcgacacgctctcagtctcacgccacagctcgtcgcgttcgtcaacggtcgacccatcgcctatggaaggaaggcgcgaaccggaggcggacggcggaaaggccgggggcctcccgccgtcggagccgccgcacctgcagggccagccgccgcaggagtacgggtacggcacgttccagggccctcgacatcctcccgtcgggttcccgcagcctgccccgcctcccgggctcggcggcggcggctatcacaaccagcagcagccgtacgcgcctgcggagacgtactacgcccaggggtaccaggccgtaccaggctatggtcctgttgctgaaggaagacctgtgagaatgagggcgtctcccatgttgtggcctcggcttaggctggtgtctgttcataaccgggtttttcttggctgccattccatggttcattggagctttcgttcttatatgtgtgcgggtacatgaccaacgagagaaaccaggatacgttgcttgcacaattgctgccgttgttgctgccgttgccatcctcctgggggtaactaaaggaacgcacgtgtggtgaattgcctccagagaaggcaatcaatgtgtatttgcgttgtatatctgtgtgtgctaaaaagtgtggagcaacatccatgtgaatgtgatcttatgtccatatatattctactttgcaatgaaatttgaaatgtagt

SEQ ID NO: 34238 - protein, 164 aa, Zea mays subsp. mays
  peptide (1)..(164): Ceres Seq. ID no. 12404216
  misc_feature (59)..(129): NCBI GI NO: 18394436 NR Description: expressed protein; protein id: At1g17080
  misc_feature (41)..(129): NCBI GI NO: 21554011 NR Description: unknown [Arabidopsis thaliana]
  misc_feature (41)..(129): NCBI GI NO: 18404524 NR Description: expressed protein; protein id: At1g53560
IPPRVSFRDTLSVSRHSSSRSSTVDPSPMEGRREPEADGGKAGGLPPSEPPHLQGQPPQEYGYGTFQGPRHPPVGFPQPAPPPGLGGGGYHNQQQPYAPAETYYAQGYQAVPGYGPVAEGRPVRMRASPMLWPRLRLVSVHNRVFLGCHSMVHWSFRSYMCAGT

SEQ ID NO: 34239 - protein, 136 aa, Zea mays subsp. mays
  peptide (1)..(136): Ceres Seq. ID no. 12404217
  misc_feature (31)..(101): NCBI GI NO: 18394436 NR Description: expressed protein; protein id: At1g17080
  misc_feature (13)..(101): NCBI GI NO: 21554011 NR Description: unknown [Arabidopsis thaliana]
  misc_feature (13)..(101): NCBI GI NO: 18404524 NR Description: expressed protein; protein id: At1g53560
MEGRREPEADGGKAGGLPPSEPPHLQGQPPQEYGYGTFQGPRHPPVGFPQPAPPPGLGGGGYHNQQQPYAPAETYYAQGYQAVPGYGPVAEGRPVRMRASPMLWPRLRLVSVHNRVFLGCHSMVHWSFRSYMCAGT

SEQ ID NO: 34240 - protein, 123 aa, Zea mays subsp. mays
  peptide (1)..(123): Ceres Seq. ID no. 12404218
  misc_feature (106)..(123): NCBI GI NO: 18400450 NR Description: Expressed protein; protein id: At3g14595
  misc_feature (106)..(123): NCBI GI NO: 21554784 NR Description: unknown [Arabidopsis thaliana]
RSRRASPSATRSQSHATARRVRQRSTHRLWKEGANRRRTAERPGASRRRSRRTCRASRRRSTGTARSRALDILPSGSRSLPRLPGSAAAAITTSSSRTRLRRRTTPRGTRPYQAMVLLLKEDL

SEQ ID NO: 34241 - DNA, 792 bp, Zea mays subsp. mays
  misc_feature (1)..(792): Ceres Seq. ID no. 12372540
atatccgttgtggcagcagccttcgtgcaggcatggcgagctcatcttgtgcactgctgggtctggcctgcttcgtgctcctggcggcggcagccggcgccacgcagtacaaggtcggcggcgacaatggctgggccgtgccggacgccaccgccgagtcgttcaacacctgggcggagaagaccagcttccagatcgggcgacagcctcttgttcgtgtaccccaaggacaaggactcggtgctgctggtggagccggccgactacaacgcctgcaacacctcctcctacgacaagcagttcgacgacggcagcacgtccgtggcgctggaccgcgccggcgccttcttcttcatcagcggcgtcgaggccaactgccgcgccaacgagaagctcatcgtcatggtcgccggcgcgggcgcgccggcgccggccccggaccggcagggctccggctcttcctcctccccgtcgacgtccgcgccggtaccctccaagggtggcggcgccccggtgccgccgtcctcgcctaaggcccccgccgccaagaactccacggccaagggcgcgcctcccgccgccggcaccgacaggaacggcgctggtgctggactcgccgtggcaggcctcgtcgcctcggttgcaggatgcgtcgcccacgccatgcttgctctctgaaaccgaaaactgctggatgcagtgcagtcgccgtgtagtgtaacaaaccgtgtgggattgtgaacagagtgtatctttcgtgttcgttgcgattcagcgggaaaaaacaaattt

SEQ ID NO: 34242 - protein, 239 aa, Zea mays subsp. mays
  peptide (1)..(239): Ceres Seq. ID no. 12372541
  misc_feature (85)..(212): Pfam Name: Pfam Description:  Glycoprotein GG/GX
  misc_feature (87)..(221): NCBI GI NO: 7441829 NR Description: proline-rich cell wall protein - upland cotton
  misc_feature (88)..(219): NCBI GI NO: 22330504 NR Description: arabinogalactan-protein, putative
  misc_feature (87)..(227): NCBI GI NO: 7441829 NR Description: proline-rich cell wall protein - upland cotton
  misc_feature (85)..(221): NCBI GI NO: 6523547 NR Description: hydroxyproline-rich glycoprotein DZ-HRGP
  misc_feature (12)..(221): NCBI GI NO: 25989119 NR Description: unknown [Streptomyces aureofaciens]
  misc_feature (63)..(218): NCBI GI NO: 11095327 NR Description: unknown [Paracoccus pantotrophus]
  misc_feature (75)..(199): NCBI GI NO: 22330504 NR Description: arabinogalactan-protein, putative
  misc_feature (87)..(221): NCBI GI NO: 27375632 NR Description: blr0521 [Bradyrhizobium japonicum]
  misc_feature (91)..(196): NCBI GI NO: 81286 NR Description: extensin - Volvox carteri (fragment)
  misc_feature (87)..(221): NCBI GI NO: 15221470 NR Description: protein kinase, putative; protein id: At1g68690
YPLWQQPSCRHGELILCTAGSGLLRAPGGGSRRHAVQGRRRQWLGRAGRHRRVVQHLGGEDQLPDRATASCSCTPRTRTRCCWWSRPTTTPATPPPTTSSSTTAARPWRWTAPAPSSSSAASRPTAAPTRSSSSWSPARARRRRPRTGRAPALPPPRRRPRRYPPRVAAPRCRRPRLRPPPPRTPRPRARLPPPAPTGTALVLDSPWQASSPRLQDASPTPCLLSETENCWMQCSRRVV

SEQ ID NO: 34243 - protein, 225 aa, Zea mays subsp. mays
  peptide (1)..(225): Ceres Seq. ID no. 12372542
  misc_feature (67)..(130): Pfam Name: Pfam Description:  Plastocyanin-like domain
  misc_feature (67)..(208): NCBI GI NO: 18402674 NR Description: expressed protein; protein id: At3g20570
  misc_feature (67)..(208): NCBI GI NO: 21618177 NR Description: unknown [Arabidopsis thaliana]
  misc_feature (67)..(197): NCBI GI NO: 8515096 NR Description: phytocyanin homolog [Pinus taeda]
  misc_feature (65)..(210): NCBI GI NO: 34908784 NR Description: P0415A04.29
  misc_feature (44)..(201): NCBI GI NO: 15234164 NR Description: putative protein; protein id: At4g27520
  misc_feature (44)..(201): NCBI GI NO: 21592865 NR Description: unknown [Arabidopsis thaliana]
  misc_feature (67)..(208): NCBI GI NO: 15234789 NR Description: putative protein; protein id: At4g30590
  misc_feature (67)..(223): NCBI GI NO: 14140127 NR Description: uclacyanin 3-like protein [Oryza sativa]
  misc_feature (67)..(216): NCBI GI NO: 15224081 NR Description: nodulin-like protein; protein id: At2g23990.1
  misc_feature (67)..(186): NCBI GI NO: 7670832 NR Description: dicyanin [Lycopersicon esculentum]
ISVVAAAFVQAWRAHLVHCWVWPASCSWRRQPAPRSTRSAATMAGPCRTPPPSRSTPGRRRPASRSGDSLLFVYPKDKDSVLLVEPADYNACNTSSYDKQFDDGSTSVALDRAGAFFFISGVEANCRANEKLIVMVAGAGAPAPAPDRQGSGSSSSPSTSAPVPSKGGGAPVPPSSPKAPAAKNSTAKGAPPAAGTDRNGAGAGLAVAGLVASVAGCVAHAMLAL

SEQ ID NO: 34244 - protein, 183 aa, Zea mays subsp. mays
  peptide (1)..(183): Ceres Seq. ID no. 12372543
  misc_feature (25)..(88): Pfam Name: Pfam Description:  Plastocyanin-like domain
  misc_feature (25)..(166): NCBI GI NO: 18402674 NR Description: expressed protein; protein id: At3g20570
  misc_feature (25)..(166): NCBI GI NO: 21618177 NR Description: unknown [Arabidopsis thaliana]
  misc_feature (25)..(155): NCBI GI NO: 8515096 NR Description: phytocyanin homolog [Pinus taeda]
  misc_feature (23)..(168): NCBI GI NO: 34908784 NR Description: P0415A04.29
  misc_feature (2)..(159): NCBI GI NO: 15234164 NR Description: putative protein; protein id: At4g27520
  misc_feature (2)..(159): NCBI GI NO: 21592865 NR Description: unknown [Arabidopsis thaliana]
  misc_feature (25)..(166): NCBI GI NO: 15234789 NR Description: putative protein; protein id: At4g30590
  misc_feature (25)..(181): NCBI GI NO: 14140127 NR Description: uclacyanin 3-like protein [Oryza sativa]
  misc_feature (25)..(174): NCBI GI NO: 15224081 NR Description: nodulin-like protein; protein id: At2g23990.1
  misc_feature (25)..(144): NCBI GI NO: 7670832 NR Description: dicyanin [Lycopersicon esculentum]
MAGPCRTPPPSRSTPGRRRPASRSGDSLLFVYPKDKDSVLLVEPADYNACNTSSYDKQFDDGSTSVALDRAGAFFFISGVEANCRANEKLIVMVAGAGAPAPAPDRQGSGSSSSPSTSAPVPSKGGGAPVPPSSPKAPAAKNSTAKGAPPAAGTDRNGAGAGLAVAGLVASVAGCVAHAMLAL

SEQ ID NO: 34245 - DNA, 646 bp, Zea mays subsp. mays
  misc_feature (1)..(646): Ceres Seq. ID no. 12483995
ctacgcaacctcccactgcattctcgaattccgattcccaatccagcaaaccctaccagccttttgcaaactcagagagggacccgatggcacccaaggcggagaagaagccggcggcgaagaagcccgcagaggaggagcccgcggccccggcggagaaggctcccgctgggaagaagccgaaggcggagaagcggctcccggcgggaaaatccgccggcaaggaaggcggtgttgacaagaaggggcggaagaaggccaagaagagcgtggagacgtacaagatctacatcttcaaggtgctgaagcaggtgcacccggacatcggcatctcctccaaggccatgtccatcatgaactccttcatcaacgacatcttcgagaagctcgccggcgaggcggccaagctcgcccgttacaacaagaagcccaccatcacctcccgggagatccagacctccgtccgcctcgttctacccggcgagctcgccaagcacgccgtctcggagggcaccaaggccgtcaccaagttcacctcgtcctaagctcctttcgagtaggtccttaagcgccgtggcgccttttgactgtatggaatgtttgtcatctgaaagttgatctgagcagtgcaatatataattctggc

SEQ ID NO: 34246 - protein, 180 aa, Zea mays subsp. mays
  peptide (1)..(180): Ceres Seq. ID no. 12483996
  misc_feature (51)..(180): Pfam Name: Pfam Description:  Core histone H2A/H2B/H3/H4
  misc_feature (29)..(180): NCBI GI NO: 1708107 NR Description: Histone H2B
  misc_feature (29)..(180): NCBI GI NO: 122022 NR Description: Histone H2B
  misc_feature (29)..(180): NCBI GI NO: 3913804 NR Description: Histone H2B.3
  misc_feature (29)..(180): NCBI GI NO: 399854 NR Description: Histone H2B.2
  misc_feature (29)..(180): NCBI GI NO: 399853 NR Description: Histone H2B.1
  misc_feature (29)..(180): NCBI GI NO: 34895838 NR Description: putative histone H2B
  misc_feature (15)..(180): NCBI GI NO: 34876159 NR Description: similar to Histone H2B 291B [Rattus norvegicus]
  misc_feature (25)..(177): NCBI GI NO: 15223150 NR Description: histone H2B, putative; protein id: At1g08170.1
TQPPTAFSNSDSQSSKPYQPFANSERDPMAPKAEKKPAAKKPAEEEPAAPAEKAPAGKKPKAEKRLPAGKSAGKEGGVDKKGRKKAKKSVETYKIYIFKVLKQVHPDIGISSKAMSIMNSFINDIFEKLAGEAAKLARYNKKPTITSREIQTSVRLVLPGELAKHAVSEGTKAVTKFTSS

SEQ ID NO: 34247 - protein, 152 aa, Zea mays subsp. mays
  peptide (1)..(152): Ceres Seq. ID no. 12483997
  misc_feature (23)..(152): Pfam Name: Pfam Description:  Core histone H2A/H2B/H3/H4
  misc_feature (1)..(152): NCBI GI NO: 1708107 NR Description: Histone H2B
  misc_feature (1)..(152): NCBI GI NO: 122022 NR Description: Histone H2B
  misc_feature (1)..(152): NCBI GI NO: 3913804 NR Description: Histone H2B.3
  misc_feature (1)..(152): NCBI GI NO: 399854 NR Description: Histone H2B.2
  misc_feature (1)..(152): NCBI GI NO: 399853 NR Description: Histone H2B.1
  misc_feature (1)..(152): NCBI GI NO: 34895838 NR Description: putative histone H2B
  misc_feature (1)..(152): NCBI GI NO: 34876159 NR Description: similar to Histone H2B 291B [Rattus norvegicus]
  misc_feature (1)..(149): NCBI GI NO: 15223150 NR Description: histone H2B, putative; protein id: At1g08170.1
MAPKAEKKPAAKKPAEEEPAAPAEKAPAGKKPKAEKRLPAGKSAGKEGGVDKKGRKKAKKSVETYKIYIFKVLKQVHPDIGISSKAMSIMNSFINDIFEKLAGEAAKLARYNKKPTITSREIQTSVRLVLPGELAKHAVSEGTKAVTKFTSS

SEQ ID NO: 34248 - protein, 101 aa, Zea mays subsp. mays
  peptide (1)..(101): Ceres Seq. ID no. 12483998
  misc_feature (31)..(86): Pfam Name: Pfam Description:  Protamine P1
  misc_feature (33)..(101): NCBI GI NO: 25143299 NR Description: pre-mRNA splicing SR protein related RSR-1 (68
  misc_feature (8)..(101): NCBI GI NO: 9843651 NR Description: SRM102 [Arabidopsis thaliana]
  misc_feature (8)..(101): NCBI GI NO: 30684163 NR Description: proline-rich protein -related
  misc_feature (2)..(101): NCBI GI NO: 25143299 NR Description: pre-mRNA splicing SR protein related RSR-1 (68
  misc_feature (38)..(101): NCBI GI NO: 25143299 NR Description: pre-mRNA splicing SR protein related RSR-1 (68
  misc_feature (9)..(101): NCBI GI NO: 9843651 NR Description: SRM102 [Arabidopsis thaliana]
  misc_feature (9)..(101): NCBI GI NO: 30684163 NR Description: proline-rich protein -related
  misc_feature (9)..(101): NCBI GI NO: 25408026 NR Description: probable proline-rich protein
  misc_feature (11)..(101): NCBI GI NO: 2429362 NR Description: proline rich protein [Santalum album]
  misc_feature (9)..(101): NCBI GI NO: 9843653 NR Description: splicing factor SC35 [Arabidopsis thaliana]
LRNLPLHSRIPIPNPANPTSLLQTQRGTRWHPRRRRSRRRRSPQRRSPRPRRRRLPLGRSRRRRSGSRRENPPARKAVLTRRGGRRPRRAWRRTRSTSSRC

SEQ ID NO: 34249 - DNA, 1486 bp, Zea mays subsp. mays
  misc_feature (1)..(1486): Ceres Seq. ID no. 12411515
atccgctttcggcgccgtcgccactcgccaccatctccaccgcctcctctcgacaagcatcccctcccatacccatggcaactgaccgtctcctccaccttctccgagcgccgacaggctctccggctgccgccgccaccacccgcgcggcttgttggggtcgtccacggacgcagcgcgtcgacgtctggcagggtgctgcggggattcgccgcgcgtccgtgtcctgctcgagcactagctctggcgggcaggggggactaacatataaggatgcaggcgtggacatagacgccggcgccgagctcgtgcgccgcatcgccaggatggcacccgggattggcggcttcggcggtctctttccctacaatgacgattatcttgttgctagcaccgatggggtggggacaaagctgaagcttgctttcgaaactggtattcatgatacaatcggcattgacctggtggcaatgagcgtcaatgacattgtaactctaggtgcaaaaccattgttcttcctagattactatgcaacgagcaagcttgatgttgatcttgcagagaaggttatcaaggggattagggatgggtgcgaacaatcagattgtgctctcctaggaggggagacagcagaaatgcctggtttctatgcagagggtgaatatgatctaagtggttttgctgtgggtgttgtgaagaagaataaagtcattgatggaaaaagcattgttaagggagatgtacttataggtcttccttccagtggtgttcattctaacgggttctctcttgttagaagagtactggagaaaagtggactttctttggatgatcagctcccaagaaatgatggcataacaactacggttggtgaagctctaatggcaccaaccttcatctatgttaagcaggtgcttgagattattagcaaaggtggtgtgaaaggactagcccacatcactggtggtggctttactgacaatatcccaagagtattcccctctggatgcggggcaaaaatttttactgggtcatgggaaatacctccaatcttcagttggcttcaacaggctggaaacattgatgatgcagagatgcggcgaacattcaatatgggcattggaatggttcttgtggtaagtcgagagtcagcagacagaattattgaagacacccatggatccagtcctgcttatcgcattggagaggtgattgagggtgatggggttcagtatgtctgacctcgtatgccttttatagtggcttgagacttgttggtctgctctgcaaagcagcagagtttatgtaacaacataatcttgtggtgttaagttctgcaccactactcccgctagaaagtgaagggtaaccaaataattatttgattggatccacgggaacttctctaaaggcttaccagaggaggccattagggggaaatacagttgttgagaatttttcatggagagcggtattgttttcgttg

SEQ ID NO: 34250 - protein, 412 aa, Zea mays subsp. mays
  peptide (1)..(412): Ceres Seq. ID no. 12411516
  misc_feature (87)..(232): Pfam Name: Pfam Description:  AIR synthase related protein, N-terminal domain
  misc_feature (26)..(412): NCBI GI NO: 34897250 NR Description: putative 5'-phosphoribosyl-5-aminoimidazolesynthetase
  misc_feature (87)..(411): NCBI GI NO: 15233161 NR Description: phosphoribosylformylglycinamidine cyclo-ligaseprecursor
  misc_feature (65)..(411): NCBI GI NO: 1709925 NR Description: Phosphoribosylformylglycinamidine cyclo-ligase
  misc_feature (87)..(368): NCBI GI NO: 541885 NR Description: phosphoribosylformylglycinamidine cyclo-ligase
  misc_feature (78)..(412): NCBI GI NO: 23029993 NR Description: hypothetical protein
  misc_feature (87)..(408): NCBI GI NO: 20807085 NR Description: Phosphoribosylaminoimidazol (AIR) synthetase
  misc_feature (87)..(411): NCBI GI NO: 34499070 NR Description: phosphoribosylformylglycinamidine cyclo-ligase
  misc_feature (77)..(405): NCBI GI NO: 22976704 NR Description: hypothetical protein [Ralstonia metallidurans]
  misc_feature (87)..(411): NCBI GI NO: 15794333 NR Description: putative phosphoribosylformylglycinamidine cyclo-ligase
  misc_feature (87)..(409): NCBI GI NO: 33591483 NR Description: phosphoribosylformylglycinamidine cyclo-ligase
PLSAPSPLATISTASSRQASPPIPMATDRLLHLLRAPTGSPAAAATTRAACWGRPRTQRVDVWQGAAGIRRASVSCSSTSSGGQGGLTYKDAGVDIDAGAELVRRIARMAPGIGGFGGLFPYNDDYLVASTDGVGTKLKLAFETGIHDTIGIDLVAMSVNDIVTLGAKPLFFLDYYATSKLDVDLAEKVIKGIRDGCEQSDCALLGGETAEMPGFYAEGEYDLSGFAVGVVKKNKVIDGKSIVKGDVLIGLPSSGVHSNGFSLVRRVLEKSGLSLDDQLPRNDGITTTVGEALMAPTFIYVKQVLEIISKGGVKGLAHITGGGFTDNIPRVFPSGCGAKIFTGSWEIPPIFSWLQQAGNIDDAEMRRTFNMGIGMVLVVSRESADRIIEDTHGSSPAYRIGEVIEGDGVQYV

SEQ ID NO: 34251 - protein, 388 aa, Zea mays subsp. mays
  peptide (1)..(388): Ceres Seq. ID no. 12411517
  misc_feature (63)..(208): Pfam Name: Pfam Description:  AIR synthase related protein, N-terminal domain
  misc_feature (2)..(388): NCBI GI NO: 34897250 NR Description: putative 5'-phosphoribosyl-5-aminoimidazolesynthetase
  misc_feature (63)..(387): NCBI GI NO: 15233161 NR Description: phosphoribosylformylglycinamidine cyclo-ligaseprecursor
  misc_feature (41)..(387): NCBI GI NO: 1709925 NR Description: Phosphoribosylformylglycinamidine cyclo-ligase
  misc_feature (63)..(344): NCBI GI NO: 541885 NR Description: phosphoribosylformylglycinamidine cyclo-ligase
  misc_feature (54)..(388): NCBI GI NO: 23029993 NR Description: hypothetical protein
  misc_feature (63)..(384): NCBI GI NO: 20807085 NR Description: Phosphoribosylaminoimidazol (AIR) synthetase
  misc_feature (63)..(387): NCBI GI NO: 34499070 NR Description: phosphoribosylformylglycinamidine cyclo-ligase
  misc_feature (53)..(381): NCBI GI NO: 22976704 NR Description: hypothetical protein [Ralstonia metallidurans]
  misc_feature (63)..(387): NCBI GI NO: 15794333 NR Description: putative phosphoribosylformylglycinamidine cyclo-ligase
  misc_feature (63)..(385): NCBI GI NO: 33591483 NR Description: phosphoribosylformylglycinamidine cyclo-ligase
MATDRLLHLLRAPTGSPAAAATTRAACWGRPRTQRVDVWQGAAGIRRASVSCSSTSSGGQGGLTYKDAGVDIDAGAELVRRIARMAPGIGGFGGLFPYNDDYLVASTDGVGTKLKLAFETGIHDTIGIDLVAMSVNDIVTLGAKPLFFLDYYATSKLDVDLAEKVIKGIRDGCEQSDCALLGGETAEMPGFYAEGEYDLSGFAVGVVKKNKVIDGKSIVKGDVLIGLPSSGVHSNGFSLVRRVLEKSGLSLDDQLPRNDGITTTVGEALMAPTFIYVKQVLEIISKGGVKGLAHITGGGFTDNIPRVFPSGCGAKIFTGSWEIPPIFSWLQQAGNIDDAEMRRTFNMGIGMVLVVSRESADRIIEDTHGSSPAYRIGEVIEGDGVQYV

SEQ ID NO: 34252 - protein, 304 aa, Zea mays subsp. mays
  peptide (1)..(304): Ceres Seq. ID no. 12411518
  misc_feature (1)..(124): Pfam Name: Pfam Description:  AIR synthase related protein, N-terminal domain
  misc_feature (1)..(304): NCBI GI NO: 34897250 NR Description: putative 5'-phosphoribosyl-5-aminoimidazolesynthetase
  misc_feature (1)..(303): NCBI GI NO: 15233161 NR Description: phosphoribosylformylglycinamidine cyclo-ligaseprecursor
  misc_feature (1)..(303): NCBI GI NO: 1709925 NR Description: Phosphoribosylformylglycinamidine cyclo-ligase
  misc_feature (1)..(260): NCBI GI NO: 541885 NR Description: phosphoribosylformylglycinamidine cyclo-ligase
  misc_feature (1)..(304): NCBI GI NO: 23029993 NR Description: hypothetical protein
  misc_feature (1)..(300): NCBI GI NO: 20807085 NR Description: Phosphoribosylaminoimidazol (AIR) synthetase
  misc_feature (1)..(303): NCBI GI NO: 34499070 NR Description: phosphoribosylformylglycinamidine cyclo-ligase
  misc_feature (1)..(297): NCBI GI NO: 22976704 NR Description: hypothetical protein [Ralstonia metallidurans]
  misc_feature (1)..(303): NCBI GI NO: 15794333 NR Description: putative phosphoribosylformylglycinamidine cyclo-ligase
  misc_feature (1)..(301): NCBI GI NO: 33591483 NR Description: phosphoribosylformylglycinamidine cyclo-ligase
MAPGIGGFGGLFPYNDDYLVASTDGVGTKLKLAFETGIHDTIGIDLVAMSVNDIVTLGAKPLFFLDYYATSKLDVDLAEKVIKGIRDGCEQSDCALLGGETAEMPGFYAEGEYDLSGFAVGVVKKNKVIDGKSIVKGDVLIGLPSSGVHSNGFSLVRRVLEKSGLSLDDQLPRNDGITTTVGEALMAPTFIYVKQVLEIISKGGVKGLAHITGGGFTDNIPRVFPSGCGAKIFTGSWEIPPIFSWLQQAGNIDDAEMRRTFNMGIGMVLVVSRESADRIIEDTHGSSPAYRIGEVIEGDGVQYV

SEQ ID NO: 34253 - DNA, 1971 bp, Zea mays subsp. mays
  misc_feature (1)..(1971): Ceres Seq. ID no. 13492793
attccacactaccccgcgctggactggagtcgagttgagctcacgctctcgcacactcgcactcccattcccactggccagattgatcttgcttcgctaatcatcctagatctccattcccgcccatgggatgcttccagtcgaaggtggcggggcccctgccgcccaacgacgccgccgctctccccgccgacaagcctgcagatcctgaggcggcgaatggcggcgccgacggggaaggcgacggtgacgacaaggaggctgtgaagcgcgcggtgccggtgttcagggagtttgctctggccgagctgcgcgccgccaccaagggattcagcgccgacctcatcgtctccgagagcggcgagaaggcgcccaacgccgtctaccgcggccgcctcgacggcgggcggctcatcgccgtcaagcgcttctcgcgcctctcctggcctgacccgcagcagttcctcgcggaggcggcgggcgttgggaaggtgcggcacaagcgcctcgtcaacctcattggctgctgcgccgagggtgacgagaggctgcttgtcgccgagtacatgcccaacgacaccctgtccaagcatctcttccactgggataagcagccgttaccatgggaaatgaggctgagggttgcatatttcattgcgcaagctctcgaccattgcaatgctgagaacaggaaaatctatcatgatttgaatgcttatagggtactttttgatgaggaaggtgatccccgcttgtcaagttttggattaatgaagaacagccgtgatgggaaaagttatagcactaacctggcttacactccaccagagtttctacgaactggcagagtaattccggagagtgtgatctatagctatggaactgtcctgttggatcttttgagcggaaaacacattcctcctagtcatgccctagatttaataaggggaaagaatatactgttgctgatggattcctccttagaagggcagtatgctaatgaagatgcttcgaaattggttgatcttgcatcaaagtgtctgcaatttgaatctagggatagaccgaacataaagtatcttctgtcttctgttggtcctcttcagaatcaaaaggaggttgcatcacatgtgttcatgggtattacaaaagccacatcagtactgccaaccatttgttctccactcagaaaggcctgcactggtatggatctttcagcggtgcatgatattttgctcaaaacaggttataaagatgatgagggtgcagaaaacgagctatcctttcaagaatggacccagcaagtgcaagagatgctgaacacaaagaagtttggtgacattgcatttagagacaaggattttaagactgcaattgactactactccaagctagttgcgatgatgtcgacgccttcagctacggtttttgtcaggcgcagtttttcctacttgatgaatgggcaagcagagctcgctctacgggacgcaatgcaagcccaggtctgcatgcccgagtggcctacggccttctacctccaggccctggctctttcaaagctcggcatggaaaccgatgcccaggacatgctcaacgatggcgccacgtttgaggccaagaagcagaacggctggcgcagttaggagccgacgacgaacaaagtctctcttccaacgactccgtgccgttgccctttgagagaagaaggtacaatggcgagtctcctccaaatcagttcactgggacacgcctgttgcactactagtagtgggattgaaacgcactgttttatcgtgcaatctcctctcgaatgtcggtaacgagtgatgatcatgatcaggggtggaaaaataggtcagggcctttgaacgcatagcgtactcttccgtgggttgcgctttgtgttgctggcgatggtggcaggatctgcctgattgttgcaactgcagttgtaattaaagggatgctctc

SEQ ID NO: 34254 - protein, 505 aa, Zea mays subsp. mays
  peptide (1)..(505): Ceres Seq. ID no. 13492794
  misc_feature (86)..(323): Pfam Name: Pfam Description:  Protein kinase domain
  misc_feature (1)..(504): NCBI GI NO: 37537032 NR Description: putative protein kinase
  misc_feature (1)..(504): NCBI GI NO: 15237465 NR Description: protein kinase family [Arabidopsis thaliana]
  misc_feature (1)..(504): NCBI GI NO: 28393210 NR Description: putative protein kinase [Arabidopsis thaliana]
  misc_feature (1)..(504): NCBI GI NO: 18418600 NR Description: protein kinase family [Arabidopsis thaliana]
  misc_feature (1)..(504): NCBI GI NO: 7486022 NR Description: hypothetical protein F23E12
  misc_feature (40)..(501): NCBI GI NO: 15232406 NR Description: protein kinase family [Arabidopsis thaliana]
  misc_feature (40)..(501): NCBI GI NO: 21553556 NR Description: protein kinase-like protein [Arabidopsis thaliana]
  misc_feature (51)..(501): NCBI GI NO: 22327962 NR Description: protein kinase - related [Arabidopsis thaliana]
  misc_feature (1)..(499): NCBI GI NO: 15237604 NR Description: protein kinase family [Arabidopsis thaliana]
  misc_feature (113)..(326): NCBI GI NO: 6633851 NR Description: F2K11.13 [Arabidopsis thaliana]
MGCFQSKVAGPLPPNDAAALPADKPADPEAANGGADGEGDGDDKEAVKRAVPVFREFALAELRAATKGFSADLIVSESGEKAPNAVYRGRLDGGRLIAVKRFSRLSWPDPQQFLAEAAGVGKVRHKRLVNLIGCCAEGDERLLVAEYMPNDTLSKHLFHWDKQPLPWEMRLRVAYFIAQALDHCNAENRKIYHDLNAYRVLFDEEGDPRLSSFGLMKNSRDGKSYSTNLAYTPPEFLRTGRVIPESVIYSYGTVLLDLLSGKHIPPSHALDLIRGKNILLLMDSSLEGQYANEDASKLVDLASKCLQFESRDRPNIKYLLSSVGPLQNQKEVASHVFMGITKATSVLPTICSPLRKACTGMDLSAVHDILLKTGYKDDEGAENELSFQEWTQQVQEMLNTKKFGDIAFRDKDFKTAIDYYSKLVAMMSTPSATVFVRRSFSYLMNGQAELALRDAMQAQVCMPEWPTAFYLQALALSKLGMETDAQDMLNDGATFEAKKQNGWRS

SEQ ID NO: 34255 - protein, 358 aa, Zea mays subsp. mays
  peptide (1)..(358): Ceres Seq. ID no. 13492795
  misc_feature (1)..(176): Pfam Name: Pfam Description:  Protein kinase domain
  misc_feature (1)..(357): NCBI GI NO: 37537032 NR Description: putative protein kinase
  misc_feature (1)..(357): NCBI GI NO: 15237465 NR Description: protein kinase family [Arabidopsis thaliana]
  misc_feature (1)..(357): NCBI GI NO: 28393210 NR Description: putative protein kinase [Arabidopsis thaliana]
  misc_feature (1)..(357): NCBI GI NO: 18418600 NR Description: protein kinase family [Arabidopsis thaliana]
  misc_feature (1)..(357): NCBI GI NO: 7486022 NR Description: hypothetical protein F23E12
  misc_feature (1)..(354): NCBI GI NO: 15232406 NR Description: protein kinase family [Arabidopsis thaliana]
  misc_feature (1)..(354): NCBI GI NO: 21553556 NR Description: protein kinase-like protein [Arabidopsis thaliana]
  misc_feature (1)..(354): NCBI GI NO: 22327962 NR Description: protein kinase - related [Arabidopsis thaliana]
  misc_feature (1)..(352): NCBI GI NO: 15237604 NR Description: protein kinase family [Arabidopsis thaliana]
  misc_feature (1)..(179): NCBI GI NO: 6633851 NR Description: F2K11.13 [Arabidopsis thaliana]
MPNDTLSKHLFHWDKQPLPWEMRLRVAYFIAQALDHCNAENRKIYHDLNAYRVLFDEEGDPRLSSFGLMKNSRDGKSYSTNLAYTPPEFLRTGRVIPESVIYSYGTVLLDLLSGKHIPPSHALDLIRGKNILLLMDSSLEGQYANEDASKLVDLASKCLQFESRDRPNIKYLLSSVGPLQNQKEVASHVFMGITKATSVLPTICSPLRKACTGMDLSAVHDILLKTGYKDDEGAENELSFQEWTQQVQEMLNTKKFGDIAFRDKDFKTAIDYYSKLVAMMSTPSATVFVRRSFSYLMNGQAELALRDAMQAQVCMPEWPTAFYLQALALSKLGMETDAQDMLNDGATFEAKKQNGWRS

SEQ ID NO: 34256 - protein, 337 aa, Zea mays subsp. mays
  peptide (1)..(337): Ceres Seq. ID no. 13492796
  misc_feature (1)..(155): Pfam Name: Pfam Description:  Protein kinase domain
  misc_feature (1)..(336): NCBI GI NO: 37537032 NR Description: putative protein kinase
  misc_feature (1)..(336): NCBI GI NO: 15237465 NR Description: protein kinase family [Arabidopsis thaliana]
  misc_feature (1)..(336): NCBI GI NO: 28393210 NR Description: putative protein kinase [Arabidopsis thaliana]
  misc_feature (1)..(336): NCBI GI NO: 18418600 NR Description: protein kinase family [Arabidopsis thaliana]
  misc_feature (1)..(336): NCBI GI NO: 7486022 NR Description: hypothetical protein F23E12
  misc_feature (1)..(333): NCBI GI NO: 15232406 NR Description: protein kinase family [Arabidopsis thaliana]
  misc_feature (1)..(333): NCBI GI NO: 21553556 NR Description: protein kinase-like protein [Arabidopsis thaliana]
  misc_feature (1)..(333): NCBI GI NO: 22327962 NR Description: protein kinase - related [Arabidopsis thaliana]
  misc_feature (1)..(331): NCBI GI NO: 15237604 NR Description: protein kinase family [Arabidopsis thaliana]
  misc_feature (1)..(158): NCBI GI NO: 6633851 NR Description: F2K11.13 [Arabidopsis thaliana]
MRLRVAYFIAQALDHCNAENRKIYHDLNAYRVLFDEEGDPRLSSFGLMKNSRDGKSYSTNLAYTPPEFLRTGRVIPESVIYSYGTVLLDLLSGKHIPPSHALDLIRGKNILLLMDSSLEGQYANEDASKLVDLASKCLQFESRDRPNIKYLLSSVGPLQNQKEVASHVFMGITKATSVLPTICSPLRKACTGMDLSAVHDILLKTGYKDDEGAENELSFQEWTQQVQEMLNTKKFGDIAFRDKDFKTAIDYYSKLVAMMSTPSATVFVRRSFSYLMNGQAELALRDAMQAQVCMPEWPTAFYLQALALSKLGMETDAQDMLNDGATFEAKKQNGWRS

SEQ ID NO: 34257 - DNA, 1277 bp, Zea mays subsp. mays
  misc_feature (1)..(1277): Ceres Seq. ID no. 12411507
aatcgaaagggattgatatgttgtgtgaggcttgaaaagataagcatgggatgtcatcttggacttgggatagagataacagagtctgttagagggagaatcacggcgagagcgtgctcgtgggcacccctctccgtcaactggggtgcgcgatcgatcgatcgaaatatcgaactgcagttgccaaaaccccaatccggtcttctatttccgatcgagccgcaaaggaggcaggaagaaggccggcgcaggcgcaggcgcggatggcgatgggagcgacggttcgcgcggcggccgcggacgccgtggtgacgttcctgtgggtgctgtgcgcctccgcgctcggtgcctccacagcagccgtcacgtcgtacctgggggtgcaggagggcgccggccactacgcgctcctcgtcaccacgtccctcctctcggtgctcctcttcaccttcgatctcctctgcggtgcgctcggcggcgccagcttcaaccccaccgacttcgccgcctcctatgccgccggactcgacagcccctccctcttctcggttgcgctccgcttcccggcgcaggccgccggcgctgtgggcggcgccctggccatctcggagctgatgccggcgcagtataagcacacgctcgcgggcccctcactcaaggtggatccccacaccggtgccctagccgaaggggtgctcaccttcgtcatcaccctgaccgtgctctgggtcatcgtcaagggcccccgcaacgtcatcctcaagaccttgctgctctcaacctccatcgtctccgtcatcctcgcaggcgcagagtacacggggccgtctatgaacccagctaatgcatttggctgggcatatgttaacaattggcacaacacatgggagcagctgtatgtgtactggatatgcccctttattggggccatgcttgctggatggatatttagggtggtgttcctaccaccggcacctaagcccaagaccaagaaagcatgattactcgtttatggatgctggtttagaagaaataagaaatagaggaaggtcacataagctcatgtgttgtacttgatttcctcaacttcccacaaactgggtgttgtgctctgttacttatttctcatcaataatttatgtttacttgtaattttgggctagtcaggatgtgtttttgtccttttatttagtttttgtatgttttctttatgagtacagtaaaatcattgatctcaattgagatggaaatgagctgaggtcggctcggcttgctcc

SEQ ID NO: 34258 - protein, 245 aa, Zea mays subsp. mays
  peptide (1)..(245): Ceres Seq. ID no. 12411508
  misc_feature (1)..(229): Pfam Name: Pfam Description:  Major intrinsic protein
  misc_feature (1)..(245): NCBI GI NO: 13447813 NR Description: small basic membrane integral protein ZmSIP1-1
  misc_feature (1)..(245): NCBI GI NO: 34906220 NR Description: P0666G04.16
  misc_feature (1)..(245): NCBI GI NO: 13447815 NR Description: small basic membrane integral protein ZmSIP1-2
  misc_feature (3)..(245): NCBI GI NO: 15229225 NR Description: hypothetical protein; protein id: At3g04090.1
  misc_feature (5)..(245): NCBI GI NO: 15238785 NR Description: putative protein; protein id: At5g18290.1
  misc_feature (3)..(243): NCBI GI NO: 15230175 NR Description: putative protein; protein id: At3g56950
  misc_feature (13)..(244): NCBI GI NO: 13447817 NR Description: small basic membrane integral protein ZmSIP2-1
  misc_feature (7)..(240): NCBI GI NO: 34904332 NR Description: unnamed protein product
  misc_feature (74)..(240): NCBI GI NO: 15811692 NR Description: aquaporin [Pyrocoelia rufa]
  misc_feature (1)..(234): NCBI GI NO: 1514977 NR Description: VM23 [Raphanus sativus]
MAMGATVRAAAADAVVTFLWVLCASALGASTAAVTSYLGVQEGAGHYALLVTTSLLSVLLFTFDLLCGALGGASFNPTDFAASYAAGLDSPSLFSVALRFPAQAAGAVGGALAISELMPAQYKHTLAGPSLKVDPHTGALAEGVLTFVITLTVLWVIVKGPRNVILKTLLLSTSIVSVILAGAEYTGPSMNPANAFGWAYVNNWHNTWEQLYVYWICPFIGAMLAGWIFRVVFLPPAPKPKTKKA

SEQ ID NO: 34259 - protein, 243 aa, Zea mays subsp. mays
  peptide (1)..(243): Ceres Seq. ID no. 12411509
  misc_feature (1)..(227): Pfam Name: Pfam Description:  Major intrinsic protein
  misc_feature (1)..(243): NCBI GI NO: 13447813 NR Description: small basic membrane integral protein ZmSIP1-1
  misc_feature (1)..(243): NCBI GI NO: 34906220 NR Description: P0666G04.16
  misc_feature (1)..(243): NCBI GI NO: 13447815 NR Description: small basic membrane integral protein ZmSIP1-2
  misc_feature (1)..(243): NCBI GI NO: 15229225 NR Description: hypothetical protein; protein id: At3g04090.1
  misc_feature (3)..(243): NCBI GI NO: 15238785 NR Description: putative protein; protein id: At5g18290.1
  misc_feature (1)..(241): NCBI GI NO: 15230175 NR Description: putative protein; protein id: At3g56950
  misc_feature (11)..(242): NCBI GI NO: 13447817 NR Description: small basic membrane integral protein ZmSIP2-1
  misc_feature (5)..(238): NCBI GI NO: 34904332 NR Description: unnamed protein product
  misc_feature (72)..(238): NCBI GI NO: 15811692 NR Description: aquaporin [Pyrocoelia rufa]
  misc_feature (1)..(232): NCBI GI NO: 1514977 NR Description: VM23 [Raphanus sativus]
MGATVRAAAADAVVTFLWVLCASALGASTAAVTSYLGVQEGAGHYALLVTTSLLSVLLFTFDLLCGALGGASFNPTDFAASYAAGLDSPSLFSVALRFPAQAAGAVGGALAISELMPAQYKHTLAGPSLKVDPHTGALAEGVLTFVITLTVLWVIVKGPRNVILKTLLLSTSIVSVILAGAEYTGPSMNPANAFGWAYVNNWHNTWEQLYVYWICPFIGAMLAGWIFRVVFLPPAPKPKTKKA

SEQ ID NO: 34260 - protein, 128 aa, Zea mays subsp. mays
  peptide (1)..(128): Ceres Seq. ID no. 12411510
  misc_feature (1)..(112): Pfam Name: Pfam Description:  Major intrinsic protein
  misc_feature (1)..(128): NCBI GI NO: 13447813 NR Description: small basic membrane integral protein ZmSIP1-1
  misc_feature (1)..(128): NCBI GI NO: 34906220 NR Description: P0666G04.16
  misc_feature (1)..(128): NCBI GI NO: 13447815 NR Description: small basic membrane integral protein ZmSIP1-2
  misc_feature (1)..(128): NCBI GI NO: 15229225 NR Description: hypothetical protein; protein id: At3g04090.1
  misc_feature (1)..(128): NCBI GI NO: 15238785 NR Description: putative protein; protein id: At5g18290.1
  misc_feature (1)..(126): NCBI GI NO: 15230175 NR Description: putative protein; protein id: At3g56950
  misc_feature (1)..(127): NCBI GI NO: 13447817 NR Description: small basic membrane integral protein ZmSIP2-1
  misc_feature (1)..(123): NCBI GI NO: 34904332 NR Description: unnamed protein product
  misc_feature (1)..(123): NCBI GI NO: 15811692 NR Description: aquaporin [Pyrocoelia rufa]
  misc_feature (1)..(117): NCBI GI NO: 1514977 NR Description: VM23 [Raphanus sativus]
MPAQYKHTLAGPSLKVDPHTGALAEGVLTFVITLTVLWVIVKGPRNVILKTLLLSTSIVSVILAGAEYTGPSMNPANAFGWAYVNNWHNTWEQLYVYWICPFIGAMLAGWIFRVVFLPPAPKPKTKKA

SEQ ID NO: 34261 - DNA, 1217 bp, Zea mays subsp. mays
  misc_feature (1)..(1217): Ceres Seq. ID no. 12374035
accgccaccacacagctcccacgctcaccgacgccacagcttgtgcgcgcgcaatggcactcgtgtccgcctcctcgtcctccaccaccgccgtcgcggcgctccccaggaatgggcagcagcgggcgtcgtcgtcgttgttctcctcctcctcctcttcctccttcctcgtcggcaagacgctgctgaggcaggccgaggcagcccggccgtcgttcgccgtgcgcgccgcggcggattccgacaggccgatctggttccccggcagcacccctccgccgtggctcgacggcagccttcccggcgacttcggctttgatccctggggcctcggatctgacccggagagcctgcggtggaacgtgcaggcggagctggtgcactgccggtgggcgatgctcggcgcggcgggtatcttcatcccggagttcctgaccaagatcggcgtcctcaacacgcccttctgggtacaccgccggcgagcagcagtacttcaccgacaccaccaccctcttcatcatcgagctcatcctcatcggctgggccgagggccgccgttgggctgacatcatcaagcccggaagcgtcaacaccgatcccatcttccccagcaacaagctcaccggcaccgacgtcgggtaccctggtggcctgtggtttgacccgctcggctggggctccggctcgccggagaagatcaaggagctgcgcaccaaggagatcaagaacggacgcctcgccatgctcgccgtcatgggcgcttggttccaggccgagtacaccggcaccggccccatcgacaacctcttcgcccacctcgccgaccctggccacgccaccatcttccaggccttcacccccaaatgaggagctctgatgaacttggcagttcgaggagtgctaccacacatgcatgcattgttaggtttgatggccgatatggaactttttctttttgttgggggcggactactgggtagactgtcaacgatgatgatgatgatgatgaaatgttcgtggtgcgatgcatggtgtacttgtactatgttgtaactaatgtaaaaatgcgatggtcgttagatgctatgtcctcttaattaaggcggacctacatgcaagtaaggatgcaaataagggtattcagtatttaattgaatactcattattttttgcaaaaaaatatgtatacatgtatatgttactagccagttgttcgg

SEQ ID NO: 34262 - protein, 187 aa, Zea mays subsp. mays
  peptide (1)..(187): Ceres Seq. ID no. 12374036
  misc_feature (90)..(155): Pfam Name: Pfam Description:  Chlorophyll A-B binding protein
  misc_feature (18)..(155): NCBI GI NO: 34393511 NR Description: putative photosystem I antenna protein
  misc_feature (18)..(155): NCBI GI NO: 1076724 NR Description: LHCI-680, photosystem I antenna protein - barley
  misc_feature (24)..(155): NCBI GI NO: 7443233 NR Description: chlorophyll a/b-binding protein type II
  misc_feature (15)..(155): NCBI GI NO: 18376587 NR Description: putative chlorophyll A-B binding protein of LHCItype II precursor
  misc_feature (15)..(155): NCBI GI NO: 99486 NR Description: chlorophyll a/b-binding protein
  misc_feature (20)..(155): NCBI GI NO: 115765 NR Description: Chlorophyll A-B binding protein 7
  misc_feature (43)..(155): NCBI GI NO: 11277627 NR Description: PS I antenna protein Lhca2
  misc_feature (20)..(155): NCBI GI NO: 115766 NR Description: Chlorophyll A-B binding protein
  misc_feature (43)..(155): NCBI GI NO: 15233120 NR Description: light-harvesting chlorophyll a/b binding protein
  misc_feature (18)..(155): NCBI GI NO: 2306981 NR Description: photosystem I antenna protein [Oryza sativa]
RHHTAPTLTDATACARAMALVSASSSSTTAVAALPRNGQQRASSSLFSSSSSSSFLVGKTLLRQAEAARPSFAVRAAADSDRPIWFPGSTPPPWLDGSLPGDFGFDPWGLGSDPESLRWNVQAELVHCRWAMLGAAGIFIPEFLTKIGVLNTPFWVHRRRAAVLHRHHHPLHHRAHPHRLGRGPPLG

SEQ ID NO: 34263 - protein, 170 aa, Zea mays subsp. mays
  peptide (1)..(170): Ceres Seq. ID no. 12374037
  misc_feature (73)..(138): Pfam Name: Pfam Description:  Chlorophyll A-B binding protein
  misc_feature (1)..(138): NCBI GI NO: 34393511 NR Description: putative photosystem I antenna protein
  misc_feature (1)..(138): NCBI GI NO: 1076724 NR Description: LHCI-680, photosystem I antenna protein - barley
  misc_feature (7)..(138): NCBI GI NO: 7443233 NR Description: chlorophyll a/b-binding protein type II
  misc_feature (1)..(138): NCBI GI NO: 18376587 NR Description: putative chlorophyll A-B binding protein of LHCItype II precursor
  misc_feature (1)..(138): NCBI GI NO: 99486 NR Description: chlorophyll a/b-binding protein
  misc_feature (3)..(138): NCBI GI NO: 115765 NR Description: Chlorophyll A-B binding protein 7
  misc_feature (26)..(138): NCBI GI NO: 11277627 NR Description: PS I antenna protein Lhca2
  misc_feature (3)..(138): NCBI GI NO: 115766 NR Description: Chlorophyll A-B binding protein
  misc_feature (26)..(138): NCBI GI NO: 15233120 NR Description: light-harvesting chlorophyll a/b binding protein
  misc_feature (1)..(138): NCBI GI NO: 2306981 NR Description: photosystem I antenna protein [Oryza sativa]
MALVSASSSSTTAVAALPRNGQQRASSSLFSSSSSSSFLVGKTLLRQAEAARPSFAVRAAADSDRPIWFPGSTPPPWLDGSLPGDFGFDPWGLGSDPESLRWNVQAELVHCRWAMLGAAGIFIPEFLTKIGVLNTPFWVHRRRAAVLHRHHHPLHHRAHPHRLGRGPPLG

SEQ ID NO: 34264 - protein, 105 aa, Zea mays subsp. mays
  peptide (1)..(105): Ceres Seq. ID no. 12374038
  misc_feature (91)..(105): NCBI GI NO: 13592175 NR Description: ppg3 [Leishmania major]
  misc_feature (91)..(105): NCBI GI NO: 13592175 NR Description: ppg3 [Leishmania major]
  misc_feature (91)..(105): NCBI GI NO: 13592175 NR Description: ppg3 [Leishmania major]
  misc_feature (91)..(105): NCBI GI NO: 13592175 NR Description: ppg3 [Leishmania major]
PPPHSSHAHRRHSLCARNGTRVRLLVLHHRRRGAPQEWAAAGVVVVVLLLLLFLLPRRQDAAEAGRGSPAVVRRARRGGFRQADLVPRQHPSAVARRQPSRRLRL

SEQ ID NO: 34265 - DNA, 1289 bp, Zea mays subsp. mays
  misc_feature (1)..(1289): Ceres Seq. ID no. 12411503
gcgcctccgtgcatgcaccgttgccgatcgtcgtcctcctccccactccccagaggccaagccaaaggtccagcaatggcgaggtctccccggcttctcgcgctgctgctggctgtcgtctggatatgcggcgcggccctagtagcgcgtgccgacccgatgctcgagaggttcgagcagtggatgggcaggcacggccggctgtacgctgacgccggagagaagcagaggcggctcgaggtgtaccggaggaacgtcgagctggtcgagaccttcaactccatgggcaacgggtacaggctggccgacaacaagttcgccgacctgacgaacgaggagttcagggccaagatgctgggcttcggacggcctcgcagcggaggcggagccgggcactccacagcgccgagcaccgtggcttgtattggaagtggactgatgggtcgtcagggttattctgatctaccgaaaagcgtggactggcgagagaagggagctgtcgcgccggtgaagagccagggggactgtggctcttgctgggcgttctccgccgttgcggccatcgagggcatcaaccagatcaagaacgggaagctggtgtccctgtcggagcaggagctggtggactgcgacaccaaggccatcggctgcgccggcgggtacatgagctgggccttcgagttcgtcatgaagaaccgcggcctcaccaccgaacggaactacccgtatcaagggctgaacggcgcctgccagacgccgaagctgaaggagagcgcggtgagcatctccgggtacatgaacgtgacgcccagcagcgagccggacctcctgcgggccgccgcggcgcagccggtgtccgtggccgtggacgccggcagcttcgtgtggcagctctacggcggcggcgtcttcacgggaccctgcaccgccgagctgaaccacggcgtcacggtggtcgggtacggcgagacccagggggacacggacggcgacggtagcggcgtgcccgggaagaagtactggatcgtcaagaactcgtgggggcccgagtggggcgacgccggctacatcctcatgcaacgcgaagccagcgtcgcgtctggcctctgcggcatcgctatgctcccgagctacccggtcatgtgatccggcggctgccgccgtcgagacctacagctgcagctctaagaacaatcagtcattatgttggccatcttttgaacaaagggcgttcctctttcccgataagatgatgtcttatcttggcgatcgataaggttacagatagt

SEQ ID NO: 34266 - protein, 381 aa, Zea mays subsp. mays
  peptide (1)..(381): Ceres Seq. ID no. 12411504
  misc_feature (155)..(380): Pfam Name: Pfam Description:  Papain family cysteine protease
  misc_feature (33)..(379): NCBI GI NO: 40806498 NR Description: putative cysteine protease 1 [Iris hollandica]
  misc_feature (26)..(379): NCBI GI NO: 24285904 NR Description: cysteine proteinase precursor [Ipomoea batatas]
  misc_feature (26)..(379): NCBI GI NO: 13491750 NR Description: cysteine protease [Ipomoea batatas]
  misc_feature (54)..(381): NCBI GI NO: 18422605 NR Description: senescence-specific cysteine protease SAG12
  misc_feature (26)..(379): NCBI GI NO: 37780047 NR Description: cysteine protease 8 [Trifolium repens]
  misc_feature (48)..(380): NCBI GI NO: 544129 NR Description: Vignain precursor
  misc_feature (54)..(381): NCBI GI NO: 21666724 NR Description: cysteine proteinase [Brassica napus]
  misc_feature (56)..(379): NCBI GI NO: 34329348 NR Description: putative cysteine proteinase [Medicago truncatula]
  misc_feature (54)..(381): NCBI GI NO: 5823020 NR Description: senescence-specific cysteine protease
  misc_feature (54)..(381): NCBI GI NO: 1046373 NR Description: SAG12 protein
APPCMHRCRSSSSSPLPRGQAKGPAMARSPRLLALLLAVVWICGAALVARADPMLERFEQWMGRHGRLYADAGEKQRRLEVYRRNVELVETFNSMGNGYRLADNKFADLTNEEFRAKMLGFGRPRSGGGAGHSTAPSTVACIGSGLMGRQGYSDLPKSVDWREKGAVAPVKSQGDCGSCWAFSAVAAIEGINQIKNGKLVSLSEQELVDCDTKAIGCAGGYMSWAFEFVMKNRGLTTERNYPYQGLNGACQTPKLKESAVSISGYMNVTPSSEPDLLRAAAAQPVSVAVDAGSFVWQLYGGGVFTGPCTAELNHGVTVVGYGETQGDTDGDGSGVPGKKYWIVKNSWGPEWGDAGYILMQREASVASGLCGIAMLPSYPVM

SEQ ID NO: 34267 - protein, 377 aa, Zea mays subsp. mays
  peptide (1)..(377): Ceres Seq. ID no. 12411505
  misc_feature (151)..(376): Pfam Name: Pfam Description:  Papain family cysteine protease
  misc_feature (29)..(375): NCBI GI NO: 40806498 NR Description: putative cysteine protease 1 [Iris hollandica]
  misc_feature (22)..(375): NCBI GI NO: 24285904 NR Description: cysteine proteinase precursor [Ipomoea batatas]
  misc_feature (22)..(375): NCBI GI NO: 13491750 NR Description: cysteine protease [Ipomoea batatas]
  misc_feature (50)..(377): NCBI GI NO: 18422605 NR Description: senescence-specific cysteine protease SAG12
  misc_feature (22)..(375): NCBI GI NO: 37780047 NR Description: cysteine protease 8 [Trifolium repens]
  misc_feature (44)..(376): NCBI GI NO: 544129 NR Description: Vignain precursor
  misc_feature (50)..(377): NCBI GI NO: 21666724 NR Description: cysteine proteinase [Brassica napus]
  misc_feature (52)..(375): NCBI GI NO: 34329348 NR Description: putative cysteine proteinase [Medicago truncatula]
  misc_feature (50)..(377): NCBI GI NO: 5823020 NR Description: senescence-specific cysteine protease
  misc_feature (50)..(377): NCBI GI NO: 1046373 NR Description: SAG12 protein
MHRCRSSSSSPLPRGQAKGPAMARSPRLLALLLAVVWICGAALVARADPMLERFEQWMGRHGRLYADAGEKQRRLEVYRRNVELVETFNSMGNGYRLADNKFADLTNEEFRAKMLGFGRPRSGGGAGHSTAPSTVACIGSGLMGRQGYSDLPKSVDWREKGAVAPVKSQGDCGSCWAFSAVAAIEGINQIKNGKLVSLSEQELVDCDTKAIGCAGGYMSWAFEFVMKNRGLTTERNYPYQGLNGACQTPKLKESAVSISGYMNVTPSSEPDLLRAAAAQPVSVAVDAGSFVWQLYGGGVFTGPCTAELNHGVTVVGYGETQGDTDGDGSGVPGKKYWIVKNSWGPEWGDAGYILMQREASVASGLCGIAMLPSYPVM

SEQ ID NO: 34268 - protein, 356 aa, Zea mays subsp. mays
  peptide (1)..(356): Ceres Seq. ID no. 12411506
  misc_feature (130)..(355): Pfam Name: Pfam Description:  Papain family cysteine protease
  misc_feature (8)..(354): NCBI GI NO: 40806498 NR Description: putative cysteine protease 1 [Iris hollandica]
  misc_feature (1)..(354): NCBI GI NO: 24285904 NR Description: cysteine proteinase precursor [Ipomoea batatas]
  misc_feature (1)..(354): NCBI GI NO: 13491750 NR Description: cysteine protease [Ipomoea batatas]
  misc_feature (29)..(356): NCBI GI NO: 18422605 NR Description: senescence-specific cysteine protease SAG12
  misc_feature (1)..(354): NCBI GI NO: 37780047 NR Description: cysteine protease 8 [Trifolium repens]
  misc_feature (23)..(355): NCBI GI NO: 544129 NR Description: Vignain precursor
  misc_feature (29)..(356): NCBI GI NO: 21666724 NR Description: cysteine proteinase [Brassica napus]
  misc_feature (31)..(354): NCBI GI NO: 34329348 NR Description: putative cysteine proteinase [Medicago truncatula]
  misc_feature (29)..(356): NCBI GI NO: 5823020 NR Description: senescence-specific cysteine protease
  misc_feature (29)..(356): NCBI GI NO: 1046373 NR Description: SAG12 protein
MARSPRLLALLLAVVWICGAALVARADPMLERFEQWMGRHGRLYADAGEKQRRLEVYRRNVELVETFNSMGNGYRLADNKFADLTNEEFRAKMLGFGRPRSGGGAGHSTAPSTVACIGSGLMGRQGYSDLPKSVDWREKGAVAPVKSQGDCGSCWAFSAVAAIEGINQIKNGKLVSLSEQELVDCDTKAIGCAGGYMSWAFEFVMKNRGLTTERNYPYQGLNGACQTPKLKESAVSISGYMNVTPSSEPDLLRAAAAQPVSVAVDAGSFVWQLYGGGVFTGPCTAELNHGVTVVGYGETQGDTDGDGSGVPGKKYWIVKNSWGPEWGDAGYILMQREASVASGLCGIAMLPSYPVM

SEQ ID NO: 34269 - DNA, 1825 bp, Zea mays subsp. mays
  misc_feature (1)..(1825): Ceres Seq. ID no. 12411499
gggtatatatatacggcgccggcgccgaggagagaggaccccggccgatcccgcacccctgactgtcagccgcgatccgctcttttttgcgtgcagcggcggagcaggagatatggcgtcggaggccaaggacgtgggcatcctcgccatggacatctacttcccgcccaactgcgtgctccaggaagagttggaaacacatgatggcgtgagcaaagggaagtataccattgggcttgggcaggaaagtatggcattttgcactgaagttgaggatgttatttcgatgagcttgacagcggtgaagtccctcctgaaaaattataacattgacccaaagtgcattggacgtttggaagttggcagtgaaaccgtaatagacaagagcaagtctataaagacatggctgatgcagatatttgaggaatctggcaatactgatattgaaggagttgactcctcgaatgcatgttatggtggaacagctgcattgtttaattgtgttaactgggttgaaagcaagtcatgggatggtcgctatggacttgttgtttgcacagacagtgcggtttacgctgaaggtccggctcgccctactggtggtgcggctgctattgcaatgctgattggaccaaatgctcctatttgttttgaaagtaaatatagaggatctcatatggcccatgtatacgacttttacaagcccgatcttgcgagtgaatatccggtggttgatgggaagctatcacaaacatgctacctcatggcattggactcctgctacaatctattttgcaaaaagtatgaaaaacatgaggggaagcagttttcaatttctgatgcagattatgttgtgttccattctccatacaacaagcttgtacagaaaagcttcgctcgtttgtactacaatgatttcttgagaaactgcagcacggttgatggagagtcaagggaaaaattggcaccctatgcaggcttgtcatctgaagaaagctaccagagtcgcgaccttgaaaaggcatctcagcaagtcgcaaagaatctgtacgagtccaaggttcagccaacaacattgatcccaaaacaagttgggaatatgtatacagcatcactctacgcagctcttgcatcggttgtccacagtagacatgaaactctggcaggccagaggattgttatgttttcgtatggcagtgggttgacatcaacgatgttctctttcatgattaatgaaggccatcaccctttcagtctgctaaacatcgcaaacatactggatatttccaagaaactgaaggcaaggcacgtggttcccccagagaaatttgtggaggcactaaaactgatggagcaccgctatggggcaagagatttcgtgacgagtcaagatacaagtctgctacccgcaggcacatactatctcacgcacgttgactccaagtacagaaggttctacgacgtgaaaggtgacggtgtcgccactgcaatgtccaacggccactgatctttcttctgcccgaagctgcaacaagtcaaataacagaggcaagtgtcctaagcatccttagatgattatatctattaggaggggaagctggagttatagattaatctctgcccagctgtaaggttgtaaagttagttagagctgcgcatgcatgcttgtttagtaaaagctctgctgctcttcagttatttagcgaatcaagcacactgctgggctataagaattgtaaacaataatctgcagaatcactggctacatccaggctatgctgatgaatgcacgatttcatgtttagcacgatcaatgcatctggct

SEQ ID NO: 34270 - protein, 501 aa, Zea mays subsp. mays
  peptide (1)..(501): Ceres Seq. ID no. 12411500
  misc_feature (42)..(489): Pfam Name: Pfam Description:  Hydroxymethylglutaryl-coenzyme A synthase
  misc_feature (42)..(501): NCBI GI NO: 16417956 NR Description: hydroxymethylglutaryl coenzyme A synthase
  misc_feature (42)..(501): NCBI GI NO: 14916100 NR Description: hydroxymethylglutaryl coenzyme A synthase
  misc_feature (42)..(501): NCBI GI NO: 7799986 NR Description: HMG-CoA synthase [Brassica juncea]
  misc_feature (42)..(501): NCBI GI NO: 11192003 NR Description: HMG-CoA synthase [Brassica juncea]
  misc_feature (42)..(501): NCBI GI NO: 11192005 NR Description: HMG-CoA synthase [Brassica juncea]
  misc_feature (42)..(501): NCBI GI NO: 15234313 NR Description: hydroxymethylglutaryl-CoA synthase
  misc_feature (42)..(501): NCBI GI NO: 1143390 NR Description: hydroxymethylglutaryl-CoA synthase
  misc_feature (38)..(500): NCBI GI NO: 7436678 NR Description: hydroxymethylglutaryl-CoA synthase (EC 4
  misc_feature (42)..(500): NCBI GI NO: 11192007 NR Description: HMG-CoA synthase [Brassica juncea]
  misc_feature (96)..(501): NCBI GI NO: 30681902 NR Description: hydroxymethylglutaryl-CoA synthase
GIYIRRRRRGERTPADPAPLTVSRDPLFFACSGGAGDMASEAKDVGILAMDIYFPPNCVLQEELETHDGVSKGKYTIGLGQESMAFCTEVEDVISMSLTAVKSLLKNYNIDPKCIGRLEVGSETVIDKSKSIKTWLMQIFEESGNTDIEGVDSSNACYGGTAALFNCVNWVESKSWDGRYGLVVCTDSAVYAEGPARPTGGAAAIAMLIGPNAPICFESKYRGSHMAHVYDFYKPDLASEYPVVDGKLSQTCYLMALDSCYNLFCKKYEKHEGKQFSISDADYVVFHSPYNKLVQKSFARLYYNDFLRNCSTVDGESREKLAPYAGLSSEESYQSRDLEKASQQVAKNLYESKVQPTTLIPKQVGNMYTASLYAALASVVHSRHETLAGQRIVMFSYGSGLTSTMFSFMINEGHHPFSLLNIANILDISKKLKARHVVPPEKFVEALKLMEHRYGARDFVTSQDTSLLPAGTYYLTHVDSKYRRFYDVKGDGVATAMSNGH

SEQ ID NO: 34271 - protein, 464 aa, Zea mays subsp. mays
  peptide (1)..(464): Ceres Seq. ID no. 12411501
  misc_feature (5)..(452): Pfam Name: Pfam Description:  Hydroxymethylglutaryl-coenzyme A synthase
  misc_feature (5)..(464): NCBI GI NO: 16417956 NR Description: hydroxymethylglutaryl coenzyme A synthase
  misc_feature (5)..(464): NCBI GI NO: 14916100 NR Description: hydroxymethylglutaryl coenzyme A synthase
  misc_feature (5)..(464): NCBI GI NO: 7799986 NR Description: HMG-CoA synthase [Brassica juncea]
  misc_feature (5)..(464): NCBI GI NO: 11192003 NR Description: HMG-CoA synthase [Brassica juncea]
  misc_feature (5)..(464): NCBI GI NO: 11192005 NR Description: HMG-CoA synthase [Brassica juncea]
  misc_feature (5)..(464): NCBI GI NO: 15234313 NR Description: hydroxymethylglutaryl-CoA synthase
  misc_feature (5)..(464): NCBI GI NO: 1143390 NR Description: hydroxymethylglutaryl-CoA synthase
  misc_feature (1)..(463): NCBI GI NO: 7436678 NR Description: hydroxymethylglutaryl-CoA synthase (EC 4
  misc_feature (5)..(463): NCBI GI NO: 11192007 NR Description: HMG-CoA synthase [Brassica juncea]
  misc_feature (59)..(464): NCBI GI NO: 30681902 NR Description: hydroxymethylglutaryl-CoA synthase
MASEAKDVGILAMDIYFPPNCVLQEELETHDGVSKGKYTIGLGQESMAFCTEVEDVISMSLTAVKSLLKNYNIDPKCIGRLEVGSETVIDKSKSIKTWLMQIFEESGNTDIEGVDSSNACYGGTAALFNCVNWVESKSWDGRYGLVVCTDSAVYAEGPARPTGGAAAIAMLIGPNAPICFESKYRGSHMAHVYDFYKPDLASEYPVVDGKLSQTCYLMALDSCYNLFCKKYEKHEGKQFSISDADYVVFHSPYNKLVQKSFARLYYNDFLRNCSTVDGESREKLAPYAGLSSEESYQSRDLEKASQQVAKNLYESKVQPTTLIPKQVGNMYTASLYAALASVVHSRHETLAGQRIVMFSYGSGLTSTMFSFMINEGHHPFSLLNIANILDISKKLKARHVVPPEKFVEALKLMEHRYGARDFVTSQDTSLLPAGTYYLTHVDSKYRRFYDVKGDGVATAMSNGH

SEQ ID NO: 34272 - protein, 452 aa, Zea mays subsp. mays
  peptide (1)..(452): Ceres Seq. ID no. 12411502
  misc_feature (1)..(440): Pfam Name: Pfam Description:  Hydroxymethylglutaryl-coenzyme A synthase
  misc_feature (1)..(452): NCBI GI NO: 16417956 NR Description: hydroxymethylglutaryl coenzyme A synthase
  misc_feature (1)..(452): NCBI GI NO: 14916100 NR Description: hydroxymethylglutaryl coenzyme A synthase
  misc_feature (1)..(452): NCBI GI NO: 7799986 NR Description: HMG-CoA synthase [Brassica juncea]
  misc_feature (1)..(452): NCBI GI NO: 11192003 NR Description: HMG-CoA synthase [Brassica juncea]
  misc_feature (1)..(452): NCBI GI NO: 11192005 NR Description: HMG-CoA synthase [Brassica juncea]
  misc_feature (1)..(452): NCBI GI NO: 15234313 NR Description: hydroxymethylglutaryl-CoA synthase
  misc_feature (1)..(452): NCBI GI NO: 1143390 NR Description: hydroxymethylglutaryl-CoA synthase
  misc_feature (1)..(451): NCBI GI NO: 7436678 NR Description: hydroxymethylglutaryl-CoA synthase (EC 4
  misc_feature (1)..(451): NCBI GI NO: 11192007 NR Description: HMG-CoA synthase [Brassica juncea]
  misc_feature (47)..(452): NCBI GI NO: 30681902 NR Description: hydroxymethylglutaryl-CoA synthase
MDIYFPPNCVLQEELETHDGVSKGKYTIGLGQESMAFCTEVEDVISMSLTAVKSLLKNYNIDPKCIGRLEVGSETVIDKSKSIKTWLMQIFEESGNTDIEGVDSSNACYGGTAALFNCVNWVESKSWDGRYGLVVCTDSAVYAEGPARPTGGAAAIAMLIGPNAPICFESKYRGSHMAHVYDFYKPDLASEYPVVDGKLSQTCYLMALDSCYNLFCKKYEKHEGKQFSISDADYVVFHSPYNKLVQKSFARLYYNDFLRNCSTVDGESREKLAPYAGLSSEESYQSRDLEKASQQVAKNLYESKVQPTTLIPKQVGNMYTASLYAALASVVHSRHETLAGQRIVMFSYGSGLTSTMFSFMINEGHHPFSLLNIANILDISKKLKARHVVPPEKFVEALKLMEHRYGARDFVTSQDTSLLPAGTYYLTHVDSKYRRFYDVKGDGVATAMSNGH

SEQ ID NO: 34273 - DNA, 1318 bp, Zea mays subsp. mays
  misc_feature (1)..(1318): Ceres Seq. ID no. 12342388
agatagggctgttttgcagcggtggcccaaaacatgcagaaaggctgcaagggccgaatttttttccaaatcgttccttctacacactgtcgaggagggcagcgggaagggacgagtcgacgccggtgtgcggtggcggcggtcgcgcggtaacgtttcccttcagcttcgatcatgttggtggcggcgccggccacaaaaggctcacccaccaaggatttgacggctgtcgagcccggggacgagggcatgcccttagtcgtgagaggtgacaggaaacttgttcatagtcgttttcgctaccgtaggtggcgcagtcggtgttcgacgcagggggagctatgggttcggtctcggtttgtcaggcgaatggcaaccaccagccgccgccgccgcaggcagaagcggagcaggtcgtcgaggatggcgttgccgtcgacaggatcaatggcaactaccagccgctggagctggtggctgaggcggggcaggtcgtcgaggagggcgatgccggcgtgaccatggaaggcgtcgcttccatcgccttgctgcctaccggtgccatctccggccatttcattcgcctccctgactccatctgctacgggctacacggcaccccaatatcttgcgagagggaatgtagccgaggagaggactaccgccttataaagctcaccatcattgattttaagagcaagagagagaaggtgcttgtggtggaatgcaggggccatgatgctgctcgattacaaaacattgaccatttgcatgggtgggaagatgacattgttggtttggttgagaaggagcacggaaatcagaaagtcttgctctcctttgaatgcgagacgctgaaggctgataaagacgcggaagatcatattgccaaatatatgccaaatctgtgtggactggacgcagttgtaaatatagggaaaatgagcatctcaggcatcaatctcgacgaggacgccgaaccaagaggggacaactgagcgtgtgaacagtggtcattgttcatcagcactggtaaactctgcacgaatcacatcaaacgcttacactgcactacatatggcagtttgatacgtgtctcattaccagtgcctgtacttaaaattctgtggctgtgaatcggattcaaaaccctttatacgtttcaactttcaagttaccacgtcgcttcttgcacgaatcccaagggtcggttgctcctgctgggtgcatttcttgtctgtggcggtactgtttgtcacgctttgtacgtatgactagcattgcttgtctgtttatgagagtggtgctgtgtttcgcc

SEQ ID NO: 34274 - protein, 218 aa, Zea mays subsp. mays
  peptide (1)..(218): Ceres Seq. ID no. 12342389
  misc_feature (53)..(207): NCBI GI NO: 15228659 NR Description: hypothetical protein; protein id: At3g29280.1
  misc_feature (82)..(195): NCBI GI NO: 11994768 NR Description: gene_id:MMF24.3~unknown protein
MGSVSVCQANGNHQPPPPQAEAEQVVEDGVAVDRINGNYQPLELVAEAGQVVEEGDAGVTMEGVASIALLPTGAISGHFIRLPDSICYGLHGTPISCERECSRGEDYRLIKLTIIDFKSKREKVLVVECRGHDAARLQNIDHLHGWEDDIVGLVEKEHGNQKVLLSFECETLKADKDAEDHIAKYMPNLCGLDAVVNIGKMSISGINLDEDAEPRGDN

SEQ ID NO: 34275 - protein, 158 aa, Zea mays subsp. mays
  peptide (1)..(158): Ceres Seq. ID no. 12342390
  misc_feature (1)..(147): NCBI GI NO: 15228659 NR Description: hypothetical protein; protein id: At3g29280.1
  misc_feature (22)..(135): NCBI GI NO: 11994768 NR Description: gene_id:MMF24.3~unknown protein
MEGVASIALLPTGAISGHFIRLPDSICYGLHGTPISCERECSRGEDYRLIKLTIIDFKSKREKVLVVECRGHDAARLQNIDHLHGWEDDIVGLVEKEHGNQKVLLSFECETLKADKDAEDHIAKYMPNLCGLDAVVNIGKMSISGINLDEDAEPRGDN

SEQ ID NO: 34276 - protein, 114 aa, Zea mays subsp. mays
  peptide (1)..(114): Ceres Seq. ID no. 12342391
MLVAAPATKGSPTKDLTAVEPGDEGMPLVVRGDRKLVHSRFRYRRWRSRCSTQGELWVRSRFVRRMATTSRRRRRQKRSRSSRMALPSTGSMATTSRWSWWLRRGRSSRRAMPA

SEQ ID NO: 34277 - DNA, 1407 bp, Zea mays subsp. mays
  misc_feature (1)..(1407): Ceres Seq. ID no. 12411495
gttctcttctctccctcctcctatagttggcttctcgcaaccctctgctttcgatcagctttctccgctccccatttccctctccaactccaatccatggcctccacggatcgctccacgccggcggaggacgagcaacagcagaagcgcccgtctctcttctcgccgtaccagatgccccgcttccgcctcgcccaccgggtggtgctggcgccgatgaccaggtgcagggcgcccgacgcggtcccaggccccgcgctcgcggagtactacgcgcagcggtccacggacggcggcttgctcatctccgagggcaccatcatctcgccgtccggccctgggttccctcgtgtccctgggatatacaatcaagaacagactgatgcatggagaaaggtggttgatgctgttcatgccaagggagctatctttttctgccaactatggcatgtaggccgagcttctcaccaagtatatcagccgggtgctgctgctccgatatcctcaactgataagccaatatcatcaagatggaggatactgatgcccgatggatcctatggcaagtatccaactccgaggcgcctagccacatccgagataccagaaattgttgagcaataccgtcaagcagccgtaaacgccatcaaagcaggtttcgatggcatcgagatccatggcgcccatggctacctcatcgatcagttcctcaagggcggtatcaacgaccggactgacgagtacggtggctcactctccaaccgttgccggttcctcctggaggtgacccgagccgtggtctctgcgataggggcagaccgcgtcgcggtccgagtgtccccggccatcgaccatctcgacgcctacgactccaaccccctgcagctcggcctggccgtggtggagcgtctcaacgctctccagcaggaggccgggcggctggcctacctccacgtgacgcagccacggtacacggcgtacgggcagacagagtctggccagcacgggagtgccgaggaggagagccggctgatgcgtgccgtgcgaggtgcctaccgtggcacgttcatgtgcagcggtgggtacacgcgggagctcggggtcgaggccatcgagtccggggacgctgacctggtgtcctacgggcggctgttcatcgctaatcccgacctggtggagcggtttcggcgcgacgccccgctgaacaaatacgtgcgcaagacgttctacacgccggaccccgtcgtcggttacacggactacacattcctcggccagcctaaggcacgcatgtgatttgattattagtgcgttgccgtaattataagaggcggagtattgtttgtatgttgtgacttgagaaaacaagcaaacatctgggtaatgccgcgattgttacgtattcct

SEQ ID NO: 34278 - protein, 431 aa, Zea mays subsp. mays
  peptide (1)..(431): Ceres Seq. ID no. 12411496
  misc_feature (53)..(402): Pfam Name: Pfam Description:  NADH:flavin oxidoreductase / NADH oxidase family
  misc_feature (42)..(424): NCBI GI NO: 12056507 NR Description: 12-oxophytodienoate reductase 3
  misc_feature (46)..(431): NCBI GI NO: 6707797 NR Description: 12-oxo-phytodienoate reductase
  misc_feature (46)..(431): NCBI GI NO: 5059115 NR Description: OPDA-reductase homolog [Arabidopsis thaliana]
  misc_feature (46)..(431): NCBI GI NO: 10242314 NR Description: 12-oxo-phytodienoate reductase
  misc_feature (46)..(431): NCBI GI NO: 7688991 NR Description: 12-oxo-phytodienoate reductase
  misc_feature (46)..(431): NCBI GI NO: 15225045 NR Description: 12-oxophytodienoate reductase
  misc_feature (45)..(424): NCBI GI NO: 40645459 NR Description: LEDI-5c protein [Lithospermum erythrorhizon]
  misc_feature (53)..(424): NCBI GI NO: 23495288 NR Description: 12-oxophytodienoic acid reductase [Oryza sativa]
  misc_feature (43)..(424): NCBI GI NO: 7449901 NR Description: probable 12-oxophytodienoate reductase (EC1
  misc_feature (43)..(424): NCBI GI NO: 14277800 NR Description: Chain A
VLFSPSSYSWLLATLCFRSAFSAPHFPLQLQSMASTDRSTPAEDEQQQKRPSLFSPYQMPRFRLAHRVVLAPMTRCRAPDAVPGPALAEYYAQRSTDGGLLISEGTIISPSGPGFPRVPGIYNQEQTDAWRKVVDAVHAKGAIFFCQLWHVGRASHQVYQPGAAAPISSTDKPISSRWRILMPDGSYGKYPTPRRLATSEIPEIVEQYRQAAVNAIKAGFDGIEIHGAHGYLIDQFLKGGINDRTDEYGGSLSNRCRFLLEVTRAVVSAIGADRVAVRVSPAIDHLDAYDSNPLQLGLAVVERLNALQQEAGRLAYLHVTQPRYTAYGQTESGQHGSAEEESRLMRAVRGAYRGTFMCSGGYTRELGVEAIESGDADLVSYGRLFIANPDLVERFRRDAPLNKYVRKTFYTPDPVVGYTDYTFLGQPKARM

SEQ ID NO: 34279 - protein, 399 aa, Zea mays subsp. mays
  peptide (1)..(399): Ceres Seq. ID no. 12411497
  misc_feature (21)..(370): Pfam Name: Pfam Description:  NADH:flavin oxidoreductase / NADH oxidase family
  misc_feature (10)..(392): NCBI GI NO: 12056507 NR Description: 12-oxophytodienoate reductase 3
  misc_feature (14)..(399): NCBI GI NO: 6707797 NR Description: 12-oxo-phytodienoate reductase
  misc_feature (14)..(399): NCBI GI NO: 5059115 NR Description: OPDA-reductase homolog [Arabidopsis thaliana]
  misc_feature (14)..(399): NCBI GI NO: 10242314 NR Description: 12-oxo-phytodienoate reductase
  misc_feature (14)..(399): NCBI GI NO: 7688991 NR Description: 12-oxo-phytodienoate reductase
  misc_feature (14)..(399): NCBI GI NO: 15225045 NR Description: 12-oxophytodienoate reductase
  misc_feature (13)..(392): NCBI GI NO: 40645459 NR Description: LEDI-5c protein [Lithospermum erythrorhizon]
  misc_feature (21)..(392): NCBI GI NO: 23495288 NR Description: 12-oxophytodienoic acid reductase [Oryza sativa]
  misc_feature (11)..(392): NCBI GI NO: 7449901 NR Description: probable 12-oxophytodienoate reductase (EC1
  misc_feature (11)..(392): NCBI GI NO: 14277800 NR Description: Chain A
MASTDRSTPAEDEQQQKRPSLFSPYQMPRFRLAHRVVLAPMTRCRAPDAVPGPALAEYYAQRSTDGGLLISEGTIISPSGPGFPRVPGIYNQEQTDAWRKVVDAVHAKGAIFFCQLWHVGRASHQVYQPGAAAPISSTDKPISSRWRILMPDGSYGKYPTPRRLATSEIPEIVEQYRQAAVNAIKAGFDGIEIHGAHGYLIDQFLKGGINDRTDEYGGSLSNRCRFLLEVTRAVVSAIGADRVAVRVSPAIDHLDAYDSNPLQLGLAVVERLNALQQEAGRLAYLHVTQPRYTAYGQTESGQHGSAEEESRLMRAVRGAYRGTFMCSGGYTRELGVEAIESGDADLVSYGRLFIANPDLVERFRRDAPLNKYVRKTFYTPDPVVGYTDYTFLGQPKARM

SEQ ID NO: 34280 - protein, 373 aa, Zea mays subsp. mays
  peptide (1)..(373): Ceres Seq. ID no. 12411498
  misc_feature (1)..(344): Pfam Name: Pfam Description:  NADH:flavin oxidoreductase / NADH oxidase family
  misc_feature (1)..(366): NCBI GI NO: 12056507 NR Description: 12-oxophytodienoate reductase 3
  misc_feature (1)..(373): NCBI GI NO: 6707797 NR Description: 12-oxo-phytodienoate reductase
  misc_feature (1)..(373): NCBI GI NO: 5059115 NR Description: OPDA-reductase homolog [Arabidopsis thaliana]
  misc_feature (1)..(373): NCBI GI NO: 10242314 NR Description: 12-oxo-phytodienoate reductase
  misc_feature (1)..(373): NCBI GI NO: 7688991 NR Description: 12-oxo-phytodienoate reductase
  misc_feature (1)..(373): NCBI GI NO: 15225045 NR Description: 12-oxophytodienoate reductase
  misc_feature (1)..(366): NCBI GI NO: 40645459 NR Description: LEDI-5c protein [Lithospermum erythrorhizon]
  misc_feature (1)..(366): NCBI GI NO: 23495288 NR Description: 12-oxophytodienoic acid reductase [Oryza sativa]
  misc_feature (1)..(366): NCBI GI NO: 7449901 NR Description: probable 12-oxophytodienoate reductase (EC1
  misc_feature (1)..(366): NCBI GI NO: 14277800 NR Description: Chain A
MPRFRLAHRVVLAPMTRCRAPDAVPGPALAEYYAQRSTDGGLLISEGTIISPSGPGFPRVPGIYNQEQTDAWRKVVDAVHAKGAIFFCQLWHVGRASHQVYQPGAAAPISSTDKPISSRWRILMPDGSYGKYPTPRRLATSEIPEIVEQYRQAAVNAIKAGFDGIEIHGAHGYLIDQFLKGGINDRTDEYGGSLSNRCRFLLEVTRAVVSAIGADRVAVRVSPAIDHLDAYDSNPLQLGLAVVERLNALQQEAGRLAYLHVTQPRYTAYGQTESGQHGSAEEESRLMRAVRGAYRGTFMCSGGYTRELGVEAIESGDADLVSYGRLFIANPDLVERFRRDAPLNKYVRKTFYTPDPVVGYTDYTFLGQPKARM

SEQ ID NO: 34281 - DNA, 1161 bp, Zea mays subsp. mays
  misc_feature (1)..(1161): Ceres Seq. ID no. 12348889
actgctccctctggcttcccgcctcctcttcggctccttcgcgtcccgacgccccctcatggccaccgccgccgccaccgtagcagcagcagtctcctccccggctgccccacgcgccggggccgccgccgcctcccgccgggggttcgtcacgtttggtggaggcgccgcccgcttctctcccacgctgcggtccggccgtgggttctctggtgtgcaaacccatgttgccgctgttgaacaagcaattgtaaaagatgctaccaagctggaagctccagttgttgttgttacaggtgcatctagagggattggtaaggcaactgctctagcccttggaaaagcaggatgcaaggttctggtaaactatgccctgtcctcgaaagaggctgaagaggtctccaaagagattgaagcatctggtggtgaggctatcaccttcggaggagatgtttcaaaagaagctgatgtagagtctatgatgaaagcagctctagataaatggggaacaatagatgtgctggtaaataatgcagggattacacgagacgcattgttgatgaggatgaagaaatctcagtggcaagacgtaattgatctgaatcttactggtgtcttcctttgtacacaggctgcaacaaaagtaatgatgaaaaagagaaagggaaaaattatcaacattgcatctgtagttggtcttactggcaatgttggccaagctaattatagcgcagccaaggctggagtgattggtttcacaaaaacagttgccagggagtatgcaagcagaaatatcaatgtgaatgctattgcaccagggttcattgcatctgatatgactgccgaacttggagaagagcttgagaagaaaatcttgtcaaccattccgttagggagatatggccaaccagaggaagttgcagggttggtcgagttcctggcccttaaccccgcagctagctatatgactggacaggtgcttacaattgacggagggatggtaatgtaagatttgagttagcttgatgcacttctacttttgctgagcatttaatgttgaacacccttgttgtgcacgggcgattttggacaacaaattagtgttgtctctttctttgtaatactctctggtaataaatctagcatgtggaatggaagttg

SEQ ID NO: 34282 - protein, 335 aa, Zea mays subsp. mays
  peptide (1)..(335): Ceres Seq. ID no. 12348890
  misc_feature (20)..(335): NCBI GI NO: 38346116 NR Description: OSJNBb0006N15.11
  misc_feature (20)..(335): NCBI GI NO: 119791 NR Description: 3-oxoacyl-
  misc_feature (72)..(335): NCBI GI NO: 14422251 NR Description: 3-oxyacyl-
  misc_feature (72)..(335): NCBI GI NO: 14422263 NR Description: beta-oxyacyl-
  misc_feature (73)..(335): NCBI GI NO: 14422249 NR Description: 3-oxyacyl-
  misc_feature (73)..(335): NCBI GI NO: 14422247 NR Description: 3-oxyacyl-
  misc_feature (92)..(335): NCBI GI NO: 13096234 NR Description: Chain A
  misc_feature (24)..(335): NCBI GI NO: 18395461 NR Description: putative 3-oxoacyl
  misc_feature (89)..(335): NCBI GI NO: 14422253 NR Description: 3-oxyacyl-
  misc_feature (24)..(335): NCBI GI NO: 99753 NR Description: 3-oxoacyl-
LLPLASRLLFGSFASRRPLMATAAATVAAAVSSPAAPRAGAAAASRRGFVTFGGGAARFSPTLRSGRGFSGVQTHVAAVEQAIVKDATKLEAPVVVVTGASRGIGKATALALGKAGCKVLVNYALSSKEAEEVSKEIEASGGEAITFGGDVSKEADVESMMKAALDKWGTIDVLVNNAGITRDALLMRMKKSQWQDVIDLNLTGVFLCTQAATKVMMKKRKGKIINIASVVGLTGNVGQANYSAAKAGVIGFTKTVAREYASRNINVNAIAPGFIASDMTAELGEELEKKILSTIPLGRYGQPEEVAGLVEFLALNPAASYMTGQVLTIDGGMVM

SEQ ID NO: 34283 - protein, 316 aa, Zea mays subsp. mays
  peptide (1)..(316): Ceres Seq. ID no. 12348891
  misc_feature (1)..(316): NCBI GI NO: 38346116 NR Description: OSJNBb0006N15.11
  misc_feature (1)..(316): NCBI GI NO: 119791 NR Description: 3-oxoacyl-
  misc_feature (53)..(316): NCBI GI NO: 14422251 NR Description: 3-oxyacyl-
  misc_feature (53)..(316): NCBI GI NO: 14422263 NR Description: beta-oxyacyl-
  misc_feature (54)..(316): NCBI GI NO: 14422249 NR Description: 3-oxyacyl-
  misc_feature (54)..(316): NCBI GI NO: 14422247 NR Description: 3-oxyacyl-
  misc_feature (73)..(316): NCBI GI NO: 13096234 NR Description: Chain A
  misc_feature (5)..(316): NCBI GI NO: 18395461 NR Description: putative 3-oxoacyl
  misc_feature (70)..(316): NCBI GI NO: 14422253 NR Description: 3-oxyacyl-
  misc_feature (5)..(316): NCBI GI NO: 99753 NR Description: 3-oxoacyl-
MATAAATVAAAVSSPAAPRAGAAAASRRGFVTFGGGAARFSPTLRSGRGFSGVQTHVAAVEQAIVKDATKLEAPVVVVTGASRGIGKATALALGKAGCKVLVNYALSSKEAEEVSKEIEASGGEAITFGGDVSKEADVESMMKAALDKWGTIDVLVNNAGITRDALLMRMKKSQWQDVIDLNLTGVFLCTQAATKVMMKKRKGKIINIASVVGLTGNVGQANYSAAKAGVIGFTKTVAREYASRNINVNAIAPGFIASDMTAELGEELEKKILSTIPLGRYGQPEEVAGLVEFLALNPAASYMTGQVLTIDGGMVM

SEQ ID NO: 34284 - protein, 176 aa, Zea mays subsp. mays
  peptide (1)..(176): Ceres Seq. ID no. 12348892
  misc_feature (1)..(176): NCBI GI NO: 38346116 NR Description: OSJNBb0006N15.11
  misc_feature (1)..(176): NCBI GI NO: 119791 NR Description: 3-oxoacyl-
  misc_feature (1)..(176): NCBI GI NO: 14422251 NR Description: 3-oxyacyl-
  misc_feature (1)..(176): NCBI GI NO: 14422263 NR Description: beta-oxyacyl-
  misc_feature (1)..(176): NCBI GI NO: 14422249 NR Description: 3-oxyacyl-
  misc_feature (1)..(176): NCBI GI NO: 14422247 NR Description: 3-oxyacyl-
  misc_feature (1)..(176): NCBI GI NO: 13096234 NR Description: Chain A
  misc_feature (1)..(176): NCBI GI NO: 18395461 NR Description: putative 3-oxoacyl
  misc_feature (1)..(176): NCBI GI NO: 14422253 NR Description: 3-oxyacyl-
  misc_feature (1)..(176): NCBI GI NO: 99753 NR Description: 3-oxoacyl-
MMKAALDKWGTIDVLVNNAGITRDALLMRMKKSQWQDVIDLNLTGVFLCTQAATKVMMKKRKGKIINIASVVGLTGNVGQANYSAAKAGVIGFTKTVAREYASRNINVNAIAPGFIASDMTAELGEELEKKILSTIPLGRYGQPEEVAGLVEFLALNPAASYMTGQVLTIDGGMVM

SEQ ID NO: 34285 - DNA, 1239 bp, Zea mays subsp. mays
  misc_feature (1)..(1239): Ceres Seq. ID no. 12364583
gcacgagaccattacctagaacatcctaatcgaaaagtcctcctcgttgttttgttccgtttccccccttgcctcgctcgtcgcgtacagctggacgcctcctttctcgctgcgggctgttgccttgcctccgtcccctcccctcgtcgcctccgactccacctcccctccccggtctctgagagagggagcccggacccggagaccgccagcaagcgcgaggcagaggaggagcatggcggccccgccgtcgaggtcgcggggcgactgaccacctgattaagctcctgctcatcggcgacagcggagttggaaagagttgcttgctgctgcggttctctgatgacacattcacgacaagttttatcaccaccatcggcattgatttcaaggttaggacggtcgagctcgatggaaagcgtgtaaaattacaaatttgggacactgctggtcaagaacgtttccgaacaattaccactgcttactacagaggagctatgggcattctgcttgtatacgatgtcacagacgaatcgtccttcgataacattaggaactggattcgcaacatagagcagcacgcatctgataatgtcaacaagatcttggtgggcaacaaggtcgatatggatgcgaagcgggtggtctccacagctcaaggtcagaagctcgcagatgaatacgggatcaagtttttcgagacgagtgcgaaaacgaaccgaaatgtggagcaggtattcttcgccatggcaagggacgtgaagcaaaggctcaccgagaccgttgccgctgcggctgagcccccgaccattcagattagcaggccagaccccgaccaggctgacgcagcctcctcgcggcggtggtcgtcgtcctgctgtaacacctgatctggcgactgccgtggcgaaatcaagcagcgtgaatcttgatgcgcgtgactggactgctaggttactgattgtcgcctgtgttcactttcattccggtgccgtgccaagccaagccgggatgtataaatttcgctgtctagtattcacctcaatcaatgtgttaactcccgctgcttcgcacgtcacgtcgtttgtttgttgagagcaaaacgtgtgtggggcagataaaaaaaaaagccctggtgggtttgctcctgtcacgtactaaacagaacgtgtctgatgattgtgtcgacggtggaacttggaagcgtgcttgtctcactattgttccgtgttttcgtcc

SEQ ID NO: 34286 - protein, 130 aa, Zea mays subsp. mays
  peptide (1)..(130): Ceres Seq. ID no. 12364584
  misc_feature (1)..(90): Pfam Name: Pfam Description:  Ras family
  misc_feature (1)..(130): NCBI GI NO: 38175435 NR Description: putative ras-related protein
  misc_feature (1)..(130): NCBI GI NO: 18447917 NR Description: ras-related protein RAB8-3 [Nicotiana tabacum]
  misc_feature (1)..(130): NCBI GI NO: 15231322 NR Description: GTP-binding protein ara-3; protein id: At3g46060
  misc_feature (1)..(130): NCBI GI NO: 1370190 NR Description: RAB8A [Lotus japonicus]
  misc_feature (1)..(130): NCBI GI NO: 18447921 NR Description: ras-related protein RAB8-5 [Nicotiana tabacum]
  misc_feature (1)..(130): NCBI GI NO: 18447913 NR Description: ras-related protein RAB8-1 [Nicotiana tabacum]
  misc_feature (1)..(130): NCBI GI NO: 5669640 NR Description: ethylene-responsive small GTP-binding protein
  misc_feature (1)..(130): NCBI GI NO: 1362066 NR Description: GTP-binding protein GTP6 - garden pea
  misc_feature (1)..(129): NCBI GI NO: 15232784 NR Description: Ras family GTP-binding protein, putative
  misc_feature (1)..(130): NCBI GI NO: 33146687 NR Description: putative ethylene-responsive small GTP-bindingprotein
MGILLVYDVTDESSFDNIRNWIRNIEQHASDNVNKILVGNKVDMDAKRVVSTAQGQKLADEYGIKFFETSAKTNRNVEQVFFAMARDVKQRLTETVAAAAEPPTIQISRPDPDQADAASSRRWSSSCCNT

SEQ ID NO: 34287 - protein, 92 aa, Zea mays subsp. mays
  peptide (1)..(92): Ceres Seq. ID no. 12364585
ARDHYLEHPNRKVLLVVLFRFPPCLARRVQLDASFLAAGCCLASVPSPRRLRLHLPSPVSERGSPDPETASKREAEEEHGGPAVEVAGRLTT

SEQ ID NO: 34288 - protein, 87 aa, Zea mays subsp. mays
  peptide (1)..(87): Ceres Seq. ID no. 12364586
  misc_feature (1)..(87): NCBI GI NO: 38175435 NR Description: putative ras-related protein
  misc_feature (1)..(87): NCBI GI NO: 18447917 NR Description: ras-related protein RAB8-3 [Nicotiana tabacum]
  misc_feature (1)..(87): NCBI GI NO: 15231322 NR Description: GTP-binding protein ara-3; protein id: At3g46060
  misc_feature (1)..(87): NCBI GI NO: 1370190 NR Description: RAB8A [Lotus japonicus]
  misc_feature (1)..(87): NCBI GI NO: 18447921 NR Description: ras-related protein RAB8-5 [Nicotiana tabacum]
  misc_feature (1)..(87): NCBI GI NO: 18447913 NR Description: ras-related protein RAB8-1 [Nicotiana tabacum]
  misc_feature (1)..(87): NCBI GI NO: 5669640 NR Description: ethylene-responsive small GTP-binding protein
  misc_feature (1)..(87): NCBI GI NO: 1362066 NR Description: GTP-binding protein GTP6 - garden pea
  misc_feature (1)..(86): NCBI GI NO: 15232784 NR Description: Ras family GTP-binding protein, putative
  misc_feature (1)..(87): NCBI GI NO: 33146687 NR Description: putative ethylene-responsive small GTP-bindingprotein
MDAKRVVSTAQGQKLADEYGIKFFETSAKTNRNVEQVFFAMARDVKQRLTETVAAAAEPPTIQISRPDPDQADAASSRRWSSSCCNT

SEQ ID NO: 34289 - DNA, 1854 bp, Zea mays subsp. mays
  misc_feature (1)..(1854): Ceres Seq. ID no. 12368044
  misc_feature (1845)..(1845): n is a, c, t, g, unknown, or other
ccattacctagaacatcctaatcgaaaacatcctaatcgaaaactaacctcgcgccggagtcgtcgcccacgatggcctaccgatccgcagtgctcttgcccgccctcctactggccgtcgccgtcgtcgtggcctccgccgccgccggggacgggaggtggcgggaggagcaggcgcgggaccgggtgccgcgggtgccggggcaggccttcaacaccagcttcgcgcagtacgccgggtacgtgaccgtcagcgagcagcgcggcgctgcgctcttctactggttctttgaggccgagaaggacccggggtccaagcccctcgtgctctggctcaacggagggcctggatgctcgtccattgcttttggacttggagaagaagtaggacctttccatgttaacgcagatgggaagggggtccatgtcaatccttattcttggaacaaagttgcaaatttactgttccttgattcacctgttggtgttggttactcatattcaaacacctctgatgatgctttaaaaaatggggatgcaagaactgccacggattcattggcattcttactgaagtggcttgaacgctttcctcaatacaaggaacgcgaattttatttgacaggggagagttatgctggtcactatgttcctcaactggctcaagccataaaaaggcaccatgaggctactggtgacaaatcaattaatctaaagggctatatggtagggaatgctctcactgatgatttccatgaccactatggaatatttcaattcatgtggactactggcctgatctctgatcaaacatacaagctgctgaatgttttctgtgactacgagtccttcgtgcattcgtctccacagtgtgataagattatggatattgctagcactgaagctggaaacattgattcatatagcatctttcacacctacatgtcatgcatcttttgcctcttcaaagaacaaagtgatgaaaaggctacattctgctggaaaaatgggagaacagtatgatccatgcactgagaagcattcaactgtatacttcaatctagctgaggttcagaaggcacttcatgttaatacagtcattggaaaatcaaaatgggagacttgcagtgaagctgttaatactcattggggggattgcgaaagatctgtgctgcatatctatcatgaacttatacagtatggcctccgtatatgggtgttcagtggagatacagatgcagtgattccagtgacttcaactagatacagcatcgatgctctcaagcttccaacaataactccatggcatgcttggtacgacgatgacggtgaggtcggtggatggacccaagggtacaggggactcaattttgtgaccgtgaggggagcaggtcacgaagtccctcttcatcgacccaaacaggccctcacgctaatcaaatcgttcttgactgggagcccaatgcctgtgcaatccagcacacacagcaacatgtaatccgtgttgttgcaactgattcacgagatgaatgaacatcccgaagcacccaagtcagccagttgtccaacccggcttgttctgcaacttgctgtagttgtttatgtatcagagctaccggtgccggttaccgcagcagccgtgcttttgtcggccctgttggtgcttgttgcagtaccagttatcccctaaggcaggggacagaaactgcggaatagtttttgtttgcattgacgtgacagcactgtaatcttaaacatcgtaccatagtcctttctatgacaaaggtgtggtttctgatgtctgcaataaatgatctggacttggggggtaaaaatgaaatactnctgtgttgc

SEQ ID NO: 34290 - protein, 316 aa, Zea mays subsp. mays
  peptide (1)..(316): Ceres Seq. ID no. 12368045
  misc_feature (4)..(287): NCBI GI NO: 18417667 NR Description: SERINE CARBOXYPEPTIDASE II - like protein
  misc_feature (4)..(191): NCBI GI NO: 25289792 NR Description: SERINE CARBOXYPEPTIDASE II-like protein
  misc_feature (196)..(312): NCBI GI NO: 25289792 NR Description: SERINE CARBOXYPEPTIDASE II-like protein
  misc_feature (5)..(287): NCBI GI NO: 34895992 NR Description: putative carboxypeptidase D
  misc_feature (1)..(287): NCBI GI NO: 34908012 NR Description: putative carboxypeptidase D
  misc_feature (1)..(287): NCBI GI NO: 7428204 NR Description: carboxypeptidase D (EC 3
  misc_feature (1)..(287): NCBI GI NO: 20455471 NR Description: Serine carboxypeptidase II precursor
  misc_feature (35)..(287): NCBI GI NO: 7428205 NR Description: carboxypeptidase D (EC 3.4.16.6) - wheat
  misc_feature (31)..(287): NCBI GI NO: 15227493 NR Description: putative serine carboxypeptidase II
  misc_feature (39)..(287): NCBI GI NO: 2493494 NR Description: Serine carboxypeptidase II-2 precursor (CP-MII.2)
MAYRSAVLLPALLLAVAVVVASAAAGDGRWREEQARDRVPRVPGQAFNTSFAQYAGYVTVSEQRGAALFYWFFEAEKDPGSKPLVLWLNGGPGCSSIAFGLGEEVGPFHVNADGKGVHVNPYSWNKVANLLFLDSPVGVGYSYSNTSDDALKNGDARTATDSLAFLLKWLERFPQYKEREFYLTGESYAGHYVPQLAQAIKRHHEATGDKSINLKGYMVGNALTDDFHDHYGIFQFMWTTGLISDQTYKLLNVFCDYESFVHSSPQCDKIMDIASTEAGNIDSYSIFHTYMSCIFCLFKEQSDEKATFCWKNGRTV

SEQ ID NO: 34291 - protein, 223 aa, Zea mays subsp. mays
  peptide (1)..(223): Ceres Seq. ID no. 12368046
  misc_feature (36)..(222): NCBI GI NO: 18417667 NR Description: SERINE CARBOXYPEPTIDASE II - like protein
  misc_feature (63)..(222): NCBI GI NO: 25289792 NR Description: SERINE CARBOXYPEPTIDASE II-like protein
  misc_feature (36)..(223): NCBI GI NO: 34895992 NR Description: putative carboxypeptidase D
  misc_feature (61)..(216): NCBI GI NO: 34908012 NR Description: putative carboxypeptidase D
  misc_feature (36)..(214): NCBI GI NO: 7428204 NR Description: carboxypeptidase D (EC 3
  misc_feature (36)..(214): NCBI GI NO: 20455471 NR Description: Serine carboxypeptidase II precursor
  misc_feature (65)..(217): NCBI GI NO: 7428205 NR Description: carboxypeptidase D (EC 3.4.16.6) - wheat
  misc_feature (36)..(215): NCBI GI NO: 15227493 NR Description: putative serine carboxypeptidase II
  misc_feature (36)..(214): NCBI GI NO: 13877871 NR Description: putative serine carboxypeptidase II
  misc_feature (38)..(210): NCBI GI NO: 34329345 NR Description: putative serine carboxypeptidase
MFSVTTSPSCIRLHSVIRLWILLALKLETLIHIASFTPTCHASFASSKNKVMKRLHSAGKMGEQYDPCTEKHSTVYFNLAEVQKALHVNTVIGKSKWETCSEAVNTHWGDCERSVLHIYHELIQYGLRIWVFSGDTDAVIPVTSTRYSIDALKLPTITPWHAWYDDDGEVGGWTQGYRGLNFVTVRGAGHEVPLHRPKQALTLIKSFLTGSPMPVQSSTHSNM

SEQ ID NO: 34292 - protein, 172 aa, Zea mays subsp. mays
  peptide (1)..(172): Ceres Seq. ID no. 12368047
  misc_feature (1)..(171): NCBI GI NO: 18417667 NR Description: SERINE CARBOXYPEPTIDASE II - like protein
  misc_feature (12)..(171): NCBI GI NO: 25289792 NR Description: SERINE CARBOXYPEPTIDASE II-like protein
  misc_feature (1)..(172): NCBI GI NO: 34895992 NR Description: putative carboxypeptidase D
  misc_feature (10)..(165): NCBI GI NO: 34908012 NR Description: putative carboxypeptidase D
  misc_feature (1)..(163): NCBI GI NO: 7428204 NR Description: carboxypeptidase D (EC 3
  misc_feature (1)..(163): NCBI GI NO: 20455471 NR Description: Serine carboxypeptidase II precursor
  misc_feature (14)..(166): NCBI GI NO: 7428205 NR Description: carboxypeptidase D (EC 3.4.16.6) - wheat
  misc_feature (1)..(164): NCBI GI NO: 15227493 NR Description: putative serine carboxypeptidase II
  misc_feature (1)..(163): NCBI GI NO: 13877871 NR Description: putative serine carboxypeptidase II
  misc_feature (1)..(159): NCBI GI NO: 34329345 NR Description: putative serine carboxypeptidase
MKRLHSAGKMGEQYDPCTEKHSTVYFNLAEVQKALHVNTVIGKSKWETCSEAVNTHWGDCERSVLHIYHELIQYGLRIWVFSGDTDAVIPVTSTRYSIDALKLPTITPWHAWYDDDGEVGGWTQGYRGLNFVTVRGAGHEVPLHRPKQALTLIKSFLTGSPMPVQSSTHSNM

SEQ ID NO: 34293 - DNA, 1486 bp, Zea mays subsp. mays
  misc_feature (1)..(1486): Ceres Seq. ID no. 13573960
agccgtggcgaaagcacacacggatcaatcacactcactcgcggccattgtcctgcccgtgcgtgctctgccttttcaggcgatcgaccaaccaacttctcgtcactgccatggctctgctctccgacctcatcaacctcgacctctcgggccgcaccgggaagatcatcgccgagtacatctgggttggcggttccgggatggacgtcaggagcaaagccaggacgctgtccggacctgttgatgaccccagcaagcttccgaagtggaacttcgacggctccagcaccggccaagctccgggcgacgacagcgaagtcatcctttgccctcgggccatcttcagggacccgttcaggaaggggcagaacatactggtcatgtgcgactgctacgagccgaacggggagccgatcccgagcaacaagcggcatggggccgcgaagatctttagccaccctgacgtcaaggctgaggaaccatggttcgggattgagcaggagtacacccttctccagaaggacaccaagtggcctctcggttggccgctggcgtaccctggccctcagggaccttactactgcgccgccggagcggacaagtcctacgggcgggacatcgtggactgcgcatacaaggcctgcctctacgccggcatcgacatcagtggcatcaacggggaggtcatgccggggcagtgggagttccaggtggcccctgccgtcggcgtctcggccggcgaccagctctgggtggctcgctacattcttgagaggatcaccgagatcgccggcgtggttgtctccttcgaccccaagccaattccgggggactggaatggcgctggtgcacacaccaactacagcaccaagtcgatgaggagcgacggcgggtacgaggtgatcaagaaggcgatcggcaagctgggcctccggcaccgggagcacatcgccgcgtacggggacggcaacgagcgcccgctcaccggccgccacgagaccgccgacatcaacaccttcgtctggggcgtgccgaaccgcggggcgtcggtgcgggtgggccgagacaccgagaaggaaggcaaaggctacttcgaggaccggaggccggcgtccaacatggacccgtacgtggtgacctgcctgatcgcggagacaaccatgctgtgggagcccagccactccaacggcgacggcaagggcgccgcggctccttgatttgattctgcggagactgagctctgtgtgtgagccggcctgcgtagatggcaaatgggactgaccctgtcagaaacttgagatgaccataataatagctgcagtgtgctcgttctggggttggataagacccaagaactttttttagctttcttcgaacaagtaatcatggtgctgaaccaacacagatgtgctactaaacacatctaacgagtcaaacgccgaagcatatcccaacgcacaaccccggttaatcttgttacccatgg

SEQ ID NO: 34294 - protein, 404 aa, Zea mays subsp. mays
  peptide (1)..(404): Ceres Seq. ID no. 13573961
  misc_feature (139)..(390): Pfam Name: Pfam Description:  Glutamine synthetase, catalytic domain
  misc_feature (37)..(404): NCBI GI NO: 585202 NR Description: GLUTAMINE SYNTHETASE ROOT ISOZYME 2
  misc_feature (38)..(399): NCBI GI NO: 13324800 NR Description: putative glutamine synthetase [Oryza sativa]
  misc_feature (37)..(391): NCBI GI NO: 2213877 NR Description: glutamine synthetase [Hevea brasiliensis]
  misc_feature (37)..(391): NCBI GI NO: 1084350 NR Description: glutamate-ammonia ligase (EC 6.3.1.2) - rape
  misc_feature (37)..(391): NCBI GI NO: 1707959 NR Description: GLUTAMINE SYNTHETASE CYTOSOLIC ISOZYME 2
  misc_feature (37)..(391): NCBI GI NO: 417060 NR Description: Glutamine synthetase nodule isozyme
  misc_feature (37)..(391): NCBI GI NO: 1076474 NR Description: Gln 1.2 protein - radish
  misc_feature (37)..(391): NCBI GI NO: 15240288 NR Description: glutamate--ammonia ligase [Arabidopsis thaliana]
  misc_feature (37)..(391): NCBI GI NO: 1934756 NR Description: cytosolic glutamine synthetase [Brassica napus]
  misc_feature (37)..(391): NCBI GI NO: 121349 NR Description: Glutamine synthetase shoot isozyme
PWRKHTRINHTHSRPLSCPCVLCLFRRSTNQLLVTAMALLSDLINLDLSGRTGKIIAEYIWVGGSGMDVRSKARTLSGPVDDPSKLPKWNFDGSSTGQAPGDDSEVILCPRAIFRDPFRKGQNILVMCDCYEPNGEPIPSNKRHGAAKIFSHPDVKAEEPWFGIEQEYTLLQKDTKWPLGWPLAYPGPQGPYYCAAGADKSYGRDIVDCAYKACLYAGIDISGINGEVMPGQWEFQVAPAVGVSAGDQLWVARYILERITEIAGVVVSFDPKPIPGDWNGAGAHTNYSTKSMRSDGGYEVIKKAIGKLGLRHREHIAAYGDGNERPLTGRHETADINTFVWGVPNRGASVRVGRDTEKEGKGYFEDRRPASNMDPYVVTCLIAETTMLWEPSHSNGDGKGAAAP

SEQ ID NO: 34295 - protein, 368 aa, Zea mays subsp. mays
  peptide (1)..(368): Ceres Seq. ID no. 13573962
  misc_feature (103)..(354): Pfam Name: Pfam Description:  Glutamine synthetase, catalytic domain
  misc_feature (1)..(368): NCBI GI NO: 585202 NR Description: GLUTAMINE SYNTHETASE ROOT ISOZYME 2
  misc_feature (2)..(363): NCBI GI NO: 13324800 NR Description: putative glutamine synthetase [Oryza sativa]
  misc_feature (1)..(355): NCBI GI NO: 2213877 NR Description: glutamine synthetase [Hevea brasiliensis]
  misc_feature (1)..(355): NCBI GI NO: 1084350 NR Description: glutamate-ammonia ligase (EC 6.3.1.2) - rape
  misc_feature (1)..(355): NCBI GI NO: 1707959 NR Description: GLUTAMINE SYNTHETASE CYTOSOLIC ISOZYME 2
  misc_feature (1)..(355): NCBI GI NO: 417060 NR Description: Glutamine synthetase nodule isozyme
  misc_feature (1)..(355): NCBI GI NO: 1076474 NR Description: Gln 1.2 protein - radish
  misc_feature (1)..(355): NCBI GI NO: 15240288 NR Description: glutamate--ammonia ligase [Arabidopsis thaliana]
  misc_feature (1)..(355): NCBI GI NO: 1934756 NR Description: cytosolic glutamine synthetase [Brassica napus]
  misc_feature (1)..(355): NCBI GI NO: 121349 NR Description: Glutamine synthetase shoot isozyme
MALLSDLINLDLSGRTGKIIAEYIWVGGSGMDVRSKARTLSGPVDDPSKLPKWNFDGSSTGQAPGDDSEVILCPRAIFRDPFRKGQNILVMCDCYEPNGEPIPSNKRHGAAKIFSHPDVKAEEPWFGIEQEYTLLQKDTKWPLGWPLAYPGPQGPYYCAAGADKSYGRDIVDCAYKACLYAGIDISGINGEVMPGQWEFQVAPAVGVSAGDQLWVARYILERITEIAGVVVSFDPKPIPGDWNGAGAHTNYSTKSMRSDGGYEVIKKAIGKLGLRHREHIAAYGDGNERPLTGRHETADINTFVWGVPNRGASVRVGRDTEKEGKGYFEDRRPASNMDPYVVTCLIAETTMLWEPSHSNGDGKGAAAP

SEQ ID NO: 34296 - protein, 338 aa, Zea mays subsp. mays
  peptide (1)..(338): Ceres Seq. ID no. 13573963
  misc_feature (73)..(324): Pfam Name: Pfam Description:  Glutamine synthetase, catalytic domain
  misc_feature (1)..(338): NCBI GI NO: 585202 NR Description: GLUTAMINE SYNTHETASE ROOT ISOZYME 2
  misc_feature (1)..(333): NCBI GI NO: 13324800 NR Description: putative glutamine synthetase [Oryza sativa]
  misc_feature (1)..(325): NCBI GI NO: 2213877 NR Description: glutamine synthetase [Hevea brasiliensis]
  misc_feature (1)..(325): NCBI GI NO: 1084350 NR Description: glutamate-ammonia ligase (EC 6.3.1.2) - rape
  misc_feature (1)..(325): NCBI GI NO: 1707959 NR Description: GLUTAMINE SYNTHETASE CYTOSOLIC ISOZYME 2
  misc_feature (1)..(325): NCBI GI NO: 417060 NR Description: Glutamine synthetase nodule isozyme
  misc_feature (1)..(325): NCBI GI NO: 1076474 NR Description: Gln 1.2 protein - radish
  misc_feature (1)..(325): NCBI GI NO: 15240288 NR Description: glutamate--ammonia ligase [Arabidopsis thaliana]
  misc_feature (1)..(325): NCBI GI NO: 1934756 NR Description: cytosolic glutamine synthetase [Brassica napus]
  misc_feature (1)..(325): NCBI GI NO: 121349 NR Description: Glutamine synthetase shoot isozyme
MDVRSKARTLSGPVDDPSKLPKWNFDGSSTGQAPGDDSEVILCPRAIFRDPFRKGQNILVMCDCYEPNGEPIPSNKRHGAAKIFSHPDVKAEEPWFGIEQEYTLLQKDTKWPLGWPLAYPGPQGPYYCAAGADKSYGRDIVDCAYKACLYAGIDISGINGEVMPGQWEFQVAPAVGVSAGDQLWVARYILERITEIAGVVVSFDPKPIPGDWNGAGAHTNYSTKSMRSDGGYEVIKKAIGKLGLRHREHIAAYGDGNERPLTGRHETADINTFVWGVPNRGASVRVGRDTEKEGKGYFEDRRPASNMDPYVVTCLIAETTMLWEPSHSNGDGKGAAAP

SEQ ID NO: 34297 - DNA, 809 bp, Zea mays subsp. mays
  misc_feature (1)..(809): Ceres Seq. ID no. 12345167
ctctttcagggccttgaaatctcgccctcgttgcggtcgtccacatccttttctctcctcctcgccggcccaacctgattgttcttcaaccaagaggaagaaaggaaggaagggaccggaagcatcagccatgtcgaactcggcgtcgggaatggccgtctgtgatgaatgcaagctcaagttccaggagctcaaggcaaagaggagcttccgcttcatcgtgttcaagatcaacgagaacgtgcagcaggtggtggtggacaggctaggggagccaggcgagagctacgacgccttcacggcctgcttccccgccaacgagtgccgctacgccgtgttcgattttgacttcgtcactgacgagaactgccagaagagcaagatcttctttatctcttgggccccggatacatcgagggtgagaagcaagatgctgtacgcgagctccaaggaccggttcaagagggagctggatggcattcaggtggagctacaagcaaccgacccgagcgaaatgagcatggacatcgtcaagtcgcgagccctctgaaacagccccggccgctgcacctgcacgctgcaggggcgcatcggctcctgcatgcccgtgggtcgtcgaatccttgcttgtgtgttgggaacggtcttgtgttttcgtgtccttgttttcctggaagcaaaagccctgcattctgtatgagactgtatgccattttccatctttttctctccccatatctctgccctagtcccgctaccgctgtagactagaacttatttggtgtttgatctcgtggcattgtcgagcc

SEQ ID NO: 34298 - protein, 182 aa, Zea mays subsp. mays
  peptide (1)..(182): Ceres Seq. ID no. 12345168
  misc_feature (55)..(181): Pfam Name: Pfam Description:  Cofilin/tropomyosin-type actin-binding protein
  misc_feature (44)..(182): NCBI GI NO: 38345587 NR Description: OSJNBb0012E24.5
  misc_feature (44)..(181): NCBI GI NO: 231509 NR Description: Actin-depolymerizing factor (ADF)
  misc_feature (44)..(182): NCBI GI NO: 22857914 NR Description: pollen specific actin-depolymerizing factor 2
  misc_feature (44)..(180): NCBI GI NO: 15223471 NR Description: actin depolymerizing factor, putative
  misc_feature (44)..(180): NCBI GI NO: 18411410 NR Description: putative actin-depolymerizing factor
  misc_feature (51)..(182): NCBI GI NO: 15235159 NR Description: actin depolymerizing factor-like protein
  misc_feature (44)..(181): NCBI GI NO: 17366768 NR Description: Actin-depolymerizing factor 1 (ADF 1)
  misc_feature (44)..(182): NCBI GI NO: 18423381 NR Description: actin depolymerizing factor-like
  misc_feature (44)..(181): NCBI GI NO: 17366765 NR Description: Actin-depolymerizing factor 2 (ADF 2)
  misc_feature (44)..(181): NCBI GI NO: 22831338 NR Description: putative actin-depolymerizing factor 2
SFRALKSRPRCGRPHPFLSSSPAQPDCSSTKRKKGRKGPEASAMSNSASGMAVCDECKLKFQELKAKRSFRFIVFKINENVQQVVVDRLGEPGESYDAFTACFPANECRYAVFDFDFVTDENCQKSKIFFISWAPDTSRVRSKMLYASSKDRFKRELDGIQVELQATDPSEMSMDIVKSRAL

SEQ ID NO: 34299 - protein, 139 aa, Zea mays subsp. mays
  peptide (1)..(139): Ceres Seq. ID no. 12345169
  misc_feature (12)..(138): Pfam Name: Pfam Description:  Cofilin/tropomyosin-type actin-binding protein
  misc_feature (1)..(139): NCBI GI NO: 38345587 NR Description: OSJNBb0012E24.5
  misc_feature (1)..(138): NCBI GI NO: 231509 NR Description: Actin-depolymerizing factor (ADF)
  misc_feature (1)..(139): NCBI GI NO: 22857914 NR Description: pollen specific actin-depolymerizing factor 2
  misc_feature (1)..(137): NCBI GI NO: 15223471 NR Description: actin depolymerizing factor, putative
  misc_feature (1)..(137): NCBI GI NO: 18411410 NR Description: putative actin-depolymerizing factor
  misc_feature (8)..(139): NCBI GI NO: 15235159 NR Description: actin depolymerizing factor-like protein
  misc_feature (1)..(138): NCBI GI NO: 17366768 NR Description: Actin-depolymerizing factor 1 (ADF 1)
  misc_feature (1)..(139): NCBI GI NO: 18423381 NR Description: actin depolymerizing factor-like
  misc_feature (1)..(138): NCBI GI NO: 17366765 NR Description: Actin-depolymerizing factor 2 (ADF 2)
  misc_feature (1)..(138): NCBI GI NO: 22831338 NR Description: putative actin-depolymerizing factor 2
MSNSASGMAVCDECKLKFQELKAKRSFRFIVFKINENVQQVVVDRLGEPGESYDAFTACFPANECRYAVFDFDFVTDENCQKSKIFFISWAPDTSRVRSKMLYASSKDRFKRELDGIQVELQATDPSEMSMDIVKSRAL

SEQ ID NO: 34300 - protein, 132 aa, Zea mays subsp. mays
  peptide (1)..(132): Ceres Seq. ID no. 12345170
  misc_feature (5)..(131): Pfam Name: Pfam Description:  Cofilin/tropomyosin-type actin-binding protein
  misc_feature (1)..(132): NCBI GI NO: 38345587 NR Description: OSJNBb0012E24.5
  misc_feature (1)..(131): NCBI GI NO: 231509 NR Description: Actin-depolymerizing factor (ADF)
  misc_feature (1)..(132): NCBI GI NO: 22857914 NR Description: pollen specific actin-depolymerizing factor 2
  misc_feature (1)..(130): NCBI GI NO: 15223471 NR Description: actin depolymerizing factor, putative
  misc_feature (1)..(130): NCBI GI NO: 18411410 NR Description: putative actin-depolymerizing factor
  misc_feature (1)..(132): NCBI GI NO: 15235159 NR Description: actin depolymerizing factor-like protein
  misc_feature (1)..(131): NCBI GI NO: 17366768 NR Description: Actin-depolymerizing factor 1 (ADF 1)
  misc_feature (1)..(132): NCBI GI NO: 18423381 NR Description: actin depolymerizing factor-like
  misc_feature (1)..(131): NCBI GI NO: 17366765 NR Description: Actin-depolymerizing factor 2 (ADF 2)
  misc_feature (1)..(131): NCBI GI NO: 22831338 NR Description: putative actin-depolymerizing factor 2
MAVCDECKLKFQELKAKRSFRFIVFKINENVQQVVVDRLGEPGESYDAFTACFPANECRYAVFDFDFVTDENCQKSKIFFISWAPDTSRVRSKMLYASSKDRFKRELDGIQVELQATDPSEMSMDIVKSRAL

SEQ ID NO: 34301 - DNA, 1057 bp, Zea mays subsp. mays
  misc_feature (1)..(1057): Ceres Seq. ID no. 12350456
accaccactttctcactgaccactgtgccgcggcatgctcaccggacggacacaaggtcgacgaccactaagcatagagaacgacgatggccgcgtcggcgctgcagcagaccatcagcttcctcgggcaggccctggtctcccgccccgccggcgtcgatgccggcggccgcatcaccatgcgccgcaccgtcaagagcgctccccagagcatctggtacggccctgaccgccccaagtaccttgggccgttctccgagcagatgccgtcatacctgacgggcgagttccccggcgactacgggtgggacaccgcggggctctccgcggaccccaagacgttcgcgcgcaaccgggagctggaggtgatccactcccggtgggcgatgctgggcgcgctggggtgcgtgttcccagaggtcctggcgaagaacggcgtcaagttcggcgaggccgtgtggttcaaggccggcgcagatcttctcggagggcgggctggactacctggggaacccgaacctggtgcacgcgcagagcatcctggcccatctgggcgtgctaggtggtgctcatgggcttcgtcgagggctttggcggcggcccgctcgaggaagggctcgacaaggtgtaccccgacggcgccttcgacccgctgggcctcgtcgacgactcggacaccgccgccgagctcaaggtaaaggagctcaagaacggccacctcgccttgttctccatgttcgggttctttgtgcaggccatcgtcaccggcaagggccccatcgagaacctcttcgaccacgtcgccgaccccgtcgccaacaacgcatgggcctacgccactaacttcgtccccggcaactaactgatgatcgatccgtccgtccgttcgtcgagcgagccgtgtggtggtgttccttgtactctacttgttgaagtcgtaggcgtgtagtagttgcacgtgtcggtgtacgatgatgatcgatctgtgccgaattttttgtattttagccatttcttgggaaaaaatcacatttagaccctagaaaattttaatgtc

SEQ ID NO: 34302 - protein, 203 aa, Zea mays subsp. mays
  peptide (1)..(203): Ceres Seq. ID no. 12350457
  misc_feature (59)..(143): Pfam Name: Pfam Description:  Chlorophyll A-B binding protein
  misc_feature (1)..(143): NCBI GI NO: 480616 NR Description: chlorophyll a/b binding protein - prince's feather
  misc_feature (1)..(143): NCBI GI NO: 29123378 NR Description: chlorophyll a/b binding protein
  misc_feature (1)..(143): NCBI GI NO: 115802 NR Description: Chlorophyll A-B binding protein 36
  misc_feature (3)..(143): NCBI GI NO: 99492 NR Description: chlorophyll a/b-binding protein
  misc_feature (1)..(143): NCBI GI NO: 115770 NR Description: Chlorophyll A-B binding protein of LHCII type I
  misc_feature (1)..(143): NCBI GI NO: 3126854 NR Description: chlorophyll a/b binding protein [Oryza sativa]
  misc_feature (3)..(143): NCBI GI NO: 115775 NR Description: Chlorophyll A-B binding protein type I
  misc_feature (1)..(143): NCBI GI NO: 115796 NR Description: Chlorophyll A-B binding protein
  misc_feature (1)..(143): NCBI GI NO: 320617 NR Description: chlorophyll a/b-binding protein II precursor
  misc_feature (1)..(143): NCBI GI NO: 1345698 NR Description: Chlorophyll A-B binding protein 151
MAASALQQTISFLGQALVSRPAGVDAGGRITMRRTVKSAPQSIWYGPDRPKYLGPFSEQMPSYLTGEFPGDYGWDTAGLSADPKTFARNRELEVIHSRWAMLGALGCVFPEVLAKNGVKFGEAVWFKAGADLLGGRAGLPGEPEPGARAEHPGPSGRARWCSWASSRALAAARSRKGSTRCTPTAPSTRWASSTTRTPPPSSR

SEQ ID NO: 34303 - protein, 172 aa, Zea mays subsp. mays
  peptide (1)..(172): Ceres Seq. ID no. 12350458
  misc_feature (28)..(112): Pfam Name: Pfam Description:  Chlorophyll A-B binding protein
  misc_feature (1)..(112): NCBI GI NO: 480616 NR Description: chlorophyll a/b binding protein - prince's feather
  misc_feature (1)..(112): NCBI GI NO: 29123378 NR Description: chlorophyll a/b binding protein
  misc_feature (1)..(112): NCBI GI NO: 115802 NR Description: Chlorophyll A-B binding protein 36
  misc_feature (1)..(112): NCBI GI NO: 99492 NR Description: chlorophyll a/b-binding protein
  misc_feature (1)..(112): NCBI GI NO: 115770 NR Description: Chlorophyll A-B binding protein of LHCII type I
  misc_feature (1)..(112): NCBI GI NO: 3126854 NR Description: chlorophyll a/b binding protein [Oryza sativa]
  misc_feature (1)..(112): NCBI GI NO: 115775 NR Description: Chlorophyll A-B binding protein type I
  misc_feature (1)..(112): NCBI GI NO: 115796 NR Description: Chlorophyll A-B binding protein
  misc_feature (1)..(112): NCBI GI NO: 320617 NR Description: chlorophyll a/b-binding protein II precursor
  misc_feature (1)..(112): NCBI GI NO: 1345698 NR Description: Chlorophyll A-B binding protein 151
MRRTVKSAPQSIWYGPDRPKYLGPFSEQMPSYLTGEFPGDYGWDTAGLSADPKTFARNRELEVIHSRWAMLGALGCVFPEVLAKNGVKFGEAVWFKAGADLLGGRAGLPGEPEPGARAEHPGPSGRARWCSWASSRALAAARSRKGSTRCTPTAPSTRWASSTTRTPPPSSR

SEQ ID NO: 34304 - protein, 144 aa, Zea mays subsp. mays
  peptide (1)..(144): Ceres Seq. ID no. 12350459
  misc_feature (1)..(84): Pfam Name: Pfam Description:  Chlorophyll A-B binding protein
  misc_feature (1)..(84): NCBI GI NO: 480616 NR Description: chlorophyll a/b binding protein - prince's feather
  misc_feature (1)..(84): NCBI GI NO: 29123378 NR Description: chlorophyll a/b binding protein
  misc_feature (1)..(84): NCBI GI NO: 115802 NR Description: Chlorophyll A-B binding protein 36
  misc_feature (1)..(84): NCBI GI NO: 99492 NR Description: chlorophyll a/b-binding protein
  misc_feature (1)..(84): NCBI GI NO: 115770 NR Description: Chlorophyll A-B binding protein of LHCII type I
  misc_feature (1)..(84): NCBI GI NO: 3126854 NR Description: chlorophyll a/b binding protein [Oryza sativa]
  misc_feature (1)..(84): NCBI GI NO: 115775 NR Description: Chlorophyll A-B binding protein type I
  misc_feature (1)..(84): NCBI GI NO: 115796 NR Description: Chlorophyll A-B binding protein
  misc_feature (1)..(84): NCBI GI NO: 320617 NR Description: chlorophyll a/b-binding protein II precursor
  misc_feature (1)..(84): NCBI GI NO: 1345698 NR Description: Chlorophyll A-B binding protein 151
MPSYLTGEFPGDYGWDTAGLSADPKTFARNRELEVIHSRWAMLGALGCVFPEVLAKNGVKFGEAVWFKAGADLLGGRAGLPGEPEPGARAEHPGPSGRARWCSWASSRALAAARSRKGSTRCTPTAPSTRWASSTTRTPPPSSR

SEQ ID NO: 34305 - DNA, 1317 bp, Zea mays subsp. mays
  misc_feature (1)..(1317): Ceres Seq. ID no. 12350464
atctgcttactgtgatcaccaaagttgtgctgatacgatgtgcgattattgctctttcttctctagaatgttcctgccgatgctttataagagaaggttggtcagcatcgatctctgccagtgtctagctgagaacatggtgacctcaagcaagggcaaggtatgcgtaaccggggcctcaggctttgttgcctcttggcttatcaaacggctcctcgagtctggatatcatgtggtagggactgtcagggacccaggaaatcaccaaaagacagcccacctttggaaattacctggcgctaaagagaggctgcaaatcgtgcgagctgatctgttggaagaagggagcttcgacagcgccgtgatggcctgtgagggtgtattccacactgcatcccccgtcctcgctaaacccgactctactagcaaggaggacacgctcgtccctgcggtgaacggtactctgaacgtgctgagatcgtgcaagaagaacccgttcctgaaaagggtcgtccttacgtcttcgtcgtctgcggtgaggatcagggacgacggtggccagtccagtaacatctcgctggacgaaacgacatggagctccgtgccactctgcgagaagatgcatctatggtatgccctagccaaggtatttgcagagaaagcggcgtgggagttcgccaaggagaacggcatcgaccttgtgactgtcctcccgtcgttcgtgatcgggcccagtttgtcccacgaactatgcgttaccgcttcagacgtcctaggcctattccaaggcgacacggcaaggttcagctcgtacggaagaatggggtacgtccacatcgacgacgttgcgagcagccacatcctggtgtacgaggccccccaggccgccgggaggtacctgtgcagctcagtggtgctggacaacgacgagctggtctcctcgctcgcgaaacgctacccgatattccccataccccggaggctgaacagcccctacggcaagcagtcgtaccagctgaacacgtcgaagctgcaggggctgggcttcaagttcagaggggtgcaggagatgttcgacgactgcgtacagtcgctcaaagaccagggacacctgctggagtgccccctgtgaactgcgatggggtgcctccgcctgtgaacgcgccggttgggttgcgtcccgaacccgctgttaattcgtttttttttcttcaataattccacgtcatgtcacggtgtcctcgcgcagactgctactgtcagggcgtcatagctcacgggctctccggctacatgaataaaaatgtcacgctcgcc

SEQ ID NO: 34306 - protein, 376 aa, Zea mays subsp. mays
  peptide (1)..(376): Ceres Seq. ID no. 12350465
  misc_feature (67)..(347): Pfam Name: Pfam Description:  NAD dependent epimerase/dehydratase family
  misc_feature (46)..(376): NCBI GI NO: 14030554 NR Description: dihydro-flavanoid reductase-like protein
  misc_feature (46)..(376): NCBI GI NO: 32352170 NR Description: dihydroflavonol reductase
  misc_feature (46)..(376): NCBI GI NO: 4581047 NR Description: putative dihydroflavonol reductase [Oryza sativa]
  misc_feature (46)..(372): NCBI GI NO: 34905082 NR Description: putative dihydroflavonol 4-reductase
  misc_feature (50)..(371): NCBI GI NO: 30690351 NR Description: dihydroflavonol 4-reductase
  misc_feature (50)..(179): NCBI GI NO: 7486020 NR Description: hypothetical protein F23E12
  misc_feature (209)..(330): NCBI GI NO: 7486020 NR Description: hypothetical protein F23E12
  misc_feature (46)..(369): NCBI GI NO: 15239741 NR Description: cinnamyl-alcohol dehydrogenase - like protein
  misc_feature (46)..(369): NCBI GI NO: 21594240 NR Description: cinnamyl-alcohol dehydrogenase-like protein
  misc_feature (47)..(369): NCBI GI NO: 7488627 NR Description: probable cinnamyl-alcohol dehydrogenase (EC1
SAYCDHQSCADTMCDYCSFFSRMFLPMLYKRRLVSIDLCQCLAENMVTSSKGKVCVTGASGFVASWLIKRLLESGYHVVGTVRDPGNHQKTAHLWKLPGAKERLQIVRADLLEEGSFDSAVMACEGVFHTASPVLAKPDSTSKEDTLVPAVNGTLNVLRSCKKNPFLKRVVLTSSSSAVRIRDDGGQSSNISLDETTWSSVPLCEKMHLWYALAKVFAEKAAWEFAKENGIDLVTVLPSFVIGPSLSHELCVTASDVLGLFQGDTARFSSYGRMGYVHIDDVASSHILVYEAPQAAGRYLCSSVVLDNDELVSSLAKRYPIFPIPRRLNSPYGKQSYQLNTSKLQGLGFKFRGVQEMFDDCVQSLKDQGHLLECPL

SEQ ID NO: 34307 - protein, 364 aa, Zea mays subsp. mays
  peptide (1)..(364): Ceres Seq. ID no. 12350466
  misc_feature (55)..(335): Pfam Name: Pfam Description:  NAD dependent epimerase/dehydratase family
  misc_feature (34)..(364): NCBI GI NO: 14030554 NR Description: dihydro-flavanoid reductase-like protein
  misc_feature (34)..(364): NCBI GI NO: 32352170 NR Description: dihydroflavonol reductase
  misc_feature (34)..(364): NCBI GI NO: 4581047 NR Description: putative dihydroflavonol reductase [Oryza sativa]
  misc_feature (34)..(360): NCBI GI NO: 34905082 NR Description: putative dihydroflavonol 4-reductase
  misc_feature (38)..(359): NCBI GI NO: 30690351 NR Description: dihydroflavonol 4-reductase
  misc_feature (38)..(167): NCBI GI NO: 7486020 NR Description: hypothetical protein F23E12
  misc_feature (197)..(318): NCBI GI NO: 7486020 NR Description: hypothetical protein F23E12
  misc_feature (34)..(357): NCBI GI NO: 15239741 NR Description: cinnamyl-alcohol dehydrogenase - like protein
  misc_feature (34)..(357): NCBI GI NO: 21594240 NR Description: cinnamyl-alcohol dehydrogenase-like protein
  misc_feature (35)..(357): NCBI GI NO: 7488627 NR Description: probable cinnamyl-alcohol dehydrogenase (EC1
MCDYCSFFSRMFLPMLYKRRLVSIDLCQCLAENMVTSSKGKVCVTGASGFVASWLIKRLLESGYHVVGTVRDPGNHQKTAHLWKLPGAKERLQIVRADLLEEGSFDSAVMACEGVFHTASPVLAKPDSTSKEDTLVPAVNGTLNVLRSCKKNPFLKRVVLTSSSSAVRIRDDGGQSSNISLDETTWSSVPLCEKMHLWYALAKVFAEKAAWEFAKENGIDLVTVLPSFVIGPSLSHELCVTASDVLGLFQGDTARFSSYGRMGYVHIDDVASSHILVYEAPQAAGRYLCSSVVLDNDELVSSLAKRYPIFPIPRRLNSPYGKQSYQLNTSKLQGLGFKFRGVQEMFDDCVQSLKDQGHLLECPL

SEQ ID NO: 34308 - protein, 354 aa, Zea mays subsp. mays
  peptide (1)..(354): Ceres Seq. ID no. 12350467
  misc_feature (45)..(325): Pfam Name: Pfam Description:  NAD dependent epimerase/dehydratase family
  misc_feature (24)..(354): NCBI GI NO: 14030554 NR Description: dihydro-flavanoid reductase-like protein
  misc_feature (24)..(354): NCBI GI NO: 32352170 NR Description: dihydroflavonol reductase
  misc_feature (24)..(354): NCBI GI NO: 4581047 NR Description: putative dihydroflavonol reductase [Oryza sativa]
  misc_feature (24)..(350): NCBI GI NO: 34905082 NR Description: putative dihydroflavonol 4-reductase
  misc_feature (28)..(349): NCBI GI NO: 30690351 NR Description: dihydroflavonol 4-reductase
  misc_feature (28)..(157): NCBI GI NO: 7486020 NR Description: hypothetical protein F23E12
  misc_feature (187)..(308): NCBI GI NO: 7486020 NR Description: hypothetical protein F23E12
  misc_feature (24)..(347): NCBI GI NO: 15239741 NR Description: cinnamyl-alcohol dehydrogenase - like protein
  misc_feature (24)..(347): NCBI GI NO: 21594240 NR Description: cinnamyl-alcohol dehydrogenase-like protein
  misc_feature (25)..(347): NCBI GI NO: 7488627 NR Description: probable cinnamyl-alcohol dehydrogenase (EC1
MFLPMLYKRRLVSIDLCQCLAENMVTSSKGKVCVTGASGFVASWLIKRLLESGYHVVGTVRDPGNHQKTAHLWKLPGAKERLQIVRADLLEEGSFDSAVMACEGVFHTASPVLAKPDSTSKEDTLVPAVNGTLNVLRSCKKNPFLKRVVLTSSSSAVRIRDDGGQSSNISLDETTWSSVPLCEKMHLWYALAKVFAEKAAWEFAKENGIDLVTVLPSFVIGPSLSHELCVTASDVLGLFQGDTARFSSYGRMGYVHIDDVASSHILVYEAPQAAGRYLCSSVVLDNDELVSSLAKRYPIFPIPRRLNSPYGKQSYQLNTSKLQGLGFKFRGVQEMFDDCVQSLKDQGHLLECPL

SEQ ID NO: 34309 - DNA, 931 bp, Zea mays subsp. mays
  misc_feature (1)..(931): Ceres Seq. ID no. 12462439
aattgacatcaccgagacctatcgccgcagaaccaccgaatccacggcatcggagagtgtagaggttagtactaggcggaggtcaagatggtgtgcatccggcaggcgactatcgacgacctgctggcgatgcaggcgtgcaacttgatgtgcctgccggagaactaccagatgaagtactacctctaccacatgctgtcttggccgcagctcctcttcgtcgccgaggactacggcggccgcatcgtcggctacgtgctcgccaagatggaggaggacccctccgagccctgccacggccacatcacctccctcgcggtgctccgctcccaccgcaagctcgggctcgccaccaagctcatgtccgccgcgcaggcagccatggaccaggtcttcggcgccgagtacgtctccctccacgtccgccgatccaaccgcgccgccttcaacctctacacctccactctcgggtaccagatccacgacatcgaggccaagtactacgccgatggagaggacgcgttcgacatgcgcaagcctctccggcagccgcaacctaagaagcaccaccatcaccaccaccacggccccggtgggtgctgctcccacgacgcacctacggcgacgactggttcttctcctcagtcttttagttcgccggataagaaggctaacacttgacggatgaagcatatctacagagaggagtcaccaagcccattggacttccgatacgcagctttttctaatagaatgggaaacgaattgtactgtaattgtttgtgtactttactttggctcaatcgtccgaccgtatctttgtaatcagttagaatggcaagcaaatgtccttgacatcttttgttattgtaaaaacatgtgttataacgctgattctcagattacatttgattattcgagctgacaattt

SEQ ID NO: 34310 - protein, 197 aa, Zea mays subsp. mays
  peptide (1)..(197): Ceres Seq. ID no. 12462440
  misc_feature (45)..(130): Pfam Name: GNAT Pfam Description: Acetyltransferase
  misc_feature (1)..(197): NCBI GI NO: 14550116 NR Description: silencing group B protein [Zea mays]
  misc_feature (1)..(193): NCBI GI NO: 38344807 NR Description: OSJNBa0043L09.27
  misc_feature (1)..(184): NCBI GI NO: 15240705 NR Description: putative protein; protein id: At5g13780
  misc_feature (4)..(160): NCBI GI NO: 28422354 NR Description: Similar to N-acetyltransferase ARD1 homolog (S
  misc_feature (4)..(172): NCBI GI NO: 20071196 NR Description: Similar to N-acetyltransferase ARD1 homolog (S
  misc_feature (4)..(162): NCBI GI NO: 9845236 NR Description: N-acetyltransferase similar to S. cerevisiae ARD1
  misc_feature (4)..(162): NCBI GI NO: 10835057 NR Description: N-acetyltransferase, homolog of S
  misc_feature (4)..(154): NCBI GI NO: 30519923 NR Description: DNA segment
  misc_feature (4)..(162): NCBI GI NO: 34881754 NR Description: similar to ARD-1 N-acetyltransferase homologue
  misc_feature (4)..(154): NCBI GI NO: 27693156 NR Description: similar to hypothetical protein MGC10646
MVCIRQATIDDLLAMQACNLMCLPENYQMKYYLYHMLSWPQLLFVAEDYGGRIVGYVLAKMEEDPSEPCHGHITSLAVLRSHRKLGLATKLMSAAQAAMDQVFGAEYVSLHVRRSNRAAFNLYTSTLGYQIHDIEAKYYADGEDAFDMRKPLRQPQPKKHHHHHHHGPGGCCSHDAPTATTGSSPQSFSSPDKKANT

SEQ ID NO: 34311 - protein, 183 aa, Zea mays subsp. mays
  peptide (1)..(183): Ceres Seq. ID no. 12462441
  misc_feature (31)..(116): Pfam Name: GNAT Pfam Description: Acetyltransferase
  misc_feature (1)..(183): NCBI GI NO: 14550116 NR Description: silencing group B protein [Zea mays]
  misc_feature (1)..(179): NCBI GI NO: 38344807 NR Description: OSJNBa0043L09.27
  misc_feature (1)..(170): NCBI GI NO: 15240705 NR Description: putative protein; protein id: At5g13780
  misc_feature (1)..(146): NCBI GI NO: 28422354 NR Description: Similar to N-acetyltransferase ARD1 homolog (S
  misc_feature (1)..(158): NCBI GI NO: 20071196 NR Description: Similar to N-acetyltransferase ARD1 homolog (S
  misc_feature (1)..(148): NCBI GI NO: 9845236 NR Description: N-acetyltransferase similar to S. cerevisiae ARD1
  misc_feature (1)..(148): NCBI GI NO: 10835057 NR Description: N-acetyltransferase, homolog of S
  misc_feature (1)..(140): NCBI GI NO: 30519923 NR Description: DNA segment
  misc_feature (1)..(148): NCBI GI NO: 34881754 NR Description: similar to ARD-1 N-acetyltransferase homologue
  misc_feature (1)..(140): NCBI GI NO: 27693156 NR Description: similar to hypothetical protein MGC10646
MQACNLMCLPENYQMKYYLYHMLSWPQLLFVAEDYGGRIVGYVLAKMEEDPSEPCHGHITSLAVLRSHRKLGLATKLMSAAQAAMDQVFGAEYVSLHVRRSNRAAFNLYTSTLGYQIHDIEAKYYADGEDAFDMRKPLRQPQPKKHHHHHHHGPGGCCSHDAPTATTGSSPQSFSSPDKKANT

SEQ ID NO: 34312 - protein, 177 aa, Zea mays subsp. mays
  peptide (1)..(177): Ceres Seq. ID no. 12462442
  misc_feature (25)..(110): Pfam Name: GNAT Pfam Description: Acetyltransferase
  misc_feature (1)..(177): NCBI GI NO: 14550116 NR Description: silencing group B protein [Zea mays]
  misc_feature (1)..(173): NCBI GI NO: 38344807 NR Description: OSJNBa0043L09.27
  misc_feature (1)..(164): NCBI GI NO: 15240705 NR Description: putative protein; protein id: At5g13780
  misc_feature (1)..(140): NCBI GI NO: 28422354 NR Description: Similar to N-acetyltransferase ARD1 homolog (S
  misc_feature (1)..(152): NCBI GI NO: 20071196 NR Description: Similar to N-acetyltransferase ARD1 homolog (S
  misc_feature (1)..(142): NCBI GI NO: 9845236 NR Description: N-acetyltransferase similar to S. cerevisiae ARD1
  misc_feature (1)..(142): NCBI GI NO: 10835057 NR Description: N-acetyltransferase, homolog of S
  misc_feature (1)..(134): NCBI GI NO: 30519923 NR Description: DNA segment
  misc_feature (1)..(142): NCBI GI NO: 34881754 NR Description: similar to ARD-1 N-acetyltransferase homologue
  misc_feature (1)..(134): NCBI GI NO: 27693156 NR Description: similar to hypothetical protein MGC10646
MCLPENYQMKYYLYHMLSWPQLLFVAEDYGGRIVGYVLAKMEEDPSEPCHGHITSLAVLRSHRKLGLATKLMSAAQAAMDQVFGAEYVSLHVRRSNRAAFNLYTSTLGYQIHDIEAKYYADGEDAFDMRKPLRQPQPKKHHHHHHHGPGGCCSHDAPTATTGSSPQSFSSPDKKANT

SEQ ID NO: 34313 - DNA, 866 bp, Zea mays subsp. mays
  misc_feature (1)..(866): Ceres Seq. ID no. 12408126
acgattccacccacaccgaatcttgacggaacgattccaccaagaaccgcgggcaacaattcacaccgcgcttctcttgtccagcgatgcagacgacggcggcggcggctgtggcatgggcgcctggcccatcggcgtccacctcgtcatcgtcctcgccgtccaccttcagggtgggggttgcgtcgacggccgtgcgggcttcttccgcgcccagccttgttgcgtcctccgcgcccctgggccgtcgacggctgcggcaagtggttcaagctgttgccaatccagaccctgcgatcgagcttccattgactgctgaaaatgtcgagatggtgttggatgaagtaaggccgtatcttatggcagacggaggcaatgttgcgttgcatgagattgatgggaacgtggtaaggttaaagctgcaaggagcatgtggttcatgcccggcttcagtaacaacgatgaagatgggtattgaacggcgcttgatggagaaaataccagagatcgttgcagttgagcccattgctgatgaggaaactggccttgagttgaaccaagagaacattgaaaaggtacttgacgagattaggccataccttgctggcacaggaggtggcgagctcgagtttgtcacaatcgaggagcctattgtcaaggttaggcttacaggcccagctgctggtgtgatgactgtccgagtagcattgactcagaagctccgtgaaaaaatccctaaaattgcagctgtccagcttttgccataagattagaatcttttagaagccaggcaccagtcacagttgataatgtaaatgaactaccgcaataaatttaaggagttgtaatgtgtagcctgctgagcg

SEQ ID NO: 34314 - protein, 226 aa, Zea mays subsp. mays
  peptide (1)..(226): Ceres Seq. ID no. 12408127
  misc_feature (80)..(147): Pfam Name: Pfam Description:  NifU-like domain
  misc_feature (3)..(225): NCBI GI NO: 18423084 NR Description: Expressed protein; protein id: At5g49940
  misc_feature (1)..(225): NCBI GI NO: 30698492 NR Description: NifU1 [Oryza sativa (japonica cultivar-group)]
  misc_feature (3)..(212): NCBI GI NO: 8777425 NR Description: gene_id:K9P8
  misc_feature (73)..(225): NCBI GI NO: 7485833 NR Description: hypothetical protein F20B18
  misc_feature (73)..(225): NCBI GI NO: 21554503 NR Description: nitrogen fixation like protein
  misc_feature (73)..(225): NCBI GI NO: 18416645 NR Description: nitrogen fixation like protein
  misc_feature (70)..(147): NCBI GI NO: 22298836 NR Description: ORF_ID:tsl1293~similar to NifU protein
  misc_feature (73)..(147): NCBI GI NO: 23126802 NR Description: hypothetical protein [Nostoc punctiforme]
  misc_feature (75)..(214): NCBI GI NO: 18411785 NR Description: putative NifU-like metallocluster assembly factor
  misc_feature (73)..(147): NCBI GI NO: 17228804 NR Description: NifU like protein [Nostoc sp. PCC 7120]
MQTTAAAAVAWAPGPSASTSSSSSPSTFRVGVASTAVRASSAPSLVASSAPLGRRRLRQVVQAVANPDPAIELPLTAENVEMVLDEVRPYLMADGGNVALHEIDGNVVRLKLQGACGSCPASVTTMKMGIERRLMEKIPEIVAVEPIADEETGLELNQENIEKVLDEIRPYLAGTGGGELEFVTIEEPIVKVRLTGPAAGVMTVRVALTQKLREKIPKIAAVQLLP

SEQ ID NO: 34315 - protein, 145 aa, Zea mays subsp. mays
  peptide (1)..(145): Ceres Seq. ID no. 12408128
  misc_feature (1)..(66): Pfam Name: Pfam Description:  NifU-like domain
  misc_feature (1)..(144): NCBI GI NO: 18423084 NR Description: Expressed protein; protein id: At5g49940
  misc_feature (1)..(144): NCBI GI NO: 30698492 NR Description: NifU1 [Oryza sativa (japonica cultivar-group)]
  misc_feature (1)..(131): NCBI GI NO: 8777425 NR Description: gene_id:K9P8
  misc_feature (1)..(144): NCBI GI NO: 7485833 NR Description: hypothetical protein F20B18
  misc_feature (1)..(144): NCBI GI NO: 21554503 NR Description: nitrogen fixation like protein
  misc_feature (1)..(144): NCBI GI NO: 18416645 NR Description: nitrogen fixation like protein
  misc_feature (1)..(66): NCBI GI NO: 22298836 NR Description: ORF_ID:tsl1293~similar to NifU protein
  misc_feature (1)..(66): NCBI GI NO: 23126802 NR Description: hypothetical protein [Nostoc punctiforme]
  misc_feature (1)..(133): NCBI GI NO: 18411785 NR Description: putative NifU-like metallocluster assembly factor
  misc_feature (1)..(66): NCBI GI NO: 17228804 NR Description: NifU like protein [Nostoc sp. PCC 7120]
MVLDEVRPYLMADGGNVALHEIDGNVVRLKLQGACGSCPASVTTMKMGIERRLMEKIPEIVAVEPIADEETGLELNQENIEKVLDEIRPYLAGTGGGELEFVTIEEPIVKVRLTGPAAGVMTVRVALTQKLREKIPKIAAVQLLP

SEQ ID NO: 34316 - protein, 135 aa, Zea mays subsp. mays
  peptide (1)..(135): Ceres Seq. ID no. 12408129
  misc_feature (1)..(56): Pfam Name: Pfam Description:  NifU-like domain
  misc_feature (1)..(134): NCBI GI NO: 18423084 NR Description: Expressed protein; protein id: At5g49940
  misc_feature (1)..(134): NCBI GI NO: 30698492 NR Description: NifU1 [Oryza sativa (japonica cultivar-group)]
  misc_feature (1)..(121): NCBI GI NO: 8777425 NR Description: gene_id:K9P8
  misc_feature (1)..(134): NCBI GI NO: 7485833 NR Description: hypothetical protein F20B18
  misc_feature (1)..(134): NCBI GI NO: 18416645 NR Description: nitrogen fixation like protein
  misc_feature (1)..(134): NCBI GI NO: 21554503 NR Description: nitrogen fixation like protein
  misc_feature (1)..(56): NCBI GI NO: 22298836 NR Description: ORF_ID:tsl1293~similar to NifU protein
  misc_feature (1)..(56): NCBI GI NO: 23126802 NR Description: hypothetical protein [Nostoc punctiforme]
  misc_feature (1)..(123): NCBI GI NO: 18411785 NR Description: putative NifU-like metallocluster assembly factor
  misc_feature (1)..(56): NCBI GI NO: 17228804 NR Description: NifU like protein [Nostoc sp. PCC 7120]
MADGGNVALHEIDGNVVRLKLQGACGSCPASVTTMKMGIERRLMEKIPEIVAVEPIADEETGLELNQENIEKVLDEIRPYLAGTGGGELEFVTIEEPIVKVRLTGPAAGVMTVRVALTQKLREKIPKIAAVQLLP

SEQ ID NO: 34317 - DNA, 1719 bp, Zea mays subsp. mays; identical to SEQ ID NO: 33806
  misc_feature (1)..(1719): Ceres Seq. ID no. 12406579

SEQ ID NO: 34318 - protein, 474 aa, Zea mays subsp. mays; identical to SEQ ID NO: 33807
  peptide (1)..(474): Ceres Seq. ID no. 12406580
  misc_feature (289)..(413): Pfam Name: Pfam Description:  DnaJ C terminal region
  misc_feature (56)..(474): NCBI GI NO: 7441932 NR Description: DnaJ protein homolog ZMDJ1 - maize
  misc_feature (56)..(474): NCBI GI NO: 29367357 NR Description: DNAJ-like protein
  misc_feature (56)..(474): NCBI GI NO: 7441930 NR Description: dnaJ protein homolog - potato
  misc_feature (56)..(474): NCBI GI NO: 4008159 NR Description: DnaJ homolog [Salix gilgiana]
  misc_feature (56)..(474): NCBI GI NO: 461944 NR Description: DnaJ protein homolog (DNAJ-1)
  misc_feature (56)..(474): NCBI GI NO: 10945669 NR Description: J1P [Daucus carota]
  misc_feature (56)..(474): NCBI GI NO: 1169382 NR Description: DnaJ protein homolog 2
  misc_feature (56)..(474): NCBI GI NO: 5802244 NR Description: seed maturation protein PM37 [Glycine max]
  misc_feature (56)..(474): NCBI GI NO: 6782421 NR Description: DnaJ-like protein [Lycopersicon esculentum]
  misc_feature (56)..(474): NCBI GI NO: 421809 NR Description: dnaJ protein homolog DnaJ-1 - cucumber

SEQ ID NO: 34319 - protein, 419 aa, Zea mays subsp. mays; identical to SEQ ID NO: 33808
  peptide (1)..(419): Ceres Seq. ID no. 12406581
  misc_feature (234)..(358): Pfam Name: Pfam Description:  DnaJ C terminal region
  misc_feature (1)..(419): NCBI GI NO: 7441932 NR Description: DnaJ protein homolog ZMDJ1 - maize
  misc_feature (1)..(419): NCBI GI NO: 29367357 NR Description: DNAJ-like protein
  misc_feature (1)..(419): NCBI GI NO: 7441930 NR Description: dnaJ protein homolog - potato
  misc_feature (1)..(419): NCBI GI NO: 4008159 NR Description: DnaJ homolog [Salix gilgiana]
  misc_feature (1)..(419): NCBI GI NO: 461944 NR Description: DnaJ protein homolog (DNAJ-1)
  misc_feature (1)..(419): NCBI GI NO: 10945669 NR Description: J1P [Daucus carota]
  misc_feature (1)..(419): NCBI GI NO: 1169382 NR Description: DnaJ protein homolog 2
  misc_feature (1)..(419): NCBI GI NO: 5802244 NR Description: seed maturation protein PM37 [Glycine max]
  misc_feature (1)..(419): NCBI GI NO: 6782421 NR Description: DnaJ-like protein [Lycopersicon esculentum]
  misc_feature (1)..(419): NCBI GI NO: 421809 NR Description: dnaJ protein homolog DnaJ-1 - cucumber

SEQ ID NO: 34320 - protein, 338 aa, Zea mays subsp. mays; identical to SEQ ID NO: 33809
  peptide (1)..(338): Ceres Seq. ID no. 12406582
  misc_feature (153)..(277): Pfam Name: Pfam Description:  DnaJ C terminal region
  misc_feature (1)..(338): NCBI GI NO: 7441932 NR Description: DnaJ protein homolog ZMDJ1 - maize
  misc_feature (1)..(338): NCBI GI NO: 29367357 NR Description: DNAJ-like protein
  misc_feature (1)..(338): NCBI GI NO: 7441930 NR Description: dnaJ protein homolog - potato
  misc_feature (1)..(338): NCBI GI NO: 4008159 NR Description: DnaJ homolog [Salix gilgiana]
  misc_feature (1)..(338): NCBI GI NO: 461944 NR Description: DnaJ protein homolog (DNAJ-1)
  misc_feature (1)..(338): NCBI GI NO: 10945669 NR Description: J1P [Daucus carota]
  misc_feature (1)..(338): NCBI GI NO: 1169382 NR Description: DnaJ protein homolog 2
  misc_feature (1)..(338): NCBI GI NO: 5802244 NR Description: seed maturation protein PM37 [Glycine max]
  misc_feature (1)..(338): NCBI GI NO: 6782421 NR Description: DnaJ-like protein [Lycopersicon esculentum]
  misc_feature (1)..(338): NCBI GI NO: 421809 NR Description: dnaJ protein homolog DnaJ-1 - cucumber

SEQ ID NO: 34321 - DNA, 1167 bp, Zea mays subsp. mays
  misc_feature (1)..(1167): Ceres Seq. ID no. 12372251
  misc_feature (265)..(265): n is a, c, t, g, unknown, or other
gcacgagaccattacctagaacatcctaatcgaaaaatctgcagcacgtctcctcttttcctcgtccacccggccatctccgcatccactcccgcaggccgcagcccagcaccggccgctctacgcctccacgccggcacgtcctcgtttctgtccgaggtcatcgcctccgcaacttcgtggccggtgaggtcgcaccaccatggcgtcgctcctagcccggcaggcagcgcaggcgctccgcgcgaggcaaacggcgcagctngggccggccgcgtcggcgatgcaagggcacctccgtacctacatgaacgcggggattcccaagcggttcaaagaggatgaggagaaagaacagcttgcaaaagatgtcgcaaaagattggaatgctgtgtttgaaaggagcatcaatacattgtttttgactgaaatggtccgtggcttgatgctaactctcaagtacttctttgatagaaatgtcacaattaactatccgtttgagaagggtcctctgagcccccgcttccgtggtgagcatgctctcagacgttatgaatctggggaagagcgctgcattgcttgtaaactatgcgaagctatatgcccagcgcaggcaattacaattgaggctgaagaacgtgaagatggcagtcgccgaaccacaagatatgatattgacatgaccaaatgcatttactgtgggttctgtcaagaggcttgcccagtcgatgctattgttgaggggcctaactttgagtttgccactgagacacacgaggaactactgtacgacaaggagaaattgcttgaaaatggtgatcgctgggagactgagattgctgagaacttgagatctgagagcctctatcgctgaatctgtcttccattatggttgataaactgggttcttccattttccatattttgctcaactagctgatgaataagcaaacgatgtatcataacttaggtacgatgtttttgtaccttggcaccatctgtgtgttttgttcattgccttgctaaaggtggcaccagatgttctttgatgggaaaattccttctgtagcactgagctgttttcagtcacaccttattttgtatacaatgaaacagaacgctgtgctcatggcacagtgatttggtgaatgttcacatgtttgtttc

SEQ ID NO: 34322 - protein, 223 aa, Zea mays subsp. mays
  peptide (1)..(223): Ceres Seq. ID no. 12372252
  misc_feature (156)..(179): Pfam Name: Pfam Description:  4Fe-4S binding domain
  misc_feature (1)..(223): NCBI GI NO: 34915206 NR Description: putative  NADH dehydrogenase
  misc_feature (1)..(223): NCBI GI NO: 6226880 NR Description: NADH-ubiquinone oxidoreductase 23 kDa subunit
  misc_feature (1)..(223): NCBI GI NO: 15219265 NR Description: NADH dehydrogenase, putative; protein id:At1g79010
  misc_feature (1)..(223): NCBI GI NO: 15219311 NR Description: NADH:ubiquinone oxidoreductase, putative
  misc_feature (1)..(223): NCBI GI NO: 1076669 NR Description: NADH2 dehydrogenase (ubiquinone) (EC 1
  misc_feature (1)..(223): NCBI GI NO: 3929358 NR Description: NADH-ubiquinone oxidoreductase 23 kDa subunit
  misc_feature (64)..(223): NCBI GI NO: 11466496 NR Description: NADH dehydrogenase, subunit 8
  misc_feature (1)..(223): NCBI GI NO: 31241895 NR Description: ENSANGP00000012187 [Anopheles gambiae]
  misc_feature (42)..(223): NCBI GI NO: 34328786 NR Description: NADH:ubiquinone oxidoreductase subunit 8
  misc_feature (21)..(223): NCBI GI NO: 27807359 NR Description: NADH dehydrogenase
  misc_feature (21)..(21): Xaa is any aa, unknown or other
MASLLARQAAQALRARQTAQXGPAASAMQGHLRTYMNAGIPKRFKEDEEKEQLAKDVAKDWNAVFERSINTLFLTEMVRGLMLTLKYFFDRNVTINYPFEKGPLSPRFRGEHALRRYESGEERCIACKLCEAICPAQAITIEAEEREDGSRRTTRYDIDMTKCIYCGFCQEACPVDAIVEGPNFEFATETHEELLYDKEKLLENGDRWETEIAENLRSESLYR

SEQ ID NO: 34323 - protein, 196 aa, Zea mays subsp. mays
  peptide (1)..(196): Ceres Seq. ID no. 12372253
  misc_feature (129)..(152): Pfam Name: Pfam Description:  4Fe-4S binding domain
  misc_feature (1)..(196): NCBI GI NO: 34915206 NR Description: putative  NADH dehydrogenase
  misc_feature (1)..(196): NCBI GI NO: 6226880 NR Description: NADH-ubiquinone oxidoreductase 23 kDa subunit
  misc_feature (1)..(196): NCBI GI NO: 15219265 NR Description: NADH dehydrogenase, putative; protein id:At1g79010
  misc_feature (1)..(196): NCBI GI NO: 15219311 NR Description: NADH:ubiquinone oxidoreductase, putative
  misc_feature (1)..(196): NCBI GI NO: 1076669 NR Description: NADH2 dehydrogenase (ubiquinone) (EC 1
  misc_feature (1)..(196): NCBI GI NO: 3929358 NR Description: NADH-ubiquinone oxidoreductase 23 kDa subunit
  misc_feature (37)..(196): NCBI GI NO: 11466496 NR Description: NADH dehydrogenase, subunit 8
  misc_feature (1)..(196): NCBI GI NO: 31241895 NR Description: ENSANGP00000012187 [Anopheles gambiae]
  misc_feature (15)..(196): NCBI GI NO: 34328786 NR Description: NADH:ubiquinone oxidoreductase subunit 8
  misc_feature (1)..(196): NCBI GI NO: 27807359 NR Description: NADH dehydrogenase
MQGHLRTYMNAGIPKRFKEDEEKEQLAKDVAKDWNAVFERSINTLFLTEMVRGLMLTLKYFFDRNVTINYPFEKGPLSPRFRGEHALRRYESGEERCIACKLCEAICPAQAITIEAEEREDGSRRTTRYDIDMTKCIYCGFCQEACPVDAIVEGPNFEFATETHEELLYDKEKLLENGDRWETEIAENLRSESLYR

SEQ ID NO: 34324 - protein, 188 aa, Zea mays subsp. mays
  peptide (1)..(188): Ceres Seq. ID no. 12372254
  misc_feature (121)..(144): Pfam Name: Pfam Description:  4Fe-4S binding domain
  misc_feature (1)..(188): NCBI GI NO: 34915206 NR Description: putative  NADH dehydrogenase
  misc_feature (1)..(188): NCBI GI NO: 6226880 NR Description: NADH-ubiquinone oxidoreductase 23 kDa subunit
  misc_feature (1)..(188): NCBI GI NO: 15219265 NR Description: NADH dehydrogenase, putative; protein id:At1g79010
  misc_feature (1)..(188): NCBI GI NO: 15219311 NR Description: NADH:ubiquinone oxidoreductase, putative
  misc_feature (1)..(188): NCBI GI NO: 1076669 NR Description: NADH2 dehydrogenase (ubiquinone) (EC 1
  misc_feature (1)..(188): NCBI GI NO: 3929358 NR Description: NADH-ubiquinone oxidoreductase 23 kDa subunit
  misc_feature (29)..(188): NCBI GI NO: 11466496 NR Description: NADH dehydrogenase, subunit 8
  misc_feature (1)..(188): NCBI GI NO: 31241895 NR Description: ENSANGP00000012187 [Anopheles gambiae]
  misc_feature (7)..(188): NCBI GI NO: 34328786 NR Description: NADH:ubiquinone oxidoreductase subunit 8
  misc_feature (1)..(188): NCBI GI NO: 27807359 NR Description: NADH dehydrogenase
MNAGIPKRFKEDEEKEQLAKDVAKDWNAVFERSINTLFLTEMVRGLMLTLKYFFDRNVTINYPFEKGPLSPRFRGEHALRRYESGEERCIACKLCEAICPAQAITIEAEEREDGSRRTTRYDIDMTKCIYCGFCQEACPVDAIVEGPNFEFATETHEELLYDKEKLLENGDRWETEIAENLRSESLYR

SEQ ID NO: 34325 - DNA, 1075 bp, Zea mays subsp. mays
  misc_feature (1)..(1075): Ceres Seq. ID no. 12402112
ctctgaaagtgggcctatcctcgctggtcacgtctcctctccgcgcacgaaaaccctagcacgcaggcgcagccagccctgctccaattcccaaagcttctggaaaacacctactcgtctctcatcccttccccgccgtcgcgtcctcttcgaactgaatcgcgccgcgatcacccaccttatggcggacaaggagcctgtcgtggagcgatccgaggcgtctgaggaggaggacgcctccgccgcggccgccgcgggggaggaagaggacacgggtgcccaggtggcccccatcgtgcggcttgaggaggtactcgtcaccaccggtgaggaggacgaggacgtcctgctcgacatgaaggcgaagctgtaccggtttgataaagacgggaaccaatggaaggaacggggcacgggcaccgtcaagcttctcaagaacaaggagaccggcaaggtccgactggtcatgcgccagggccaagacgcttaagatatgcgcgaaccacctcgtggcccccaccacgagaatgcaggaacatgccggcagcgacaaatcgtgcgtctggcacgcttctgactttgcggatggcgaactcaaggaggagatgtttgccatcaggtttggttcggtagaaaactgcaagaagttcaaggagttggttgaggagattgctgagtcacttacagagaacgaggacaaggaaggtcaagatggctcatccacggccggattgctggagaagctcactgtgagcgagggcaaatctgaggaaagtggcaagtcggagtccactgattctggcaaagtgaccgaaaccaaagccgatgcagccccagccgagtagttggtgtggttgcacgcagatcctccccgtgctgaatcagttcctctgccctttagccatgaaatatgtttgctaatttttttggggcgagttggagcagtctcttgtgtttgggtttgttcttaaaaactttgagttaattggggttggaacgttcggtatgcaagtgtagtatttcactgcgtggatcgttatggattgcggtaaattcatataaggtgcatctattg

SEQ ID NO: 34326 - protein, 162 aa, Zea mays subsp. mays
  peptide (1)..(162): Ceres Seq. ID no. 12402113
  misc_feature (106)..(160): Pfam Name: Pfam Description:  RanBP1 domain
  misc_feature (61)..(160): NCBI GI NO: 15222310 NR Description: Ran-binding protein
  misc_feature (61)..(160): NCBI GI NO: 2058282 NR Description: atranbp1a [Arabidopsis thaliana]
  misc_feature (65)..(160): NCBI GI NO: 14091665 NR Description: Ran binding protein-1 [Lycopersicon esculentum]
  misc_feature (61)..(160): NCBI GI NO: 5106769 NR Description: Ran-binding protein siRanBP [Arabidopsis thaliana]
  misc_feature (61)..(160): NCBI GI NO: 8843780 NR Description: contains similarity to small GTPase Ran bindingprotein 1~gene_id:MZN1
  misc_feature (61)..(160): NCBI GI NO: 30697102 NR Description: Ran binding protein 1 homolog - like
  misc_feature (70)..(158): NCBI GI NO: 34869790 NR Description: similar to Ran-specific GTPase-activating protein
  misc_feature (67)..(158): NCBI GI NO: 1877412 NR Description: Ran binding protein 1 [Xenopus laevis]
  misc_feature (72)..(158): NCBI GI NO: 6755284 NR Description: RAN binding protein 1 [Mus musculus]
  misc_feature (63)..(158): NCBI GI NO: 40746106 NR Description: hypothetical protein AN0084.2
SESGPILAGHVSSPRTKTLARRRSQPCSNSQSFWKTPTRLSSLPRRRVLFELNRAAITHLMADKEPVVERSEASEEEDASAAAAAGEEEDTGAQVAPIVRLEEVLVTTGEEDEDVLLDMKAKLYRFDKDGNQWKERGTGTVKLLKNKETGKVRLVMRQGQDA

SEQ ID NO: 34327 - protein, 105 aa, Zea mays subsp. mays
  peptide (1)..(105): Ceres Seq. ID no. 12402114
  misc_feature (1)..(51): Pfam Name: Pfam Description:  RanBP1 domain
  misc_feature (1)..(100): NCBI GI NO: 15222310 NR Description: Ran-binding protein
  misc_feature (1)..(100): NCBI GI NO: 2058282 NR Description: atranbp1a [Arabidopsis thaliana]
  misc_feature (1)..(100): NCBI GI NO: 14091665 NR Description: Ran binding protein-1 [Lycopersicon esculentum]
  misc_feature (1)..(100): NCBI GI NO: 5106769 NR Description: Ran-binding protein siRanBP [Arabidopsis thaliana]
  misc_feature (1)..(105): NCBI GI NO: 8843780 NR Description: contains similarity to small GTPase Ran bindingprotein 1~gene_id:MZN1
  misc_feature (1)..(105): NCBI GI NO: 30697102 NR Description: Ran binding protein 1 homolog - like
  misc_feature (1)..(87): NCBI GI NO: 34869790 NR Description: similar to Ran-specific GTPase-activating protein
  misc_feature (1)..(96): NCBI GI NO: 1877412 NR Description: Ran binding protein 1 [Xenopus laevis]
  misc_feature (1)..(87): NCBI GI NO: 6755284 NR Description: RAN binding protein 1 [Mus musculus]
  misc_feature (1)..(56): NCBI GI NO: 40746106 NR Description: hypothetical protein AN0084.2
MQEHAGSDKSCVWHASDFADGELKEEMFAIRFGSVENCKKFKELVEEIAESLTENEDKEGQDGSSTAGLLEKLTVSEGKSEESGKSESTDSGKVTETKADAAPAE

SEQ ID NO: 34328 - protein, 102 aa, Zea mays subsp. mays
  peptide (1)..(102): Ceres Seq. ID no. 12402115
  misc_feature (46)..(100): Pfam Name: Pfam Description:  RanBP1 domain
  misc_feature (1)..(100): NCBI GI NO: 15222310 NR Description: Ran-binding protein
  misc_feature (1)..(100): NCBI GI NO: 2058282 NR Description: atranbp1a [Arabidopsis thaliana]
  misc_feature (5)..(100): NCBI GI NO: 14091665 NR Description: Ran binding protein-1 [Lycopersicon esculentum]
  misc_feature (1)..(100): NCBI GI NO: 5106769 NR Description: Ran-binding protein siRanBP [Arabidopsis thaliana]
  misc_feature (1)..(100): NCBI GI NO: 8843780 NR Description: contains similarity to small GTPase Ran bindingprotein 1~gene_id:MZN1
  misc_feature (1)..(100): NCBI GI NO: 30697102 NR Description: Ran binding protein 1 homolog - like
  misc_feature (10)..(98): NCBI GI NO: 34869790 NR Description: similar to Ran-specific GTPase-activating protein
  misc_feature (7)..(98): NCBI GI NO: 1877412 NR Description: Ran binding protein 1 [Xenopus laevis]
  misc_feature (12)..(98): NCBI GI NO: 6755284 NR Description: RAN binding protein 1 [Mus musculus]
  misc_feature (3)..(98): NCBI GI NO: 40746106 NR Description: hypothetical protein AN0084.2
MADKEPVVERSEASEEEDASAAAAAGEEEDTGAQVAPIVRLEEVLVTTGEEDEDVLLDMKAKLYRFDKDGNQWKERGTGTVKLLKNKETGKVRLVMRQGQDA

SEQ ID NO: 34329 - DNA, 964 bp, Zea mays subsp. mays
  misc_feature (1)..(964): Ceres Seq. ID no. 12341310
acgcgtccaggctcggaggctccaacagcacgacgcaaccgaccccaccttccctttacgcgaagaagcatcaccgcgagacgcgagtcgtcctcctctctgtcttcgctcggcgatctatcaaggagggtgagggggagatggcggagaatccgcagctgtttgggaacgggatgccggtgccgttctacggcgagatgttcgtcctcgtccgcgacggcgtcgagttccacgtcgacaagatcccgtcagctcctggaggtcatgtgaaaacaaaaggcacaatttacctgtccaatataaggatggtgtttgttgccagcaagcctgttggcaacttctttgcttttgatatgccactgttgtttgtgcatggtgagaagttcaatcagcccatatttcactgcaacaacatctctggattcgttgaaccagtcgttccagacaatcagaacagggccctgtactcaactcacaccttcaagatcttgttcaagtaaggcggctgtggtactttcgttcctctcttccttaacctgactgcatctgtgcggcgctacaatgagtttgaagcccagtctgctgctaacatggcaccgcgtgtggatcccctgcaagccgcgcagactcctgtcgatgatatgatgcgtcatgcgtatgttgacccaaatgatcctaccaagatttaccttcagcaacctgccccagaatcgcagctgaggaggagaaactaccacggcccagctgatgtgaattagcgcttgctggattggcaaaactcatggccaatgaactgttgtatctgtttgaacaatttatcacaactggcttcaatatccgggagcccccgtatactgcgaatctgtggccgttacatcgtacataatgttttgagttcgctcaataatgatgtacataagcagtggtgtactggtgtgttcaaataatattgtagtgttaagtc

SEQ ID NO: 34330 - protein, 165 aa, Zea mays subsp. mays
  peptide (1)..(165): Ceres Seq. ID no. 12341311
  misc_feature (47)..(165): NCBI GI NO: 15239148 NR Description: putative protein; protein id: At5g11680
  misc_feature (47)..(165): NCBI GI NO: 23479181 NR Description: arabinogalactan protein [Plasmodium yoelii yoelii]
  misc_feature (47)..(165): NCBI GI NO: 23619609 NR Description: hypothetical protein [Plasmodium falciparum 3D7]
ASRLGGSNSTTQPTPPSLYAKKHHRETRVVLLSVFARRSIKEGEGEMAENPQLFGNGMPVPFYGEMFVLVRDGVEFHVDKIPSAPGGHVKTKGTIYLSNIRMVFVASKPVGNFFAFDMPLLFVHGEKFNQPIFHCNNISGFVEPVVPDNQNRALYSTHTFKILFK

SEQ ID NO: 34331 - protein, 119 aa, Zea mays subsp. mays
  peptide (1)..(119): Ceres Seq. ID no. 12341312
  misc_feature (1)..(119): NCBI GI NO: 15239148 NR Description: putative protein; protein id: At5g11680
  misc_feature (1)..(119): NCBI GI NO: 23479181 NR Description: arabinogalactan protein [Plasmodium yoelii yoelii]
  misc_feature (1)..(119): NCBI GI NO: 23619609 NR Description: hypothetical protein [Plasmodium falciparum 3D7]
MAENPQLFGNGMPVPFYGEMFVLVRDGVEFHVDKIPSAPGGHVKTKGTIYLSNIRMVFVASKPVGNFFAFDMPLLFVHGEKFNQPIFHCNNISGFVEPVVPDNQNRALYSTHTFKILFK

SEQ ID NO: 34332 - protein, 108 aa, Zea mays subsp. mays
  peptide (1)..(108): Ceres Seq. ID no. 12341313
  misc_feature (1)..(108): NCBI GI NO: 15239148 NR Description: putative protein; protein id: At5g11680
  misc_feature (1)..(108): NCBI GI NO: 23479181 NR Description: arabinogalactan protein [Plasmodium yoelii yoelii]
  misc_feature (1)..(108): NCBI GI NO: 23619609 NR Description: hypothetical protein [Plasmodium falciparum 3D7]
MPVPFYGEMFVLVRDGVEFHVDKIPSAPGGHVKTKGTIYLSNIRMVFVASKPVGNFFAFDMPLLFVHGEKFNQPIFHCNNISGFVEPVVPDNQNRALYSTHTFKILFK

SEQ ID NO: 34333 - DNA, 619 bp, Zea mays subsp. mays
  misc_feature (1)..(619): Ceres Seq. ID no. 12483051
atttttcgagatgaacgaacagtccagaacccactgctcgaaaccgcagccactggccagtcgatgcccatgactgcggtgcccaggaccggccccggttgcctggggtcgccgccggctcaggctctgtcgagctcactagccggggttcaaggcgccccgaagcgactgggcgcatcgaagccgtcgtggatcgttcgcactgagtcaaacgtgaggagggagagagcaaaacgacctgatcctccttgcaccatctgcaagggcacagggagaatagactgccgcaactgctttggccgaggaagaacaaaccatgccgatgtggccatgcttccgaacggcgaatggccacaatggtgtcgaatttgtggtggtagtggactggattactgcctccggtgccatggaactggtgagtatcgtgaacccatgggcttccacttcactgtccaaagaaaatgagtgaggtgggatggccttgtatgctacgatgcagcgcagctgcggggacatcgtagcccactcagcatgtttctccactgtctctcagaactcagatgatttatgtctagcgctaacgctgtaataacgttgcttcataaaaggaaaaaatgtc

SEQ ID NO: 34334 - protein, 154 aa, Zea mays subsp. mays
  peptide (1)..(154): Ceres Seq. ID no. 12483052
  misc_feature (24)..(154): NCBI GI NO: 38346709 NR Description: OSJNBa0086O06.7
  misc_feature (32)..(152): NCBI GI NO: 9294155 NR Description: gene_id:MKP6.23~unknown protein
  misc_feature (32)..(140): NCBI GI NO: 15229091 NR Description: hypothetical protein; protein id: At3g17670.1
IFRDERTVQNPLLETAATGQSMPMTAVPRTGPGCLGSPPAQALSSSLAGVQGAPKRLGASKPSWIVRTESNVRRERAKRPDPPCTICKGTGRIDCRNCFGRGRTNHADVAMLPNGEWPQWCRICGGSGLDYCLRCHGTGEYREPMGFHFTVQRK

SEQ ID NO: 34335 - protein, 133 aa, Zea mays subsp. mays
  peptide (1)..(133): Ceres Seq. ID no. 12483053
  misc_feature (3)..(133): NCBI GI NO: 38346709 NR Description: OSJNBa0086O06.7
  misc_feature (11)..(131): NCBI GI NO: 9294155 NR Description: gene_id:MKP6.23~unknown protein
  misc_feature (11)..(119): NCBI GI NO: 15229091 NR Description: hypothetical protein; protein id: At3g17670.1
MPMTAVPRTGPGCLGSPPAQALSSSLAGVQGAPKRLGASKPSWIVRTESNVRRERAKRPDPPCTICKGTGRIDCRNCFGRGRTNHADVAMLPNGEWPQWCRICGGSGLDYCLRCHGTGEYREPMGFHFTVQRK

SEQ ID NO: 34336 - protein, 131 aa, Zea mays subsp. mays
  peptide (1)..(131): Ceres Seq. ID no. 12483054
  misc_feature (1)..(131): NCBI GI NO: 38346709 NR Description: OSJNBa0086O06.7
  misc_feature (9)..(129): NCBI GI NO: 9294155 NR Description: gene_id:MKP6.23~unknown protein
  misc_feature (9)..(117): NCBI GI NO: 15229091 NR Description: hypothetical protein; protein id: At3g17670.1
MTAVPRTGPGCLGSPPAQALSSSLAGVQGAPKRLGASKPSWIVRTESNVRRERAKRPDPPCTICKGTGRIDCRNCFGRGRTNHADVAMLPNGEWPQWCRICGGSGLDYCLRCHGTGEYREPMGFHFTVQRK

SEQ ID NO: 34337 - DNA, 831 bp, Zea mays subsp. mays
  misc_feature (1)..(831): Ceres Seq. ID no. 12402108
attttgtggacctatagcatattcccgtggtctccccccttttgctttgcttgccgagacggcgaccatggcgaagcagcagaatcctatccccatcccgatgccctgtcgctgtcgctgcccctcgtcctcgtcgcgctgctcctgccggccgcccgcggcgccgcggagacgccgcagtacacgacggtgcacgcggagtcggacttcgaggtgcggctgtacggcgacaccgtctggatgtccgcccccaccccggacatcccttccttccacgtcgccaccaagctcggcttccacagattgttccagtacctgatgggcgcaaacctcaactcttcgaggatcaggatgaccacccctgtgctcacgagtgtggttccaggtgcagggcctctgcgctcctcggcctactccgtccggctgtacctgccggcgaagttccaggcttcccctccggttcctctcccagagctgaacctgcatccagatcggtggccaggccactgcgtcgcagcgaggagcttctcgggtcgtgcacgggacaagaacgtggtcgaggaagccgagaagctcgccatgagcctgagccggtcaccatgggctaactccacagactactccagcaagagcgcttactcggttgcacagtacagcagtccattccgcatcattggccgtgtcaatgaggtgtggttcgacgtcaactgcagatctactgctgctggtgttgagtcctactgaaaaaaaaactgccagatgtgatggataataataatttggatgtaaaacacaagctgtcctgctttattccatctcttactcctagcc

SEQ ID NO: 34338 - protein, 247 aa, Zea mays subsp. mays
  peptide (1)..(247): Ceres Seq. ID no. 12402109
  misc_feature (57)..(236): Pfam Name: Pfam Description:  SOUL heme-binding protein
  misc_feature (36)..(247): NCBI GI NO: 34904402 NR Description: unnamed protein product
  misc_feature (50)..(232): NCBI GI NO: 15220033 NR Description: SOUL-like protein; protein id: At1g17100
  misc_feature (36)..(234): NCBI GI NO: 34903864 NR Description: unnamed protein product
  misc_feature (49)..(233): NCBI GI NO: 18411970 NR Description: expressed protein; protein id: At1g78450
  misc_feature (49)..(233): NCBI GI NO: 21593898 NR Description: SOUL-like protein [Arabidopsis thaliana]
  misc_feature (57)..(232): NCBI GI NO: 28278449 NR Description: Similar to heme binding protein 2 [Danio rerio]
  misc_feature (57)..(236): NCBI GI NO: 15218357 NR Description: hypothetical protein; protein id: At1g78460.1
  misc_feature (51)..(232): NCBI GI NO: 7657603 NR Description: heme binding protein 2
  misc_feature (70)..(232): NCBI GI NO: 15778345 NR Description: C6ORF34B [Homo sapiens]
  misc_feature (70)..(232): NCBI GI NO: 27731687 NR Description: similar to heme binding protein 2
ILWTYSIFPWSPPFCFACRDGDHGEAAESYPHPDALSLSLPLVLVALLLPAARGAAETPQYTTVHAESDFEVRLYGDTVWMSAPTPDIPSFHVATKLGFHRLFQYLMGANLNSSRIRMTTPVLTSVVPGAGPLRSSAYSVRLYLPAKFQASPPVPLPELNLHPDRWPGHCVAARSFSGRARDKNVVEEAEKLAMSLSRSPWANSTDYSSKSAYSVAQYSSPFRIIGRVNEVWFDVNCRSTAAGVESY

SEQ ID NO: 34339 - protein, 167 aa, Zea mays subsp. mays
  peptide (1)..(167): Ceres Seq. ID no. 12402110
  misc_feature (1)..(156): Pfam Name: Pfam Description:  SOUL heme-binding protein
  misc_feature (1)..(167): NCBI GI NO: 34904402 NR Description: unnamed protein product
  misc_feature (1)..(152): NCBI GI NO: 15220033 NR Description: SOUL-like protein; protein id: At1g17100
  misc_feature (1)..(154): NCBI GI NO: 34903864 NR Description: unnamed protein product
  misc_feature (1)..(153): NCBI GI NO: 18411970 NR Description: expressed protein; protein id: At1g78450
  misc_feature (1)..(153): NCBI GI NO: 21593898 NR Description: SOUL-like protein [Arabidopsis thaliana]
  misc_feature (1)..(152): NCBI GI NO: 28278449 NR Description: Similar to heme binding protein 2 [Danio rerio]
  misc_feature (1)..(156): NCBI GI NO: 15218357 NR Description: hypothetical protein; protein id: At1g78460.1
  misc_feature (1)..(152): NCBI GI NO: 7657603 NR Description: heme binding protein 2
  misc_feature (1)..(152): NCBI GI NO: 15778345 NR Description: C6ORF34B [Homo sapiens]
  misc_feature (1)..(152): NCBI GI NO: 27731687 NR Description: similar to heme binding protein 2
MSAPTPDIPSFHVATKLGFHRLFQYLMGANLNSSRIRMTTPVLTSVVPGAGPLRSSAYSVRLYLPAKFQASPPVPLPELNLHPDRWPGHCVAARSFSGRARDKNVVEEAEKLAMSLSRSPWANSTDYSSKSAYSVAQYSSPFRIIGRVNEVWFDVNCRSTAAGVESY

SEQ ID NO: 34340 - protein, 141 aa, Zea mays subsp. mays
  peptide (1)..(141): Ceres Seq. ID no. 12402111
  misc_feature (1)..(130): Pfam Name: Pfam Description:  SOUL heme-binding protein
  misc_feature (1)..(141): NCBI GI NO: 34904402 NR Description: unnamed protein product
  misc_feature (1)..(126): NCBI GI NO: 15220033 NR Description: SOUL-like protein; protein id: At1g17100
  misc_feature (1)..(128): NCBI GI NO: 34903864 NR Description: unnamed protein product
  misc_feature (1)..(127): NCBI GI NO: 18411970 NR Description: expressed protein; protein id: At1g78450
  misc_feature (1)..(127): NCBI GI NO: 21593898 NR Description: SOUL-like protein [Arabidopsis thaliana]
  misc_feature (1)..(126): NCBI GI NO: 28278449 NR Description: Similar to heme binding protein 2 [Danio rerio]
  misc_feature (1)..(130): NCBI GI NO: 15218357 NR Description: hypothetical protein; protein id: At1g78460.1
  misc_feature (1)..(126): NCBI GI NO: 7657603 NR Description: heme binding protein 2
  misc_feature (1)..(126): NCBI GI NO: 15778345 NR Description: C6ORF34B [Homo sapiens]
  misc_feature (1)..(126): NCBI GI NO: 27731687 NR Description: similar to heme binding protein 2
MGANLNSSRIRMTTPVLTSVVPGAGPLRSSAYSVRLYLPAKFQASPPVPLPELNLHPDRWPGHCVAARSFSGRARDKNVVEEAEKLAMSLSRSPWANSTDYSSKSAYSVAQYSSPFRIIGRVNEVWFDVNCRSTAAGVESY

SEQ ID NO: 34341 - DNA, 1801 bp, Zea mays subsp. mays
  misc_feature (1)..(1801): Ceres Seq. ID no. 12351800
atcagcgtgttttgttttgtttcgtctcgtcgaccgagccgtccgtcgtcctccctggcggtctggccgcctccgccttcctccccgtgcgtctcacccttttcctctacagcttcctctgcccaatcagctcgtcctctcccctcctctccctcccgtgaactgctaaaatccctcgccaagcatttccgtcgggttaggtggtagataagccgaaaatcgagtggaaaagcatcaatcgagtgctgcgctagttgcctggttcgtcccaacaaattccaccgggaatcagggtcgtccggcagcggctgaggcgtctgggttctggaggagcggccgtcggtgaggggggatggggggcggcggcggatcctccgggccggagctgtcgacggacaacatgaaggggatagtcctggcgctgctctccagcggcttcatcggcgccagcttcatcatcaagaagaagggtctccgccgggccgctgtcgcctccggcgtccgtgcaggtgtaggcgggtactcatacctcatggagcccctgtggtgggttggcatgatcattatgattgtaggtgagattgccaatttcgtggcatatgctttcgcccccgctgttctggttactccccttggagcactcagcataattgttagtgcagtgctggctcatttcattctgaacgagaggctgcatgccctcggggtgctcggctgcgtgatgtgcattgcagggtctgtggtcattgttatccacgctccacaggagcaggagattacttcagttaaggaaatatggaacatggcgacacaacctgctttcttgttatatgttgcgtcagttattgtgattgtttttgtcctggtgttctatttctcccctctctatgggcagtccaatgtgttgatctacactgccatttgctctttgatgggctctctttcggttatgagtgttaaagctcttggtacatcactaaagcttacttttgagggaacaaaccaattaatatatccagagacttggttctttatgcttgttgtggctacttgtgtgttgactcagatgaattatctgaacaaggcacttgacacgttcaacacggcaattgtatctccaatatattatgtaatgttcacaactcttacaatacttgccagcgtcataatgttcaaggattggtctggtcaaagccctggaagcgtcatttctgaaatttgtggcttggttgtggtgttgtctggtaccattttgttgcatgtgacgaaggattatgaaaggatcccacaatcaagaagtgtttatgcaccattatctccctctttgacaactagattaaatggagaattgttgaagcatgtcgtggatgagaggacttcggacgaagaaaaggccttgagaagacaggagatgtattagcgtgcgtcagaatatcaaaggaaatataggttactctgatggattctccggcaggggcttgtacatggcgtagtgataaccttcccatagcgattgttgattcctccattacagtttgttggtttgtgtatataactgcagcaatttgtggctaccgagtgattgcaaatctgccgaggtggtggaaggctgcagagttccaccaaaaagaatctaagtcgggtgcatagattcttatcgaattcccttcttcctttcgtaacttcctcagttttgtccacggcatttgttccatgtgagttttagagtgaatcacggaccctatgcaactgatgtacattattattgtcatagtgaagttcgtgcaactgtgaatgatgt

SEQ ID NO: 34342 - protein, 355 aa, Zea mays subsp. mays
  peptide (1)..(355): Ceres Seq. ID no. 12351801
  misc_feature (12)..(307): Pfam Name: DUF803 Pfam Description: Protein of unknown function
  misc_feature (2)..(320): NCBI GI NO: 20161440 NR Description: B1065E10.15
  misc_feature (12)..(307): NCBI GI NO: 18399280 NR Description: expressed protein; protein id: At1g34470
  misc_feature (1)..(332): NCBI GI NO: 18409942 NR Description: expressed protein; protein id: At1g71900
  misc_feature (1)..(307): NCBI GI NO: 25406128 NR Description: unknown protein F17M19.5
  misc_feature (12)..(310): NCBI GI NO: 30681265 NR Description: expressed protein [Arabidopsis thaliana]
  misc_feature (14)..(315): NCBI GI NO: 26449939 NR Description: unknown protein [Arabidopsis thaliana]
  misc_feature (11)..(331): NCBI GI NO: 15229534 NR Description: unknown protein; protein id: At3g23870.1
  misc_feature (11)..(307): NCBI GI NO: 18414079 NR Description: expressed protein; protein id: At4g13800
  misc_feature (12)..(307): NCBI GI NO: 21593618 NR Description: unknown [Arabidopsis thaliana]
  misc_feature (19)..(307): NCBI GI NO: 23428942 NR Description: NIPA2 [Gallus gallus]
MGGGGGSSGPELSTDNMKGIVLALLSSGFIGASFIIKKKGLRRAAVASGVRAGVGGYSYLMEPLWWVGMIIMIVGEIANFVAYAFAPAVLVTPLGALSIIVSAVLAHFILNERLHALGVLGCVMCIAGSVVIVIHAPQEQEITSVKEIWNMATQPAFLLYVASVIVIVFVLVFYFSPLYGQSNVLIYTAICSLMGSLSVMSVKALGTSLKLTFEGTNQLIYPETWFFMLVVATCVLTQMNYLNKALDTFNTAIVSPIYYVMFTTLTILASVIMFKDWSGQSPGSVISEICGLVVVLSGTILLHVTKDYERIPQSRSVYAPLSPSLTTRLNGELLKHVVDERTSDEEKALRRQEMY

SEQ ID NO: 34343 - protein, 339 aa, Zea mays subsp. mays
  peptide (1)..(339): Ceres Seq. ID no. 12351802
  misc_feature (1)..(291): Pfam Name: DUF803 Pfam Description: Protein of unknown function
  misc_feature (1)..(304): NCBI GI NO: 20161440 NR Description: B1065E10.15
  misc_feature (1)..(291): NCBI GI NO: 18399280 NR Description: expressed protein; protein id: At1g34470
  misc_feature (1)..(316): NCBI GI NO: 18409942 NR Description: expressed protein; protein id: At1g71900
  misc_feature (1)..(291): NCBI GI NO: 25406128 NR Description: unknown protein F17M19.5
  misc_feature (1)..(294): NCBI GI NO: 30681265 NR Description: expressed protein [Arabidopsis thaliana]
  misc_feature (1)..(299): NCBI GI NO: 26449939 NR Description: unknown protein [Arabidopsis thaliana]
  misc_feature (1)..(315): NCBI GI NO: 15229534 NR Description: unknown protein; protein id: At3g23870.1
  misc_feature (1)..(291): NCBI GI NO: 18414079 NR Description: expressed protein; protein id: At4g13800
  misc_feature (1)..(291): NCBI GI NO: 21593618 NR Description: unknown [Arabidopsis thaliana]
  misc_feature (3)..(291): NCBI GI NO: 23428942 NR Description: NIPA2 [Gallus gallus]
MKGIVLALLSSGFIGASFIIKKKGLRRAAVASGVRAGVGGYSYLMEPLWWVGMIIMIVGEIANFVAYAFAPAVLVTPLGALSIIVSAVLAHFILNERLHALGVLGCVMCIAGSVVIVIHAPQEQEITSVKEIWNMATQPAFLLYVASVIVIVFVLVFYFSPLYGQSNVLIYTAICSLMGSLSVMSVKALGTSLKLTFEGTNQLIYPETWFFMLVVATCVLTQMNYLNKALDTFNTAIVSPIYYVMFTTLTILASVIMFKDWSGQSPGSVISEICGLVVVLSGTILLHVTKDYERIPQSRSVYAPLSPSLTTRLNGELLKHVVDERTSDEEKALRRQEMY

SEQ ID NO: 34344 - protein, 295 aa, Zea mays subsp. mays
  peptide (1)..(295): Ceres Seq. ID no. 12351803
  misc_feature (1)..(247): Pfam Name: DUF803 Pfam Description: Protein of unknown function
  misc_feature (1)..(260): NCBI GI NO: 20161440 NR Description: B1065E10.15
  misc_feature (1)..(247): NCBI GI NO: 18399280 NR Description: expressed protein; protein id: At1g34470
  misc_feature (1)..(272): NCBI GI NO: 18409942 NR Description: expressed protein; protein id: At1g71900
  misc_feature (1)..(247): NCBI GI NO: 25406128 NR Description: unknown protein F17M19.5
  misc_feature (1)..(250): NCBI GI NO: 30681265 NR Description: expressed protein [Arabidopsis thaliana]
  misc_feature (1)..(255): NCBI GI NO: 26449939 NR Description: unknown protein [Arabidopsis thaliana]
  misc_feature (1)..(271): NCBI GI NO: 15229534 NR Description: unknown protein; protein id: At3g23870.1
  misc_feature (1)..(247): NCBI GI NO: 18414079 NR Description: expressed protein; protein id: At4g13800
  misc_feature (1)..(247): NCBI GI NO: 21593618 NR Description: unknown [Arabidopsis thaliana]
  misc_feature (1)..(247): NCBI GI NO: 23428942 NR Description: NIPA2 [Gallus gallus]
MEPLWWVGMIIMIVGEIANFVAYAFAPAVLVTPLGALSIIVSAVLAHFILNERLHALGVLGCVMCIAGSVVIVIHAPQEQEITSVKEIWNMATQPAFLLYVASVIVIVFVLVFYFSPLYGQSNVLIYTAICSLMGSLSVMSVKALGTSLKLTFEGTNQLIYPETWFFMLVVATCVLTQMNYLNKALDTFNTAIVSPIYYVMFTTLTILASVIMFKDWSGQSPGSVISEICGLVVVLSGTILLHVTKDYERIPQSRSVYAPLSPSLTTRLNGELLKHVVDERTSDEEKALRRQEMY

SEQ ID NO: 34345 - DNA, 1334 bp, Zea mays subsp. mays
  misc_feature (1)..(1334): Ceres Seq. ID no. 12369102
atcttccgagatttgtctgcgcccctgcggcgcgcatggcgccacgactgaccgtggccttgggcggcgctcgggcatgagtacatggcgctcggtggcctcgcgtcgcgttactcacccaccggcaccgcgccacggccgcgttcgtctcaacaggagccgatggccactctcgcgccacggccacatatcctcctcggcttgacaaggccgcagcccatagcgcttcgtgcctgcgccgccttctcccgctcccgccacgcgccagtcccaccgcgggccgcgcagccgcggcgcgtcttcctcggccttggcctgccttcatcgaccaggccacccgcatggcctccggcggcacctcgtcccgctctttcgttgccggagcgcggccgaggcaaggcgtttccccagtcgagcagattctcaagaatgtcgagtggccagatgagttccctttcaagcctgaggacttcagccgcttcgacgaatcatcagatactctgttctactcggttccacgttttgtcactcacattgatgaccaagcaatccaagctctcacagagtactattctgaagttcttcctccaagtaatactcctggggtggccattctggacatgtgcagcagctgggtcagccattatcctcccggttacagacaagagaagatcgtggggatgggtatgaatgaagatgaactgaaaaagaactcggtactgactcagtatgtcgtgcaagacctcaatgtgaacccaaagcttcctttcgaagataacacttttgatgttatcaccaatgtggttagtgtagattaccttacaaagccaatagatgtttttaaggagatgcgacgaatactcaagccaagcggccttgccataatgagcttttcaaaccggtgcttttggacaaaagctatatctatatggacctcaactggtgatgctgatcatgcatggatagttggtgcttacttccattatgttggaggttttgaacctccccaggcacttgatatatctcctaatccaggacgaactgacccaatgtatgttgtatgctcgagaaagaaaatagggtaactaaacaatatatttggcaagtgctatcaagaaacaaatagaaggaaaaatacaagaagcaagttgtttggccctgatcgcaggacctattggtgagctgatgtttccgtgagtaatgtaacgacagaaaaaagaagcaactactacataaactatttatagaagcggcagattcacttcataggttgtagcaactgtctttactaaaagtgtgtttggtttgaggaatgaagtgatccatcttcttcc

SEQ ID NO: 34346 - protein, 247 aa, Zea mays subsp. mays
  peptide (1)..(247): Ceres Seq. ID no. 12369103
  misc_feature (1)..(246): NCBI GI NO: 34910520 NR Description: B1142C05.17
  misc_feature (3)..(244): NCBI GI NO: 14030675 NR Description: AT4g29590/T16L4_100 [Arabidopsis thaliana]
  misc_feature (3)..(244): NCBI GI NO: 15233624 NR Description: putative protein; protein id: At4g29590.1
  misc_feature (3)..(244): NCBI GI NO: 21536833 NR Description: unknown [Arabidopsis thaliana]
  misc_feature (41)..(246): NCBI GI NO: 22970815 NR Description: hypothetical protein [Chloroflexus aurantiacus]
  misc_feature (40)..(245): NCBI GI NO: 17232182 NR Description: hypothetical protein [Nostoc sp. PCC 7120]
  misc_feature (40)..(225): NCBI GI NO: 23129867 NR Description: hypothetical protein [Nostoc punctiforme]
  misc_feature (41)..(245): NCBI GI NO: 22298320 NR Description: ORF_ID:tlr0778~hypothetical protein
  misc_feature (42)..(229): NCBI GI NO: 15232158 NR Description: hypothetical protein; protein id: At3g01660.1
  misc_feature (45)..(216): NCBI GI NO: 23042398 NR Description: hypothetical protein
MASGGTSSRSFVAGARPRQGVSPVEQILKNVEWPDEFPFKPEDFSRFDESSDTLFYSVPRFVTHIDDQAIQALTEYYSEVLPPSNTPGVAILDMCSSWVSHYPPGYRQEKIVGMGMNEDELKKNSVLTQYVVQDLNVNPKLPFEDNTFDVITNVVSVDYLTKPIDVFKEMRRILKPSGLAIMSFSNRCFWTKAISIWTSTGDADHAWIVGAYFHYVGGFEPPQALDISPNPGRTDPMYVVCSRKKIG

SEQ ID NO: 34347 - protein, 201 aa, Zea mays subsp. mays
  peptide (1)..(201): Ceres Seq. ID no. 12369104
  misc_feature (27)..(77): NCBI GI NO: 34910520 NR Description: B1142C05.17
MALGGLASRYSPTGTAPRPRSSQQEPMATLAPRPHILLGLTRPQPIALRACAAFSRSRHAPVPPRAAQPRRVFLGLGLPSSTRPPAWPPAAPRPALSLPERGRGKAFPQSSRFSRMSSGQMSSLSSLRTSAASTNHQILCSTRFHVLSLTLMTKQSKLSQSTILKFFLQVILLGWPFWTCAAAGSAIILPVTDKRRSWGWV

SEQ ID NO: 34348 - protein, 175 aa, Zea mays subsp. mays
  peptide (1)..(175): Ceres Seq. ID no. 12369105
  misc_feature (1)..(51): NCBI GI NO: 34910520 NR Description: B1142C05.17
MATLAPRPHILLGLTRPQPIALRACAAFSRSRHAPVPPRAAQPRRVFLGLGLPSSTRPPAWPPAAPRPALSLPERGRGKAFPQSSRFSRMSSGQMSSLSSLRTSAASTNHQILCSTRFHVLSLTLMTKQSKLSQSTILKFFLQVILLGWPFWTCAAAGSAIILPVTDKRRSWGWV

SEQ ID NO: 34349 - DNA, 1620 bp, Zea mays subsp. mays
  misc_feature (1)..(1620): Ceres Seq. ID no. 12367514
aatggccgcctcctccccttccacctcctcccctaatggcagatgctaggcggcggcgcccctcttgagaagtgaaagggaaagatttgttttgccgcccgcgccctgctcaggcgctccgcctcggtcgggccacacaaggtagcgccttccgcctcgttgcctgacccattcctgtttcgttcgaagcactgaagcagccccagaccgacgccaggcgcccaggccagtggtcgacgcctgtggtgagctgataggcgatgtcgtcaccgtctccggtgctggcaagggctgcgcgtctcacgtgtaggttgtgatctttctgcccagagatgtgcgatttgtcttcgcttgatctgagtgacagtaaaacggagaccggctagtgttgttcctgaaacctgttgatttatggggagccagacaatcgcatcacaggctgggggaggtggaagaggcatgggtagtagtggtggtgccggtgcagcgcaacgcgggcagatgcagagtctggcaagacaagggtctctgtataaccttacccttgatgaggtgcagagccatttgggagaacccctacacagcatgaaccttgaggagctgctgaagagtgtctttcctgatgacctggaccctgatggtggcactaccagccaatatgagcagagttcgggcctcttgcgacagggaagtatcacaatgccgcctgagctcagcaggagaactgtggacgaggtgtggaaggacatccaggatgcaccaaacagaaatgttggggagagtggtcggcggaagcgggagcggcagccaacgcttggagagatgacgcttgaggatttcttggtgaaagctggggttgtcgccgaaggatatctgaaggacttgaatggcataggcagtgtggaacaggttggtagcactggggctgcgggtttgacagcaggggcacaatggttagaccactatcagcagcggattacagctatcgagccccatcagcacaggcaacatagtttgccaggtgcttacataccgggtcagttaagccttcagtccctgaatgttggaccaagtgctattttggagtcatactctgatggccacatttcttcaccgatgatgggtgcactttctgattctccgatgcctggtagaaagcgtggttccccaggagatgtggctgataagttggtggagagaaggcagaagaggatgatcaagaatagggagtcagctgctcgttcaagggctaggaagcaggcatacactaatgaactggaaaacaaggtttctcgattagaagaggagaataagaagctaaccacgttaaaggagttggaaaatatacttttctctgagcctcttccggaacccaagtaccaactgaggagaaccggctcagcgactttctgattgtatgcagaatatcttgttttgctgtaggttgtaagtcctgtagcttactagcaggagccgagcatgtgctgtccgaggccttgctaccagtatagtatgtaaaatcttcaggacacatgtaggtggtcggagcttgtttacatggtgtgacttaacagatggatacatataactatgagaagtatgggagccctttctttggtg

SEQ ID NO: 34350 - protein, 333 aa, Zea mays subsp. mays
  peptide (1)..(333): Ceres Seq. ID no. 12367515
  misc_feature (258)..(316): Pfam Name: Pfam Description:  bZIP transcription factor
  misc_feature (6)..(308): NCBI GI NO: 34909206 NR Description: putative promoter-binding factor-like protein
  misc_feature (32)..(187): NCBI GI NO: 26451276 NR Description: putative bZIP transcription factor AtbZIP12 / DPBF4
  misc_feature (236)..(332): NCBI GI NO: 26451276 NR Description: putative bZIP transcription factor AtbZIP12 / DPBF4
  misc_feature (32)..(187): NCBI GI NO: 18405590 NR Description: bZIP family transcription factor
  misc_feature (236)..(332): NCBI GI NO: 18405590 NR Description: bZIP family transcription factor
  misc_feature (53)..(187): NCBI GI NO: 21694632 NR Description: basic leucine zipper transcription factor
  misc_feature (236)..(332): NCBI GI NO: 21694632 NR Description: basic leucine zipper transcription factor
  misc_feature (59)..(187): NCBI GI NO: 7487620 NR Description: probable bZIP transcription factor
  misc_feature (236)..(332): NCBI GI NO: 7487620 NR Description: probable bZIP transcription factor
  misc_feature (82)..(333): NCBI GI NO: 7489325 NR Description: Dc3 promoter-binding factor-3 - common sunflower
MGSQTIASQAGGGGRGMGSSGGAGAAQRGQMQSLARQGSLYNLTLDEVQSHLGEPLHSMNLEELLKSVFPDDLDPDGGTTSQYEQSSGLLRQGSITMPPELSRRTVDEVWKDIQDAPNRNVGESGRRKRERQPTLGEMTLEDFLVKAGVVAEGYLKDLNGIGSVEQVGSTGAAGLTAGAQWLDHYQQRITAIEPHQHRQHSLPGAYIPGQLSLQSLNVGPSAILESYSDGHISSPMMGALSDSPMPGRKRGSPGDVADKLVERRQKRMIKNRESAARSRARKQAYTNELENKVSRLEEENKKLTTLKELENILFSEPLPEPKYQLRRTGSATF

SEQ ID NO: 34351 - protein, 317 aa, Zea mays subsp. mays
  peptide (1)..(317): Ceres Seq. ID no. 12367516
  misc_feature (242)..(300): Pfam Name: Pfam Description:  bZIP transcription factor
  misc_feature (1)..(292): NCBI GI NO: 34909206 NR Description: putative promoter-binding factor-like protein
  misc_feature (16)..(171): NCBI GI NO: 26451276 NR Description: putative bZIP transcription factor AtbZIP12 / DPBF4
  misc_feature (220)..(316): NCBI GI NO: 26451276 NR Description: putative bZIP transcription factor AtbZIP12 / DPBF4
  misc_feature (16)..(171): NCBI GI NO: 18405590 NR Description: bZIP family transcription factor
  misc_feature (220)..(316): NCBI GI NO: 18405590 NR Description: bZIP family transcription factor
  misc_feature (37)..(171): NCBI GI NO: 21694632 NR Description: basic leucine zipper transcription factor
  misc_feature (220)..(316): NCBI GI NO: 21694632 NR Description: basic leucine zipper transcription factor
  misc_feature (43)..(171): NCBI GI NO: 7487620 NR Description: probable bZIP transcription factor
  misc_feature (220)..(316): NCBI GI NO: 7487620 NR Description: probable bZIP transcription factor
  misc_feature (66)..(317): NCBI GI NO: 7489325 NR Description: Dc3 promoter-binding factor-3 - common sunflower
MGSSGGAGAAQRGQMQSLARQGSLYNLTLDEVQSHLGEPLHSMNLEELLKSVFPDDLDPDGGTTSQYEQSSGLLRQGSITMPPELSRRTVDEVWKDIQDAPNRNVGESGRRKRERQPTLGEMTLEDFLVKAGVVAEGYLKDLNGIGSVEQVGSTGAAGLTAGAQWLDHYQQRITAIEPHQHRQHSLPGAYIPGQLSLQSLNVGPSAILESYSDGHISSPMMGALSDSPMPGRKRGSPGDVADKLVERRQKRMIKNRESAARSRARKQAYTNELENKVSRLEEENKKLTTLKELENILFSEPLPEPKYQLRRTGSATF

SEQ ID NO: 34352 - protein, 303 aa, Zea mays subsp. mays
  peptide (1)..(303): Ceres Seq. ID no. 12367517
  misc_feature (228)..(286): Pfam Name: Pfam Description:  bZIP transcription factor
  misc_feature (1)..(278): NCBI GI NO: 34909206 NR Description: putative promoter-binding factor-like protein
  misc_feature (2)..(157): NCBI GI NO: 26451276 NR Description: putative bZIP transcription factor AtbZIP12 / DPBF4
  misc_feature (206)..(302): NCBI GI NO: 26451276 NR Description: putative bZIP transcription factor AtbZIP12 / DPBF4
  misc_feature (2)..(157): NCBI GI NO: 18405590 NR Description: bZIP family transcription factor
  misc_feature (206)..(302): NCBI GI NO: 18405590 NR Description: bZIP family transcription factor
  misc_feature (23)..(157): NCBI GI NO: 21694632 NR Description: basic leucine zipper transcription factor
  misc_feature (206)..(302): NCBI GI NO: 21694632 NR Description: basic leucine zipper transcription factor
  misc_feature (29)..(157): NCBI GI NO: 7487620 NR Description: probable bZIP transcription factor
  misc_feature (206)..(302): NCBI GI NO: 7487620 NR Description: probable bZIP transcription factor
  misc_feature (52)..(303): NCBI GI NO: 7489325 NR Description: Dc3 promoter-binding factor-3 - common sunflower
MQSLARQGSLYNLTLDEVQSHLGEPLHSMNLEELLKSVFPDDLDPDGGTTSQYEQSSGLLRQGSITMPPELSRRTVDEVWKDIQDAPNRNVGESGRRKRERQPTLGEMTLEDFLVKAGVVAEGYLKDLNGIGSVEQVGSTGAAGLTAGAQWLDHYQQRITAIEPHQHRQHSLPGAYIPGQLSLQSLNVGPSAILESYSDGHISSPMMGALSDSPMPGRKRGSPGDVADKLVERRQKRMIKNRESAARSRARKQAYTNELENKVSRLEEENKKLTTLKELENILFSEPLPEPKYQLRRTGSATF

SEQ ID NO: 34353 - DNA, 1245 bp, Zea mays subsp. mays
  misc_feature (1)..(1245): Ceres Seq. ID no. 12343927
aaaacgttatgtttattcgatttcgtgtcctgtccgtttgacgaccgagccctgccccccttttccagtttccttctcccttcctgccgctgcggcggtggcggcaacgactcgcgcgggccggtcctaggttctcccggagcggttcggcgggatgggcacgccggagttccccaacctgggaaagcactgcagcgtcggagactgcaaccagatcgacttcctccccttcacctgcgaccgctgcgaccatgtcttttgccttgatcaccgaagttatacatcacaccaatgcccaaatgcaaacatgaaagacgtcactgtcctcatctgcccactctgtgctaaaggtgttcgcctcaatccaagtgaagacccaaatatcacctgggatactcatgttaacactgattgtgatccatcaaattaccaaaaagtgatgaagaaaaagaaatgccctgttcctgggtgcagagagacactgacattttccaacaccatcagatgcaaagattgcaccagagaacactgcctaaagcacagatttgggcctgatcataagtgcccaggaccaagaaaagtggattctggctttccctttgtaagcatgctaaggagaagtcagaaagcggagacacgctcaaatagcagtaacaacaatggttcttcgtggtggagctccagtcttgtgaatgcagcaacgaatttcaaatcatcagccgaagctggaatgcagaagctgagcaccgtgactagccaagccttccagaaggctaaggatgggatcgccccaaatagcagcagcagcagtggtgaccttgtggagcaatgtgttcactgcccagcaagattttccaccgtgggggccttaattgaacatgttgagaaatcccaccagatcaactcacaaccaagtcatggccgagtgacgattgatgtttgcccaaaatgcagcaaggcgttccgggatcctgtgttgcttgtggagcatgttgagaaggagcatggaggaacgtcaagagtgtagtgtaaagcttcgtgtgtgctcttaacctttgtaatgtgtaacttttcgttaccttttctcatttcatcaatttgattatactctacacttttgggctcaacatttgcccacaggacaagtatattacgctggattgaaggcaaagcagccattgtccatcattatagaaactgaagtaagatttgttaagaaaatgttaatatctgtcgcaactggtg

SEQ ID NO: 34354 - protein, 290 aa, Zea mays subsp. mays
  peptide (1)..(290): Ceres Seq. ID no. 12343928
  misc_feature (101)..(145): Pfam Name: Pfam Description:  AN1-like Zinc finger
  misc_feature (1)..(289): NCBI GI NO: 33146779 NR Description: putative arsenite inducible RNA associated protein
  misc_feature (1)..(289): NCBI GI NO: 30688811 NR Description: zinc finger protein (PMZ) -related
  misc_feature (1)..(252): NCBI GI NO: 15230311 NR Description: putative protein; protein id: At3g57480.1
  misc_feature (1)..(137): NCBI GI NO: 15232930 NR Description: zinc finger protein
  misc_feature (5)..(225): NCBI GI NO: 33416395 NR Description: Unknown (protein for MGC:66295) [Danio rerio]
  misc_feature (3)..(216): NCBI GI NO: 31207325 NR Description: ENSANGP00000015397 [Anopheles gambiae]
  misc_feature (5)..(163): NCBI GI NO: 24581431 NR Description: CG12795-PA [Drosophila melanogaster]
  misc_feature (5)..(161): NCBI GI NO: 20270357 NR Description: hypothetical protein BC018415 [Homo sapiens]
  misc_feature (5)..(161): NCBI GI NO: 21749694 NR Description: unnamed protein product [Homo sapiens]
  misc_feature (5)..(207): NCBI GI NO: 21312112 NR Description: RIKEN cDNA 1110060O18 [Mus musculus]
MGTPEFPNLGKHCSVGDCNQIDFLPFTCDRCDHVFCLDHRSYTSHQCPNANMKDVTVLICPLCAKGVRLNPSEDPNITWDTHVNTDCDPSNYQKVMKKKKCPVPGCRETLTFSNTIRCKDCTREHCLKHRFGPDHKCPGPRKVDSGFPFVSMLRRSQKAETRSNSSNNNGSSWWSSSLVNAATNFKSSAEAGMQKLSTVTSQAFQKAKDGIAPNSSSSSGDLVEQCVHCPARFSTVGALIEHVEKSHQINSQPSHGRVTIDVCPKCSKAFRDPVLLVEHVEKEHGGTSRV

SEQ ID NO: 34355 - protein, 239 aa, Zea mays subsp. mays
  peptide (1)..(239): Ceres Seq. ID no. 12343929
  misc_feature (50)..(94): Pfam Name: Pfam Description:  AN1-like Zinc finger
  misc_feature (1)..(238): NCBI GI NO: 33146779 NR Description: putative arsenite inducible RNA associated protein
  misc_feature (1)..(238): NCBI GI NO: 30688811 NR Description: zinc finger protein (PMZ) -related
  misc_feature (1)..(201): NCBI GI NO: 15230311 NR Description: putative protein; protein id: At3g57480.1
  misc_feature (1)..(86): NCBI GI NO: 15232930 NR Description: zinc finger protein
  misc_feature (1)..(174): NCBI GI NO: 33416395 NR Description: Unknown (protein for MGC:66295) [Danio rerio]
  misc_feature (1)..(165): NCBI GI NO: 31207325 NR Description: ENSANGP00000015397 [Anopheles gambiae]
  misc_feature (1)..(112): NCBI GI NO: 24581431 NR Description: CG12795-PA [Drosophila melanogaster]
  misc_feature (1)..(110): NCBI GI NO: 20270357 NR Description: hypothetical protein BC018415 [Homo sapiens]
  misc_feature (1)..(110): NCBI GI NO: 21749694 NR Description: unnamed protein product [Homo sapiens]
  misc_feature (1)..(156): NCBI GI NO: 21312112 NR Description: RIKEN cDNA 1110060O18 [Mus musculus]
MKDVTVLICPLCAKGVRLNPSEDPNITWDTHVNTDCDPSNYQKVMKKKKCPVPGCRETLTFSNTIRCKDCTREHCLKHRFGPDHKCPGPRKVDSGFPFVSMLRRSQKAETRSNSSNNNGSSWWSSSLVNAATNFKSSAEAGMQKLSTVTSQAFQKAKDGIAPNSSSSSGDLVEQCVHCPARFSTVGALIEHVEKSHQINSQPSHGRVTIDVCPKCSKAFRDPVLLVEHVEKEHGGTSRV

SEQ ID NO: 34356 - protein, 195 aa, Zea mays subsp. mays
  peptide (1)..(195): Ceres Seq. ID no. 12343930
  misc_feature (6)..(50): Pfam Name: Pfam Description:  AN1-like Zinc finger
  misc_feature (1)..(194): NCBI GI NO: 33146779 NR Description: putative arsenite inducible RNA associated protein
  misc_feature (1)..(194): NCBI GI NO: 30688811 NR Description: zinc finger protein (PMZ) -related
  misc_feature (1)..(157): NCBI GI NO: 15230311 NR Description: putative protein; protein id: At3g57480.1
  misc_feature (1)..(42): NCBI GI NO: 15232930 NR Description: zinc finger protein
  misc_feature (1)..(130): NCBI GI NO: 33416395 NR Description: Unknown (protein for MGC:66295) [Danio rerio]
  misc_feature (1)..(121): NCBI GI NO: 31207325 NR Description: ENSANGP00000015397 [Anopheles gambiae]
  misc_feature (1)..(68): NCBI GI NO: 24581431 NR Description: CG12795-PA [Drosophila melanogaster]
  misc_feature (1)..(66): NCBI GI NO: 20270357 NR Description: hypothetical protein BC018415 [Homo sapiens]
  misc_feature (1)..(66): NCBI GI NO: 21749694 NR Description: unnamed protein product [Homo sapiens]
  misc_feature (1)..(112): NCBI GI NO: 21312112 NR Description: RIKEN cDNA 1110060O18 [Mus musculus]
MKKKKCPVPGCRETLTFSNTIRCKDCTREHCLKHRFGPDHKCPGPRKVDSGFPFVSMLRRSQKAETRSNSSNNNGSSWWSSSLVNAATNFKSSAEAGMQKLSTVTSQAFQKAKDGIAPNSSSSSGDLVEQCVHCPARFSTVGALIEHVEKSHQINSQPSHGRVTIDVCPKCSKAFRDPVLLVEHVEKEHGGTSRV

SEQ ID NO: 34357 - DNA, 1231 bp, Zea mays subsp. mays
  misc_feature (1)..(1231): Ceres Seq. ID no. 12344599
agagttatgttcactccacaagacaatcacactagagtactggacggagtcgaggagcaggcgacaccttcaccgcttcggtaacggatcgacaggcgacagctcacagctggcggtggtttggctcggggacggggtgcggcggcctccgcgagcagttcggcagcgacacggcgcggggggtggggcgccttgctggctggtgtagcgtagtgcggggccacaacgaggaagcggtggcatccagcaggcaccatcagaaaaccacatggctcggcaaccttggagcaataatggccatagaaattccccttcaaattcattagatggaggagttcctggacccatgcctctggtccctttccaggaggaacttgcagttggttgtgaagagattcgtagaattgctgctgataatactcttgtgctagaggatattctgggccttaggcaagaattagctgtcattgaagacgagatccatatacttgccaaacaaaccattcccagacttcgtgttgataatgaaatggaatacagggatattatccagggaggcatgaagttagaggaacagatgcatgctcttaaacttatcaaggaagaagtgttggtcctaagttctgaaaagatggagttggaagctttgtgcaaagagctatctgtgaaggttcagtcattgtacagggagctggagcagatccaatccgagaacaagcagatacctgctataagagaagggttgcatgatatacaagaggagatttcgagggccaggatggcatacgagcatgagaaacgtgcaaaagttgagcttcttgaggagagtcaggccatagagagtgattttatcaacataaaaatggaagcacagagattgcggacagagctggagaagaggaggtctggtgtgttcaagcatcatgcatttggctcatactataaaagatagagcatggcattgcatcctccaactgataggtgggcgtcacaaagcgtagctaagggtttggtgtctattagagaaattaatcgaactcaggagtcaagaccaaatgcgtttgtctttcggatgagcagctgacatttatttgcgaacacgttgctattattatatctcattattaagtaggagtacaaattggacgattgaaagaagaatattatcaatttggtctttattgtactcctacttattttttctctcgaaaagtactcctacttatttttg

SEQ ID NO: 34358 - protein, 227 aa, Zea mays subsp. mays
  peptide (1)..(227): Ceres Seq. ID no. 12344600
  misc_feature (22)..(222): NCBI GI NO: 38175471 NR Description: myosin-like protein
  misc_feature (42)..(208): NCBI GI NO: 18405242 NR Description: expressed protein; protein id: At1g55170
  misc_feature (42)..(208): NCBI GI NO: 25405799 NR Description: myosin-like protein, 97843-94399
  misc_feature (1)..(208): NCBI GI NO: 30697468 NR Description: expressed protein [Arabidopsis thaliana]
  misc_feature (1)..(208): NCBI GI NO: 25404669 NR Description: hypothetical protein F5A8.8
  misc_feature (21)..(215): NCBI GI NO: 28876008 NR Description: hypothetical protein
  misc_feature (15)..(223): NCBI GI NO: 18400511 NR Description: expressed protein; protein id: At3g14750
  misc_feature (15)..(223): NCBI GI NO: 9294396 NR Description: gb|AAD10662
  misc_feature (21)..(215): NCBI GI NO: 33146484 NR Description: myosin-like protein
  misc_feature (33)..(213): NCBI GI NO: 15240385 NR Description: putative protein; protein id: At5g61920.1
MARQPWSNNGHRNSPSNSLDGGVPGPMPLVPFQEELAVGCEEIRRIAADNTLVLEDILGLRQELAVIEDEIHILAKQTIPRLRVDNEMEYRDIIQGGMKLEEQMHALKLIKEEVLVLSSEKMELEALCKELSVKVQSLYRELEQIQSENKQIPAIREGLHDIQEEISRARMAYEHEKRAKVELLEESQAIESDFINIKMEAQRLRTELEKRRSGVFKHHAFGSYYKR

SEQ ID NO: 34359 - protein, 201 aa, Zea mays subsp. mays
  peptide (1)..(201): Ceres Seq. ID no. 12344601
  misc_feature (1)..(196): NCBI GI NO: 38175471 NR Description: myosin-like protein
  misc_feature (16)..(182): NCBI GI NO: 18405242 NR Description: expressed protein; protein id: At1g55170
  misc_feature (16)..(182): NCBI GI NO: 25405799 NR Description: myosin-like protein, 97843-94399
  misc_feature (1)..(182): NCBI GI NO: 30697468 NR Description: expressed protein [Arabidopsis thaliana]
  misc_feature (1)..(182): NCBI GI NO: 25404669 NR Description: hypothetical protein F5A8.8
  misc_feature (1)..(189): NCBI GI NO: 28876008 NR Description: hypothetical protein
  misc_feature (1)..(197): NCBI GI NO: 18400511 NR Description: expressed protein; protein id: At3g14750
  misc_feature (1)..(197): NCBI GI NO: 9294396 NR Description: gb|AAD10662
  misc_feature (1)..(189): NCBI GI NO: 33146484 NR Description: myosin-like protein
  misc_feature (7)..(187): NCBI GI NO: 15240385 NR Description: putative protein; protein id: At5g61920.1
MPLVPFQEELAVGCEEIRRIAADNTLVLEDILGLRQELAVIEDEIHILAKQTIPRLRVDNEMEYRDIIQGGMKLEEQMHALKLIKEEVLVLSSEKMELEALCKELSVKVQSLYRELEQIQSENKQIPAIREGLHDIQEEISRARMAYEHEKRAKVELLEESQAIESDFINIKMEAQRLRTELEKRRSGVFKHHAFGSYYKR

SEQ ID NO: 34360 - protein, 140 aa, Zea mays subsp. mays
  peptide (1)..(140): Ceres Seq. ID no. 12344602
  misc_feature (1)..(135): NCBI GI NO: 38175471 NR Description: myosin-like protein
  misc_feature (1)..(121): NCBI GI NO: 18405242 NR Description: expressed protein; protein id: At1g55170
  misc_feature (1)..(121): NCBI GI NO: 25405799 NR Description: myosin-like protein, 97843-94399
  misc_feature (1)..(121): NCBI GI NO: 30697468 NR Description: expressed protein [Arabidopsis thaliana]
  misc_feature (1)..(121): NCBI GI NO: 25404669 NR Description: hypothetical protein F5A8.8
  misc_feature (1)..(128): NCBI GI NO: 28876008 NR Description: hypothetical protein
  misc_feature (1)..(136): NCBI GI NO: 18400511 NR Description: expressed protein; protein id: At3g14750
  misc_feature (1)..(136): NCBI GI NO: 9294396 NR Description: gb|AAD10662
  misc_feature (1)..(128): NCBI GI NO: 33146484 NR Description: myosin-like protein
  misc_feature (1)..(126): NCBI GI NO: 15240385 NR Description: putative protein; protein id: At5g61920.1
MEYRDIIQGGMKLEEQMHALKLIKEEVLVLSSEKMELEALCKELSVKVQSLYRELEQIQSENKQIPAIREGLHDIQEEISRARMAYEHEKRAKVELLEESQAIESDFINIKMEAQRLRTELEKRRSGVFKHHAFGSYYKR

SEQ ID NO: 34361 - DNA, 809 bp, Zea mays subsp. mays
  misc_feature (1)..(809): Ceres Seq. ID no. 12462322
  misc_feature (777)..(777): n is a, c, t, g, unknown, or other
  misc_feature (615)..(615): n is a, c, t, g, unknown, or other
  misc_feature (454)..(454): n is a, c, t, g, unknown, or other
  misc_feature (781)..(781): n is a, c, t, g, unknown, or other
acatatctccatctcacccgcgcgcccacgcgcctccaccacgccatccatcgcaatggccgccgccgccgcgctcctcctcctcctgtgcgccgcgtctctcgcgtccgcagccgccgacgacgggttgacgaccttcaaggtgtacttccacgacgtcgtggcggggacgaacccgacggcggtgcgcatcgcgcaggcggcgtcctccaacacgtcgtccaccaacttcggcgcggtggtggccatcgacgacccgctgacgacgggtcccacgcgcgccgcgggcacggaggtgggccgcgcccagggcacctacacgttcgcggaccagcagacgttcggcctcctcatggtcatgaacttcgtgttcacggccggcgagcacaacggcagcacgctctccatccttggccgcaacgaggtgctcagcgacgtccgcgagatgagcatngtcggcggcagcggcaagttccgcatggcgcgcgggtacgtgcaggcgcacaccatcgactccggcgccacctccgggaccaccgtcgtccagtacaccgtcaacgtcaaggcctagctacctgttacgtacccttgcttgcgactccgggccgtggcttntcgtacgtccatccatatctccggctgctttgtacacaccttgtctgtcgtctttgagcgggattcggatttgcagagccgaatttactactaaagtttcaaaatttcacagagttgtagggtcgagaattaaatgtgtcgaaaacacgttagcgaccattnttanatagtttttgttggaattttgttggccc

SEQ ID NO: 34362 - protein, 223 aa, Zea mays subsp. mays
  peptide (1)..(223): Ceres Seq. ID no. 12462323
  misc_feature (152)..(152): Xaa is any aa, unknown or other
  misc_feature (205)..(205): Xaa is any aa, unknown or other
TYLHLTRAPTRLHHAIHRNGRRRRAPPPPVRRVSRVRSRRRRVDDLQGVLPRRRGGDEPDGGAHRAGGVLQHVVHQLRRGGGHRRPADDGSHARRGHGGGPRPGHLHVRGPADVRPPHGHELRVHGRRAQRQHALHPWPQRGAQRRPRDEHXRRQRQVPHGARVRAGAHHRLRRHLRDHRRPVHRQRQGLATCYVPLLATPGRGXSYVHPYLRLLCTHLVCRL

SEQ ID NO: 34363 - protein, 189 aa, Zea mays subsp. mays
  peptide (1)..(189): Ceres Seq. ID no. 12462324
  misc_feature (41)..(187): Pfam Name: Pfam Description:  Dirigent-like protein
  misc_feature (41)..(187): NCBI GI NO: 15218836 NR Description: disease resistance response protein-related/dirigent protein-related
  misc_feature (41)..(185): NCBI GI NO: 15238980 NR Description: disease resistance response protein-related
  misc_feature (41)..(185): NCBI GI NO: 15219966 NR Description: disease resistance response protein-related
  misc_feature (43)..(183): NCBI GI NO: 15217886 NR Description: disease resistance response protein-related/dirigent protein-related
  misc_feature (43)..(187): NCBI GI NO: 15222673 NR Description: disease resistance response protein-related/dirigent protein-related
  misc_feature (43)..(187): NCBI GI NO: 22135914 NR Description: unknown protein [Arabidopsis thaliana]
  misc_feature (43)..(169): NCBI GI NO: 15239779 NR Description: disease resistance response protein-related/dirigent protein-related
  misc_feature (44)..(185): NCBI GI NO: 15238982 NR Description: disease resistance response protein-related
  misc_feature (43)..(187): NCBI GI NO: 15231302 NR Description: disease resistance response protein-related/dirigent protein-related
  misc_feature (43)..(169): NCBI GI NO: 15231318 NR Description: disease resistance response protein-related/dirigent protein-related
  misc_feature (151)..(151): Xaa is any aa, unknown or other
HISISPARPRASTTPSIAMAAAAALLLLLCAASLASAAADDGLTTFKVYFHDVVAGTNPTAVRIAQAASSNTSSTNFGAVVAIDDPLTTGPTRAAGTEVGRAQGTYTFADQQTFGLLMVMNFVFTAGEHNGSTLSILGRNEVLSDVREMSXVGGSGKFRMARGYVQAHTIDSGATSGTTVVQYTVNVKA

SEQ ID NO: 34364 - protein, 171 aa, Zea mays subsp. mays
  peptide (1)..(171): Ceres Seq. ID no. 12462325
  misc_feature (23)..(169): Pfam Name: Pfam Description:  Dirigent-like protein
  misc_feature (23)..(169): NCBI GI NO: 15218836 NR Description: disease resistance response protein-related/dirigent protein-related
  misc_feature (23)..(167): NCBI GI NO: 15238980 NR Description: disease resistance response protein-related
  misc_feature (23)..(167): NCBI GI NO: 15219966 NR Description: disease resistance response protein-related
  misc_feature (25)..(165): NCBI GI NO: 15217886 NR Description: disease resistance response protein-related/dirigent protein-related
  misc_feature (25)..(169): NCBI GI NO: 15222673 NR Description: disease resistance response protein-related/dirigent protein-related
  misc_feature (25)..(169): NCBI GI NO: 22135914 NR Description: unknown protein [Arabidopsis thaliana]
  misc_feature (25)..(151): NCBI GI NO: 15239779 NR Description: disease resistance response protein-related/dirigent protein-related
  misc_feature (26)..(167): NCBI GI NO: 15238982 NR Description: disease resistance response protein-related
  misc_feature (25)..(169): NCBI GI NO: 15231302 NR Description: disease resistance response protein-related/dirigent protein-related
  misc_feature (25)..(151): NCBI GI NO: 15231318 NR Description: disease resistance response protein-related/dirigent protein-related
  misc_feature (133)..(133): Xaa is any aa, unknown or other
MAAAAALLLLLCAASLASAAADDGLTTFKVYFHDVVAGTNPTAVRIAQAASSNTSSTNFGAVVAIDDPLTTGPTRAAGTEVGRAQGTYTFADQQTFGLLMVMNFVFTAGEHNGSTLSILGRNEVLSDVREMSXVGGSGKFRMARGYVQAHTIDSGATSGTTVVQYTVNVKA

SEQ ID NO: 34365 - DNA, 1436 bp, Zea mays subsp. mays
  misc_feature (1)..(1436): Ceres Seq. ID no. 12414721
aaaccgttggataaagacgctgcaaactgaatagggagcaagacggttccggagtccggactcaagtcccccaaaaatcccaatcgaacccgtccgcctatcgccccaaaccctcgcccagctcgaggtcctcgccgccggccgccggccgccgtctccgtccgaccgccgccatggctcgcaacgaggagaaggcgcagtcaatgctgaaccgcttcatcacgatgaagcaggaggagaagcgcaagccccgagagcgccggccctacctcgcctccgagtgccgggacctcgccgacgccgagcgctggcgctctgagatcctccgcgagatcggcgccaaggtcgccgagatccagaacgagggtctcggcgagcaccgcctccgcgacctcaacgacgagatcaacaaactcctccgcgagcgcggccactgggagcgccgcatcgtcgagctcggcggccgcgactactcccgcagctccaacgcgccgctcatgaccgacctcgacggcaacatagtcgccgtccccaacccctcgggtcgcggaccggggtaccgctactttggcgcggccaggaagctccctggcgtgcgggagctcttcgacaagccgcctgagatgcggaagcgacgcacccgctacgagatccacaagcgcatcaacgccgggtactacggatactatgacgatgaggacggcgtgctagagcgccttgagggccctgccgagaagcgcatgcgggaggagattgtttcagagtggcaccgtgtggaacgggtgcggcgggaggccatgaagggggtgatgagcggtgaggtggctgcggctggagggcgcagcggggaggctgctagagaggttctgtttgagggggtggaggaggaggtcgaagaggagaggaagcgcgaggaagagaagagagagagggagaaaggcgaggaagttgggagggaattcgttgcacatgtgccgctacctgatgaaaaggagattgagcgcatggtattagagaggaagaagaaggagctgcttagcaagtatgccagcgattccctgctggttgagcaggaggaggccaaggagatgctcaatgtccgacgctagaagacgactggccaattgaagctttcattgtgagctcaagacgagcactgaggtacaagaaggaacatcttttgaagtgctggcaccggggggaccaaagacattgttatgtaaaagaaaacaggtttgcctgaaatcacattttatgtgtttaatcagacttgagcgagtgatactggtgcctgtgtgccctgaacgaaggctagacttgtggtattgatgtgcctgtgtgcactgtaacttaactcgtatcatgtacagccattggctgcaatgcactgatcattgatcccttaaaatttcagtgatatagcaaaatctgatcgt

SEQ ID NO: 34366 - protein, 311 aa, Zea mays subsp. mays
  peptide (1)..(311): Ceres Seq. ID no. 12414722
  misc_feature (1)..(292): Pfam Name: Pfam Description:  Isy1-like splicing family
  misc_feature (1)..(311): NCBI GI NO: 15230193 NR Description: unknown protein; protein id: At3g18790
  misc_feature (1)..(307): NCBI GI NO: 13938521 NR Description: Unknown (protein for MGC:2431) [Homo sapiens]
  misc_feature (1)..(198): NCBI GI NO: 17561262 NR Description: Putative protein
  misc_feature (192)..(291): NCBI GI NO: 17561262 NR Description: Putative protein
  misc_feature (1)..(198): NCBI GI NO: 39591921 NR Description: Hypothetical protein CBG23070
  misc_feature (192)..(291): NCBI GI NO: 39591921 NR Description: Hypothetical protein CBG23070
  misc_feature (1)..(208): NCBI GI NO: 34856385 NR Description: similar to RIKEN cDNA 5830446M03
  misc_feature (1)..(252): NCBI GI NO: 20149316 NR Description: expressed sequence AU020769 [Mus musculus]
  misc_feature (1)..(208): NCBI GI NO: 6330157 NR Description: KIAA1160 protein [Homo sapiens]
  misc_feature (1)..(208): NCBI GI NO: 20149304 NR Description: KIAA1160 protein [Homo sapiens]
MARNEEKAQSMLNRFITMKQEEKRKPRERRPYLASECRDLADAERWRSEILREIGAKVAEIQNEGLGEHRLRDLNDEINKLLRERGHWERRIVELGGRDYSRSSNAPLMTDLDGNIVAVPNPSGRGPGYRYFGAARKLPGVRELFDKPPEMRKRRTRYEIHKRINAGYYGYYDDEDGVLERLEGPAEKRMREEIVSEWHRVERVRREAMKGVMSGEVAAAGGRSGEAAREVLFEGVEEEVEEERKREEEKREREKGEEVGREFVAHVPLPDEKEIERMVLERKKKELLSKYASDSLLVEQEEAKEMLNVRR

SEQ ID NO: 34367 - protein, 301 aa, Zea mays subsp. mays
  peptide (1)..(301): Ceres Seq. ID no. 12414723
  misc_feature (1)..(282): Pfam Name: Pfam Description:  Isy1-like splicing family
  misc_feature (1)..(301): NCBI GI NO: 15230193 NR Description: unknown protein; protein id: At3g18790
  misc_feature (1)..(297): NCBI GI NO: 13938521 NR Description: Unknown (protein for MGC:2431) [Homo sapiens]
  misc_feature (1)..(188): NCBI GI NO: 17561262 NR Description: Putative protein
  misc_feature (182)..(281): NCBI GI NO: 17561262 NR Description: Putative protein
  misc_feature (1)..(188): NCBI GI NO: 39591921 NR Description: Hypothetical protein CBG23070
  misc_feature (182)..(281): NCBI GI NO: 39591921 NR Description: Hypothetical protein CBG23070
  misc_feature (1)..(198): NCBI GI NO: 34856385 NR Description: similar to RIKEN cDNA 5830446M03
  misc_feature (1)..(242): NCBI GI NO: 20149316 NR Description: expressed sequence AU020769 [Mus musculus]
  misc_feature (1)..(198): NCBI GI NO: 6330157 NR Description: KIAA1160 protein [Homo sapiens]
  misc_feature (1)..(198): NCBI GI NO: 20149304 NR Description: KIAA1160 protein [Homo sapiens]
MLNRFITMKQEEKRKPRERRPYLASECRDLADAERWRSEILREIGAKVAEIQNEGLGEHRLRDLNDEINKLLRERGHWERRIVELGGRDYSRSSNAPLMTDLDGNIVAVPNPSGRGPGYRYFGAARKLPGVRELFDKPPEMRKRRTRYEIHKRINAGYYGYYDDEDGVLERLEGPAEKRMREEIVSEWHRVERVRREAMKGVMSGEVAAAGGRSGEAAREVLFEGVEEEVEEERKREEEKREREKGEEVGREFVAHVPLPDEKEIERMVLERKKKELLSKYASDSLLVEQEEAKEMLNVRR

SEQ ID NO: 34368 - protein, 294 aa, Zea mays subsp. mays
  peptide (1)..(294): Ceres Seq. ID no. 12414724
  misc_feature (1)..(275): Pfam Name: Pfam Description:  Isy1-like splicing family
  misc_feature (1)..(294): NCBI GI NO: 15230193 NR Description: unknown protein; protein id: At3g18790
  misc_feature (1)..(290): NCBI GI NO: 13938521 NR Description: Unknown (protein for MGC:2431) [Homo sapiens]
  misc_feature (1)..(181): NCBI GI NO: 17561262 NR Description: Putative protein
  misc_feature (175)..(274): NCBI GI NO: 17561262 NR Description: Putative protein
  misc_feature (1)..(181): NCBI GI NO: 39591921 NR Description: Hypothetical protein CBG23070
  misc_feature (175)..(274): NCBI GI NO: 39591921 NR Description: Hypothetical protein CBG23070
  misc_feature (1)..(191): NCBI GI NO: 34856385 NR Description: similar to RIKEN cDNA 5830446M03
  misc_feature (1)..(235): NCBI GI NO: 20149316 NR Description: expressed sequence AU020769 [Mus musculus]
  misc_feature (1)..(191): NCBI GI NO: 6330157 NR Description: KIAA1160 protein [Homo sapiens]
  misc_feature (1)..(191): NCBI GI NO: 20149304 NR Description: KIAA1160 protein [Homo sapiens]
MKQEEKRKPRERRPYLASECRDLADAERWRSEILREIGAKVAEIQNEGLGEHRLRDLNDEINKLLRERGHWERRIVELGGRDYSRSSNAPLMTDLDGNIVAVPNPSGRGPGYRYFGAARKLPGVRELFDKPPEMRKRRTRYEIHKRINAGYYGYYDDEDGVLERLEGPAEKRMREEIVSEWHRVERVRREAMKGVMSGEVAAAGGRSGEAAREVLFEGVEEEVEEERKREEEKREREKGEEVGREFVAHVPLPDEKEIERMVLERKKKELLSKYASDSLLVEQEEAKEMLNVRR

SEQ ID NO: 34369 - DNA, 1913 bp, Zea mays subsp. mays
  misc_feature (1)..(1913): Ceres Seq. ID no. 12414708
aaagagagaagggagaggcgagggagctcaccaggagagaggggcctgtgcgtgagcattgagcaaagcaaaggaagcagtacatacatacatatttctctcgctcgctcgcagagaggcccggccggccggctccatgcaacaagggaggacgacgagcggtggcggtgggcgatgatgatgatgatgatggcgggggagcacgtgctggccgctctgggcaccctactgctggcctcgctcctgaccctggtgctgaaccacttcctgcccttgcttctgaaccccaaggcccccaggggaagcttcgggtggccgctcctcggcgagacgctcaggttcctcacgccgcacgcctccaacacgctgggcggcttcctcgaggatcactgctccaggtatgggcgggtgttcaagtcccacctgttctgcaccccgacggtggtgtcctgcgaccaggacctcaaccacttcatcctgcagaacgaggagcggctgttccagtgcagctacccgaggccgatccatggcatcctgggcaagtcctccatgctcgtcgtcctgggcgaggaccacaagcgcctcaggaacctggccctcgccctcgtcacctccaccaagctcaagcccagctacctaggcgacatcgagaagatcgcgctgcacgtcgtcggcgcatggcgacggcacggcagcagcggcggcgtcagggtcgtcgcattctgcgaggaggcaagaaagttcgcattcagtgtgatagtgaagcaggtgctggggctgtcgccagaggagccggtcactgcaaggatactggaggacttcctggccttcatgaagggactcatctccttccccctctacatcccagggaccccatatgccaaggctgtccgggcgagagagaggatatccagcactgtgaagggcatcatcaaggagcggaggagcgctgggtcatggaacaagcagggcgacttccttgacgtgctgctgtcaagcaacgagctatctgacgaggagaaagtgagctttgtgctggactccctgctgggagggtatgagaccacctcgctcctcatctccatggtcgtttatttccttggccagtctgctcaagatctggacctggttaagagggagcacgacagcataagatccaacaaaggcaaggaggagtgcttgacttcagaagactacaagaagatggaatatacccaacaagtcatcaacgaggcgctgagatgcggcaacatcgtcaagttcgtccaccggaaggcgctgaaagacgtcaaatacaaagagtatctgattccatctggctggaaggtcctaccggtcttcactgccgttcatctgaacccctcacttcatggagacgcgcagcagtttcagccctgtaggtgggagggcacaagccaagggacaagcaagaggtttacaccgttcggtggtggcccccggctctgcccaggatcagagctcgctaaagtggagactgctttcttcctccatcaccttgtcctcaattatagatggagaattgatggcgatgacattccaatggcatacccgtatgtggagtttcagagaggtctgccaatagaaatcgagccaacgtcccctgaatcttgactgtcctggagctacagccatcagttatcacaccagagagaaaaggggaaggtgcatggagtatacatgaatggtcagtgacagatctcacaagtgaaggaacactgagggcgcgtgctagtagctagcatatgaggcagctgagactgtaatttaatgtacatggtgtagatatattttgtccatggcaattgcttgaagtggctgattcacttcaccctgtaaaacattctccagtggtttcaactgctatcctataaaaaagaagggcccctgtgttt

SEQ ID NO: 34370 - protein, 543 aa, Zea mays subsp. mays
  peptide (1)..(543): Ceres Seq. ID no. 12414709
  misc_feature (295)..(535): NCBI GI NO: 32487441 NR Description: OSJNBa0016O02.25
  misc_feature (63)..(263): NCBI GI NO: 32487441 NR Description: OSJNBa0016O02.25
  misc_feature (104)..(539): NCBI GI NO: 22326806 NR Description: cytochrome p450 family; protein id: At5g14400.1
  misc_feature (62)..(315): NCBI GI NO: 2935342 NR Description: steroid 22-alpha-hydroxylase; DWF4; CYP90B1
  misc_feature (62)..(315): NCBI GI NO: 15229822 NR Description: steroid 22-alpha-hydroxylase
  misc_feature (325)..(536): NCBI GI NO: 2935342 NR Description: steroid 22-alpha-hydroxylase; DWF4; CYP90B1
  misc_feature (325)..(536): NCBI GI NO: 15229822 NR Description: steroid 22-alpha-hydroxylase
  misc_feature (104)..(340): NCBI GI NO: 11357546 NR Description: hypothetical protein F18O22
  misc_feature (380)..(539): NCBI GI NO: 11357546 NR Description: hypothetical protein F18O22
  misc_feature (99)..(536): NCBI GI NO: 34902330 NR Description: Putative steroid 22-alpha-hydroxylase
KERRERRGSSPGERGLCVSIEQSKGSSTYIHISLARSQRGPAGRLHATREDDERWRWAMMMMMMAGEHVLAALGTLLLASLLTLVLNHFLPLLLNPKAPRGSFGWPLLGETLRFLTPHASNTLGGFLEDHCSRYGRVFKSHLFCTPTVVSCDQDLNHFILQNEERLFQCSYPRPIHGILGKSSMLVVLGEDHKRLRNLALALVTSTKLKPSYLGDIEKIALHVVGAWRRHGSSGGVRVVAFCEEARKFAFSVIVKQVLGLSPEEPVTARILEDFLAFMKGLISFPLYIPGTPYAKAVRARERISSTVKGIIKERRSAGSWNKQGDFLDVLLSSNELSDEEKVSFVLDSLLGGYETTSLLISMVVYFLGQSAQDLDLVKREHDSIRSNKGKEECLTSEDYKKMEYTQQVINEALRCGNIVKFVHRKALKDVKYKEYLIPSGWKVLPVFTAVHLNPSLHGDAQQFQPCRWEGTSQGTSKRFTPFGGGPRLCPGSELAKVETAFFLHHLVLNYRWRIDGDDIPMAYPYVEFQRGLPIEIEPTSPES

SEQ ID NO: 34371 - protein, 485 aa, Zea mays subsp. mays
  peptide (1)..(485): Ceres Seq. ID no. 12414710
  misc_feature (237)..(477): NCBI GI NO: 32487441 NR Description: OSJNBa0016O02.25
  misc_feature (5)..(205): NCBI GI NO: 32487441 NR Description: OSJNBa0016O02.25
  misc_feature (46)..(481): NCBI GI NO: 22326806 NR Description: cytochrome p450 family; protein id: At5g14400.1
  misc_feature (4)..(257): NCBI GI NO: 2935342 NR Description: steroid 22-alpha-hydroxylase; DWF4; CYP90B1
  misc_feature (4)..(257): NCBI GI NO: 15229822 NR Description: steroid 22-alpha-hydroxylase
  misc_feature (267)..(478): NCBI GI NO: 2935342 NR Description: steroid 22-alpha-hydroxylase; DWF4; CYP90B1
  misc_feature (267)..(478): NCBI GI NO: 15229822 NR Description: steroid 22-alpha-hydroxylase
  misc_feature (46)..(282): NCBI GI NO: 11357546 NR Description: hypothetical protein F18O22
  misc_feature (322)..(481): NCBI GI NO: 11357546 NR Description: hypothetical protein F18O22
  misc_feature (41)..(478): NCBI GI NO: 34902330 NR Description: Putative steroid 22-alpha-hydroxylase
MMMMMMAGEHVLAALGTLLLASLLTLVLNHFLPLLLNPKAPRGSFGWPLLGETLRFLTPHASNTLGGFLEDHCSRYGRVFKSHLFCTPTVVSCDQDLNHFILQNEERLFQCSYPRPIHGILGKSSMLVVLGEDHKRLRNLALALVTSTKLKPSYLGDIEKIALHVVGAWRRHGSSGGVRVVAFCEEARKFAFSVIVKQVLGLSPEEPVTARILEDFLAFMKGLISFPLYIPGTPYAKAVRARERISSTVKGIIKERRSAGSWNKQGDFLDVLLSSNELSDEEKVSFVLDSLLGGYETTSLLISMVVYFLGQSAQDLDLVKREHDSIRSNKGKEECLTSEDYKKMEYTQQVINEALRCGNIVKFVHRKALKDVKYKEYLIPSGWKVLPVFTAVHLNPSLHGDAQQFQPCRWEGTSQGTSKRFTPFGGGPRLCPGSELAKVETAFFLHHLVLNYRWRIDGDDIPMAYPYVEFQRGLPIEIEPTSPES

SEQ ID NO: 34372 - protein, 484 aa, Zea mays subsp. mays
  peptide (1)..(484): Ceres Seq. ID no. 12414711
  misc_feature (236)..(476): NCBI GI NO: 32487441 NR Description: OSJNBa0016O02.25
  misc_feature (4)..(204): NCBI GI NO: 32487441 NR Description: OSJNBa0016O02.25
  misc_feature (45)..(480): NCBI GI NO: 22326806 NR Description: cytochrome p450 family; protein id: At5g14400.1
  misc_feature (3)..(256): NCBI GI NO: 2935342 NR Description: steroid 22-alpha-hydroxylase; DWF4; CYP90B1
  misc_feature (3)..(256): NCBI GI NO: 15229822 NR Description: steroid 22-alpha-hydroxylase
  misc_feature (266)..(477): NCBI GI NO: 2935342 NR Description: steroid 22-alpha-hydroxylase; DWF4; CYP90B1
  misc_feature (266)..(477): NCBI GI NO: 15229822 NR Description: steroid 22-alpha-hydroxylase
  misc_feature (45)..(281): NCBI GI NO: 11357546 NR Description: hypothetical protein F18O22
  misc_feature (321)..(480): NCBI GI NO: 11357546 NR Description: hypothetical protein F18O22
  misc_feature (40)..(477): NCBI GI NO: 34902330 NR Description: Putative steroid 22-alpha-hydroxylase
MMMMMAGEHVLAALGTLLLASLLTLVLNHFLPLLLNPKAPRGSFGWPLLGETLRFLTPHASNTLGGFLEDHCSRYGRVFKSHLFCTPTVVSCDQDLNHFILQNEERLFQCSYPRPIHGILGKSSMLVVLGEDHKRLRNLALALVTSTKLKPSYLGDIEKIALHVVGAWRRHGSSGGVRVVAFCEEARKFAFSVIVKQVLGLSPEEPVTARILEDFLAFMKGLISFPLYIPGTPYAKAVRARERISSTVKGIIKERRSAGSWNKQGDFLDVLLSSNELSDEEKVSFVLDSLLGGYETTSLLISMVVYFLGQSAQDLDLVKREHDSIRSNKGKEECLTSEDYKKMEYTQQVINEALRCGNIVKFVHRKALKDVKYKEYLIPSGWKVLPVFTAVHLNPSLHGDAQQFQPCRWEGTSQGTSKRFTPFGGGPRLCPGSELAKVETAFFLHHLVLNYRWRIDGDDIPMAYPYVEFQRGLPIEIEPTSPES

SEQ ID NO: 34373 - DNA, 855 bp, Zea mays subsp. mays
  misc_feature (1)..(855): Ceres Seq. ID no. 12365042
attcatgatggcaatggcacagagagaggtgagtccagcgttcatcctctttacgtctcccgcgtttcgttccctggctggtacggtacccgtcgtcgtgcgaacccaagacacccgcagagtgctcgaccaaatgcgacactaggttaggtgcttctactccacggcgatcacccagctgctacccaactgtcgcaggccgacgcgccgagcgagggcgccgccgccgccgtctccggcgtcatggcggtgaagctcaaggacctggtcccggccgcgaccaacacggtgaacacgacgttcatcgtgctcgacaaggcggcgccgtcgacccgccgacagggcggcgccagggaggagacgtgcctggcgctggtggcggacgagaccgcggcggcgcacttcctgctgtggggcgccgagtgcggcgcgttcgagccgggcgacatcgtgcggctcacggacggcatcttctcgtaccacagggggaacgtcctggtgctgcgggcgggccgccgcgggcgcgccgagaaggtgggcgagttcgccatgctcttcgtggagacccccaacatgagcgagctccagtgggggcccgaccccagcgacggccggaggatggtgcaggaggccgtcgtctcgccttactcccagatcttcaagccgctgcggtgatcttcttactactgagaaacatgatactaggggtacgaacttacgatgaagaagaacgaaaaagaagggcttaaagctctgtctgtcttccaaagtgacaaggttacagcttacaacatgttcaaccatacaattatatcttccactgtgcaattatatgtttcattcacagtttgctgc

SEQ ID NO: 34374 - protein, 143 aa, Zea mays subsp. mays
  peptide (1)..(143): Ceres Seq. ID no. 12365043
  misc_feature (19)..(111): Pfam Name: Pfam Description:  OB-fold nucleic acid binding domain
  misc_feature (1)..(143): NCBI GI NO: 34898750 NR Description: hypothetical protein~similar to Arabidopsisthaliana chromosome5
  misc_feature (1)..(143): NCBI GI NO: 34898746 NR Description: hypothetical protein~similar to Arabidopsisthaliana chromosome5
  misc_feature (1)..(142): NCBI GI NO: 15242865 NR Description: unknown protein; protein id: At5g63690.1
  misc_feature (5)..(113): NCBI GI NO: 13129048 NR Description: hypothetical protein MGC2731 [Homo sapiens]
  misc_feature (5)..(113): NCBI GI NO: 28076937 NR Description: RIKEN cDNA 2610036N15 [Mus musculus]
  misc_feature (5)..(113): NCBI GI NO: 34862206 NR Description: similar to RIKEN cDNA 2610036N15
  misc_feature (5)..(113): NCBI GI NO: 16877754 NR Description: Similar to RIKEN cDNA 4930434H03 gene
  misc_feature (5)..(113): NCBI GI NO: 30844321 NR Description: RIKEN cDNA 5830411E10 [Mus musculus]
  misc_feature (5)..(113): NCBI GI NO: 26340138 NR Description: unnamed protein product [Mus musculus]
  misc_feature (30)..(113): NCBI GI NO: 20071811 NR Description: Similar to RIKEN cDNA 4930434H03 gene
MAVKLKDLVPAATNTVNTTFIVLDKAAPSTRRQGGAREETCLALVADETAAAHFLLWGAECGAFEPGDIVRLTDGIFSYHRGNVLVLRAGRRGRAEKVGEFAMLFVETPNMSELQWGPDPSDGRRMVQEAVVSPYSQIFKPLR

SEQ ID NO: 34375 - DNA, 967 bp, Zea mays subsp. mays
  misc_feature (1)..(967): Ceres Seq. ID no. 12343734
cccaatcctcccgccgcggcgacgccttcccctccctccttcctccgtcccatgctccgccgctgacacgttggcccgacttaaccttacgatggccgccgcctccgccatcaccgccgtctccggcgttgtgcttccccaaaccttcctatccccccggtcgccgccgccgcaggtcctagccgtggcctcctcattccgccggctctccttgtgcgcttcccctcgccggatcactcacataatcccccgcgctgatgcaagtgccgaagctggagaaccggagcctgtcactgcttcagatgaatccgaagaggaggtggccgaggggtctgtcgctgtggcggagggggaggaaccgacgccgccgagcaagccgaaggttaagttcggcgaaataattgggattctgaataagcagttcattgaggaggctgagaaggtgaagactgtaccggatctgaggcctggcgatatcattgagcttaggatgcaacggcccaacaaaaggagattgtcgctctttaagggcataatcatcgcaaagcacaaagctggtgttcacaccacaatccgtgtcagaaggatcattgctggtgtaggagttgagattaccttcccagtgtactcacccaggatcaaggaaatcacggttatcaggcacaagaaagtgaggagagcaaagttgtactacctgaaagacaagcttccccgcttttcaacattcaagtgaaatcagatatgctgacagaacgactttttccaccaccatctcgatttctcttaaacctttttttttcacttccctatcgatatcatcatatttcactgtaatctctgggtatcagatgtgtaatatctacagctttatatcatacttggcttagtgcaatgttttgtttgttgtcagtgtacaaaattcatactagcaccttgttattatgaatttgcaaatacaaggttatgc

SEQ ID NO: 34376 - protein, 243 aa, Zea mays subsp. mays
  peptide (1)..(243): Ceres Seq. ID no. 12343735
  misc_feature (135)..(243): Pfam Name: Pfam Description:  Ribosomal protein L19
  misc_feature (32)..(243): NCBI GI NO: 14140122 NR Description: putative plastid ribosomal protein L19 precursor
  misc_feature (30)..(243): NCBI GI NO: 8809601 NR Description: contains similarity to plastid ribosomal proteinL19~gene_id:MQL5
  misc_feature (30)..(243): NCBI GI NO: 21592584 NR Description: contains similarity to plastid ribosomal proteinL19
  misc_feature (30)..(243): NCBI GI NO: 18422764 NR Description: putative protein; protein id: At5g47190
  misc_feature (89)..(243): NCBI GI NO: 18414915 NR Description: putative protein; protein id: At4g17560
  misc_feature (70)..(243): NCBI GI NO: 7582403 NR Description: plastid ribosomal protein L19 precursor
  misc_feature (72)..(236): NCBI GI NO: 15234249 NR Description: putative protein; protein id: At4g11630
  misc_feature (133)..(236): NCBI GI NO: 15239778 NR Description: putative protein; protein id: At5g11750
  misc_feature (133)..(236): NCBI GI NO: 18395422 NR Description: expressed protein; protein id: At1g24240
  misc_feature (100)..(243): NCBI GI NO: 33239924 NR Description: Ribosomal protein L19
PILPPRRRLPLPPSSVPCSAADTLARLNLTMAAASAITAVSGVVLPQTFLSPRSPPPQVLAVASSFRRLSLCASPRRITHIIPRADASAEAGEPEPVTASDESEEEVAEGSVAVAEGEEPTPPSKPKVKFGEIIGILNKQFIEEAEKVKTVPDLRPGDIIELRMQRPNKRRLSLFKGIIIAKHKAGVHTTIRVRRIIAGVGVEITFPVYSPRIKEITVIRHKKVRRAKLYYLKDKLPRFSTFK

SEQ ID NO: 34377 - protein, 213 aa, Zea mays subsp. mays
  peptide (1)..(213): Ceres Seq. ID no. 12343736
  misc_feature (105)..(213): Pfam Name: Pfam Description:  Ribosomal protein L19
  misc_feature (2)..(213): NCBI GI NO: 14140122 NR Description: putative plastid ribosomal protein L19 precursor
  misc_feature (1)..(213): NCBI GI NO: 8809601 NR Description: contains similarity to plastid ribosomal proteinL19~gene_id:MQL5
  misc_feature (1)..(213): NCBI GI NO: 21592584 NR Description: contains similarity to plastid ribosomal proteinL19
  misc_feature (1)..(213): NCBI GI NO: 18422764 NR Description: putative protein; protein id: At5g47190
  misc_feature (59)..(213): NCBI GI NO: 18414915 NR Description: putative protein; protein id: At4g17560
  misc_feature (40)..(213): NCBI GI NO: 7582403 NR Description: plastid ribosomal protein L19 precursor
  misc_feature (42)..(206): NCBI GI NO: 15234249 NR Description: putative protein; protein id: At4g11630
  misc_feature (103)..(206): NCBI GI NO: 15239778 NR Description: putative protein; protein id: At5g11750
  misc_feature (103)..(206): NCBI GI NO: 18395422 NR Description: expressed protein; protein id: At1g24240
  misc_feature (70)..(213): NCBI GI NO: 33239924 NR Description: Ribosomal protein L19
MAAASAITAVSGVVLPQTFLSPRSPPPQVLAVASSFRRLSLCASPRRITHIIPRADASAEAGEPEPVTASDESEEEVAEGSVAVAEGEEPTPPSKPKVKFGEIIGILNKQFIEEAEKVKTVPDLRPGDIIELRMQRPNKRRLSLFKGIIIAKHKAGVHTTIRVRRIIAGVGVEITFPVYSPRIKEITVIRHKKVRRAKLYYLKDKLPRFSTFK

SEQ ID NO: 34378 - DNA, 1038 bp, Zea mays subsp. mays
  misc_feature (1)..(1038): Ceres Seq. ID no. 12344880
aaggcaggctgcgacgtcacggtttggaacaggaccaagagcaagtgcgatcccctcctcagtctcggtgccaagtacgagcctacaccggcccaagtcgcttcatcttgtgacgtgacattcgcgatgctcgctgatccacaaagcgcggctgaggttgcatgtgggtccagtggagctgctgaagggttggcccctgggaaaggctatgtcgatgtgtcgacggttgatggtgctacatccaagctgattggtgaacgcattacaagtactggagcatctttccttgaggctccagtttcaggctcgaaaaaaccagcagaagatgggctgctcatctttcttactgcaggtgatgagtccttgtacaagagagtggcgcccctccttgatgtcatggggaagtcaaggttttatcttggcgatgtaggcaatggtgctgcaatgaagctcgtggttaacatggtcatgggggagcatgatggtttccttctcagaagggttgctcctgagtgaaaaagtcggtttagacccgaatactctcgtcgaggttatttcccagggtgctatcagtgcccccatgttctctctcaagggcccatccatggttaaagctgcatatcctcctgcatttcctctgaagcatcaacagaaggacttgaggctcgcattggccctggcggaatcggtgtcccagtccattcctacagttgcagctgcgaacgagctgtacaaggctgcaaaatcgctcggccttagtgaccacgacttctcggcggttattgaagcgctgaaagccaaagtgcagagccagagctcacaatagtagttgcctgttcagcagagctcacagtagttgttgcctcttcagcagctaccattgaggcagcattttgtctcgatggatgaagttgacacttaggaaaatttctcaagatcgctacagaaaagtctcagaacaatacaatttctgtattcgtaaatattttctcaaacatcacaacgacgacatttccttaaggaagaaaaaaaactttc

SEQ ID NO: 34379 - protein, 171 aa, Zea mays subsp. mays
  peptide (1)..(171): Ceres Seq. ID no. 12344881
  misc_feature (1)..(142): Pfam Name: Pfam Description:  NAD binding domain of 6-phosphogluconate dehydrogenase
  misc_feature (1)..(158): NCBI GI NO: 18394513 NR Description: Expressed protein; protein id: At1g17650
  misc_feature (52)..(158): NCBI GI NO: 8778467 NR Description: F1L3.35 [Arabidopsis thaliana]
  misc_feature (1)..(54): NCBI GI NO: 8778467 NR Description: F1L3.35 [Arabidopsis thaliana]
  misc_feature (2)..(158): NCBI GI NO: 34914300 NR Description: putative gamma hydroxybutyrate dehydrogenase
  misc_feature (1)..(158): NCBI GI NO: 15375068 NR Description: gamma hydroxybutyrate dehydrogenase
  misc_feature (1)..(158): NCBI GI NO: 18404556 NR Description: expressed protein; protein id: At3g25530
  misc_feature (3)..(158): NCBI GI NO: 29368238 NR Description: gamma hydroxybutyrate dehydrogenase-like protein
  misc_feature (1)..(158): NCBI GI NO: 23054597 NR Description: hypothetical protein [Geobacter metallireducens]
  misc_feature (1)..(159): NCBI GI NO: 39996474 NR Description: 3-hydroxyisobutyrate dehydrogenase family protein
  misc_feature (1)..(158): NCBI GI NO: 13277568 NR Description: Similar to RIKEN cDNA 3930401K13 gene
KAGCDVTVWNRTKSKCDPLLSLGAKYEPTPAQVASSCDVTFAMLADPQSAAEVACGSSGAAEGLAPGKGYVDVSTVDGATSKLIGERITSTGASFLEAPVSGSKKPAEDGLLIFLTAGDESLYKRVAPLLDVMGKSRFYLGDVGNGAAMKLVVNMVMGEHDGFLLRRVAPE

SEQ ID NO: 34380 - protein, 129 aa, Zea mays subsp. mays
  peptide (1)..(129): Ceres Seq. ID no. 12344882
  misc_feature (1)..(100): Pfam Name: Pfam Description:  NAD binding domain of 6-phosphogluconate dehydrogenase
  misc_feature (1)..(116): NCBI GI NO: 18394513 NR Description: Expressed protein; protein id: At1g17650
  misc_feature (10)..(116): NCBI GI NO: 8778467 NR Description: F1L3.35 [Arabidopsis thaliana]
  misc_feature (1)..(12): NCBI GI NO: 8778467 NR Description: F1L3.35 [Arabidopsis thaliana]
  misc_feature (1)..(116): NCBI GI NO: 34914300 NR Description: putative gamma hydroxybutyrate dehydrogenase
  misc_feature (1)..(116): NCBI GI NO: 15375068 NR Description: gamma hydroxybutyrate dehydrogenase
  misc_feature (1)..(116): NCBI GI NO: 18404556 NR Description: expressed protein; protein id: At3g25530
  misc_feature (1)..(116): NCBI GI NO: 29368238 NR Description: gamma hydroxybutyrate dehydrogenase-like protein
  misc_feature (1)..(116): NCBI GI NO: 23054597 NR Description: hypothetical protein [Geobacter metallireducens]
  misc_feature (1)..(117): NCBI GI NO: 39996474 NR Description: 3-hydroxyisobutyrate dehydrogenase family protein
  misc_feature (1)..(116): NCBI GI NO: 13277568 NR Description: Similar to RIKEN cDNA 3930401K13 gene
MLADPQSAAEVACGSSGAAEGLAPGKGYVDVSTVDGATSKLIGERITSTGASFLEAPVSGSKKPAEDGLLIFLTAGDESLYKRVAPLLDVMGKSRFYLGDVGNGAAMKLVVNMVMGEHDGFLLRRVAPE

SEQ ID NO: 34381 - protein, 115 aa, Zea mays subsp. mays
  peptide (1)..(115): Ceres Seq. ID no. 12344883
  misc_feature (1)..(107): NCBI GI NO: 18394513 NR Description: Expressed protein; protein id: At1g17650
  misc_feature (1)..(107): NCBI GI NO: 8778467 NR Description: F1L3.35 [Arabidopsis thaliana]
  misc_feature (1)..(112): NCBI GI NO: 34914300 NR Description: putative gamma hydroxybutyrate dehydrogenase
  misc_feature (1)..(106): NCBI GI NO: 15375068 NR Description: gamma hydroxybutyrate dehydrogenase
  misc_feature (1)..(106): NCBI GI NO: 18404556 NR Description: expressed protein; protein id: At3g25530
  misc_feature (1)..(106): NCBI GI NO: 29368238 NR Description: gamma hydroxybutyrate dehydrogenase-like protein
  misc_feature (1)..(106): NCBI GI NO: 23054597 NR Description: hypothetical protein [Geobacter metallireducens]
  misc_feature (1)..(106): NCBI GI NO: 39996474 NR Description: 3-hydroxyisobutyrate dehydrogenase family protein
  misc_feature (1)..(104): NCBI GI NO: 13277568 NR Description: Similar to RIKEN cDNA 3930401K13 gene
  misc_feature (1)..(104): NCBI GI NO: 20891625 NR Description: RIKEN cDNA 3930401K13 [Mus musculus]
MMVSFSEGLLLSEKVGLDPNTLVEVISQGAISAPMFSLKGPSMVKAAYPPAFPLKHQQKDLRLALALAESVSQSIPTVAAANELYKAAKSLGLSDHDFSAVIEALKAKVQSQSSQ

SEQ ID NO: 34382 - DNA, 1412 bp, Zea mays subsp. mays; identical to SEQ ID NO: 28880
  misc_feature (1)..(1412): Ceres Seq. ID no. 12556700

SEQ ID NO: 34383 - protein, 365 aa, Zea mays subsp. mays; identical to SEQ ID NO: 28881
  peptide (1)..(365): Ceres Seq. ID no. 12556701
  misc_feature (69)..(365): NCBI GI NO: 2130089 NR Description: 2-oxoglutarate/malate translocator
  misc_feature (69)..(365): NCBI GI NO: 2130090 NR Description: 2-oxoglutarate/malate translocator
  misc_feature (72)..(365): NCBI GI NO: 19913109 NR Description: dicarboxylate/tricarboxylate carrier
  misc_feature (77)..(365): NCBI GI NO: 7489246 NR Description: oxoglutarate/malate translocator - potato
  misc_feature (74)..(365): NCBI GI NO: 15241167 NR Description: mitochondrial 2-oxoglutarate/malate translocator
  misc_feature (77)..(365): NCBI GI NO: 10798640 NR Description: mitochondrial 2-oxoglutarate/malate carrier
  misc_feature (77)..(365): NCBI GI NO: 19913105 NR Description: dicarboxylate/tricarboxylate carrier
  misc_feature (77)..(365): NCBI GI NO: 19913107 NR Description: dicarboxylate/tricarboxylate carrier
  misc_feature (141)..(365): NCBI GI NO: 19913111 NR Description: dicarboxylate/tricarboxylate carrier
  misc_feature (148)..(365): NCBI GI NO: 2331139 NR Description: 2-oxoglutarate/malate translocator [Oryza sativa]

SEQ ID NO: 34384 - protein, 273 aa, Zea mays subsp. mays; identical to SEQ ID NO: 28882
  peptide (1)..(273): Ceres Seq. ID no. 12556702
  misc_feature (1)..(273): NCBI GI NO: 2130089 NR Description: 2-oxoglutarate/malate translocator
  misc_feature (1)..(273): NCBI GI NO: 2130090 NR Description: 2-oxoglutarate/malate translocator
  misc_feature (1)..(273): NCBI GI NO: 19913109 NR Description: dicarboxylate/tricarboxylate carrier
  misc_feature (1)..(273): NCBI GI NO: 7489246 NR Description: oxoglutarate/malate translocator - potato
  misc_feature (1)..(273): NCBI GI NO: 15241167 NR Description: mitochondrial 2-oxoglutarate/malate translocator
  misc_feature (1)..(273): NCBI GI NO: 10798640 NR Description: mitochondrial 2-oxoglutarate/malate carrier
  misc_feature (1)..(273): NCBI GI NO: 19913105 NR Description: dicarboxylate/tricarboxylate carrier
  misc_feature (1)..(273): NCBI GI NO: 19913107 NR Description: dicarboxylate/tricarboxylate carrier
  misc_feature (49)..(273): NCBI GI NO: 19913111 NR Description: dicarboxylate/tricarboxylate carrier
  misc_feature (56)..(273): NCBI GI NO: 2331139 NR Description: 2-oxoglutarate/malate translocator [Oryza sativa]

SEQ ID NO: 34385 - protein, 262 aa, Zea mays subsp. mays; identical to SEQ ID NO: 28883
  peptide (1)..(262): Ceres Seq. ID no. 12556703
  misc_feature (1)..(262): NCBI GI NO: 2130089 NR Description: 2-oxoglutarate/malate translocator
  misc_feature (1)..(262): NCBI GI NO: 2130090 NR Description: 2-oxoglutarate/malate translocator
  misc_feature (1)..(262): NCBI GI NO: 19913109 NR Description: dicarboxylate/tricarboxylate carrier
  misc_feature (1)..(262): NCBI GI NO: 7489246 NR Description: oxoglutarate/malate translocator - potato
  misc_feature (1)..(262): NCBI GI NO: 15241167 NR Description: mitochondrial 2-oxoglutarate/malate translocator
  misc_feature (1)..(262): NCBI GI NO: 10798640 NR Description: mitochondrial 2-oxoglutarate/malate carrier
  misc_feature (1)..(262): NCBI GI NO: 19913105 NR Description: dicarboxylate/tricarboxylate carrier
  misc_feature (1)..(262): NCBI GI NO: 19913107 NR Description: dicarboxylate/tricarboxylate carrier
  misc_feature (38)..(262): NCBI GI NO: 19913111 NR Description: dicarboxylate/tricarboxylate carrier
  misc_feature (45)..(262): NCBI GI NO: 2331139 NR Description: 2-oxoglutarate/malate translocator [Oryza sativa]

SEQ ID NO: 34386 - DNA, 1980 bp, Zea mays subsp. mays
  misc_feature (1)..(1980): Ceres Seq. ID no. 12450491
aaaccttctcccctttcctcagaccccaggccccagcccggcaagcagacatgggcaaccgtgcgtcgcgccaccaccgccaagccgccgagcagcaaccggcgacgccgaccctgccgaagccccagccccagatccagccgccgcctccgcctccgccgacgcagacgcagcagtaccagcaggcgccgccgcagtcgcagcagaagccgaagccggcggcggacgtgggggcggtggggcgcgtgctggggcggcccatggaggacgtgcgcgcgacctacactttcggccgcgagctcgggcggggccagttcggggtcacctacctcgtcacgcactcggagaccgggcagcgcttcgcctgcaagtccatcgccacgcggaagctcgtccaccgcgacgacattgaggacgtgcgccgggaggtgcagatcatgcaccacctcacgggccaccgcaacatcgtcgagctccggggagcatacgaggacaggcactcggtcaaccttgttatggagctctgcgagggcggggagctcttcgaccgcatcatagccaagggccactacaccgagcgagccgccgcctcgctctgccgcgagatcgtcgccgtcgtccacagctgccactccatgggggtcttccatcgggatctcaagcccgagaacttcctgttcctcaataacaaggaggactccccgctcaaggccacggacttcggtctctccgtcttcttcaagcacggggagacgtttaaggatcttgtgggaagtgcatattatgttgctcctgaggtactgaaacggaaatatggggcagaggctgacatatggagtgctggggtcattctttacatccttctgtctggtgttcctcctttttgggcagagaatgaggatggcatatttgatgctgtcttgcgcggtcacatcgatttctcttctgacccttggccttcaatatccaatggtgcaaaggatttggttaagaagatgctgcgacaagacccaaaagaacgcctgactgctgctgaaattttgaaccacccatggattagagaggatggagaggccccagataagccacttgacattactgtcattggtagaatgaaacagttcagggcaatgaacaagctcaagaaagttgcattgaaggttgtggctgagaacttatcagatgaagagattatgggcctaaaagaaatgttcagatccctggatacagataacagtgggacaattactcttgaagagctaagatctggtttaccaaaacttggtacaaaaatttctgaatcagaaattaaacaattgatggaggcggctgatgttgatggaaatggtaccattgattatgcggagtttatatcagccacaatgcatttgaatagattggagaaggaagaccacatactcaaagcttttgaatatttcgataaggatcacagcggatacataaccgtagatgagttggaagaagctttgaagaagtatgatatgggagatgacaaaactataaaagaaatcattgctgaagtagatacagatcatgatggaagaattaattaccaggagtttgttgccatgatgaggaacaacagccctgagattgttccaaatcggaggcgcatgttctaactgtcatggacaatcacattgaatactttcaagaacaatctgcccttagacataatctttgtcccattttctttttggaacagccgttaagaagactccttaatttgagatccatgtctctgctgcccggacctgtttgtcccaaaatagggtggtgttatagtgattcgtacttgatgctttgagcttcatggactcttgcgtggcaatgtttatccccattgtacgtctggttgttctgctgcttcgatctgaggctttctttaggtgtaaacggatatctgaattattaggataaatttaatattttaaaatagatatgtataaaatttgatgc

SEQ ID NO: 34387 - protein, 546 aa, Zea mays subsp. mays
  peptide (1)..(546): Ceres Seq. ID no. 12450492
  misc_feature (94)..(352): Pfam Name: Pfam Description:  Protein kinase domain
  misc_feature (80)..(545): NCBI GI NO: 15236560 NR Description: calcium-dependent protein kinase
  misc_feature (80)..(545): NCBI GI NO: 15450437 NR Description: AT4g23650/F9D16_120 [Arabidopsis thaliana]
  misc_feature (25)..(544): NCBI GI NO: 14970920 NR Description: calcium dependent calmodulin independent proteinkinase
  misc_feature (17)..(544): NCBI GI NO: 18175903 NR Description: putative calcium-dependent protein kinase
  misc_feature (17)..(544): NCBI GI NO: 15239888 NR Description: calcium-dependent protein kinase
  misc_feature (63)..(544): NCBI GI NO: 15239716 NR Description: calcium-dependent protein kinase - like
  misc_feature (80)..(544): NCBI GI NO: 5162878 NR Description: calcium-dependent protein kinase
  misc_feature (80)..(544): NCBI GI NO: 5162877 NR Description: calcium-dependent protein kinase
  misc_feature (21)..(535): NCBI GI NO: 7428009 NR Description: calcium-dependent protein kinase (EC 2
  misc_feature (12)..(532): NCBI GI NO: 23616997 NR Description: CDP2_ORYSA Calcium-dependent protein kinase
TFSPFLRPQAPARQADMGNRASRHHRQAAEQQPATPTLPKPQPQIQPPPPPPPTQTQQYQQAPPQSQQKPKPAADVGAVGRVLGRPMEDVRATYTFGRELGRGQFGVTYLVTHSETGQRFACKSIATRKLVHRDDIEDVRREVQIMHHLTGHRNIVELRGAYEDRHSVNLVMELCEGGELFDRIIAKGHYTERAAASLCREIVAVVHSCHSMGVFHRDLKPENFLFLNNKEDSPLKATDFGLSVFFKHGETFKDLVGSAYYVAPEVLKRKYGAEADIWSAGVILYILLSGVPPFWAENEDGIFDAVLRGHIDFSSDPWPSISNGAKDLVKKMLRQDPKERLTAAEILNHPWIREDGEAPDKPLDITVIGRMKQFRAMNKLKKVALKVVAENLSDEEIMGLKEMFRSLDTDNSGTITLEELRSGLPKLGTKISESEIKQLMEAADVDGNGTIDYAEFISATMHLNRLEKEDHILKAFEYFDKDHSGYITVDELEEALKKYDMGDDKTIKEIIAEVDTDHDGRINYQEFVAMMRNNSPEIVPNRRRMF

SEQ ID NO: 34388 - protein, 530 aa, Zea mays subsp. mays
  peptide (1)..(530): Ceres Seq. ID no. 12450493
  misc_feature (78)..(336): Pfam Name: Pfam Description:  Protein kinase domain
  misc_feature (64)..(529): NCBI GI NO: 15236560 NR Description: calcium-dependent protein kinase
  misc_feature (64)..(529): NCBI GI NO: 15450437 NR Description: AT4g23650/F9D16_120 [Arabidopsis thaliana]
  misc_feature (9)..(528): NCBI GI NO: 14970920 NR Description: calcium dependent calmodulin independent proteinkinase
  misc_feature (1)..(528): NCBI GI NO: 18175903 NR Description: putative calcium-dependent protein kinase
  misc_feature (1)..(528): NCBI GI NO: 15239888 NR Description: calcium-dependent protein kinase
  misc_feature (47)..(528): NCBI GI NO: 15239716 NR Description: calcium-dependent protein kinase - like
  misc_feature (64)..(528): NCBI GI NO: 5162878 NR Description: calcium-dependent protein kinase
  misc_feature (64)..(528): NCBI GI NO: 5162877 NR Description: calcium-dependent protein kinase
  misc_feature (5)..(519): NCBI GI NO: 7428009 NR Description: calcium-dependent protein kinase (EC 2
  misc_feature (1)..(516): NCBI GI NO: 23616997 NR Description: CDP2_ORYSA Calcium-dependent protein kinase
MGNRASRHHRQAAEQQPATPTLPKPQPQIQPPPPPPPTQTQQYQQAPPQSQQKPKPAADVGAVGRVLGRPMEDVRATYTFGRELGRGQFGVTYLVTHSETGQRFACKSIATRKLVHRDDIEDVRREVQIMHHLTGHRNIVELRGAYEDRHSVNLVMELCEGGELFDRIIAKGHYTERAAASLCREIVAVVHSCHSMGVFHRDLKPENFLFLNNKEDSPLKATDFGLSVFFKHGETFKDLVGSAYYVAPEVLKRKYGAEADIWSAGVILYILLSGVPPFWAENEDGIFDAVLRGHIDFSSDPWPSISNGAKDLVKKMLRQDPKERLTAAEILNHPWIREDGEAPDKPLDITVIGRMKQFRAMNKLKKVALKVVAENLSDEEIMGLKEMFRSLDTDNSGTITLEELRSGLPKLGTKISESEIKQLMEAADVDGNGTIDYAEFISATMHLNRLEKEDHILKAFEYFDKDHSGYITVDELEEALKKYDMGDDKTIKEIIAEVDTDHDGRINYQEFVAMMRNNSPEIVPNRRRMF

SEQ ID NO: 34389 - protein, 460 aa, Zea mays subsp. mays
  peptide (1)..(460): Ceres Seq. ID no. 12450494
  misc_feature (8)..(266): Pfam Name: Pfam Description:  Protein kinase domain
  misc_feature (1)..(459): NCBI GI NO: 15236560 NR Description: calcium-dependent protein kinase
  misc_feature (1)..(459): NCBI GI NO: 15450437 NR Description: AT4g23650/F9D16_120 [Arabidopsis thaliana]
  misc_feature (1)..(458): NCBI GI NO: 14970920 NR Description: calcium dependent calmodulin independent proteinkinase
  misc_feature (1)..(458): NCBI GI NO: 18175903 NR Description: putative calcium-dependent protein kinase
  misc_feature (1)..(458): NCBI GI NO: 15239888 NR Description: calcium-dependent protein kinase
  misc_feature (1)..(458): NCBI GI NO: 15239716 NR Description: calcium-dependent protein kinase - like
  misc_feature (1)..(458): NCBI GI NO: 5162878 NR Description: calcium-dependent protein kinase
  misc_feature (1)..(458): NCBI GI NO: 5162877 NR Description: calcium-dependent protein kinase
  misc_feature (1)..(449): NCBI GI NO: 7428009 NR Description: calcium-dependent protein kinase (EC 2
  misc_feature (1)..(446): NCBI GI NO: 23616997 NR Description: CDP2_ORYSA Calcium-dependent protein kinase
MEDVRATYTFGRELGRGQFGVTYLVTHSETGQRFACKSIATRKLVHRDDIEDVRREVQIMHHLTGHRNIVELRGAYEDRHSVNLVMELCEGGELFDRIIAKGHYTERAAASLCREIVAVVHSCHSMGVFHRDLKPENFLFLNNKEDSPLKATDFGLSVFFKHGETFKDLVGSAYYVAPEVLKRKYGAEADIWSAGVILYILLSGVPPFWAENEDGIFDAVLRGHIDFSSDPWPSISNGAKDLVKKMLRQDPKERLTAAEILNHPWIREDGEAPDKPLDITVIGRMKQFRAMNKLKKVALKVVAENLSDEEIMGLKEMFRSLDTDNSGTITLEELRSGLPKLGTKISESEIKQLMEAADVDGNGTIDYAEFISATMHLNRLEKEDHILKAFEYFDKDHSGYITVDELEEALKKYDMGDDKTIKEIIAEVDTDHDGRINYQEFVAMMRNNSPEIVPNRRRMF

SEQ ID NO: 34390 - DNA, 1549 bp, Zea mays subsp. mays
  misc_feature (1)..(1549): Ceres Seq. ID no. 12414516
  misc_feature (227)..(227): n is a, c, t, g, unknown, or other
atggacacttggacacctgccttctctccttccttccatccattcctccctgtctccgccctcttctcactcccgtaggccgtggtgccgccgccgactgctgggaccgccctacaccaagtgcccaggtcatcttcgggccattcgccggcgacgagcaccaccaggtgtgccaggttgaccgagctatggacagcctgtggcatcttggggacgagctccgcggngcagcccaaggtggtggaggaccgccagtggtctctcatgacgtccaagctggcggagatcaccaggtccaagggcgagaggatgaacactgtccctgacgccaagcagtgggacaagacgtcctaccagcttcacgacgacagcaggatgggccacatcaacctcggcctcatgaaccttgatctcaagatgaacgaggctgccgccatgaagctccccttccgtggcatgccctataacatgaaccagatgtacctcaaggggagcaatgccaattccaatgtcaatgcgttcaagatgaatgttggggtcaacaagtactccaatagtccaaacgggaaagacgccaatgggaaaaacaatggcggcaacaacaacaatgggagcgccaacggcacttctgtggctgacaagcgcttcaagacattgccgacgagtgagatgctaccgaggaatgaagtccttggtggatacatctttgtctgcaacaacgataccatgcaggaggatctcaagaggcagctttttggtttgccagcaagatatcgtgattcagtccgagcaatcactcctggcttgcctcttttcctctataactacacaacccaccagcttcatggggtatttgaggctgccagttttggtgggtccaatatcgatcctactgcatgggaggataagaagtgtaaaggtgaatctagattcccagcgcaggtgaggatctgcattaggaagctgtgcaagccgttggaagaggattccttcaggccagttttgcaccattatgatgggccaaagttccgccttgagctctccatcgcggagacattgtcactgctagacctatgcgggaaggaaggcatctgagctgtcgaggaggtggtggtggttgccttgtgagcttctagtaaataccaatcatctttgtatgttttgtggatggtggttggcaacgttgtttatttatgcacaagctgctgctggtttcgggatggaaggaaggacctggtccctgaaacaagctgcggagagtgatcctgtcagtgtattgtgtctggcgtggtcaagaaccaaatcaatgttggaccgaccgactgagagtttggagtgtgtatgttttgctattactcttatctctagtagagtgtgggtatacctgggcagaatgtgtccccaaaagttgggggcctgtctgtgtactgtgtgcgatggacgccctaagtaaaaaaagggcaggtgatggtcgtgctccaggtttgtgttttgtactctgttgtaccttgaacctcctttgcgttttgcctaatcagagaatgagtgc

SEQ ID NO: 34391 - protein, 276 aa, Zea mays subsp. mays
  peptide (1)..(276): Ceres Seq. ID no. 12414517
  misc_feature (1)..(275): NCBI GI NO: 2369766 NR Description: hypothetical protein [Citrus x paradisi]
  misc_feature (1)..(275): NCBI GI NO: 15232081 NR Description: gda-1, putative; protein id: At3g27090
  misc_feature (1)..(275): NCBI GI NO: 21592623 NR Description: gda-1, putative [Arabidopsis thaliana]
  misc_feature (59)..(275): NCBI GI NO: 21665866 NR Description: GDA2 protein [Pisum sativum]
  misc_feature (89)..(270): NCBI GI NO: 584825 NR Description: B2 PROTEIN
  misc_feature (17)..(270): NCBI GI NO: 18422167 NR Description: putative protein; protein id: At5g42050
  misc_feature (74)..(270): NCBI GI NO: 9757950 NR Description: gene_id:MJC20
  misc_feature (81)..(264): NCBI GI NO: 34913876 NR Description: B1156H12.22
  misc_feature (155)..(239): NCBI GI NO: 7488804 NR Description: gda-1 protein - garden pea
  misc_feature (124)..(270): NCBI GI NO: 34896110 NR Description: P0701D05.9
MTSKLAEITRSKGERMNTVPDAKQWDKTSYQLHDDSRMGHINLGLMNLDLKMNEAAAMKLPFRGMPYNMNQMYLKGSNANSNVNAFKMNVGVNKYSNSPNGKDANGKNNGGNNNNGSANGTSVADKRFKTLPTSEMLPRNEVLGGYIFVCNNDTMQEDLKRQLFGLPARYRDSVRAITPGLPLFLYNYTTHQLHGVFEAASFGGSNIDPTAWEDKKCKGESRFPAQVRICIRKLCKPLEEDSFRPVLHHYDGPKFRLELSIAETLSLLDLCGKEGI

SEQ ID NO: 34392 - protein, 261 aa, Zea mays subsp. mays
  peptide (1)..(261): Ceres Seq. ID no. 12414518
  misc_feature (1)..(260): NCBI GI NO: 2369766 NR Description: hypothetical protein [Citrus x paradisi]
  misc_feature (1)..(260): NCBI GI NO: 15232081 NR Description: gda-1, putative; protein id: At3g27090
  misc_feature (1)..(260): NCBI GI NO: 21592623 NR Description: gda-1, putative [Arabidopsis thaliana]
  misc_feature (44)..(260): NCBI GI NO: 21665866 NR Description: GDA2 protein [Pisum sativum]
  misc_feature (74)..(255): NCBI GI NO: 584825 NR Description: B2 PROTEIN
  misc_feature (2)..(255): NCBI GI NO: 18422167 NR Description: putative protein; protein id: At5g42050
  misc_feature (59)..(255): NCBI GI NO: 9757950 NR Description: gene_id:MJC20
  misc_feature (66)..(249): NCBI GI NO: 34913876 NR Description: B1156H12.22
  misc_feature (140)..(224): NCBI GI NO: 7488804 NR Description: gda-1 protein - garden pea
  misc_feature (109)..(255): NCBI GI NO: 34896110 NR Description: P0701D05.9
MNTVPDAKQWDKTSYQLHDDSRMGHINLGLMNLDLKMNEAAAMKLPFRGMPYNMNQMYLKGSNANSNVNAFKMNVGVNKYSNSPNGKDANGKNNGGNNNNGSANGTSVADKRFKTLPTSEMLPRNEVLGGYIFVCNNDTMQEDLKRQLFGLPARYRDSVRAITPGLPLFLYNYTTHQLHGVFEAASFGGSNIDPTAWEDKKCKGESRFPAQVRICIRKLCKPLEEDSFRPVLHHYDGPKFRLELSIAETLSLLDLCGKEGI

SEQ ID NO: 34393 - protein, 239 aa, Zea mays subsp. mays
  peptide (1)..(239): Ceres Seq. ID no. 12414519
  misc_feature (1)..(238): NCBI GI NO: 2369766 NR Description: hypothetical protein [Citrus x paradisi]
  misc_feature (1)..(238): NCBI GI NO: 15232081 NR Description: gda-1, putative; protein id: At3g27090
  misc_feature (1)..(238): NCBI GI NO: 21592623 NR Description: gda-1, putative [Arabidopsis thaliana]
  misc_feature (22)..(238): NCBI GI NO: 21665866 NR Description: GDA2 protein [Pisum sativum]
  misc_feature (52)..(233): NCBI GI NO: 584825 NR Description: B2 PROTEIN
  misc_feature (1)..(233): NCBI GI NO: 18422167 NR Description: putative protein; protein id: At5g42050
  misc_feature (37)..(233): NCBI GI NO: 9757950 NR Description: gene_id:MJC20
  misc_feature (44)..(227): NCBI GI NO: 34913876 NR Description: B1156H12.22
  misc_feature (118)..(202): NCBI GI NO: 7488804 NR Description: gda-1 protein - garden pea
  misc_feature (87)..(233): NCBI GI NO: 34896110 NR Description: P0701D05.9
MGHINLGLMNLDLKMNEAAAMKLPFRGMPYNMNQMYLKGSNANSNVNAFKMNVGVNKYSNSPNGKDANGKNNGGNNNNGSANGTSVADKRFKTLPTSEMLPRNEVLGGYIFVCNNDTMQEDLKRQLFGLPARYRDSVRAITPGLPLFLYNYTTHQLHGVFEAASFGGSNIDPTAWEDKKCKGESRFPAQVRICIRKLCKPLEEDSFRPVLHHYDGPKFRLELSIAETLSLLDLCGKEGI

SEQ ID NO: 34394 - DNA, 1164 bp, Zea mays subsp. mays
  misc_feature (1)..(1164): Ceres Seq. ID no. 12414536
gaccccgcacaccgacgacgaagagaggagaggaggcggagccgagagctcgagcccaaccgcgcaactcacttccccgtcgcgatttgcattgccctcctcttggcccccgatctcgccgtgccctacccccagacccgctccgccgccaccggagagatcgcgccccccattcccacaatctaatgcttccgtccctcgaggagccgagccctccgcgcggccgtgggatggggcggtgacaacaccggtgagtggcgtggggcagggagccggtggcgaggggcatatcatggtgcagtgcctggacggggtgaggcagctgctcgcggtcctgctcaagtgctgcgacgtcgagctcaagcagccgcccgggctcgaggaccctcaggttctcgcgagggagaccgtcttcagcgtgagcgaagtcgaggctctctacgagctgttcaagaagataagcagtgctgtcatcgatgatgggctgattaacaaggaggagtttcagttggcactatttaagaccagcaagaaggagagcctgttcgcagaccgcgtatttgatttgtttgacacaaagcacaatggaattttaggatttgaagaatttgctcgtgctctctcagtatttcatcctaatgctccccttgatgagaaaattgacttttcattccggctgtatgatctcaagcagcaaggctacattgagagacaagaggttaagcagatggttgttgctacacttgctgagtcaggaatgaatctttcagatgaaattgtagagagtataattgacaagacatttgaggaggcagacacaaaacatgatggaaggattgacaaggaagagtggcgcagtctagtcagtcggcatccatctttgctgaagaacatgactcttcagtacctcaaggacatcaccacaacatttccaagctttgtctttcactcccaagttgatgataactgattttcatgggattattttggcaagaagcattagaagatattctcgtggggttctgatatggttttctttttcaattattgggttgttggattgactgagatcgtagtgctcataagtatgttggatgttggattcgagaactcaaatcttttgtcaaccatgtttctttcatttgcatgtctggatgcgcttgg

SEQ ID NO: 34395 - protein, 322 aa, Zea mays subsp. mays
  peptide (1)..(322): Ceres Seq. ID no. 12414537
  misc_feature (182)..(210): Pfam Name: Pfam Description:  EF hand
  misc_feature (98)..(321): NCBI GI NO: 16924116 NR Description: putative calcineurin B-like protein [Oryza sativa]
  misc_feature (98)..(321): NCBI GI NO: 22137326 NR Description: calcineurin B [Pisum sativum]
  misc_feature (98)..(321): NCBI GI NO: 15236778 NR Description: calcineurin B-like protein 3; protein id:At4g26570
  misc_feature (98)..(321): NCBI GI NO: 15241101 NR Description: calcineurin B-like protein 2 (gb|AAC26009
  misc_feature (98)..(321): NCBI GI NO: 30687272 NR Description: calcineurin B-like protein 3 (CBL3)
  misc_feature (98)..(321): NCBI GI NO: 21593228 NR Description: calcineurin B-like protein 2
  misc_feature (128)..(316): NCBI GI NO: 38493047 NR Description: Chain A
  misc_feature (97)..(321): NCBI GI NO: 18414640 NR Description: expressed protein; protein id: At4g16350
  misc_feature (97)..(321): NCBI GI NO: 13448027 NR Description: SOS3-like calcium binding protein
  misc_feature (121)..(321): NCBI GI NO: 18414931 NR Description: calcineurin B-like protein 1; protein id:At4g17615
TPHTDDEERRGGGAESSSPTAQLTSPSRFALPSSWPPISPCPTPRPAPPPPERSRPPFPQSNASVPRGAEPSARPWDGAVTTPVSGVGQGAGGEGHIMVQCLDGVRQLLAVLLKCCDVELKQPPGLEDPQVLARETVFSVSEVEALYELFKKISSAVIDDGLINKEEFQLALFKTSKKESLFADRVFDLFDTKHNGILGFEEFARALSVFHPNAPLDEKIDFSFRLYDLKQQGYIERQEVKQMVVATLAESGMNLSDEIVESIIDKTFEEADTKHDGRIDKEEWRSLVSRHPSLLKNMTLQYLKDITTTFPSFVFHSQVDDN

SEQ ID NO: 34396 - protein, 225 aa, Zea mays subsp. mays
  peptide (1)..(225): Ceres Seq. ID no. 12414538
  misc_feature (85)..(113): Pfam Name: Pfam Description:  EF hand
  misc_feature (1)..(224): NCBI GI NO: 16924116 NR Description: putative calcineurin B-like protein [Oryza sativa]
  misc_feature (1)..(224): NCBI GI NO: 22137326 NR Description: calcineurin B [Pisum sativum]
  misc_feature (1)..(224): NCBI GI NO: 15236778 NR Description: calcineurin B-like protein 3; protein id:At4g26570
  misc_feature (1)..(224): NCBI GI NO: 15241101 NR Description: calcineurin B-like protein 2 (gb|AAC26009
  misc_feature (1)..(224): NCBI GI NO: 30687272 NR Description: calcineurin B-like protein 3 (CBL3)
  misc_feature (1)..(224): NCBI GI NO: 21593228 NR Description: calcineurin B-like protein 2
  misc_feature (31)..(219): NCBI GI NO: 38493047 NR Description: Chain A
  misc_feature (1)..(224): NCBI GI NO: 18414640 NR Description: expressed protein; protein id: At4g16350
  misc_feature (1)..(224): NCBI GI NO: 13448027 NR Description: SOS3-like calcium binding protein
  misc_feature (24)..(224): NCBI GI NO: 18414931 NR Description: calcineurin B-like protein 1; protein id:At4g17615
MVQCLDGVRQLLAVLLKCCDVELKQPPGLEDPQVLARETVFSVSEVEALYELFKKISSAVIDDGLINKEEFQLALFKTSKKESLFADRVFDLFDTKHNGILGFEEFARALSVFHPNAPLDEKIDFSFRLYDLKQQGYIERQEVKQMVVATLAESGMNLSDEIVESIIDKTFEEADTKHDGRIDKEEWRSLVSRHPSLLKNMTLQYLKDITTTFPSFVFHSQVDDN

SEQ ID NO: 34397 - DNA, 1112 bp, Zea mays subsp. mays
  misc_feature (1)..(1112): Ceres Seq. ID no. 12351804
aagttcaggcagtttcgtgcccttttcttctccaccagctcaaagctgaacgcggcatccttcctttcctcccctcttctgcccccatttcgttcctttcacaccggggaccggcgagcagagccgcgcacagcagaacgcggaagcaagaggaggcgatcgactactcgaccagccctctccgtgtctccgatggcggctcgcgtcctcgcggccctcgcccttgccctcgccctcgccctcgtcgccgtacccgctcccacgcgggcgtccaacgacgagggggacgcgctctacgcgctgcggcagcggctgtcggaccccaacggcgtgctgcagagctgggatcccacgctcgtcaccccctgcacctggttccacatctcctgcgaccaggtcggccgcgtcgtccgcctggacttgggcaactccaacgtctccggctccatcggccctgagctcggccgccttgtcaacctcaagtacctggagctgtacaggaacaaccttgacggcgagatccccaaggaattgggcaacctcaagaacctgatcagcttggatctgtatgccaacaagctcacgggaggaatccccaagtcactctccaagctcgactcactcagattcatgcgcttgaacaacaacaagcttacaggatcaattccaagggagtttgccaagctctccaacctgaaagtcatcgatttgtctaacaatgatctctgtggaactatccctgttgatgggcctttctcaacctttcctctccgaagctttgagaacaacagcaggctcaacggtccagagctacaaggattggttccttatgattttggatgttagatgccgatcaacaatgtaccaccttccccagttgaaagggggaaagacaagatagtattatcaatagaaacctagcttcaagaatgtcgtgactatatatatgtatgatattaagactagatttgataagggtggcatagcaagtcctgatattctgtgtgcattcagaatagctgcttttatgcccttgtgttgatattttgcaaaccaaaacaaactgttctgaaacgagggcacatattgttcatgaataaatttgagcctcc

SEQ ID NO: 34398 - protein, 281 aa, Zea mays subsp. mays
  peptide (1)..(281): Ceres Seq. ID no. 12351805
  misc_feature (231)..(263): Pfam Name: Pfam Description:  Leucine Rich Repeat
  misc_feature (65)..(281): NCBI GI NO: 34896972 NR Description: putative leucine-rich repeat protein
  misc_feature (71)..(281): NCBI GI NO: 34903344 NR Description: unnamed protein product
  misc_feature (62)..(281): NCBI GI NO: 34146800 NR Description: At3g43740 [Arabidopsis thaliana]
  misc_feature (70)..(281): NCBI GI NO: 15242153 NR Description: leucine-rich repeat protein; protein id:At5g21090
  misc_feature (65)..(281): NCBI GI NO: 29468120 NR Description: leucine-rich repeat protein [Oryza sativa]
  misc_feature (90)..(281): NCBI GI NO: 30385250 NR Description: leucine-rich repeat protein
  misc_feature (65)..(281): NCBI GI NO: 27497122 NR Description: floral organ regulator 1
  misc_feature (79)..(281): NCBI GI NO: 7489030 NR Description: leucine-rich repeat protein LRP - tomato
  misc_feature (67)..(281): NCBI GI NO: 21740899 NR Description: OSJNBa0036B21.13
  misc_feature (65)..(281): NCBI GI NO: 13897320 NR Description: somatic embryogenesis receptor-like kinase 2
KFRQFRALFFSTSSKLNAASFLSSPLLPPFRSFHTGDRRAEPRTAERGSKRRRSTTRPALSVSPMAARVLAALALALALALVAVPAPTRASNDEGDALYALRQRLSDPNGVLQSWDPTLVTPCTWFHISCDQVGRVVRLDLGNSNVSGSIGPELGRLVNLKYLELYRNNLDGEIPKELGNLKNLISLDLYANKLTGGIPKSLSKLDSLRFMRLNNNKLTGSIPREFAKLSNLKVIDLSNNDLCGTIPVDGPFSTFPLRSFENNSRLNGPELQGLVPYDFGC

SEQ ID NO: 34399 - protein, 217 aa, Zea mays subsp. mays; identical to SEQ ID NO: 32855
  peptide (1)..(217): Ceres Seq. ID no. 12351806
  misc_feature (167)..(199): Pfam Name: Pfam Description:  Leucine Rich Repeat
  misc_feature (1)..(217): NCBI GI NO: 34896972 NR Description: putative leucine-rich repeat protein
  misc_feature (7)..(217): NCBI GI NO: 34903344 NR Description: unnamed protein product
  misc_feature (1)..(217): NCBI GI NO: 34146800 NR Description: At3g43740 [Arabidopsis thaliana]
  misc_feature (6)..(217): NCBI GI NO: 15242153 NR Description: leucine-rich repeat protein; protein id:At5g21090
  misc_feature (1)..(217): NCBI GI NO: 29468120 NR Description: leucine-rich repeat protein [Oryza sativa]
  misc_feature (26)..(217): NCBI GI NO: 30385250 NR Description: leucine-rich repeat protein
  misc_feature (1)..(217): NCBI GI NO: 27497122 NR Description: floral organ regulator 1
  misc_feature (15)..(217): NCBI GI NO: 7489030 NR Description: leucine-rich repeat protein LRP - tomato
  misc_feature (3)..(217): NCBI GI NO: 21740899 NR Description: OSJNBa0036B21.13
  misc_feature (1)..(217): NCBI GI NO: 13897320 NR Description: somatic embryogenesis receptor-like kinase 2

SEQ ID NO: 34400 - protein, 151 aa, Zea mays subsp. mays
  peptide (1)..(151): Ceres Seq. ID no. 12351807
VQAVSCPFLLHQLKAERGILPFLPSSAPISFLSHRGPASRAAHSRTRKQEEAIDYSTSPLRVSDGGSRPRGPRPCPRPRPRRRTRSHAGVQRRGGRALRAAAAAVGPQRRAAELGSHARHPLHLVPHLLRPGRPRRPPGLGQLQRLRLHRP

SEQ ID NO: 34401 - DNA, 812 bp, Zea mays subsp. mays
  misc_feature (1)..(812): Ceres Seq. ID no. 12351463
ctcaccaagaaagaaaaacagacacacgtcactgttcgccttgtccggtcgtttctgctccattcctcctcctgcaagccgcaaaggaatcaggcggagtggcgcgatgggagagcaggtcgtgacggagcagatccagcggaagctggaggaggtcaacgctaccgtccaacagcacctcgcgggtgtccaggaccacatcaacttcaccatgcagcaagcatacttcaagtgcgcatatggttgctttgatcggcgccatactcaggaagcgatcagcaactgtgtggagaattgtagtgtgcctgtccttgctgccaacaatatttttgagagtgagatggccaagtttcagggaatgttgaaccggtcattgagggtctgtcaagataagtttgaagctgccaatctccagaagttgaaatcagatgcaactcgggaactggaatcctgtgtcaacagatctattgatgacagcctcagggtccttccgcatgtggtggatcagatcaagtccaccctcaaaatcaattagaggcactattacttttagcaaatgaaccagatatagttgagaatgtttcatattcacattcgctgcataactccacattttcagagctcttaccgatattgatagaacatgatcaccctatcgtagttttttggattctgctcttaccacctagtcctggcatgtcaacagcgtcgacattttgaactctactgagaacacagcttaggcattgaaaggctggatgaacttgttgtgctacatgtacaagaatactcttacgtcttgtgattttttg

SEQ ID NO: 34402 - protein, 177 aa, Zea mays subsp. mays
  peptide (1)..(177): Ceres Seq. ID no. 12351464
  misc_feature (44)..(172): Pfam Name: DUF842 Pfam Description: Eukaryotic protein of unknown function
  misc_feature (35)..(176): NCBI GI NO: 18402744 NR Description: expressed protein; protein id: At2g31725
  misc_feature (35)..(176): NCBI GI NO: 15221245 NR Description: hypothetical Protein; protein id: At1g05730.1
  misc_feature (38)..(176): NCBI GI NO: 15224344 NR Description: hypothetical protein; protein id: At2g43720
  misc_feature (32)..(153): NCBI GI NO: 15221247 NR Description: hypothetical protein; protein id: At1g05740.1
  misc_feature (41)..(174): NCBI GI NO: 19922546 NR Description: CG5327 gene product [Drosophila melanogaster]
  misc_feature (41)..(174): NCBI GI NO: 14249520 NR Description: hypothetical protein FLJ14668 [Homo sapiens]
  misc_feature (71)..(174): NCBI GI NO: 27712200 NR Description: similar to RIKEN cDNA 2010309E21
  misc_feature (71)..(174): NCBI GI NO: 15929034 NR Description: hypothetical protein FLJ14668 [Homo sapiens]
  misc_feature (71)..(174): NCBI GI NO: 13385042 NR Description: RIKEN cDNA 2010309E21 [Mus musculus]
  misc_feature (71)..(174): NCBI GI NO: 15489002 NR Description: Unknown (protein for IMAGE:3493774) [Mus musculus]
SPRKKNRHTSLFALSGRFCSIPPPASRKGIRRSGAMGEQVVTEQIQRKLEEVNATVQQHLAGVQDHINFTMQQAYFKCAYGCFDRRHTQEAISNCVENCSVPVLAANNIFESEMAKFQGMLNRSLRVCQDKFEAANLQKLKSDATRELESCVNRSIDDSLRVLPHVVDQIKSTLKIN

SEQ ID NO: 34403 - protein, 142 aa, Zea mays subsp. mays
  peptide (1)..(142): Ceres Seq. ID no. 12351465
  misc_feature (9)..(137): Pfam Name: DUF842 Pfam Description: Eukaryotic protein of unknown function
  misc_feature (1)..(141): NCBI GI NO: 18402744 NR Description: expressed protein; protein id: At2g31725
  misc_feature (1)..(141): NCBI GI NO: 15221245 NR Description: hypothetical Protein; protein id: At1g05730.1
  misc_feature (3)..(141): NCBI GI NO: 15224344 NR Description: hypothetical protein; protein id: At2g43720
  misc_feature (1)..(118): NCBI GI NO: 15221247 NR Description: hypothetical protein; protein id: At1g05740.1
  misc_feature (6)..(139): NCBI GI NO: 19922546 NR Description: CG5327 gene product [Drosophila melanogaster]
  misc_feature (6)..(139): NCBI GI NO: 14249520 NR Description: hypothetical protein FLJ14668 [Homo sapiens]
  misc_feature (36)..(139): NCBI GI NO: 27712200 NR Description: similar to RIKEN cDNA 2010309E21
  misc_feature (36)..(139): NCBI GI NO: 15929034 NR Description: hypothetical protein FLJ14668 [Homo sapiens]
  misc_feature (36)..(139): NCBI GI NO: 13385042 NR Description: RIKEN cDNA 2010309E21 [Mus musculus]
  misc_feature (36)..(139): NCBI GI NO: 15489002 NR Description: Unknown (protein for IMAGE:3493774) [Mus musculus]
MGEQVVTEQIQRKLEEVNATVQQHLAGVQDHINFTMQQAYFKCAYGCFDRRHTQEAISNCVENCSVPVLAANNIFESEMAKFQGMLNRSLRVCQDKFEAANLQKLKSDATRELESCVNRSIDDSLRVLPHVVDQIKSTLKIN

SEQ ID NO: 34404 - protein, 107 aa, Zea mays subsp. mays
  peptide (1)..(107): Ceres Seq. ID no. 12351466
  misc_feature (1)..(102): Pfam Name: DUF842 Pfam Description: Eukaryotic protein of unknown function
  misc_feature (1)..(106): NCBI GI NO: 18402744 NR Description: expressed protein; protein id: At2g31725
  misc_feature (1)..(106): NCBI GI NO: 15221245 NR Description: hypothetical Protein; protein id: At1g05730.1
  misc_feature (1)..(106): NCBI GI NO: 15224344 NR Description: hypothetical protein; protein id: At2g43720
  misc_feature (1)..(83): NCBI GI NO: 15221247 NR Description: hypothetical protein; protein id: At1g05740.1
  misc_feature (1)..(104): NCBI GI NO: 19922546 NR Description: CG5327 gene product [Drosophila melanogaster]
  misc_feature (1)..(104): NCBI GI NO: 14249520 NR Description: hypothetical protein FLJ14668 [Homo sapiens]
  misc_feature (1)..(104): NCBI GI NO: 27712200 NR Description: similar to RIKEN cDNA 2010309E21
  misc_feature (1)..(104): NCBI GI NO: 15929034 NR Description: hypothetical protein FLJ14668 [Homo sapiens]
  misc_feature (1)..(104): NCBI GI NO: 13385042 NR Description: RIKEN cDNA 2010309E21 [Mus musculus]
  misc_feature (1)..(104): NCBI GI NO: 15489002 NR Description: Unknown (protein for IMAGE:3493774) [Mus musculus]
MQQAYFKCAYGCFDRRHTQEAISNCVENCSVPVLAANNIFESEMAKFQGMLNRSLRVCQDKFEAANLQKLKSDATRELESCVNRSIDDSLRVLPHVVDQIKSTLKIN

SEQ ID NO: 34405 - DNA, 1284 bp, Zea mays subsp. mays
  misc_feature (1)..(1284): Ceres Seq. ID no. 12414696
atgcagattcccaagtggagttgcggcggctggttatcatttatcatcaccttcgcctcacaccttccggccgcccattccgatccgatccccggccggccacctaccaccggtcagccccatcaatctctgaggcagcgtcagccatcaggcctccctcgtcgatctccccgccgccgccgctgctaataccagataatggaggccggcgccgccgctgctgccactgccatctaccctctgcaccatgcaaaaccatacacctggtgaggcatgcccaaggtgtccacaacgtggaaggcgacacggatcacagcgcctacatgaaacccgacttcttcgacgcgagcatcactcccttgggctggaaccaggttgacctcctgcgagagcatgtgaaggaatctgggcttgcagaaaagattgagctggttatttgttctcctttgtcgaggaccatgcagactgcagtgggagtttttgttggcgaaagctgcagtaatggtgtgagtgtgcctccactgatggtggagaatgctggacgtccggcagtttcaagtttgaactgcccaccatttcttgctgttgaggcctgcagggagcgcttgggtgtccatccttgtgacaagaggaggagcatcacagagtaccgtgctctcttccctgccattgatttttcgctgatagagagtgacgaagatgttctctgggtaccagatgtcagagaaacctttgagtcgctcgcagaaaggggtatgaagttcattgactggctatggacaagagaagagagagagatagccatcgtcacccatagcggtttattaagccataccttgcgcaggtacagcaaagagtgccatccaacagtaacacaagaagtgagcaagtactttgcaaactgcgagctccggtccttggtactggttgacaggagtatgcttggttcagatggccccagttacaacaactaccctggcaaaatgaaaatcccagccgcacttgatctgcccagcgatgacaagaagcagcctcttcagaaccagagcggctgagcaggcctgtcttggggcttgtttggtgttcaccaccactgattccttttcttttgtcatcctattttgaaacttccctagctgcattcagtccattttttgtgaactattttgaacttcccatctgtggttgttgagcaccatttgtggtactggacatggccggacggtccaacctgtggacggtccgtgattagatcagatcatacgtaattaacccttttcggcg

SEQ ID NO: 34406 - protein, 350 aa, Zea mays subsp. mays
  peptide (1)..(350): Ceres Seq. ID no. 12414697
  misc_feature (84)..(317): Pfam Name: Pfam Description:  Phosphoglycerate mutase family
  misc_feature (79)..(339): NCBI GI NO: 38344765 NR Description: OSJNBa0068L06.8
  misc_feature (79)..(349): NCBI GI NO: 21700765 NR Description: unknown [Glycine max]
  misc_feature (79)..(349): NCBI GI NO: 21700767 NR Description: unknown [Glycine max]
  misc_feature (79)..(339): NCBI GI NO: 15237708 NR Description: ZW10-like protein; protein id: At5g64460
  misc_feature (79)..(338): NCBI GI NO: 15227803 NR Description: unknown protein; protein id: At2g17280.1
  misc_feature (79)..(342): NCBI GI NO: 15217922 NR Description: unknown protein; protein id: At1g58280.1
  misc_feature (79)..(342): NCBI GI NO: 25372930 NR Description: hypothetical protein ZW10
  misc_feature (79)..(342): NCBI GI NO: 25372931 NR Description: hypothetical protein F19C14.10
  misc_feature (203)..(342): NCBI GI NO: 30696245 NR Description: expressed protein [Arabidopsis thaliana]
  misc_feature (79)..(202): NCBI GI NO: 30696245 NR Description: expressed protein [Arabidopsis thaliana]
ADSQVELRRLVIIYHHLRLTPSGRPFRSDPRPATYHRSAPSISEAASAIRPPSSISPPPPLLIPDNGGRRRRCCHCHLPSAPCKTIHLVRHAQGVHNVEGDTDHSAYMKPDFFDASITPLGWNQVDLLREHVKESGLAEKIELVICSPLSRTMQTAVGVFVGESCSNGVSVPPLMVENAGRPAVSSLNCPPFLAVEACRERLGVHPCDKRRSITEYRALFPAIDFSLIESDEDVLWVPDVRETFESLAERGMKFIDWLWTREEREIAIVTHSGLLSHTLRRYSKECHPTVTQEVSKYFANCELRSLVLVDRSMLGSDGPSYNNYPGKMKIPAALDLPSDDKKQPLQNQSG

SEQ ID NO: 34407 - protein, 243 aa, Zea mays subsp. mays
  peptide (1)..(243): Ceres Seq. ID no. 12414698
  misc_feature (1)..(210): Pfam Name: Pfam Description:  Phosphoglycerate mutase family
  misc_feature (1)..(232): NCBI GI NO: 38344765 NR Description: OSJNBa0068L06.8
  misc_feature (1)..(242): NCBI GI NO: 21700765 NR Description: unknown [Glycine max]
  misc_feature (1)..(242): NCBI GI NO: 21700767 NR Description: unknown [Glycine max]
  misc_feature (1)..(232): NCBI GI NO: 15237708 NR Description: ZW10-like protein; protein id: At5g64460
  misc_feature (1)..(231): NCBI GI NO: 15227803 NR Description: unknown protein; protein id: At2g17280.1
  misc_feature (1)..(235): NCBI GI NO: 15217922 NR Description: unknown protein; protein id: At1g58280.1
  misc_feature (1)..(235): NCBI GI NO: 25372930 NR Description: hypothetical protein ZW10
  misc_feature (1)..(235): NCBI GI NO: 25372931 NR Description: hypothetical protein F19C14.10
  misc_feature (96)..(235): NCBI GI NO: 30696245 NR Description: expressed protein [Arabidopsis thaliana]
  misc_feature (1)..(95): NCBI GI NO: 30696245 NR Description: expressed protein [Arabidopsis thaliana]
MKPDFFDASITPLGWNQVDLLREHVKESGLAEKIELVICSPLSRTMQTAVGVFVGESCSNGVSVPPLMVENAGRPAVSSLNCPPFLAVEACRERLGVHPCDKRRSITEYRALFPAIDFSLIESDEDVLWVPDVRETFESLAERGMKFIDWLWTREEREIAIVTHSGLLSHTLRRYSKECHPTVTQEVSKYFANCELRSLVLVDRSMLGSDGPSYNNYPGKMKIPAALDLPSDDKKQPLQNQSG

SEQ ID NO: 34408 - protein, 198 aa, Zea mays subsp. mays
  peptide (1)..(198): Ceres Seq. ID no. 12414699
  misc_feature (1)..(165): Pfam Name: Pfam Description:  Phosphoglycerate mutase family
  misc_feature (1)..(187): NCBI GI NO: 38344765 NR Description: OSJNBa0068L06.8
  misc_feature (1)..(197): NCBI GI NO: 21700765 NR Description: unknown [Glycine max]
  misc_feature (1)..(197): NCBI GI NO: 21700767 NR Description: unknown [Glycine max]
  misc_feature (1)..(187): NCBI GI NO: 15237708 NR Description: ZW10-like protein; protein id: At5g64460
  misc_feature (1)..(186): NCBI GI NO: 15227803 NR Description: unknown protein; protein id: At2g17280.1
  misc_feature (1)..(190): NCBI GI NO: 15217922 NR Description: unknown protein; protein id: At1g58280.1
  misc_feature (1)..(190): NCBI GI NO: 25372930 NR Description: hypothetical protein ZW10
  misc_feature (1)..(190): NCBI GI NO: 25372931 NR Description: hypothetical protein F19C14.10
  misc_feature (51)..(190): NCBI GI NO: 30696245 NR Description: expressed protein [Arabidopsis thaliana]
  misc_feature (1)..(50): NCBI GI NO: 30696245 NR Description: expressed protein [Arabidopsis thaliana]
MQTAVGVFVGESCSNGVSVPPLMVENAGRPAVSSLNCPPFLAVEACRERLGVHPCDKRRSITEYRALFPAIDFSLIESDEDVLWVPDVRETFESLAERGMKFIDWLWTREEREIAIVTHSGLLSHTLRRYSKECHPTVTQEVSKYFANCELRSLVLVDRSMLGSDGPSYNNYPGKMKIPAALDLPSDDKKQPLQNQSG

SEQ ID NO: 34409 - DNA, 1039 bp, Zea mays subsp. mays
  misc_feature (1)..(1039): Ceres Seq. ID no. 12345461
atcacttgacttgcgagcgaccgcggctcacgtcggctgcataaattgcttcgtagactagtaccacacagtttgcgagaaggggagaggtagaggttccgaggtagagagatagagaggaggagagggagggcgaggcggcggatccgtcactccgttcttctccgctgatctggaggaaggaggcgaggggagttgcaaatccatcaatggccactccaaccacctattcagtccgcatatcctcggagacccacaagattgaagcctgggtggtgtctgacgaagctttggccaggcaactgcaggaggaggagaacacgcgtgacgctgctgccgacaccagagaagtcgccggcaatgtacccttggagtcatcgtcaccggctgttgagtacaggcctgcacagaatgcagctcaggttgcaagggaagacaatgtggacccagataatatgtcatatgagcaactacaagcattaggggaagcagtaggaattcagtccagagggttatctgatgagctgatatcttatttggagccatttaggaacaagtgcactttcttctccaggaaaaagaacagtgaggaatgtgtgatctgcaagacaacatatagaagccggcagaaattgataagactaccctgcagccactgttatcacgcagattgcataactcgttggcttaagatcaacaaggcatgcccagtctgcaacgaggaggtgtttggatgaactgcaaggttcctggcagatgctgcggtttcatcgttacttgcttgcggcatgcttttgagaagacgttggacgcataaggtccattgtttgtgattatgttgtgagcctagtttggtgccctttgcttaagaggactggctctgcccatgcatgggtcggtctacacgtgtgctagtaactggaccaggtcgcgttttgtgatgcgtctatccatcttggttttatcacaaattgatagatctgttgtgtgggtagtttggttgccgttttctgaatataatggatggtgtttttgcccc

SEQ ID NO: 34410 - protein, 175 aa, Zea mays subsp. mays
  peptide (1)..(175): Ceres Seq. ID no. 12345462
  misc_feature (129)..(169): Pfam Name: RING finger Pfam Description: Zinc finger, C3HC4 type
  misc_feature (19)..(175): NCBI GI NO: 38567912 NR Description: OSJNBa0088I22.8
  misc_feature (12)..(175): NCBI GI NO: 34898016 NR Description: ESTs C26000
  misc_feature (60)..(175): NCBI GI NO: 22331928 NR Description: putative protein; protein id: At3g63530.1
  misc_feature (19)..(173): NCBI GI NO: 21536693 NR Description: unknown [Arabidopsis thaliana]
  misc_feature (24)..(173): NCBI GI NO: 10334499 NR Description: hypothetical protein [Cicer arietinum]
  misc_feature (19)..(173): NCBI GI NO: 18402411 NR Description: expressed protein; protein id: At3g19910
  misc_feature (75)..(172): NCBI GI NO: 15232746 NR Description: zinc-finger protein-like protein
  misc_feature (63)..(169): NCBI GI NO: 1076498 NR Description: RING finger protein Pzf - soybean (fragment)
  misc_feature (74)..(169): NCBI GI NO: 11358785 NR Description: RING-H2 finger protein RHG1a
  misc_feature (74)..(172): NCBI GI NO: 15226553 NR Description: putative RING zinc finger protein
MATPTTYSVRISSETHKIEAWVVSDEALARQLQEEENTRDAAADTREVAGNVPLESSSPAVEYRPAQNAAQVAREDNVDPDNMSYEQLQALGEAVGIQSRGLSDELISYLEPFRNKCTFFSRKKNSEECVICKTTYRSRQKLIRLPCSHCYHADCITRWLKINKACPVCNEEVFG

SEQ ID NO: 34411 - protein, 93 aa, Zea mays subsp. mays
  peptide (1)..(93): Ceres Seq. ID no. 12345463
  misc_feature (47)..(87): Pfam Name: RING finger Pfam Description: Zinc finger, C3HC4 type
  misc_feature (1)..(93): NCBI GI NO: 38567912 NR Description: OSJNBa0088I22.8
  misc_feature (1)..(93): NCBI GI NO: 34898016 NR Description: ESTs C26000
  misc_feature (1)..(93): NCBI GI NO: 22331928 NR Description: putative protein; protein id: At3g63530.1
  misc_feature (1)..(91): NCBI GI NO: 21536693 NR Description: unknown [Arabidopsis thaliana]
  misc_feature (1)..(91): NCBI GI NO: 10334499 NR Description: hypothetical protein [Cicer arietinum]
  misc_feature (1)..(91): NCBI GI NO: 18402411 NR Description: expressed protein; protein id: At3g19910
  misc_feature (1)..(90): NCBI GI NO: 15232746 NR Description: zinc-finger protein-like protein
  misc_feature (1)..(87): NCBI GI NO: 1076498 NR Description: RING finger protein Pzf - soybean (fragment)
  misc_feature (1)..(87): NCBI GI NO: 11358785 NR Description: RING-H2 finger protein RHG1a
  misc_feature (1)..(90): NCBI GI NO: 15226553 NR Description: putative RING zinc finger protein
MSYEQLQALGEAVGIQSRGLSDELISYLEPFRNKCTFFSRKKNSEECVICKTTYRSRQKLIRLPCSHCYHADCITRWLKINKACPVCNEEVFG

SEQ ID NO: 34412 - DNA, 1438 bp, Zea mays subsp. mays
  misc_feature (1)..(1438): Ceres Seq. ID no. 12351808
gacgccaccaatcaacgcttccctttatggccggagcaatagttggcagactcggccgccatcccaccacctccttgctcctcctaacactgccccgtcacgccgccgcacaccaccggctttactctccttcctcctcccaagttgcaagagccggattgccaggtgcttgtttcgtttcgggctgtgtcagtattcaaaaatgggtgatccaagtgagaggaatggacacggcgctcttacccgggtgctattctgtggtccatattggcctgcttctactaactacaccagggagtatttgcaggactatccattcattcaggttgatgaagtaggtcttgagcaggtacctgatgttattcacagctatcatatatgtgtagtaaaaaataagcgtatagattcagatattattgccaaggcaactcagatgaagattataatgcagtatggtgttgggttagaaggtgttgatgtaaatgctgctacagaacacaaaatcaaagttgcacgaatacctggaagtacgacaggaaatgctgtctcttgcgcagaaatggcaatctatcttactctaggcattctgcgtaagcaaaaggagatggatactgctgtgaaccggaaagaccttggtgttccagttggagatacattgttcggcaaaacaatccttatccttggatttggggccattggcatcgaggttgccaagaggctaagaccctttggggtaaaaattcttgctacaaaaagaaattggtcatcggacacattgccatctgatgtcgatgagctagttgacaagaaaggtgggccggaagatatgtatgagtttgctggtgaagctaacattgttatagcatgcatgaccttaaccagcgagacaattggaattgtggatcataagtttgtttcatcaatgaaaaaggggtcatatctggtcaacattgctcggggacgcctgctggactacaaggctgtgtttgatcacctggaatcgggccatctagctggtctggggattgatgttgcttggatggagccatttgatcctgaggaccctgttctgaaattcccaaacgtcattctaacgccccatgtggccggcgtcaccgagtattcctacagaactatggcaaagtctgttggtgacaccgcccttcagcttcatttaggcgaggcgttcacggaggtagagttcgtcaactaaaaaaccgtccaggcggcagccgtagacgcatgccattcgtcggctattggaaccgctgatgcgatcatttgtagagaataatggatccgcgacttgtaagaataaacatgtagccagatgtttgatggtgatctccatgagaactctgccactggctgcttagctggtacctggtagtggtagcaagtcatttttctcaaacattgcgttctctttcgccttctc

SEQ ID NO: 34413 - protein, 403 aa, Zea mays subsp. mays
  peptide (1)..(403): Ceres Seq. ID no. 12351809
  misc_feature (184)..(367): Pfam Name: Pfam Description:  D-isomer specific 2-hydroxyacid dehydrogenase
  misc_feature (108)..(403): NCBI GI NO: 34901058 NR Description: putative phosphoglycerate dehydrogenase
  misc_feature (107)..(383): NCBI GI NO: 34901040 NR Description: putative phosphoglycerate dehydrogenase
  misc_feature (80)..(403): NCBI GI NO: 25406154 NR Description: hypothetical protein T9N14.9
  misc_feature (80)..(403): NCBI GI NO: 30698851 NR Description: oxidoreductase family [Arabidopsis thaliana]
  misc_feature (111)..(394): NCBI GI NO: 14521645 NR Description: GLYCERATE DEHYDROGENASE [Pyrococcus abyssi]
  misc_feature (106)..(393): NCBI GI NO: 16079364 NR Description: phosphoglycerate dehydrogenase [Bacillus subtilis]
  misc_feature (133)..(394): NCBI GI NO: 25027935 NR Description: putative D-3-phosphoglycerate dehydrogenase
  misc_feature (138)..(394): NCBI GI NO: 23023997 NR Description: hypothetical protein
  misc_feature (115)..(393): NCBI GI NO: 11498419 NR Description: phosphoglycerate dehydrogenase (serA)
  misc_feature (109)..(394): NCBI GI NO: 19552504 NR Description: phosphoglycerate dehydrogenase
TPPINASLYGRSNSWQTRPPSHHLLAPPNTAPSRRRTPPALLSFLLPSCKSRIARCLFRFGLCQYSKMGDPSERNGHGALTRVLFCGPYWPASTNYTREYLQDYPFIQVDEVGLEQVPDVIHSYHICVVKNKRIDSDIIAKATQMKIIMQYGVGLEGVDVNAATEHKIKVARIPGSTTGNAVSCAEMAIYLTLGILRKQKEMDTAVNRKDLGVPVGDTLFGKTILILGFGAIGIEVAKRLRPFGVKILATKRNWSSDTLPSDVDELVDKKGGPEDMYEFAGEANIVIACMTLTSETIGIVDHKFVSSMKKGSYLVNIARGRLLDYKAVFDHLESGHLAGLGIDVAWMEPFDPEDPVLKFPNVILTPHVAGVTEYSYRTMAKSVGDTALQLHLGEAFTEVEFVN

SEQ ID NO: 34414 - protein, 336 aa, Zea mays subsp. mays
  peptide (1)..(336): Ceres Seq. ID no. 12351810
  misc_feature (117)..(300): Pfam Name: Pfam Description:  D-isomer specific 2-hydroxyacid dehydrogenase
  misc_feature (41)..(336): NCBI GI NO: 34901058 NR Description: putative phosphoglycerate dehydrogenase
  misc_feature (40)..(316): NCBI GI NO: 34901040 NR Description: putative phosphoglycerate dehydrogenase
  misc_feature (13)..(336): NCBI GI NO: 25406154 NR Description: hypothetical protein T9N14.9
  misc_feature (13)..(336): NCBI GI NO: 30698851 NR Description: oxidoreductase family [Arabidopsis thaliana]
  misc_feature (44)..(327): NCBI GI NO: 14521645 NR Description: GLYCERATE DEHYDROGENASE [Pyrococcus abyssi]
  misc_feature (39)..(326): NCBI GI NO: 16079364 NR Description: phosphoglycerate dehydrogenase [Bacillus subtilis]
  misc_feature (66)..(327): NCBI GI NO: 25027935 NR Description: putative D-3-phosphoglycerate dehydrogenase
  misc_feature (71)..(327): NCBI GI NO: 23023997 NR Description: hypothetical protein
  misc_feature (48)..(326): NCBI GI NO: 11498419 NR Description: phosphoglycerate dehydrogenase (serA)
  misc_feature (42)..(327): NCBI GI NO: 19552504 NR Description: phosphoglycerate dehydrogenase
MGDPSERNGHGALTRVLFCGPYWPASTNYTREYLQDYPFIQVDEVGLEQVPDVIHSYHICVVKNKRIDSDIIAKATQMKIIMQYGVGLEGVDVNAATEHKIKVARIPGSTTGNAVSCAEMAIYLTLGILRKQKEMDTAVNRKDLGVPVGDTLFGKTILILGFGAIGIEVAKRLRPFGVKILATKRNWSSDTLPSDVDELVDKKGGPEDMYEFAGEANIVIACMTLTSETIGIVDHKFVSSMKKGSYLVNIARGRLLDYKAVFDHLESGHLAGLGIDVAWMEPFDPEDPVLKFPNVILTPHVAGVTEYSYRTMAKSVGDTALQLHLGEAFTEVEFVN

SEQ ID NO: 34415 - protein, 259 aa, Zea mays subsp. mays
  peptide (1)..(259): Ceres Seq. ID no. 12351811
  misc_feature (40)..(223): Pfam Name: Pfam Description:  D-isomer specific 2-hydroxyacid dehydrogenase
  misc_feature (1)..(259): NCBI GI NO: 34901058 NR Description: putative phosphoglycerate dehydrogenase
  misc_feature (1)..(239): NCBI GI NO: 34901040 NR Description: putative phosphoglycerate dehydrogenase
  misc_feature (1)..(259): NCBI GI NO: 25406154 NR Description: hypothetical protein T9N14.9
  misc_feature (1)..(259): NCBI GI NO: 30698851 NR Description: oxidoreductase family [Arabidopsis thaliana]
  misc_feature (1)..(250): NCBI GI NO: 14521645 NR Description: GLYCERATE DEHYDROGENASE [Pyrococcus abyssi]
  misc_feature (1)..(249): NCBI GI NO: 16079364 NR Description: phosphoglycerate dehydrogenase [Bacillus subtilis]
  misc_feature (1)..(250): NCBI GI NO: 25027935 NR Description: putative D-3-phosphoglycerate dehydrogenase
  misc_feature (1)..(250): NCBI GI NO: 23023997 NR Description: hypothetical protein
  misc_feature (1)..(249): NCBI GI NO: 11498419 NR Description: phosphoglycerate dehydrogenase (serA)
  misc_feature (1)..(250): NCBI GI NO: 19552504 NR Description: phosphoglycerate dehydrogenase
MKIIMQYGVGLEGVDVNAATEHKIKVARIPGSTTGNAVSCAEMAIYLTLGILRKQKEMDTAVNRKDLGVPVGDTLFGKTILILGFGAIGIEVAKRLRPFGVKILATKRNWSSDTLPSDVDELVDKKGGPEDMYEFAGEANIVIACMTLTSETIGIVDHKFVSSMKKGSYLVNIARGRLLDYKAVFDHLESGHLAGLGIDVAWMEPFDPEDPVLKFPNVILTPHVAGVTEYSYRTMAKSVGDTALQLHLGEAFTEVEFVN

SEQ ID NO: 34416 - DNA, 1324 bp, Zea mays subsp. mays
  misc_feature (1)..(1324): Ceres Seq. ID no. 12414692
atctcctccacttccttcctgggctctgggctacgtattatccatccgtctcagtcacctcgcctcctcctcctcctcccccagtccccctccctcatcctcgattgcgcccctcactcgccatgtcggggctctacagccaggggttctcccctgcgcgaaacctctcccctcagattagaagcaatccggacgctgatagtcagtacctggccgagctgctcgccgaacaccacaaactggggcccttcatgcaggtgctgcccgtatgcaacaagctgctgagccaagagattatgcgggtatcaagcattgtgcacaaccatggatttggcgatttcgacaggcatcggtttagaagtcctagtccaatgtcttctccaaaccctagagctaatctccctggcaatgggttcagtccttggagcggactacaagagagattaggttttcctcaaggaaccagcatggactggcaaggagcacccccaagtcctagctcccatgttgtaaagaagattcttcgtctggaggttccagttgattcttatccgaatttcaattttgtggggcgcattttaggacctagaggtaattctctaaagcgagtagaagcatccactgggtgtcgtgttttcattagaggaaagggttccatcaaagattcagggaaggaggacaaactacggggaaaaccgggctatgagcacctgagtgatccgctgcatatcttgatagaggccgagttccctgccagtatcatcgatgcaaggctgagacaagcacaggagattatagaagaattgcttaaaccagtggacgagtcccaagatctctacaaaaggcagcagctcagggagctggcaatgctgaactcaaccctgagagaggacagccctcatccggggagtgtctctccattcagcaacggtggcatgaagcgtgcgaaaacaggacagtagagaaaacaactatgctcccatatctggccccgtcgtcatgggaacgccatgggcatgcgtgaaggaaggccatgcgccttcgctggcggagtccggtatcttctgctagctttcacctccggacaggggaaagatgagatgagatgagatgagatagtcgcggacccttggttggatccggcgttggttgttgtatggtctagaacattcgttctatttgttattgacggttaaccctagtatgttggtgagctgcaacctgcaaactgcatggtaaactagctagagaggcctgctgagtatgtgagctttaggtcttttcttgacattgtattataacctttttaacattatggagttgc

SEQ ID NO: 34417 - protein, 319 aa, Zea mays subsp. mays
  peptide (1)..(319): Ceres Seq. ID no. 12414693
  misc_feature (175)..(230): Pfam Name: Pfam Description:  KH domain
  misc_feature (43)..(316): NCBI GI NO: 34900448 NR Description: contains EST C27129
  misc_feature (34)..(319): NCBI GI NO: 12322716 NR Description: unknown protein; 28504-31237
  misc_feature (41)..(319): NCBI GI NO: 30680583 NR Description: KH domain protein [Arabidopsis thaliana]
  misc_feature (41)..(318): NCBI GI NO: 15224909 NR Description: KH domain protein; protein id: At2g38610
  misc_feature (41)..(319): NCBI GI NO: 40645104 NR Description: hypothetical protein [Nicotiana tabacum]
  misc_feature (49)..(316): NCBI GI NO: 34909270 NR Description: P0454H12.18
  misc_feature (54)..(317): NCBI GI NO: 15236738 NR Description: KH domain protein; protein id: At4g26480.1
  misc_feature (54)..(317): NCBI GI NO: 20268733 NR Description: unknown protein [Arabidopsis thaliana]
  misc_feature (54)..(317): NCBI GI NO: 15241136 NR Description: KH domain protein; protein id: At5g56140.1
  misc_feature (97)..(319): NCBI GI NO: 34907446 NR Description: P0434C04.5
LLHFLPGLWATYYPSVSVTSPPPPPPPVPLPHPRLRPSLAMSGLYSQGFSPARNLSPQIRSNPDADSQYLAELLAEHHKLGPFMQVLPVCNKLLSQEIMRVSSIVHNHGFGDFDRHRFRSPSPMSSPNPRANLPGNGFSPWSGLQERLGFPQGTSMDWQGAPPSPSSHVVKKILRLEVPVDSYPNFNFVGRILGPRGNSLKRVEASTGCRVFIRGKGSIKDSGKEDKLRGKPGYEHLSDPLHILIEAEFPASIIDARLRQAQEIIEELLKPVDESQDLYKRQQLRELAMLNSTLREDSPHPGSVSPFSNGGMKRAKTGQ

SEQ ID NO: 34418 - protein, 279 aa, Zea mays subsp. mays
  peptide (1)..(279): Ceres Seq. ID no. 12414694
  misc_feature (135)..(190): Pfam Name: Pfam Description:  KH domain
  misc_feature (3)..(276): NCBI GI NO: 34900448 NR Description: contains EST C27129
  misc_feature (1)..(279): NCBI GI NO: 12322716 NR Description: unknown protein; 28504-31237
  misc_feature (1)..(279): NCBI GI NO: 30680583 NR Description: KH domain protein [Arabidopsis thaliana]
  misc_feature (1)..(278): NCBI GI NO: 15224909 NR Description: KH domain protein; protein id: At2g38610
  misc_feature (1)..(279): NCBI GI NO: 40645104 NR Description: hypothetical protein [Nicotiana tabacum]
  misc_feature (9)..(276): NCBI GI NO: 34909270 NR Description: P0454H12.18
  misc_feature (14)..(277): NCBI GI NO: 15236738 NR Description: KH domain protein; protein id: At4g26480.1
  misc_feature (14)..(277): NCBI GI NO: 20268733 NR Description: unknown protein [Arabidopsis thaliana]
  misc_feature (14)..(277): NCBI GI NO: 15241136 NR Description: KH domain protein; protein id: At5g56140.1
  misc_feature (57)..(279): NCBI GI NO: 34907446 NR Description: P0434C04.5
MSGLYSQGFSPARNLSPQIRSNPDADSQYLAELLAEHHKLGPFMQVLPVCNKLLSQEIMRVSSIVHNHGFGDFDRHRFRSPSPMSSPNPRANLPGNGFSPWSGLQERLGFPQGTSMDWQGAPPSPSSHVVKKILRLEVPVDSYPNFNFVGRILGPRGNSLKRVEASTGCRVFIRGKGSIKDSGKEDKLRGKPGYEHLSDPLHILIEAEFPASIIDARLRQAQEIIEELLKPVDESQDLYKRQQLRELAMLNSTLREDSPHPGSVSPFSNGGMKRAKTGQ

SEQ ID NO: 34419 - protein, 236 aa, Zea mays subsp. mays
  peptide (1)..(236): Ceres Seq. ID no. 12414695
  misc_feature (92)..(147): Pfam Name: Pfam Description:  KH domain
  misc_feature (1)..(233): NCBI GI NO: 34900448 NR Description: contains EST C27129
  misc_feature (1)..(236): NCBI GI NO: 12322716 NR Description: unknown protein; 28504-31237
  misc_feature (1)..(236): NCBI GI NO: 30680583 NR Description: KH domain protein [Arabidopsis thaliana]
  misc_feature (1)..(235): NCBI GI NO: 15224909 NR Description: KH domain protein; protein id: At2g38610
  misc_feature (1)..(236): NCBI GI NO: 40645104 NR Description: hypothetical protein [Nicotiana tabacum]
  misc_feature (1)..(233): NCBI GI NO: 34909270 NR Description: P0454H12.18
  misc_feature (1)..(234): NCBI GI NO: 15236738 NR Description: KH domain protein; protein id: At4g26480.1
  misc_feature (1)..(234): NCBI GI NO: 20268733 NR Description: unknown protein [Arabidopsis thaliana]
  misc_feature (1)..(234): NCBI GI NO: 15241136 NR Description: KH domain protein; protein id: At5g56140.1
  misc_feature (14)..(236): NCBI GI NO: 34907446 NR Description: P0434C04.5
MQVLPVCNKLLSQEIMRVSSIVHNHGFGDFDRHRFRSPSPMSSPNPRANLPGNGFSPWSGLQERLGFPQGTSMDWQGAPPSPSSHVVKKILRLEVPVDSYPNFNFVGRILGPRGNSLKRVEASTGCRVFIRGKGSIKDSGKEDKLRGKPGYEHLSDPLHILIEAEFPASIIDARLRQAQEIIEELLKPVDESQDLYKRQQLRELAMLNSTLREDSPHPGSVSPFSNGGMKRAKTGQ

SEQ ID NO: 34420 - DNA, 1011 bp, Zea mays subsp. mays
  misc_feature (1)..(1011): Ceres Seq. ID no. 12384230
gagtagcaatcactgctgcgcccgataggtggcagcgagccagcgacccacccgactctgttccaacgagccttccctcccaaacttgcacgctgcccccgctctcgcctccgcccccgatccagatccagggtggaatagggaacggccatacaccatggcggatttctccaaggaatcttgcccttctgtgaagaacattttacttctggattctgaaggaaagcgtgttgctgtaaagtatttctcagatgattggccgactaatgcatcaaagttagcctacgaaaagtctgtttttactaaaactctaaagacaaatgcacggacagaagctgagataacattgtttgatggttatattgtcgtttacaagtttgtacatgaccttcacttttttgtcaccgctggagatgatgagaatgagctcatcttagcaagtgtactacatggtttttctgattctgttggtcttctactcaggggtgatgttgagaagcggactgcgcttgagaacttggatttgatacttctctgcatcgatgaaattgtagatgggggaatcatcctggaaacagatgcaaacaccattgctggtaaggttgcaaccaatgctgttgatggttctgtgcccttttctgagcagacgatatctcaggcactagccacagctagggagcaccttgcaagatctctactgaaatgaacaaccagcaatatgtatgacgtattatatgacatatatgtgtgtaggttgggctactgaatgttgagggtctttgtagacgttattcgtcccaaagtgctgctgtgacagagcctagttgaatatccgagggattggtcacatgctcgttaaattttttttttgaaccagtgagtttgtagctgccatatttcaggtaaaacataaaataaagagttgtaattgggtgtaatataattttcaccatacaaaaaaaaattcatctcaactatcaaaccatggtaaaaggttcaaaattatctatc

SEQ ID NO: 34421 - protein, 182 aa, Zea mays subsp. mays
  peptide (1)..(182): Ceres Seq. ID no. 12384231
  misc_feature (11)..(154): Pfam Name: Pfam Description:  Clathrin adaptor complex small chain
  misc_feature (1)..(182): NCBI GI NO: 7380908 NR Description: nonclathrin coat protein zeta2-COP [Zea mays]
  misc_feature (18)..(182): NCBI GI NO: 7259350 NR Description: nonclathrin coat protein zeta2-COP [Oryza sativa]
  misc_feature (5)..(182): NCBI GI NO: 7363244 NR Description: nonclathrin coat protein zeta2-COP [Glycine max]
  misc_feature (1)..(182): NCBI GI NO: 7259352 NR Description: nonclathrin coat protein zeta1-COP
  misc_feature (8)..(182): NCBI GI NO: 7259354 NR Description: nonclathrin coat protein zeta2-COP
  misc_feature (5)..(182): NCBI GI NO: 7259348 NR Description: nonclathrin coat protein zeta1-COP [Glycine max]
  misc_feature (5)..(181): NCBI GI NO: 30681014 NR Description: coatomer zeta subunit (zeta-coat protein) -related
  misc_feature (5)..(181): NCBI GI NO: 18413126 NR Description: putative coatomer protein; protein id: At4g08520
  misc_feature (5)..(181): NCBI GI NO: 18491175 NR Description: putative coatomer protein [Arabidopsis thaliana]
  misc_feature (7)..(181): NCBI GI NO: 7678766 NR Description: zeta1-COP [Oryza sativa (japonica cultivar-group)]
MADFSKESCPSVKNILLLDSEGKRVAVKYFSDDWPTNASKLAYEKSVFTKTLKTNARTEAEITLFDGYIVVYKFVHDLHFFVTAGDDENELILASVLHGFSDSVGLLLRGDVEKRTALENLDLILLCIDEIVDGGIILETDANTIAGKVATNAVDGSVPFSEQTISQALATAREHLARSLLK

SEQ ID NO: 34422 - DNA, 1462 bp, Zea mays subsp. mays; identical to SEQ ID NO: 32498
  misc_feature (1)..(1462): Ceres Seq. ID no. 13579635

SEQ ID NO: 34423 - protein, 410 aa, Zea mays subsp. mays; identical to SEQ ID NO: 32499
  peptide (1)..(410): Ceres Seq. ID no. 13579636
  misc_feature (30)..(103): Pfam Name: Pfam Description:  Ubiquitin family
  misc_feature (27)..(410): NCBI GI NO: 100934 NR Description: polyubiquitin - maize
  misc_feature (27)..(410): NCBI GI NO: 481477 NR Description: polyubiquitin 6 - rice
  misc_feature (30)..(410): NCBI GI NO: 899608 NR Description: polyubiquitin
  misc_feature (27)..(409): NCBI GI NO: 902584 NR Description: polyubiquitin containing 7 ubiquitin monomers
  misc_feature (27)..(410): NCBI GI NO: 902584 NR Description: polyubiquitin containing 7 ubiquitin monomers
  misc_feature (30)..(410): NCBI GI NO: 4809266 NR Description: polyubiquitin [Sporobolus stapfianus]
  misc_feature (27)..(409): NCBI GI NO: 100524 NR Description: polyubiquitin 6 - common sunflower
  misc_feature (27)..(409): NCBI GI NO: 16660462 NR Description: polyubiquitin OUB2 [Olea europaea]
  misc_feature (27)..(409): NCBI GI NO: 4115337 NR Description: ubiquitin [Pisum sativum]
  misc_feature (27)..(409): NCBI GI NO: 100934 NR Description: polyubiquitin - maize

SEQ ID NO: 34424 - protein, 381 aa, Zea mays subsp. mays; identical to SEQ ID NO: 32500
  peptide (1)..(381): Ceres Seq. ID no. 13579637
  misc_feature (1)..(74): Pfam Name: Pfam Description:  Ubiquitin family
  misc_feature (1)..(381): NCBI GI NO: 100934 NR Description: polyubiquitin - maize
  misc_feature (1)..(381): NCBI GI NO: 481477 NR Description: polyubiquitin 6 - rice
  misc_feature (1)..(381): NCBI GI NO: 899608 NR Description: polyubiquitin
  misc_feature (1)..(380): NCBI GI NO: 902584 NR Description: polyubiquitin containing 7 ubiquitin monomers
  misc_feature (1)..(381): NCBI GI NO: 902584 NR Description: polyubiquitin containing 7 ubiquitin monomers
  misc_feature (1)..(381): NCBI GI NO: 4809266 NR Description: polyubiquitin [Sporobolus stapfianus]
  misc_feature (1)..(380): NCBI GI NO: 100524 NR Description: polyubiquitin 6 - common sunflower
  misc_feature (1)..(380): NCBI GI NO: 418854 NR Description: polyubiquitin 6 - parsley
  misc_feature (1)..(380): NCBI GI NO: 16660462 NR Description: polyubiquitin OUB2 [Olea europaea]
  misc_feature (1)..(380): NCBI GI NO: 4115337 NR Description: ubiquitin [Pisum sativum]

SEQ ID NO: 34425 - protein, 305 aa, Zea mays subsp. mays; identical to SEQ ID NO: 32501
  peptide (1)..(305): Ceres Seq. ID no. 13579638
  misc_feature (1)..(74): Pfam Name: Pfam Description:  Ubiquitin family
  misc_feature (1)..(305): NCBI GI NO: 100934 NR Description: polyubiquitin - maize
  misc_feature (1)..(305): NCBI GI NO: 481477 NR Description: polyubiquitin 6 - rice
  misc_feature (1)..(305): NCBI GI NO: 899608 NR Description: polyubiquitin
  misc_feature (1)..(304): NCBI GI NO: 902584 NR Description: polyubiquitin containing 7 ubiquitin monomers
  misc_feature (1)..(305): NCBI GI NO: 902584 NR Description: polyubiquitin containing 7 ubiquitin monomers
  misc_feature (1)..(305): NCBI GI NO: 4809266 NR Description: polyubiquitin [Sporobolus stapfianus]
  misc_feature (1)..(304): NCBI GI NO: 100524 NR Description: polyubiquitin 6 - common sunflower
  misc_feature (1)..(304): NCBI GI NO: 16660462 NR Description: polyubiquitin OUB2 [Olea europaea]
  misc_feature (1)..(304): NCBI GI NO: 4115337 NR Description: ubiquitin [Pisum sativum]
  misc_feature (1)..(304): NCBI GI NO: 170352 NR Description: hexameric polyubiquitin

SEQ ID NO: 34426 - DNA, 1022 bp, Zea mays subsp. mays
  misc_feature (1)..(1022): Ceres Seq. ID no. 12350942
aaaccaaaccctctaatccatttcggcatttccaacgccttcgccctaccagccacgtcgtttcgaggccgatcgaccgagcagcagcagctggtggcaatggcggcggcggcggaggtcgtgctgctggacttctgggtgagccccttcgggcagcgctgccggatcgcgctggcggagaagggcgtggcctacgagtaccgcgagcaggacctcctgaacaagggcgagctgctcctccgctccaaccccatccacaagaagatccccgtcctgctccacgccggcaggcccgtctgcgagtcgctcgtcatcctccagtacatcgacgaggcctggccggacgtcgcgccgctcctccccaaggacgacccctacgcccgcgcgcaggcgcgtttctgggccgattacatcgacaagaagatctatgacagccagactcggctgtggaagttcgagggcgaggcgcgggagcaggcgaagaaggacctggtggaggtcctggagaccctggagggggagctcgccgacaagcctttcttcggcggcggcgccctcggcttcgtggacgtggctctggtgcccttcacgtcctggttcctcgcctacgagaagctgggcgggttcagcatccaggagcactgccccaggatcgtggcctgggcggcgcgctgcagggagcgggagagcgtggccaaggcgctgtccgaccctgccaaggtgctcgggttcgtccagttcctccagagcaagttcggggccaagtgatcggaaacgctgtgtgtgctgctatgcaggccaggctggtgctttgatctctgctcgatcagctccatgcccatgctagcgttgcatagcgcagttgatgtgtgatgtgtctggttggttgtagctgctctttgcctggttgcgttgcgtcagtgtgttttcagcgtctggggtagctctgcgttgcccttgcccctgccccctgttgcatactcctagctctcgccgagtttgacaatttcgtcagttaatcc

SEQ ID NO: 34427 - protein, 255 aa, Zea mays subsp. mays
  peptide (1)..(255): Ceres Seq. ID no. 12350943
  misc_feature (34)..(255): NCBI GI NO: 4468796 NR Description: GST6 protein [Zea mays]
  misc_feature (42)..(253): NCBI GI NO: 7447304 NR Description: glutathione transferase (EC 2.5.1.18) - maize
  misc_feature (37)..(255): NCBI GI NO: 11177831 NR Description: putative glutathione S-transferase OsGSTU5
  misc_feature (34)..(253): NCBI GI NO: 6683765 NR Description: glutathione-S-transferase [Hordeum vulgare]
  misc_feature (34)..(253): NCBI GI NO: 20067419 NR Description: glutathione transferase [Triticum aestivum]
  misc_feature (34)..(253): NCBI GI NO: 20067417 NR Description: glutathione transferase [Triticum aestivum]
  misc_feature (34)..(253): NCBI GI NO: 20067415 NR Description: glutathione transferase [Triticum aestivum]
  misc_feature (34)..(255): NCBI GI NO: 33357806 NR Description: Chain A, Crystal Structure Solution Of Rice Gst1
  misc_feature (36)..(253): NCBI GI NO: 416652 NR Description: PROBABLE GLUTATHIONE S-TRANSFERASE
  misc_feature (36)..(253): NCBI GI NO: 1346215 NR Description: PROBABLE GLUTATHIONE S-TRANSFERASE PARC
KPNPLIHFGISNAFALPATSFRGRSTEQQQLVAMAAAAEVVLLDFWVSPFGQRCRIALAEKGVAYEYREQDLLNKGELLLRSNPIHKKIPVLLHAGRPVCESLVILQYIDEAWPDVAPLLPKDDPYARAQARFWADYIDKKIYDSQTRLWKFEGEAREQAKKDLVEVLETLEGELADKPFFGGGALGFVDVALVPFTSWFLAYEKLGGFSIQEHCPRIVAWAARCRERESVAKALSDPAKVLGFVQFLQSKFGAK

SEQ ID NO: 34428 - protein, 222 aa, Zea mays subsp. mays
  peptide (1)..(222): Ceres Seq. ID no. 12350944
  misc_feature (1)..(222): NCBI GI NO: 4468796 NR Description: GST6 protein [Zea mays]
  misc_feature (9)..(220): NCBI GI NO: 7447304 NR Description: glutathione transferase (EC 2.5.1.18) - maize
  misc_feature (4)..(222): NCBI GI NO: 11177831 NR Description: putative glutathione S-transferase OsGSTU5
  misc_feature (1)..(220): NCBI GI NO: 6683765 NR Description: glutathione-S-transferase [Hordeum vulgare]
  misc_feature (1)..(220): NCBI GI NO: 20067419 NR Description: glutathione transferase [Triticum aestivum]
  misc_feature (1)..(220): NCBI GI NO: 20067417 NR Description: glutathione transferase [Triticum aestivum]
  misc_feature (1)..(220): NCBI GI NO: 20067415 NR Description: glutathione transferase [Triticum aestivum]
  misc_feature (1)..(222): NCBI GI NO: 33357806 NR Description: Chain A, Crystal Structure Solution Of Rice Gst1
  misc_feature (3)..(220): NCBI GI NO: 416652 NR Description: PROBABLE GLUTATHIONE S-TRANSFERASE
  misc_feature (3)..(220): NCBI GI NO: 1346215 NR Description: PROBABLE GLUTATHIONE S-TRANSFERASE PARC
MAAAAEVVLLDFWVSPFGQRCRIALAEKGVAYEYREQDLLNKGELLLRSNPIHKKIPVLLHAGRPVCESLVILQYIDEAWPDVAPLLPKDDPYARAQARFWADYIDKKIYDSQTRLWKFEGEAREQAKKDLVEVLETLEGELADKPFFGGGALGFVDVALVPFTSWFLAYEKLGGFSIQEHCPRIVAWAARCRERESVAKALSDPAKVLGFVQFLQSKFGAK

SEQ ID NO: 34429 - protein, 142 aa, Zea mays subsp. mays
  peptide (1)..(142): Ceres Seq. ID no. 12350945
TKPSNPFRHFQRLRPTSHVVSRPIDRAAAAGGNGGGGGGRAAGLLGEPLRAALPDRAGGEGRGLRVPRAGPPEQGRAAPPLQPHPQEDPRPAPRRQARLRVARHPPVHRRGLAGRRAAPPQGRPLRPRAGAFLGRLHRQEDL

SEQ ID NO: 34430 - DNA, 1913 bp, Zea mays subsp. mays
  misc_feature (1)..(1913): Ceres Seq. ID no. 12355817
actctcgctttcttctgtctcgcctcgccctcgcctttgttgatcttttcctttctcgcgttcccctcgccttcctcttcctcccccacacccaccggtcgccgcccccgtcgccccggcctcctcggtccagagacgagggggtccgcgccgttccgacgccacaccgcaaccgcatcacatcaccgcctgctcccaccgtccatccgccctccctcgatcgcgctccccggatcgctggtacctccgcgcgcggctccgacctcatcttcctccatcgactggcatcggcagcggcggcgtgttcccggccaaccttcgaaagggtaatcaatcgccagacttttgggagctgtgttgggggggaccggggggaagagccaagttactgcagaggctaacatttcggttgtcgagtgatggcgcaaggcatcaacttccctgacttcatcggcgccgtgggtggccatgatggtggcgtggactttggtgggaacttctgtgacatggccttctaccagaagctaggggagggcaccaacatgtcggtcgacagcctcaacagcatgcagaccagcatgcatggggggtccatcgccatgtctgtggacaacaacagtagcgttggctctaacagtgactcccgcactggcatgcttggtcatcctggtctcaaggggcctgccattgtgggaagctactcagttgggcacagcatcttccgccctggccgggtgtcccatgccttgagtgaggatgcgctggcacatgctctgatggacaataagttcccaactgagacactcaaggattatgaggagtggactattgatctggggaagctccacttgggaatgccctttgcacaaggtgcctttgggaagctctacaggggaacatacaatgggatggatgttgctattaagcttttggagcgacctgaggctgaccctgagaaagctcaactgttagagcagcagtttgtccaagaagttatgatgcttgcaacactgagtcacccgaatattgtcaagttcattggtgcgtgcaggaagccattggtttggtgtattgtgacggagtatgcgaagggtggatctctcaagaatttcttgagcaagaggcagaacaggtctgtcccgctgaagttggcagtcaagcaggcattagatgttgcacgtggcatggcctatgtccatggccttgggttcattcatagagatcttaagtcggacaacctcctgatttctggtgataagtccattaagattgctgactttggagtggctaggattgaagtcaagactgaggggatgacacctgaaactggaacataccgctggatggctcctgaaatgatccagcataggccatacaaccagaaagttgatgtctacagttttgccattgtcctgtgggagttagtgactgggaatgtcccctttgcaaacatgagcgcagtgcaagctgcatttgctgtggttaacaagggcgtgcgaccagccataccccacgactgcctccctgcccttgcggagatcatgaccatgtgctgggacacaaaccctgaagtccgtcccccattcgctgagattgtgaggatgctggagcaggtggaggtggaggttctgaccactgtccgtaaggctcgcttccgctgttgcatcgcccaaccgatgacgctggactgacggactgagtcgtccgcaatccaggaaaagaacctggagaggggtttaatcctatgtgtttataatcccaatagacttgtgcttcagaaacagaaggctgactcctcagtctgccttctgtctttgacatgttatcgtagagtacacctagctgtcgtcaccagtggttgtaatagaggtagctttatgcttgactaaatacccttccgttataacaagtgc

SEQ ID NO: 34431 - protein, 423 aa, Zea mays subsp. mays
  peptide (1)..(423): Ceres Seq. ID no. 12355818
  misc_feature (142)..(396): Pfam Name: Pfam Description:  Protein kinase domain
  misc_feature (1)..(423): NCBI GI NO: 27085278 NR Description: serine/threonine protein kinase
  misc_feature (1)..(423): NCBI GI NO: 14571547 NR Description: serine/threonine protein kinase
  misc_feature (1)..(423): NCBI GI NO: 27085280 NR Description: serine/threonine protein kinase
  misc_feature (1)..(423): NCBI GI NO: 18400528 NR Description: putative protein kinase; protein id: At2g24360
  misc_feature (7)..(423): NCBI GI NO: 27085282 NR Description: serine/threonine protein kinase
  misc_feature (8)..(423): NCBI GI NO: 15235845 NR Description: protein kinase - like protein
  misc_feature (1)..(423): NCBI GI NO: 25287646 NR Description: probable protein kinase
  misc_feature (1)..(423): NCBI GI NO: 28864539 NR Description: serine/threonine protein kinase
  misc_feature (4)..(423): NCBI GI NO: 13124865 NR Description: serine/threonine/tyrosine kinase
  misc_feature (61)..(423): NCBI GI NO: 29367355 NR Description: serine/thronine protein kinase-like protein
MAQGINFPDFIGAVGGHDGGVDFGGNFCDMAFYQKLGEGTNMSVDSLNSMQTSMHGGSIAMSVDNNSSVGSNSDSRTGMLGHPGLKGPAIVGSYSVGHSIFRPGRVSHALSEDALAHALMDNKFPTETLKDYEEWTIDLGKLHLGMPFAQGAFGKLYRGTYNGMDVAIKLLERPEADPEKAQLLEQQFVQEVMMLATLSHPNIVKFIGACRKPLVWCIVTEYAKGGSLKNFLSKRQNRSVPLKLAVKQALDVARGMAYVHGLGFIHRDLKSDNLLISGDKSIKIADFGVARIEVKTEGMTPETGTYRWMAPEMIQHRPYNQKVDVYSFAIVLWELVTGNVPFANMSAVQAAFAVVNKGVRPAIPHDCLPALAEIMTMCWDTNPEVRPPFAEIVRMLEQVEVEVLTTVRKARFRCCIAQPMTLD

SEQ ID NO: 34432 - protein, 394 aa, Zea mays subsp. mays
  peptide (1)..(394): Ceres Seq. ID no. 12355819
  misc_feature (113)..(367): Pfam Name: Pfam Description:  Protein kinase domain
  misc_feature (1)..(394): NCBI GI NO: 27085278 NR Description: serine/threonine protein kinase
  misc_feature (1)..(394): NCBI GI NO: 14571547 NR Description: serine/threonine protein kinase
  misc_feature (1)..(394): NCBI GI NO: 27085280 NR Description: serine/threonine protein kinase
  misc_feature (1)..(394): NCBI GI NO: 18400528 NR Description: putative protein kinase; protein id: At2g24360
  misc_feature (1)..(394): NCBI GI NO: 27085282 NR Description: serine/threonine protein kinase
  misc_feature (1)..(394): NCBI GI NO: 15235845 NR Description: protein kinase - like protein
  misc_feature (1)..(394): NCBI GI NO: 25287646 NR Description: probable protein kinase
  misc_feature (1)..(394): NCBI GI NO: 28864539 NR Description: serine/threonine protein kinase
  misc_feature (1)..(394): NCBI GI NO: 13124865 NR Description: serine/threonine/tyrosine kinase
  misc_feature (32)..(394): NCBI GI NO: 29367355 NR Description: serine/thronine protein kinase-like protein
MAFYQKLGEGTNMSVDSLNSMQTSMHGGSIAMSVDNNSSVGSNSDSRTGMLGHPGLKGPAIVGSYSVGHSIFRPGRVSHALSEDALAHALMDNKFPTETLKDYEEWTIDLGKLHLGMPFAQGAFGKLYRGTYNGMDVAIKLLERPEADPEKAQLLEQQFVQEVMMLATLSHPNIVKFIGACRKPLVWCIVTEYAKGGSLKNFLSKRQNRSVPLKLAVKQALDVARGMAYVHGLGFIHRDLKSDNLLISGDKSIKIADFGVARIEVKTEGMTPETGTYRWMAPEMIQHRPYNQKVDVYSFAIVLWELVTGNVPFANMSAVQAAFAVVNKGVRPAIPHDCLPALAEIMTMCWDTNPEVRPPFAEIVRMLEQVEVEVLTTVRKARFRCCIAQPMTLD

SEQ ID NO: 34433 - protein, 382 aa, Zea mays subsp. mays
  peptide (1)..(382): Ceres Seq. ID no. 12355820
  misc_feature (101)..(355): Pfam Name: Pfam Description:  Protein kinase domain
  misc_feature (1)..(382): NCBI GI NO: 27085278 NR Description: serine/threonine protein kinase
  misc_feature (1)..(382): NCBI GI NO: 14571547 NR Description: serine/threonine protein kinase
  misc_feature (1)..(382): NCBI GI NO: 27085280 NR Description: serine/threonine protein kinase
  misc_feature (1)..(382): NCBI GI NO: 18400528 NR Description: putative protein kinase; protein id: At2g24360
  misc_feature (1)..(382): NCBI GI NO: 27085282 NR Description: serine/threonine protein kinase
  misc_feature (1)..(382): NCBI GI NO: 15235845 NR Description: protein kinase - like protein
  misc_feature (1)..(382): NCBI GI NO: 25287646 NR Description: probable protein kinase
  misc_feature (1)..(382): NCBI GI NO: 28864539 NR Description: serine/threonine protein kinase
  misc_feature (1)..(382): NCBI GI NO: 13124865 NR Description: serine/threonine/tyrosine kinase
  misc_feature (20)..(382): NCBI GI NO: 29367355 NR Description: serine/thronine protein kinase-like protein
MSVDSLNSMQTSMHGGSIAMSVDNNSSVGSNSDSRTGMLGHPGLKGPAIVGSYSVGHSIFRPGRVSHALSEDALAHALMDNKFPTETLKDYEEWTIDLGKLHLGMPFAQGAFGKLYRGTYNGMDVAIKLLERPEADPEKAQLLEQQFVQEVMMLATLSHPNIVKFIGACRKPLVWCIVTEYAKGGSLKNFLSKRQNRSVPLKLAVKQALDVARGMAYVHGLGFIHRDLKSDNLLISGDKSIKIADFGVARIEVKTEGMTPETGTYRWMAPEMIQHRPYNQKVDVYSFAIVLWELVTGNVPFANMSAVQAAFAVVNKGVRPAIPHDCLPALAEIMTMCWDTNPEVRPPFAEIVRMLEQVEVEVLTTVRKARFRCCIAQPMTLD

SEQ ID NO: 34434 - DNA, 1106 bp, Zea mays subsp. mays
  misc_feature (1)..(1106): Ceres Seq. ID no. 12344615
gccgcctctgttccttcgctagtcgacaggccccgcttccgctctcctcttccaccggccaccgccgcgcgccgagaagatggggaagcggtggatcccactggaggccaacccggatgtcatgaaccagttcatatggggtctgggagtctccgagagggctgtgcagttctgcgacgtctacggcctggacgacgagctgatcgccttggtgccccatcccgttctcgcagtcctcttcctctacccgttcacctccctggacgaggagaataaagaagaatcaagtgtttctgccacatcgaccgcagggggcaaggatttgagcaagaaggtatactttacaaagcagactattggcaatgcttgtggaacaattggtgttattcatgcaataggaaatgcaacatctcaaatcaagctagttgagggttcctattttggaaagttatataagcaaacagctgatatggatccagtccagcgtgctgcctttcttgagcaagatgatgagatggaggatgcacattctattgctgcatctgctggtgacactaatattaatcttgatgttaatgtacactttgtatgtttctcctgtgttgatggtgaactttacgagcttgatggactaaaatcacaacccacaccccatggcccatcatcacctgaaaccttgttgcaggatgctgcagaagtcatcaaagctagaattgcggagaaccctaactcgatgaacttcaatgtcatggccctttcaaagaagtgaagtatactgtgatgggtggatttcatttggcagaatacgggtccctttttttcagttctgctgagtactgcactgagtggaaggtttgcacagggaaacaaagatagggaaaaaatgttgactcgatgattctcgtgccttcttgatggatagagagatggtggttcacgatttcacctttttcctgcgtacttaggctatttacaagggtagttttatgatggtttcatacacatttaatagtatgtcacatcaccattttatatgatatgtcatagtatttaagataaataagtttcataggatgaaataggaatgaaatcgtgtcacctttttc

SEQ ID NO: 34435 - protein, 229 aa, Zea mays subsp. mays
  peptide (1)..(229): Ceres Seq. ID no. 12344616
  misc_feature (1)..(228): NCBI GI NO: 14140139 NR Description: putative protein [Oryza sativa]
  misc_feature (1)..(229): NCBI GI NO: 38346164 NR Description: OSJNBa0079A21.11
  misc_feature (3)..(229): NCBI GI NO: 15236549 NR Description: carboxyl-terminal proteinase like protein
  misc_feature (1)..(229): NCBI GI NO: 32488373 NR Description: OSJNBa0043A12.3
  misc_feature (2)..(227): NCBI GI NO: 5174741 NR Description: ubiquitin carboxyl-terminal esterase L3
  misc_feature (2)..(227): NCBI GI NO: 17380334 NR Description: Ubiquitin carboxyl-terminal hydrolase isozyme L3
  misc_feature (3)..(161): NCBI GI NO: 7488069 NR Description: probable carboxyl-terminal proteinase - Arabidopsisthaliana
  misc_feature (2)..(227): NCBI GI NO: 7710106 NR Description: ubiquitin carboxyl-terminal esterase L3
  misc_feature (2)..(227): NCBI GI NO: 27705170 NR Description: similar to ubiqutin carboxyl-terminal hydrolase l3
  misc_feature (2)..(227): NCBI GI NO: 15809026 NR Description: ubiquitin carboxyl-terminal esterase L4
MGKRWIPLEANPDVMNQFIWGLGVSERAVQFCDVYGLDDELIALVPHPVLAVLFLYPFTSLDEENKEESSVSATSTAGGKDLSKKVYFTKQTIGNACGTIGVIHAIGNATSQIKLVEGSYFGKLYKQTADMDPVQRAAFLEQDDEMEDAHSIAASAGDTNINLDVNVHFVCFSCVDGELYELDGLKSQPTPHGPSSPETLLQDAAEVIKARIAENPNSMNFNVMALSKK

SEQ ID NO: 34436 - protein, 215 aa, Zea mays subsp. mays
  peptide (1)..(215): Ceres Seq. ID no. 12344617
  misc_feature (1)..(214): NCBI GI NO: 14140139 NR Description: putative protein [Oryza sativa]
  misc_feature (1)..(215): NCBI GI NO: 38346164 NR Description: OSJNBa0079A21.11
  misc_feature (1)..(215): NCBI GI NO: 15236549 NR Description: carboxyl-terminal proteinase like protein
  misc_feature (1)..(215): NCBI GI NO: 32488373 NR Description: OSJNBa0043A12.3
  misc_feature (1)..(213): NCBI GI NO: 5174741 NR Description: ubiquitin carboxyl-terminal esterase L3
  misc_feature (1)..(213): NCBI GI NO: 17380334 NR Description: Ubiquitin carboxyl-terminal hydrolase isozyme L3
  misc_feature (1)..(147): NCBI GI NO: 7488069 NR Description: probable carboxyl-terminal proteinase - Arabidopsisthaliana
  misc_feature (1)..(213): NCBI GI NO: 7710106 NR Description: ubiquitin carboxyl-terminal esterase L3
  misc_feature (1)..(213): NCBI GI NO: 27705170 NR Description: similar to ubiqutin carboxyl-terminal hydrolase l3
  misc_feature (1)..(213): NCBI GI NO: 15809026 NR Description: ubiquitin carboxyl-terminal esterase L4
MNQFIWGLGVSERAVQFCDVYGLDDELIALVPHPVLAVLFLYPFTSLDEENKEESSVSATSTAGGKDLSKKVYFTKQTIGNACGTIGVIHAIGNATSQIKLVEGSYFGKLYKQTADMDPVQRAAFLEQDDEMEDAHSIAASAGDTNINLDVNVHFVCFSCVDGELYELDGLKSQPTPHGPSSPETLLQDAAEVIKARIAENPNSMNFNVMALSKK

SEQ ID NO: 34437 - DNA, 861 bp, Zea mays subsp. mays
  misc_feature (1)..(861): Ceres Seq. ID no. 12414781
gcacgagaccattacctagaacatcctaatcgaaaaagctctgacttgtgtgttgtggctccttgcttgacactctactcttccagggattgaggccaggggcttcatatttggcccggcagtcgcattggctattggcgccaagttcatacctttgcgcaagcctaggaagctccccggcgaggtgatctccgagaaatacgttctcgagtacgggaccgattgcttagagatgcatgtcggagccatcgaacggcctggtgagcgcgtgctgatcaccgacgacttggtcgcgaccggagggacgctctgtgctgcaatcaggcttcttgaacgtgctgaagctgatgtggtcgagtgcgcatgcctcattggcctcccaaaattcaaggatttctacaagttgaatggaaagcccgtctacgtgctggttgagtcccgtgaatcagataaataagaacttatgggtcagaggaaagctgacggttcattccttgctgctgtgcttgagcagtggagggacatcgacaagccaaccatggggggtgcgtcagcgttactaaggctagctgctaagatcgacttggtgagaggagagattagaagtgatggggggggcgttagtcttgtaggctgagtagattttcagagtactgaagagcttgtagttctgccaggaacatgcttattagttgaagcaagagtgttgatggtccattgcttgttggattttgtggttttgatttgaagggcgcaaacatggctggatcagcttgacggaagaacttggacatcaataccttagcatcaaatactagggaagtaggaacctgctacttgtagcgtgttattcctatctcc

SEQ ID NO: 34438 - protein, 74 aa, Zea mays subsp. mays
  peptide (1)..(74): Ceres Seq. ID no. 12414782
  misc_feature (1)..(71): NCBI GI NO: 29826070 NR Description: adenine phosphoribosyltransferase form 2
  misc_feature (1)..(71): NCBI GI NO: 40019121 NR Description: adenine phosphoribosyltransferase [Zea mays]
  misc_feature (1)..(69): NCBI GI NO: 33354190 NR Description: putative adenine phosphoribosyl transferase
  misc_feature (1)..(68): NCBI GI NO: 3776082 NR Description: MtN30 [Medicago truncatula]
  misc_feature (1)..(74): NCBI GI NO: 1402894 NR Description: adenine phosphoribosyltransferase
  misc_feature (1)..(74): NCBI GI NO: 15220047 NR Description: adenine phosphoribosyltransferase
  misc_feature (1)..(74): NCBI GI NO: 15238973 NR Description: adenine phosphoribosyltransferase - like protein
  misc_feature (1)..(72): NCBI GI NO: 2499932 NR Description: Adenine phosphoribosyltransferase 1 (APRT)
  misc_feature (1)..(72): NCBI GI NO: 9711921 NR Description: Adenine phosphoribosyltransferase
  misc_feature (1)..(70): NCBI GI NO: 15235709 NR Description: adenine phosphoribosyltransferase (EC 2
MHVGAIERPGERVLITDDLVATGGTLCAAIRLLERAEADVVECACLIGLPKFKDFYKLNGKPVYVLVESRESDK

SEQ ID NO: 34439 - protein, 57 aa, Zea mays subsp. mays
  peptide (1)..(57): Ceres Seq. ID no. 12414783
MGQRKADGSFLAAVLEQWRDIDKPTMGGASALLRLAAKIDLVRGEIRSDGGGVSLVG

SEQ ID NO: 34440 - protein, 51 aa, Zea mays subsp. mays
  peptide (1)..(51): Ceres Seq. ID no. 12414784
MESPSTCWLSPVNQINKNLWVRGKLTVHSLLLCLSSGGTSTSQPWGVRQRY

SEQ ID NO: 34441 - DNA, 2463 bp, Zea mays subsp. mays
  misc_feature (1)..(2463): Ceres Seq. ID no. 12369025
ctggtcttctgcgagaagcacacgaagcaaccggggcacctccgcctgcgcctcccctctcagctactctgtttgtacgcggccgcatccatttcgtctgcccaggaatggaggaagaatatctgcagtgagggactgaggggatcccaggttccagacaaaactcaccgaggaaaaccattctccgacatggtgaggatgagaaggaggttggtgctgctgctgctcctcctcggcctcacggtgctttccccgctcgcgctctacactagccgcctctccgtggcgcttaactctataccgcgggttttccctggagaaatcacgaatcagggccgtggcgtcgaggcagataagctgaatgcgcttcctctggaaacagtgagctccttgaaagaacctgtcgacattgtcttctcagaggagctgactgaatctaagagccaagaattgcgattgccaaaggtaggtgcgcacaagagccgtgtgctctctgaagtcacggttgctgatgatggtacatcatcgaaagataatgaagtgattgagcaagtaattacgctggaagcacaggatggtggcttggtgaagggagcaggtgtttcagatgagcaggagaaaaacattggatctctgcagcaatcttcttctgaggaaagttcacaggacactatgcctaaacagacacctgcaaaggttgttgcggagaactcccaatcagctagaacagacggtaaaactaaaaccgctgttctacctgatatgcggatccgaaatatcaaggatcagttaatcaaggcgaaggtataccttggtcttggatccattagagcgagttctcaatatcttaaagacctacggcagaggatacgggaagttcaaaaggtgcttggtgatgcatccaaggactctgatctaccaaagaatgcacatgaaaaggttaaagcactggagcagatgctgattaagggaaaacagatgcaggatgattgttctattattgtaaaaaagcttcgagctatgcttcattcagcagaggagcagctgcatgcacacaaaaaacagactgtttttctgacacaacttgcagctaaaacccttcctaaaggtcttcactgcctccccctgagactagctaacgaatacttttcattggatcctgttcggcagcagttcccaaaccaacaaaatctcattaacccaaaactgtatcattatgcgttgttctcggataacatactagcaacagcggttgttgttaactcaacagtgttaaatgctaagcatccttctgatcatgttatccacatagtaactgacaaactgaattatgctccaatgagaatgtggttcctctctaatcctccggggaaagcaacaattgaagtacagaatattgaggagtttacatggctaaatgacagctacagtccagtactcaaacatcttgggtcccaatccatgattgattactactttggaacgaatcgtgcaaactcagattcaaacctaaaatatcgaaacccaaagtacctgtcaatccttaatcatctccgcttttacctacctgagatttatccaaagcttgacaagatggtctttcttgatgatgacatcgtagtaaagaaggatctggctggcctttggtcaatcaacatgaaggggaaggtaaacggtgctgttgagacttgtggagagagtttccatcgctatgatcgatacctgaatttttcaaatcctgttatcaccaagagttttgacccacatgcttgtgtttgggcttttggaatgaatgtgtttgacctggctgaatggaggcggcagaacataactgaaatttatcactcgtggcagaagcttaatgaagatagatcactctggaaacttggtactctccctccgggtttggtcacattctggaacaagacatttcccctcagccggtcatggcatgttcttggtctaggttacaatccccatgttaacagcagagacattgagcatgctgcagtcatacattacaatggcaacatgaagccctggttggagattggtctacccaagttccggagctactggtccaagtatctggattatgaccaatctttccttcgggaatgcaacatcaatccatgaaggaacctggtgcttttagtcccttctgacataaccaatagcctgttttctgtcgatgtgcactttagtgtagtcagcatagtactctcttgctttagatatcagttgttaacaagatttcttattgcctgtgcttcttgtcagaccctttgcataattgcaggaatatctgttatgtttttagagtacatgctttagagcagggcaaactttagatagtgcaatgctcttatgcgatatcgcctttatgtactgaacgtttgctgcaatcatgtaatttggaagcaaactttcccaacaatttaataggtattcaattgggtatcg

SEQ ID NO: 34442 - protein, 711 aa, Zea mays subsp. mays
  peptide (1)..(711): Ceres Seq. ID no. 12369026
  misc_feature (64)..(711): NCBI GI NO: 38423965 NR Description: putative glycosyltransferase
  misc_feature (175)..(711): NCBI GI NO: 10177914 NR Description: emb|CAB71043
  misc_feature (175)..(711): NCBI GI NO: 18422837 NR Description: putative protein; protein id: At5g47780
  misc_feature (254)..(710): NCBI GI NO: 15233046 NR Description: putative protein; protein id: At3g61130
  misc_feature (254)..(710): NCBI GI NO: 7271113 NR Description: 68 kDa protein [Cicer arietinum]
  misc_feature (145)..(710): NCBI GI NO: 7485958 NR Description: hypothetical protein F22I13
  misc_feature (145)..(710): NCBI GI NO: 30691875 NR Description: glycosyltransferase family 8
  misc_feature (254)..(648): NCBI GI NO: 14517362 NR Description: AT3g61130/T20K12_30 [Arabidopsis thaliana]
  misc_feature (254)..(707): NCBI GI NO: 37533460 NR Description: hypothetical protein
  misc_feature (254)..(568): NCBI GI NO: 15227235 NR Description: hypothetical protein; protein id: At2g46480.1
LVFCEKHTKQPGHLRLRLPSQLLCLYAAASISSAQEWRKNICSEGLRGSQVPDKTHRGKPFSDMVRMRRRLVLLLLLLGLTVLSPLALYTSRLSVALNSIPRVFPGEITNQGRGVEADKLNALPLETVSSLKEPVDIVFSEELTESKSQELRLPKVGAHKSRVLSEVTVADDGTSSKDNEVIEQVITLEAQDGGLVKGAGVSDEQEKNIGSLQQSSSEESSQDTMPKQTPAKVVAENSQSARTDGKTKTAVLPDMRIRNIKDQLIKAKVYLGLGSIRASSQYLKDLRQRIREVQKVLGDASKDSDLPKNAHEKVKALEQMLIKGKQMQDDCSIIVKKLRAMLHSAEEQLHAHKKQTVFLTQLAAKTLPKGLHCLPLRLANEYFSLDPVRQQFPNQQNLINPKLYHYALFSDNILATAVVVNSTVLNAKHPSDHVIHIVTDKLNYAPMRMWFLSNPPGKATIEVQNIEEFTWLNDSYSPVLKHLGSQSMIDYYFGTNRANSDSNLKYRNPKYLSILNHLRFYLPEIYPKLDKMVFLDDDIVVKKDLAGLWSINMKGKVNGAVETCGESFHRYDRYLNFSNPVITKSFDPHACVWAFGMNVFDLAEWRRQNITEIYHSWQKLNEDRSLWKLGTLPPGLVTFWNKTFPLSRSWHVLGLGYNPHVNSRDIEHAAVIHYNGNMKPWLEIGLPKFRSYWSKYLDYDQSFLRECNINP

SEQ ID NO: 34443 - protein, 648 aa, Zea mays subsp. mays
  peptide (1)..(648): Ceres Seq. ID no. 12369027
  misc_feature (1)..(648): NCBI GI NO: 38423965 NR Description: putative glycosyltransferase
  misc_feature (112)..(648): NCBI GI NO: 10177914 NR Description: emb|CAB71043
  misc_feature (112)..(648): NCBI GI NO: 18422837 NR Description: putative protein; protein id: At5g47780
  misc_feature (191)..(647): NCBI GI NO: 15233046 NR Description: putative protein; protein id: At3g61130
  misc_feature (191)..(647): NCBI GI NO: 7271113 NR Description: 68 kDa protein [Cicer arietinum]
  misc_feature (82)..(647): NCBI GI NO: 7485958 NR Description: hypothetical protein F22I13
  misc_feature (82)..(647): NCBI GI NO: 30691875 NR Description: glycosyltransferase family 8
  misc_feature (191)..(585): NCBI GI NO: 14517362 NR Description: AT3g61130/T20K12_30 [Arabidopsis thaliana]
  misc_feature (191)..(644): NCBI GI NO: 37533460 NR Description: hypothetical protein
  misc_feature (191)..(505): NCBI GI NO: 15227235 NR Description: hypothetical protein; protein id: At2g46480.1
MVRMRRRLVLLLLLLGLTVLSPLALYTSRLSVALNSIPRVFPGEITNQGRGVEADKLNALPLETVSSLKEPVDIVFSEELTESKSQELRLPKVGAHKSRVLSEVTVADDGTSSKDNEVIEQVITLEAQDGGLVKGAGVSDEQEKNIGSLQQSSSEESSQDTMPKQTPAKVVAENSQSARTDGKTKTAVLPDMRIRNIKDQLIKAKVYLGLGSIRASSQYLKDLRQRIREVQKVLGDASKDSDLPKNAHEKVKALEQMLIKGKQMQDDCSIIVKKLRAMLHSAEEQLHAHKKQTVFLTQLAAKTLPKGLHCLPLRLANEYFSLDPVRQQFPNQQNLINPKLYHYALFSDNILATAVVVNSTVLNAKHPSDHVIHIVTDKLNYAPMRMWFLSNPPGKATIEVQNIEEFTWLNDSYSPVLKHLGSQSMIDYYFGTNRANSDSNLKYRNPKYLSILNHLRFYLPEIYPKLDKMVFLDDDIVVKKDLAGLWSINMKGKVNGAVETCGESFHRYDRYLNFSNPVITKSFDPHACVWAFGMNVFDLAEWRRQNITEIYHSWQKLNEDRSLWKLGTLPPGLVTFWNKTFPLSRSWHVLGLGYNPHVNSRDIEHAAVIHYNGNMKPWLEIGLPKFRSYWSKYLDYDQSFLRECNINP

SEQ ID NO: 34444 - protein, 645 aa, Zea mays subsp. mays
  peptide (1)..(645): Ceres Seq. ID no. 12369028
  misc_feature (1)..(645): NCBI GI NO: 38423965 NR Description: putative glycosyltransferase
  misc_feature (109)..(645): NCBI GI NO: 10177914 NR Description: emb|CAB71043
  misc_feature (109)..(645): NCBI GI NO: 18422837 NR Description: putative protein; protein id: At5g47780
  misc_feature (188)..(644): NCBI GI NO: 15233046 NR Description: putative protein; protein id: At3g61130
  misc_feature (188)..(644): NCBI GI NO: 7271113 NR Description: 68 kDa protein [Cicer arietinum]
  misc_feature (79)..(644): NCBI GI NO: 7485958 NR Description: hypothetical protein F22I13
  misc_feature (79)..(644): NCBI GI NO: 30691875 NR Description: glycosyltransferase family 8
  misc_feature (188)..(582): NCBI GI NO: 14517362 NR Description: AT3g61130/T20K12_30 [Arabidopsis thaliana]
  misc_feature (188)..(641): NCBI GI NO: 37533460 NR Description: hypothetical protein
  misc_feature (188)..(502): NCBI GI NO: 15227235 NR Description: hypothetical protein; protein id: At2g46480.1
MRRRLVLLLLLLGLTVLSPLALYTSRLSVALNSIPRVFPGEITNQGRGVEADKLNALPLETVSSLKEPVDIVFSEELTESKSQELRLPKVGAHKSRVLSEVTVADDGTSSKDNEVIEQVITLEAQDGGLVKGAGVSDEQEKNIGSLQQSSSEESSQDTMPKQTPAKVVAENSQSARTDGKTKTAVLPDMRIRNIKDQLIKAKVYLGLGSIRASSQYLKDLRQRIREVQKVLGDASKDSDLPKNAHEKVKALEQMLIKGKQMQDDCSIIVKKLRAMLHSAEEQLHAHKKQTVFLTQLAAKTLPKGLHCLPLRLANEYFSLDPVRQQFPNQQNLINPKLYHYALFSDNILATAVVVNSTVLNAKHPSDHVIHIVTDKLNYAPMRMWFLSNPPGKATIEVQNIEEFTWLNDSYSPVLKHLGSQSMIDYYFGTNRANSDSNLKYRNPKYLSILNHLRFYLPEIYPKLDKMVFLDDDIVVKKDLAGLWSINMKGKVNGAVETCGESFHRYDRYLNFSNPVITKSFDPHACVWAFGMNVFDLAEWRRQNITEIYHSWQKLNEDRSLWKLGTLPPGLVTFWNKTFPLSRSWHVLGLGYNPHVNSRDIEHAAVIHYNGNMKPWLEIGLPKFRSYWSKYLDYDQSFLRECNINP

SEQ ID NO: 34445 - DNA, 2188 bp, Zea mays subsp. mays
  misc_feature (1)..(2188): Ceres Seq. ID no. 12376651
gcacgagaccattacctagaacatcctaatcgaaaaacaacaaactcagtttccaaattagcaaattagcaagcaactgagtgcaacagaaacatgaaggtaacatgtttttttttctgcttcttttttttctgccgggaagagtttgtctctcttcgatggaccacggcatctagctcttttgtgtgtgtgtgcctctagccctccagctgatgaaacatcttcttgggcttttttttgatattattcgggtcccagcaaaggattgtgatcaaggtgcagatgacctgcgacaagtgccgtaaaaacgctctggctctagcttgctcgacatatggtaagcactgcgttactgatcgcagtgacccgtgtctgaacgcccagcctctcgcgtggtcgaggagcggcacagcagctgatcgtgtctgtgactgtgacgtcttggttgcaggagtgcaatccgtggggatcgagggtgaggagcgggaccagctcgtggtgatcggcgacggcgtcgacgccacctgcctggcgagcggcctgcggaagaaggtgaaggtgggcagggcggacatcgtgaaggtggaagcggtgggcgacgagaaggaggcgacgacgaaggacgacgcggccgccagtagtagtagtagtagtcctaatcccgtggcccaccgcttacaccttccctcggtcccttccatctcctagccgccgccgccgccgcccaaaaccctacctaccctcttctccccctcactctcctttcatctccattctaatggcggcccaacccgtccggcgaagctgctagtgcttgtatctactatcttcatcaggtacttcgcgatcctactgaagtattccccgccgccgctgccatggccaccctcaaccctttcgaactcctcggcgccgacgacaacgacgacccgtcgctgttgattgcggcggcggcggctgctgctcagaaagccgaggcgaagaagtccgccgtggcgcctgctgggaaggctgcccagcctgcggcgaccaccaagttcccgaccaagcccgctcctccctcgcagacggttcgggatgcacgcggcggtggctcatcagctcgtggaggctttggccgtggtgaacgtggccgtggcagaggtggacggggatatggtcagaaccgtggcttcagtggtgacaatggcaatgagttccagggaggttatggtggcggaggctatggggatggtgctgtaactggtggatctgaaggagaaagggagagagacactcgtcccccgtaccgtggcggaggcagacgtggtggttacaggaatgttgagtttggtgatgactctgcagaggccaccacggagaaactatgagcgccacagcgggactggccatggctatgagatgaagcgtgatggcgcagggcgtgggaactggggcactgccactgatgagcttattgcccaggatgcagaggactctccgaagatggaggaggctgctcctgttgctgagaaacaaggtgagcagatcgatgccccagcagcagatgagaacaaagataacaaggatgctactgcaaatgaggaggaagaaaaggaagaggacaaggagatgactctggaggaatttgagaaaataagagaggagaagaggaaagcactacttgcgttgaaggctgaggagaggaaagttgaagttgacaaggatctgcgttctctgcagccactttcaaacaagaaagaaaatgatgaagttttcattaagctgggttctgacaaggataagaagaaggaaaatgctgagcgtgatgagcgtgccaagaagtcggtgagcatcaacgagttcctgaaacctgctgaaggagaaaggtactacggcggccgtggccgtggaaggggccgtggggatcgtggtggttttagaggcggatacggagggggatacagtcgtggcccagctgctgctgctccatccattgaagatcaagctcagttcccaagccttggtgggaagtgaagggcgcccagctgctgctgtcaccgagcgttgtgttgtctgctgttgtcatatttaaattttgtccgacgttacatttctgtgccacggtttaaacggaacaaataatggtgttgcatgtggctatctttggttatgtggtacttgacgttgaataccggagttgtttatc

SEQ ID NO: 34446 - protein, 231 aa, Zea mays subsp. mays
  peptide (1)..(231): Ceres Seq. ID no. 12376652
  misc_feature (9)..(173): Pfam Name: Pfam Description:  Hyaluronan / mRNA binding family
  misc_feature (9)..(231): NCBI GI NO: 34910712 NR Description: putative nuclear RNA binding protein A
  misc_feature (26)..(231): NCBI GI NO: 34912396 NR Description: putative putative nuclear RNA binding protein A
  misc_feature (12)..(231): NCBI GI NO: 39725276 NR Description: salt tolerance protein 1 [Beta vulgaris]
  misc_feature (12)..(231): NCBI GI NO: 7488863 NR Description: probable transcription factor - fava bean
  misc_feature (12)..(231): NCBI GI NO: 6492266 NR Description: nuclear RNA binding protein A [Spinacia oleracea]
  misc_feature (12)..(229): NCBI GI NO: 39725278 NR Description: salt tolerance protein 2 [Beta vulgaris]
  misc_feature (8)..(229): NCBI GI NO: 15238039 NR Description: putative protein; protein id: At5g47210
  misc_feature (8)..(229): NCBI GI NO: 21553991 NR Description: nuclear RNA binding protein A-like protein
  misc_feature (12)..(231): NCBI GI NO: 15235894 NR Description: nuclear antigen homolog; protein id: At4g16830
  misc_feature (12)..(229): NCBI GI NO: 15236552 NR Description: nuclear RNA binding protein A-like protein
MLSLVMTLQRPPRRNYERHSGTGHGYEMKRDGAGRGNWGTATDELIAQDAEDSPKMEEAAPVAEKQGEQIDAPAADENKDNKDATANEEEEKEEDKEMTLEEFEKIREEKRKALLALKAEERKVEVDKDLRSLQPLSNKKENDEVFIKLGSDKDKKKENAERDERAKKSVSINEFLKPAEGERYYGGRGRGRGRGDRGGFRGGYGGGYSRGPAAAAPSIEDQAQFPSLGGK

SEQ ID NO: 34447 - protein, 226 aa, Zea mays subsp. mays
  peptide (1)..(226): Ceres Seq. ID no. 12376653
  misc_feature (4)..(168): Pfam Name: Pfam Description:  Hyaluronan / mRNA binding family
  misc_feature (4)..(226): NCBI GI NO: 34910712 NR Description: putative nuclear RNA binding protein A
  misc_feature (21)..(226): NCBI GI NO: 34912396 NR Description: putative putative nuclear RNA binding protein A
  misc_feature (7)..(226): NCBI GI NO: 39725276 NR Description: salt tolerance protein 1 [Beta vulgaris]
  misc_feature (7)..(226): NCBI GI NO: 7488863 NR Description: probable transcription factor - fava bean
  misc_feature (7)..(226): NCBI GI NO: 6492266 NR Description: nuclear RNA binding protein A [Spinacia oleracea]
  misc_feature (7)..(224): NCBI GI NO: 39725278 NR Description: salt tolerance protein 2 [Beta vulgaris]
  misc_feature (3)..(224): NCBI GI NO: 15238039 NR Description: putative protein; protein id: At5g47210
  misc_feature (3)..(224): NCBI GI NO: 21553991 NR Description: nuclear RNA binding protein A-like protein
  misc_feature (7)..(226): NCBI GI NO: 15235894 NR Description: nuclear antigen homolog; protein id: At4g16830
  misc_feature (7)..(224): NCBI GI NO: 15236552 NR Description: nuclear RNA binding protein A-like protein
MTLQRPPRRNYERHSGTGHGYEMKRDGAGRGNWGTATDELIAQDAEDSPKMEEAAPVAEKQGEQIDAPAADENKDNKDATANEEEEKEEDKEMTLEEFEKIREEKRKALLALKAEERKVEVDKDLRSLQPLSNKKENDEVFIKLGSDKDKKKENAERDERAKKSVSINEFLKPAEGERYYGGRGRGRGRGDRGGFRGGYGGGYSRGPAAAAPSIEDQAQFPSLGGK

SEQ ID NO: 34448 - protein, 204 aa, Zea mays subsp. mays
  peptide (1)..(204): Ceres Seq. ID no. 12376654
  misc_feature (1)..(146): Pfam Name: Pfam Description:  Hyaluronan / mRNA binding family
  misc_feature (1)..(204): NCBI GI NO: 34910712 NR Description: putative nuclear RNA binding protein A
  misc_feature (1)..(204): NCBI GI NO: 34912396 NR Description: putative putative nuclear RNA binding protein A
  misc_feature (1)..(204): NCBI GI NO: 39725276 NR Description: salt tolerance protein 1 [Beta vulgaris]
  misc_feature (1)..(204): NCBI GI NO: 7488863 NR Description: probable transcription factor - fava bean
  misc_feature (1)..(204): NCBI GI NO: 6492266 NR Description: nuclear RNA binding protein A [Spinacia oleracea]
  misc_feature (1)..(202): NCBI GI NO: 39725278 NR Description: salt tolerance protein 2 [Beta vulgaris]
  misc_feature (1)..(202): NCBI GI NO: 15238039 NR Description: putative protein; protein id: At5g47210
  misc_feature (1)..(202): NCBI GI NO: 21553991 NR Description: nuclear RNA binding protein A-like protein
  misc_feature (1)..(204): NCBI GI NO: 15235894 NR Description: nuclear antigen homolog; protein id: At4g16830
  misc_feature (1)..(202): NCBI GI NO: 15236552 NR Description: nuclear RNA binding protein A-like protein
MKRDGAGRGNWGTATDELIAQDAEDSPKMEEAAPVAEKQGEQIDAPAADENKDNKDATANEEEEKEEDKEMTLEEFEKIREEKRKALLALKAEERKVEVDKDLRSLQPLSNKKENDEVFIKLGSDKDKKKENAERDERAKKSVSINEFLKPAEGERYYGGRGRGRGRGDRGGFRGGYGGGYSRGPAAAAPSIEDQAQFPSLGGK

SEQ ID NO: 34449 - DNA, 822 bp, Zea mays subsp. mays
  misc_feature (1)..(822): Ceres Seq. ID no. 12366902
caagttcagtcacagccacaggtatgctgacactcctgccccttcgcttgccattctcgctacctgtagccgccacactcccgaacgccgccttgctcctcccggcaagcaccagggtctccctccgccagatcacgcagggagccagcatgaacgctgccgccgcctcctccgctccggacgctgctgcggccgccactggcgaggagggcgcgaaggaggccgtggacgtgctggtccagtacgtggtcctgcggcgcgatctggcggacgcgtggccgctggggagcgtcgtggcgcagggctgccacgccgccgtggccgccgtgtgggcgcaccgggaccacccggacaccgccgcctactgcgcgcccgacaacctcgaccgaatgcacaaggtaacactggaggtgaaaggagagacacagctgaataacctggctgagaagctggcagcagctggtgtccggtacaagctgtggatagagcagcctgagaacatcccaacatgcatagctacagcaccctgcccaaagtcgcaggtttcttctttcttcaagaagctcaagctttgcaaatgagcaaagaacaacagttgttcattgctccgtctgctactgtcattacggaggatcatcaaaactttcaaaactgcccatgtatgtttcatgacatgttctgctagcaacaagccatagataattagatatctcagtgatgtaatggagatatttgtgtcgttattcgccttgctgattttacatgattgtccattcacttactgtgtacctgtctcagcagttaattaatgcgaataaattg

SEQ ID NO: 34450 - protein, 192 aa, Zea mays subsp. mays
  peptide (1)..(192): Ceres Seq. ID no. 12366903
  misc_feature (8)..(192): NCBI GI NO: 38346909 NR Description: OSJNBb0015N08.9
  misc_feature (5)..(192): NCBI GI NO: 15238224 NR Description: putative protein; protein id: At5g10700.1
  misc_feature (77)..(192): NCBI GI NO: 27716785 NR Description: similar to CG14903-PA
  misc_feature (77)..(192): NCBI GI NO: 37546977 NR Description: similar to ENSANGP00000018456 [Homo sapiens]
  misc_feature (78)..(192): NCBI GI NO: 24647481 NR Description: CG14903-PA [Drosophila melanogaster]
  misc_feature (79)..(190): NCBI GI NO: 39585949 NR Description: Hypothetical protein CBG13912
  misc_feature (76)..(192): NCBI GI NO: 23479593 NR Description: Drosophila melanogaster CG14903 gene product
  misc_feature (71)..(190): NCBI GI NO: 25148624 NR Description: Low molecular weight phosphotyrosine proteinphosphatase
  misc_feature (78)..(192): NCBI GI NO: 23612187 NR Description: hypothetical protein [Plasmodium falciparum 3D7]
  misc_feature (77)..(192): NCBI GI NO: 29248553 NR Description: GLP_162_41645_41277 [Giardia lamblia ATCC 50803]
SSVTATGMLTLLPLRLPFSLPVAATLPNAALLLPASTRVSLRQITQGASMNAAAASSAPDAAAAATGEEGAKEAVDVLVQYVVLRRDLADAWPLGSVVAQGCHAAVAAVWAHRDHPDTAAYCAPDNLDRMHKVTLEVKGETQLNNLAEKLAAAGVRYKLWIEQPENIPTCIATAPCPKSQVSSFFKKLKLCK

SEQ ID NO: 34451 - protein, 185 aa, Zea mays subsp. mays
  peptide (1)..(185): Ceres Seq. ID no. 12366904
  misc_feature (1)..(185): NCBI GI NO: 38346909 NR Description: OSJNBb0015N08.9
  misc_feature (1)..(185): NCBI GI NO: 15238224 NR Description: putative protein; protein id: At5g10700.1
  misc_feature (70)..(185): NCBI GI NO: 27716785 NR Description: similar to CG14903-PA
  misc_feature (70)..(185): NCBI GI NO: 37546977 NR Description: similar to ENSANGP00000018456 [Homo sapiens]
  misc_feature (71)..(185): NCBI GI NO: 24647481 NR Description: CG14903-PA [Drosophila melanogaster]
  misc_feature (72)..(183): NCBI GI NO: 39585949 NR Description: Hypothetical protein CBG13912
  misc_feature (69)..(185): NCBI GI NO: 23479593 NR Description: Drosophila melanogaster CG14903 gene product
  misc_feature (64)..(183): NCBI GI NO: 25148624 NR Description: Low molecular weight phosphotyrosine proteinphosphatase
  misc_feature (71)..(185): NCBI GI NO: 23612187 NR Description: hypothetical protein [Plasmodium falciparum 3D7]
  misc_feature (70)..(185): NCBI GI NO: 29248553 NR Description: GLP_162_41645_41277 [Giardia lamblia ATCC 50803]
MLTLLPLRLPFSLPVAATLPNAALLLPASTRVSLRQITQGASMNAAAASSAPDAAAAATGEEGAKEAVDVLVQYVVLRRDLADAWPLGSVVAQGCHAAVAAVWAHRDHPDTAAYCAPDNLDRMHKVTLEVKGETQLNNLAEKLAAAGVRYKLWIEQPENIPTCIATAPCPKSQVSSFFKKLKLCK

SEQ ID NO: 34452 - protein, 144 aa, Zea mays subsp. mays
  peptide (1)..(144): Ceres Seq. ID no. 12366905
KFSHSHRYADTPAPSLAILATCSRHTPERRLAPPGKHQGLPPPDHAGSQHERCRRLLRSGRCCGRHWRGGREGGRGRAGPVRGPAARSGGRVAAGERRGAGLPRRRGRRVGAPGPPGHRRLLRARQPRPNAQGNTGGERRDTAE

SEQ ID NO: 34453 - DNA, 1898 bp, Zea mays subsp. mays
  misc_feature (1)..(1898): Ceres Seq. ID no. 12352643
aatccaaaccctagagagagagagagagagtgtgtagtgtgtgtgtgtgagagagagggggattggaggcgaaggcagcgggctagcgctagcggaggaggagagatccgctgaggtggaacgcccgatcggcggagccccatccaccaccactccacaagatgcggggcgggacgctgcagatcaactggcacgaccagcagccggtgctcagcctcgacttccaccccgtctcccgccgcctcgccacagccggagcggaccacgacgtcaagatctgggaggtagcgtcggacggcaagctccccaccgccaccttcaagaccggcctggtccccaacaccaccgcccacagctccgcggtcaacgtcctccggttctccccttcaggggagtatctcgcctccggtgctgatggtggcggcatcaccctctggaaactgcatcccgctgacgacggcgaggcatggaaaattcacaagacgttactattccatcacaaggatgttcttgaccttcagtggtcgcatgacagcacatttcttgtttctgcatcagtcgacaacacttgcataatttgggaagctagtaaaggcacagtgcaacaaaagctagagggacatctgcattatgttcagggtgtggcatgggatcctttgggccagtatattgcttcactgagttctgacagaacctgtaaaatatatgcaaaaaagcctcagggcaaatccaagaacgcggagaggttgaactttgtttgccagcatacactagtgaaggtagaataccagaatcatgatgaatctaagccaccaaccaaatctcatttgtttcatgatgagacactaccatctttcttccgaaggttggcatggtcacctgatggatcttttctagtattgccagcaggcctttctaaacactcctccgaggtgattaatacagcttatgtaatgtccaggcgtgacctctcaaggccttcgatacaactccctggggcaagtaaagctatagtggcagtacgcttctgccctgtactattcaaaccacgtggttctaactcagatggtttcttcaagcttccttatagagttgtctttgctgtggctactttgaactctctgtatgtctatgatacagaaagtgttcctccaattctagtccatgctggtctacactatgctgccattaccgatattgcatggtcttctgatgctaagtacctggcagtgtcatcacgagatggctactgtactataatagagtttgagaatgaggaactgggacagcctcacatactccccggatcaaaggaagttgctaatgggaatctgacacctgagaccaagaagcctgtatgtgctgatagcatgaaggttgataatagtgccaacaagcttaagatggaagccagtcctgttgctgtaggagttagagcaccactgctgccaactgagaacatcaagagaacaggagagcttgccgaaggaaatgtaacctgtgaaaacaaggagccggtaacaatagacagtatggaagtagatgccgatgataccaaaggcaaggaggcaaccatacccgtggcagctgaagtgacaccgccaccagcggtaccggcagcgaagaacagcgcatctagtaagcctgctaagaggcgaattactcctatcgcaatcgactaggtagtagacgcagcagttagggttttgatgtgttatgtagtgatggcaagtactggatactatgtttaggctaccctgtaaagtcgtttgtgctgcggtgctcatcttctgctctagtcctcctgctcttgacacaattggggagaatgtgaacagaagggctgtgtgtatgtatgagcacactttgttatggcgcaacatgcaagccactaaccg

SEQ ID NO: 34454 - protein, 506 aa, Zea mays subsp. mays
  peptide (1)..(506): Ceres Seq. ID no. 12352644
  misc_feature (1)..(488): NCBI GI NO: 4884488 NR Description: FAS2 [Arabidopsis thaliana]
  misc_feature (1)..(382): NCBI GI NO: 18424846 NR Description: FAS2 (dbj|BAA77766
  misc_feature (1)..(421): NCBI GI NO: 11096297 NR Description: FAS2 [Glycine max]
  misc_feature (5)..(421): NCBI GI NO: 4885105 NR Description: chromatin assembly factor 1, subunit B
  misc_feature (5)..(506): NCBI GI NO: 34867673 NR Description: similar to Chromatin assembly factor 1 subunit B
  misc_feature (5)..(506): NCBI GI NO: 21312470 NR Description: chromatin assembly factor 1, subunit B (p60)
  misc_feature (13)..(495): NCBI GI NO: 24652458 NR Description: CG12892-PA [Drosophila melanogaster]
  misc_feature (13)..(495): NCBI GI NO: 13569829 NR Description: chromatin assembly factor-1 p105 subunit
  misc_feature (1)..(185): NCBI GI NO: 40740803 NR Description: hypothetical protein AN3785.2
  misc_feature (305)..(493): NCBI GI NO: 40740803 NR Description: hypothetical protein AN3785.2
MRGGTLQINWHDQQPVLSLDFHPVSRRLATAGADHDVKIWEVASDGKLPTATFKTGLVPNTTAHSSAVNVLRFSPSGEYLASGADGGGITLWKLHPADDGEAWKIHKTLLFHHKDVLDLQWSHDSTFLVSASVDNTCIIWEASKGTVQQKLEGHLHYVQGVAWDPLGQYIASLSSDRTCKIYAKKPQGKSKNAERLNFVCQHTLVKVEYQNHDESKPPTKSHLFHDETLPSFFRRLAWSPDGSFLVLPAGLSKHSSEVINTAYVMSRRDLSRPSIQLPGASKAIVAVRFCPVLFKPRGSNSDGFFKLPYRVVFAVATLNSLYVYDTESVPPILVHAGLHYAAITDIAWSSDAKYLAVSSRDGYCTIIEFENEELGQPHILPGSKEVANGNLTPETKKPVCADSMKVDNSANKLKMEASPVAVGVRAPLLPTENIKRTGELAEGNVTCENKEPVTIDSMEVDADDTKGKEATIPVAAEVTPPPAVPAAKNSASSKPAKRRITPIAID

SEQ ID NO: 34455 - DNA, 751 bp, Zea mays subsp. mays
  misc_feature (1)..(751): Ceres Seq. ID no. 12414680
cactgtttacaaaatcaggaatgttattcttggaagtgagtctcatagcctttctacttcaaggaaatgatgccagcggttttgaatctttggcacgaacctttgttatatctggagctgtagttgctgctgatgtattgctcaagactatatatgtttttggcttcggtgttcctttgttcattgatactgatcaaggaactagtgggaaatggggcctgtggattctccacaaacttgtgcttactggagtctatgggctgattgttttcatgcatcattcaagatggagagacaggctgcctgcaaaaccagcatactacaactatgtatgtgtgatgttgctactgaatggcatatcactgtttggatgtttccttattgcaagtggagctggatttggtttatggttatataatctcacaaccgtatgctatcattctctttaccttcccctcctatatgtgactttcttagcagacttcttccaggaggaagacatgctcctagagaacgtctactattctgaaatgaaggatgctgggttcttcgatgctgactgggattaatccgtggctactgtgctgtatgacccatcccatatgaagtacgctgtatttgtttttattttatctgtgtactctcaacgtagaacaggaaatgtatgtagctagtcgtggtagtgaatggaaatatgtaatcttactgctgcatacttcagaaaatcagaattcaagtgatttcacggccg

SEQ ID NO: 34456 - protein, 188 aa, Zea mays subsp. mays
  peptide (1)..(188): Ceres Seq. ID no. 12414681
  misc_feature (48)..(188): NCBI GI NO: 21326119 NR Description: putative expressed protein [Sorghum bicolor]
  misc_feature (1)..(24): NCBI GI NO: 21326119 NR Description: putative expressed protein [Sorghum bicolor]
  misc_feature (1)..(188): NCBI GI NO: 18397089 NR Description: expressed protein; protein id: At3g05010
  misc_feature (1)..(188): NCBI GI NO: 12322847 NR Description: unknown protein; 15342-13483
  misc_feature (1)..(188): NCBI GI NO: 15240462 NR Description: putative protein; protein id: At5g27210
  misc_feature (1)..(188): NCBI GI NO: 21618098 NR Description: unknown [Arabidopsis thaliana]
  misc_feature (1)..(188): NCBI GI NO: 14532472 NR Description: AT5g27210/T21B4_120 [Arabidopsis thaliana]
  misc_feature (22)..(154): NCBI GI NO: 7485300 NR Description: hypothetical protein A_TM021B04
LFTKSGMLFLEVSLIAFLLQGNDASGFESLARTFVISGAVVAADVLLKTIYVFGFGVPLFIDTDQGTSGKWGLWILHKLVLTGVYGLIVFMHHSRWRDRLPAKPAYYNYVCVMLLLNGISLFGCFLIASGAGFGLWLYNLTTVCYHSLYLPLLYVTFLADFFQEEDMLLENVYYSEMKDAGFFDADWD

SEQ ID NO: 34457 - protein, 182 aa, Zea mays subsp. mays
  peptide (1)..(182): Ceres Seq. ID no. 12414682
  misc_feature (42)..(182): NCBI GI NO: 21326119 NR Description: putative expressed protein [Sorghum bicolor]
  misc_feature (1)..(18): NCBI GI NO: 21326119 NR Description: putative expressed protein [Sorghum bicolor]
  misc_feature (1)..(182): NCBI GI NO: 18397089 NR Description: expressed protein; protein id: At3g05010
  misc_feature (1)..(182): NCBI GI NO: 12322847 NR Description: unknown protein; 15342-13483
  misc_feature (1)..(182): NCBI GI NO: 15240462 NR Description: putative protein; protein id: At5g27210
  misc_feature (1)..(182): NCBI GI NO: 21618098 NR Description: unknown [Arabidopsis thaliana]
  misc_feature (1)..(182): NCBI GI NO: 14532472 NR Description: AT5g27210/T21B4_120 [Arabidopsis thaliana]
  misc_feature (16)..(148): NCBI GI NO: 7485300 NR Description: hypothetical protein A_TM021B04
MLFLEVSLIAFLLQGNDASGFESLARTFVISGAVVAADVLLKTIYVFGFGVPLFIDTDQGTSGKWGLWILHKLVLTGVYGLIVFMHHSRWRDRLPAKPAYYNYVCVMLLLNGISLFGCFLIASGAGFGLWLYNLTTVCYHSLYLPLLYVTFLADFFQEEDMLLENVYYSEMKDAGFFDADWD

SEQ ID NO: 34458 - protein, 98 aa, Zea mays subsp. mays
  peptide (1)..(98): Ceres Seq. ID no. 12414683
  misc_feature (1)..(98): NCBI GI NO: 21326119 NR Description: putative expressed protein [Sorghum bicolor]
  misc_feature (1)..(98): NCBI GI NO: 18397089 NR Description: expressed protein; protein id: At3g05010
  misc_feature (1)..(98): NCBI GI NO: 12322847 NR Description: unknown protein; 15342-13483
  misc_feature (1)..(98): NCBI GI NO: 15240462 NR Description: putative protein; protein id: At5g27210
  misc_feature (1)..(98): NCBI GI NO: 21618098 NR Description: unknown [Arabidopsis thaliana]
  misc_feature (1)..(98): NCBI GI NO: 14532472 NR Description: AT5g27210/T21B4_120 [Arabidopsis thaliana]
  misc_feature (1)..(64): NCBI GI NO: 7485300 NR Description: hypothetical protein A_TM021B04
MHHSRWRDRLPAKPAYYNYVCVMLLLNGISLFGCFLIASGAGFGLWLYNLTTVCYHSLYLPLLYVTFLADFFQEEDMLLENVYYSEMKDAGFFDADWD

SEQ ID NO: 34459 - DNA, 1064 bp, Zea mays subsp. mays
  misc_feature (1)..(1064): Ceres Seq. ID no. 12345171
acagagcctgaaatcggctacacacacgcacacgcatacgcaggaattgaaccagccgctagtcccgcgccttttgcggccatgatcaagctgagctactccaagaggctcttcaagaggatctcctccacgtccaataagcagcaggcggccgcttccggcggcggcgacaatggcagcgcggccgcgaccggcggaggaggcgcccgggagatcgagtgggaggtgaggccgggagggatgctggtgcagaagagggacgggaggggcggccgggagacggtcgccgtcagggtttccaccggcttctcctggcatgatgtgtccatcggagccacctccacttttggggagctgaaggtgatgctgtccatggtaacagggctggagccacgggagcagaggctgctgttcaggggcaaagagaggaacgacaccgaccacctccacatggttggggtgagggacaaggacaaggtcctcctgctagaggacccggccctcaaggacatgaagctccgggctctgtcggctcgagtcgtgccggggccgtgccagtcttttatccaagtgtaacttcccgctaccgtgctaactgttaccactatacttgttagttgtgttatatcccaccaccaaggtacttttagtttctggaaagcccttttaaatatccggaatccgaagggtttgctctctaaaccactctgtctttagtgtcacttcgtggaagggtccctgaagatgagagtcagccatagtggctgtgatgtgatttggagcctacagcttgttcgctgcggcttgctgcggctgcaatccggctgcggctgcggcttctacagtatttttctctctatggattgcagctgcagcagtccaaacagctgcaacagtgtcggcttgcagccaaccgaacacgcccctagtgtctgggatgtttttttatggtccctactactactactaccaccgtggtcatttctcattcctacctacatctacatgcatgggtcatgggtaggcaactaggcatgagtgataaagattgtatgtatgtacac

SEQ ID NO: 34460 - protein, 191 aa, Zea mays subsp. mays
  peptide (1)..(191): Ceres Seq. ID no. 12345172
  misc_feature (95)..(167): Pfam Name: Pfam Description:  Ubiquitin family
  misc_feature (28)..(191): NCBI GI NO: 32488469 NR Description: OSJNBa0081L15.2
  misc_feature (28)..(191): NCBI GI NO: 20804881 NR Description: P0497A05.5
  misc_feature (39)..(189): NCBI GI NO: 15241381 NR Description: putative protein; protein id: At5g14360.1
  misc_feature (39)..(172): NCBI GI NO: 15237460 NR Description: putative protein; protein id: At5g40630.1
  misc_feature (58)..(117): NCBI GI NO: 34907972 NR Description: P0446G04.18
  misc_feature (117)..(175): NCBI GI NO: 34907972 NR Description: P0446G04.18
  misc_feature (55)..(173): NCBI GI NO: 34898024 NR Description: ESTs AU082174
  misc_feature (40)..(173): NCBI GI NO: 25553557 NR Description: OSJNBa0038F22.4
  misc_feature (57)..(175): NCBI GI NO: 21537107 NR Description: unknown [Arabidopsis thaliana]
  misc_feature (57)..(175): NCBI GI NO: 15240726 NR Description: putative protein; protein id: At5g07220
TEPEIGYTHAHAYAGIEPAASPAPFAAMIKLSYSKRLFKRISSTSNKQQAAASGGGDNGSAAATGGGGAREIEWEVRPGGMLVQKRDGRGGRETVAVRVSTGFSWHDVSIGATSTFGELKVMLSMVTGLEPREQRLLFRGKERNDTDHLHMVGVRDKDKVLLLEDPALKDMKLRALSARVVPGPCQSFIQV

SEQ ID NO: 34461 - protein, 164 aa, Zea mays subsp. mays
  peptide (1)..(164): Ceres Seq. ID no. 12345173
  misc_feature (68)..(140): Pfam Name: Pfam Description:  Ubiquitin family
  misc_feature (1)..(164): NCBI GI NO: 32488469 NR Description: OSJNBa0081L15.2
  misc_feature (1)..(164): NCBI GI NO: 20804881 NR Description: P0497A05.5
  misc_feature (12)..(162): NCBI GI NO: 15241381 NR Description: putative protein; protein id: At5g14360.1
  misc_feature (12)..(145): NCBI GI NO: 15237460 NR Description: putative protein; protein id: At5g40630.1
  misc_feature (31)..(90): NCBI GI NO: 34907972 NR Description: P0446G04.18
  misc_feature (90)..(148): NCBI GI NO: 34907972 NR Description: P0446G04.18
  misc_feature (28)..(146): NCBI GI NO: 34898024 NR Description: ESTs AU082174
  misc_feature (13)..(146): NCBI GI NO: 25553557 NR Description: OSJNBa0038F22.4
  misc_feature (30)..(148): NCBI GI NO: 21537107 NR Description: unknown [Arabidopsis thaliana]
  misc_feature (30)..(148): NCBI GI NO: 15240726 NR Description: putative protein; protein id: At5g07220
MIKLSYSKRLFKRISSTSNKQQAAASGGGDNGSAAATGGGGAREIEWEVRPGGMLVQKRDGRGGRETVAVRVSTGFSWHDVSIGATSTFGELKVMLSMVTGLEPREQRLLFRGKERNDTDHLHMVGVRDKDKVLLLEDPALKDMKLRALSARVVPGPCQSFIQV

SEQ ID NO: 34462 - protein, 111 aa, Zea mays subsp. mays
  peptide (1)..(111): Ceres Seq. ID no. 12345174
  misc_feature (15)..(87): Pfam Name: Pfam Description:  Ubiquitin family
  misc_feature (1)..(111): NCBI GI NO: 32488469 NR Description: OSJNBa0081L15.2
  misc_feature (1)..(111): NCBI GI NO: 20804881 NR Description: P0497A05.5
  misc_feature (1)..(109): NCBI GI NO: 15241381 NR Description: putative protein; protein id: At5g14360.1
  misc_feature (1)..(92): NCBI GI NO: 15237460 NR Description: putative protein; protein id: At5g40630.1
  misc_feature (1)..(37): NCBI GI NO: 34907972 NR Description: P0446G04.18
  misc_feature (37)..(95): NCBI GI NO: 34907972 NR Description: P0446G04.18
  misc_feature (1)..(93): NCBI GI NO: 34898024 NR Description: ESTs AU082174
  misc_feature (1)..(93): NCBI GI NO: 25553557 NR Description: OSJNBa0038F22.4
  misc_feature (1)..(95): NCBI GI NO: 21537107 NR Description: unknown [Arabidopsis thaliana]
  misc_feature (1)..(95): NCBI GI NO: 15240726 NR Description: putative protein; protein id: At5g07220
MLVQKRDGRGGRETVAVRVSTGFSWHDVSIGATSTFGELKVMLSMVTGLEPREQRLLFRGKERNDTDHLHMVGVRDKDKVLLLEDPALKDMKLRALSARVVPGPCQSFIQV

SEQ ID NO: 34463 - DNA, 1161 bp, Zea mays subsp. mays
  misc_feature (1)..(1161): Ceres Seq. ID no. 12414676
  misc_feature (1153)..(1153): n is a, c, t, g, unknown, or other
atcggacggccgcgtggctcccaggagccctatatcaccatccttgcccaccacctcctgaccctcatcacccgcgtccgccaccgccgccgcctttcgtaccgcggcccctaaacccctttcctcgttcccctccgtctctcagttaggcacaatgatgctagctaataagcttggtggtttgctcaagaatgctacgagttcaaagagttcaaatatgtctgtctaccaagcaatcagatgcatgttcatcatccaagctttttgttggagggctttcttatggaaccgatgatcaccagtctcagagacgagtttgccaaatatggacaagttattgaagctaagattatccttgatcgtgagtctgggaggtccagaggttttggctttataacttacacgtcttctgaggaggcttcggctgccatcactgccatggatggaaagactctggatggacggaacatacgggttaatcatgctaacgagaggacaggtggcttccgcagcagccgtggttatggtggtggcggctatggtggtggtggtggtggctatggtggcggtggctatggtggcggctatggtggtggtagcggtggctatggcggcggcggcagcggtgactatggtggcggcagcggtggatatggtggcaactacggcaacagggctggtggtggctatggtggtggtggtgattatggagttgcaggtggggctgaaggcagttttgctgctggaggtagcgacagctttggcagcagtaactttgctgacagtggttttggtgaaaaccctgctggtagctttggcgcaacgggtggttccagtggcgctgatgggttctctgctggcacacctggtgacggtaacaagaatgatgaaatcatggatgatctcttcaaggacgatgagcctgacagctacgccaacaagaggagctaatttgtgtccaccaccaccatgcgaggccgtgtggattctaggccatatgtattcggtagtgttttctgttaacatgataggtgtctgatgtctaaataatggaacgagtccttttgttgagtttgagttgtggaactttcaaagcgtgcgttgcatgtggcgcttgtgccggcaaacatggcatactttcatgttatattgntatttgct

SEQ ID NO: 34464 - protein, 236 aa, Zea mays subsp. mays
  peptide (1)..(236): Ceres Seq. ID no. 12414677
  misc_feature (21)..(79): Pfam Name: a.k.a. RRM, RBD, or RNP domain Pfam Description: RNA recognition motif.
  misc_feature (21)..(213): NCBI GI NO: 15239505 NR Description: glycine-rich RNA-binding protein
  misc_feature (20)..(209): NCBI GI NO: 15822705 NR Description: RNA-binding protein precursor [Solanum tuberosum]
  misc_feature (20)..(235): NCBI GI NO: 15822703 NR Description: RNA-binding protein precursor [Nicotiana tabacum]
  misc_feature (1)..(217): NCBI GI NO: 15221187 NR Description: glycine-rich RNA-binding protein
  misc_feature (21)..(164): NCBI GI NO: 10799202 NR Description: glycine-rich RNA-binding protein [Sorghum bicolor]
  misc_feature (21)..(164): NCBI GI NO: 544423 NR Description: Glycine-rich RNA-binding protein 2
  misc_feature (21)..(175): NCBI GI NO: 7439981 NR Description: glycine-rich RNA-binding protein GRP1 - wheat
  misc_feature (26)..(226): NCBI GI NO: 33239465 NR Description: RNA-binding protein, RRM domain
  misc_feature (86)..(214): NCBI GI NO: 28374304 NR Description: similar to heterogeneous ribonuclear particleprotein
  misc_feature (12)..(90): NCBI GI NO: 28374304 NR Description: similar to heterogeneous ribonuclear particleprotein
MHVHHPSFLLEGFLMEPMITSLRDEFAKYGQVIEAKIILDRESGRSRGFGFITYTSSEEASAAITAMDGKTLDGRNIRVNHANERTGGFRSSRGYGGGGYGGGGGGYGGGGYGGGYGGGSGGYGGGGSGDYGGGSGGYGGNYGNRAGGGYGGGGDYGVAGGAEGSFAAGGSDSFGSSNFADSGFGENPAGSFGATGGSSGADGFSAGTPGDGNKNDEIMDDLFKDDEPDSYANKRS

SEQ ID NO: 34465 - protein, 222 aa, Zea mays subsp. mays
  peptide (1)..(222): Ceres Seq. ID no. 12414678
  misc_feature (7)..(65): Pfam Name: a.k.a. RRM, RBD, or RNP domain Pfam Description: RNA recognition motif.
  misc_feature (7)..(199): NCBI GI NO: 15239505 NR Description: glycine-rich RNA-binding protein
  misc_feature (6)..(195): NCBI GI NO: 15822705 NR Description: RNA-binding protein precursor [Solanum tuberosum]
  misc_feature (6)..(221): NCBI GI NO: 15822703 NR Description: RNA-binding protein precursor [Nicotiana tabacum]
  misc_feature (1)..(203): NCBI GI NO: 15221187 NR Description: glycine-rich RNA-binding protein
  misc_feature (7)..(150): NCBI GI NO: 10799202 NR Description: glycine-rich RNA-binding protein [Sorghum bicolor]
  misc_feature (7)..(150): NCBI GI NO: 544423 NR Description: Glycine-rich RNA-binding protein 2
  misc_feature (7)..(161): NCBI GI NO: 7439981 NR Description: glycine-rich RNA-binding protein GRP1 - wheat
  misc_feature (12)..(212): NCBI GI NO: 33239465 NR Description: RNA-binding protein, RRM domain
  misc_feature (72)..(200): NCBI GI NO: 28374304 NR Description: similar to heterogeneous ribonuclear particleprotein
  misc_feature (1)..(76): NCBI GI NO: 28374304 NR Description: similar to heterogeneous ribonuclear particleprotein
MEPMITSLRDEFAKYGQVIEAKIILDRESGRSRGFGFITYTSSEEASAAITAMDGKTLDGRNIRVNHANERTGGFRSSRGYGGGGYGGGGGGYGGGGYGGGYGGGSGGYGGGGSGDYGGGSGGYGGNYGNRAGGGYGGGGDYGVAGGAEGSFAAGGSDSFGSSNFADSGFGENPAGSFGATGGSSGADGFSAGTPGDGNKNDEIMDDLFKDDEPDSYANKRS

SEQ ID NO: 34466 - protein, 219 aa, Zea mays subsp. mays
  peptide (1)..(219): Ceres Seq. ID no. 12414679
  misc_feature (4)..(62): Pfam Name: a.k.a. RRM, RBD, or RNP domain Pfam Description: RNA recognition motif.
  misc_feature (4)..(196): NCBI GI NO: 15239505 NR Description: glycine-rich RNA-binding protein
  misc_feature (3)..(192): NCBI GI NO: 15822705 NR Description: RNA-binding protein precursor [Solanum tuberosum]
  misc_feature (3)..(218): NCBI GI NO: 15822703 NR Description: RNA-binding protein precursor [Nicotiana tabacum]
  misc_feature (1)..(200): NCBI GI NO: 15221187 NR Description: glycine-rich RNA-binding protein
  misc_feature (4)..(147): NCBI GI NO: 10799202 NR Description: glycine-rich RNA-binding protein [Sorghum bicolor]
  misc_feature (4)..(147): NCBI GI NO: 544423 NR Description: Glycine-rich RNA-binding protein 2
  misc_feature (4)..(158): NCBI GI NO: 7439981 NR Description: glycine-rich RNA-binding protein GRP1 - wheat
  misc_feature (9)..(209): NCBI GI NO: 33239465 NR Description: RNA-binding protein, RRM domain
  misc_feature (69)..(197): NCBI GI NO: 28374304 NR Description: similar to heterogeneous ribonuclear particleprotein
  misc_feature (1)..(73): NCBI GI NO: 28374304 NR Description: similar to heterogeneous ribonuclear particleprotein
MITSLRDEFAKYGQVIEAKIILDRESGRSRGFGFITYTSSEEASAAITAMDGKTLDGRNIRVNHANERTGGFRSSRGYGGGGYGGGGGGYGGGGYGGGYGGGSGGYGGGGSGDYGGGSGGYGGNYGNRAGGGYGGGGDYGVAGGAEGSFAAGGSDSFGSSNFADSGFGENPAGSFGATGGSSGADGFSAGTPGDGNKNDEIMDDLFKDDEPDSYANKRS

SEQ ID NO: 34467 - DNA, 1206 bp, Zea mays subsp. mays
  misc_feature (1)..(1206): Ceres Seq. ID no. 13492266
aaaagagagagggggaggtcgacgagacagagagagaaggccaagaggcttcctctccccattcctcccttccgtgccctagccgagccagccgcgaggaaggaggcatcccgccgtctcgcctggcgcccgcccgtcggccgaccttctgccgcagcttccaattgtaaaaagatcatagatttttgtgcaagagcgagtggatatggaaccatcccctcagcctatgggtgtcgctgccggtgggtcacaagtgtatcctgcctctgcctatccgcctgcagcaacagtagctcctgcttctgttgtatctgctggtttacagtcagggcagccattcccagccaatcctggtcatatgagtgctcagcaccagattgtctaccaacaagctcaacaattccaccaacagctccagcagcaacaacaacagcagcttcagcagttctgggttgaacgcatgactgaaattgaggcgacgactgatttcaagaaccacaacttgccacttgcgaggataaagaagatcatgaaggccgatgaagatgttcgcatgatctcagctgaagctcctgtagtctttgcaaaagcttgtgagatattcatactggagctgacacttaggtcgtggatgcacactgaggagaacaagcgccgcaccttgcaaaagaatgacattgcagcagcgatcactaggactgacatttatgacttcttggtcgacattgttcccagggatgagatgaaggaggacggaattgggcttcctagggctggtctgccacccatgggagccccagctgatgcatatccatactactacatgccacagcagcaggtgcctggttctggaatggtttatggtgcccagcaagggcacccagtgacttatttgtggcaggagcctcagcaacagcaggagcaagctcctgaagagcagcaatctgcatgaaagtggctgagaatattgctcagaagctatcacctgattcagagttctcattttaggttgtccaaactgcaggttttcttagtaatatcgttggttatcaaactgaaacaggcgattctaagtagggtgtagcatcatggtagtttcatttctgcttgtgatgttagttgaaaggataatgattagtggctagtggattaaagttaccataccatttccttctattccgaaagtttgcctccatgaggcctctg

SEQ ID NO: 34468 - protein, 248 aa, Zea mays subsp. mays
  peptide (1)..(248): Ceres Seq. ID no. 13492267
  misc_feature (44)..(226): NCBI GI NO: 15223482 NR Description: transcription factor Hap5a, putative
  misc_feature (44)..(226): NCBI GI NO: 21554704 NR Description: transcription factor, putative
  misc_feature (31)..(244): NCBI GI NO: 15223986 NR Description: transcription factor Hap5a, putative
  misc_feature (65)..(244): NCBI GI NO: 25372763 NR Description: hypothetical protein
  misc_feature (31)..(244): NCBI GI NO: 6289057 NR Description: heme activated protein [Arabidopsis thaliana]
  misc_feature (65)..(245): NCBI GI NO: 15221912 NR Description: transcription factor Hap5a, putative
  misc_feature (24)..(236): NCBI GI NO: 15242784 NR Description: transcription factor Hap5a, putative
  misc_feature (67)..(236): NCBI GI NO: 15228405 NR Description: transcription factor Hap5a, putative
  misc_feature (86)..(226): NCBI GI NO: 25404100 NR Description: transcription factor
  misc_feature (86)..(210): NCBI GI NO: 2398533 NR Description: Transcription factor [Arabidopsis thaliana]
MEPSPQPMGVAAGGSQVYPASAYPPAATVAPASVVSAGLQSGQPFPANPGHMSAQHQIVYQQAQQFHQQLQQQQQQQLQQFWVERMTEIEATTDFKNHNLPLARIKKIMKADEDVRMISAEAPVVFAKACEIFILELTLRSWMHTEENKRRTLQKNDIAAAITRTDIYDFLVDIVPRDEMKEDGIGLPRAGLPPMGAPADAYPYYYMPQQQVPGSGMVYGAQQGHPVTYLWQEPQQQQEQAPEEQQSA

SEQ ID NO: 34469 - protein, 241 aa, Zea mays subsp. mays
  peptide (1)..(241): Ceres Seq. ID no. 13492268
  misc_feature (37)..(219): NCBI GI NO: 15223482 NR Description: transcription factor Hap5a, putative
  misc_feature (37)..(219): NCBI GI NO: 21554704 NR Description: transcription factor, putative
  misc_feature (24)..(237): NCBI GI NO: 15223986 NR Description: transcription factor Hap5a, putative
  misc_feature (58)..(237): NCBI GI NO: 25372763 NR Description: hypothetical protein
  misc_feature (24)..(237): NCBI GI NO: 6289057 NR Description: heme activated protein [Arabidopsis thaliana]
  misc_feature (58)..(238): NCBI GI NO: 15221912 NR Description: transcription factor Hap5a, putative
  misc_feature (17)..(229): NCBI GI NO: 15242784 NR Description: transcription factor Hap5a, putative
  misc_feature (60)..(229): NCBI GI NO: 15228405 NR Description: transcription factor Hap5a, putative
  misc_feature (79)..(219): NCBI GI NO: 25404100 NR Description: transcription factor
  misc_feature (79)..(203): NCBI GI NO: 2398533 NR Description: Transcription factor [Arabidopsis thaliana]
MGVAAGGSQVYPASAYPPAATVAPASVVSAGLQSGQPFPANPGHMSAQHQIVYQQAQQFHQQLQQQQQQQLQQFWVERMTEIEATTDFKNHNLPLARIKKIMKADEDVRMISAEAPVVFAKACEIFILELTLRSWMHTEENKRRTLQKNDIAAAITRTDIYDFLVDIVPRDEMKEDGIGLPRAGLPPMGAPADAYPYYYMPQQQVPGSGMVYGAQQGHPVTYLWQEPQQQQEQAPEEQQSA

SEQ ID NO: 34470 - protein, 197 aa, Zea mays subsp. mays
  peptide (1)..(197): Ceres Seq. ID no. 13492269
  misc_feature (1)..(175): NCBI GI NO: 15223482 NR Description: transcription factor Hap5a, putative
  misc_feature (1)..(175): NCBI GI NO: 21554704 NR Description: transcription factor, putative
  misc_feature (1)..(193): NCBI GI NO: 15223986 NR Description: transcription factor Hap5a, putative
  misc_feature (14)..(193): NCBI GI NO: 25372763 NR Description: hypothetical protein
  misc_feature (1)..(193): NCBI GI NO: 6289057 NR Description: heme activated protein [Arabidopsis thaliana]
  misc_feature (14)..(194): NCBI GI NO: 15221912 NR Description: transcription factor Hap5a, putative
  misc_feature (1)..(185): NCBI GI NO: 15242784 NR Description: transcription factor Hap5a, putative
  misc_feature (16)..(185): NCBI GI NO: 15228405 NR Description: transcription factor Hap5a, putative
  misc_feature (35)..(175): NCBI GI NO: 25404100 NR Description: transcription factor
  misc_feature (35)..(159): NCBI GI NO: 2398533 NR Description: Transcription factor [Arabidopsis thaliana]
MSAQHQIVYQQAQQFHQQLQQQQQQQLQQFWVERMTEIEATTDFKNHNLPLARIKKIMKADEDVRMISAEAPVVFAKACEIFILELTLRSWMHTEENKRRTLQKNDIAAAITRTDIYDFLVDIVPRDEMKEDGIGLPRAGLPPMGAPADAYPYYYMPQQQVPGSGMVYGAQQGHPVTYLWQEPQQQQEQAPEEQQSA

SEQ ID NO: 34471 - DNA, 2031 bp, Zea mays subsp. mays; identical to SEQ ID NO: 23657
  misc_feature (1)..(2031): Ceres Seq. ID no. 12348893

SEQ ID NO: 34472 - protein, 393 aa, Zea mays subsp. mays; identical to SEQ ID NO: 23658
  peptide (1)..(393): Ceres Seq. ID no. 12348894
  misc_feature (13)..(346): Pfam Name: Pfam Description:  Adenosylmethionine decarboxylase
  misc_feature (1)..(382): NCBI GI NO: 3913427 NR Description: S-adenosylmethionine decarboxylase proenzyme
  misc_feature (1)..(378): NCBI GI NO: 19855056 NR Description: S-adenosylmethionine decarboxylase proenzyme
  misc_feature (1)..(378): NCBI GI NO: 3929545 NR Description: S-adenosylmethionine decarboxylase [Oryza sativa]
  misc_feature (9)..(390): NCBI GI NO: 3913438 NR Description: S-adenosylmethionine decarboxylase proenzyme
  misc_feature (9)..(378): NCBI GI NO: 4325045 NR Description: S-adenosylmethionine decarboxylase precursor
  misc_feature (1)..(378): NCBI GI NO: 7436593 NR Description: adenosylmethionine decarboxylase homolog
  misc_feature (1)..(370): NCBI GI NO: 6646868 NR Description: S-adenosylmethionine decarboxylase 2
  misc_feature (1)..(278): NCBI GI NO: 10241685 NR Description: S-adenosylmethionine decarboxylase
  misc_feature (13)..(363): NCBI GI NO: 28566348 NR Description: S-adenosylmethionine decarboxylase
  misc_feature (9)..(359): NCBI GI NO: 31980105 NR Description: S-adenosylmethionine decarboxylase proenzyme

SEQ ID NO: 34473 - protein, 281 aa, Zea mays subsp. mays; identical to SEQ ID NO: 23659
  peptide (1)..(281): Ceres Seq. ID no. 12348895
  misc_feature (1)..(234): Pfam Name: Pfam Description:  Adenosylmethionine decarboxylase
  misc_feature (1)..(270): NCBI GI NO: 3913427 NR Description: S-adenosylmethionine decarboxylase proenzyme
  misc_feature (1)..(266): NCBI GI NO: 19855056 NR Description: S-adenosylmethionine decarboxylase proenzyme
  misc_feature (1)..(266): NCBI GI NO: 3929545 NR Description: S-adenosylmethionine decarboxylase [Oryza sativa]
  misc_feature (1)..(278): NCBI GI NO: 3913438 NR Description: S-adenosylmethionine decarboxylase proenzyme
  misc_feature (1)..(266): NCBI GI NO: 4325045 NR Description: S-adenosylmethionine decarboxylase precursor
  misc_feature (1)..(266): NCBI GI NO: 7436593 NR Description: adenosylmethionine decarboxylase homolog
  misc_feature (1)..(258): NCBI GI NO: 6646868 NR Description: S-adenosylmethionine decarboxylase 2
  misc_feature (1)..(166): NCBI GI NO: 10241685 NR Description: S-adenosylmethionine decarboxylase
  misc_feature (1)..(251): NCBI GI NO: 28566348 NR Description: S-adenosylmethionine decarboxylase
  misc_feature (1)..(247): NCBI GI NO: 31980105 NR Description: S-adenosylmethionine decarboxylase proenzyme

SEQ ID NO: 34474 - protein, 210 aa, Zea mays subsp. mays; identical to SEQ ID NO: 23660
  peptide (1)..(210): Ceres Seq. ID no. 12348896
  misc_feature (1)..(163): Pfam Name: Pfam Description:  Adenosylmethionine decarboxylase
  misc_feature (1)..(199): NCBI GI NO: 3913427 NR Description: S-adenosylmethionine decarboxylase proenzyme
  misc_feature (1)..(195): NCBI GI NO: 19855056 NR Description: S-adenosylmethionine decarboxylase proenzyme
  misc_feature (1)..(195): NCBI GI NO: 3929545 NR Description: S-adenosylmethionine decarboxylase [Oryza sativa]
  misc_feature (1)..(207): NCBI GI NO: 3913438 NR Description: S-adenosylmethionine decarboxylase proenzyme
  misc_feature (1)..(195): NCBI GI NO: 4325045 NR Description: S-adenosylmethionine decarboxylase precursor
  misc_feature (1)..(195): NCBI GI NO: 7436593 NR Description: adenosylmethionine decarboxylase homolog
  misc_feature (1)..(187): NCBI GI NO: 6646868 NR Description: S-adenosylmethionine decarboxylase 2
  misc_feature (1)..(95): NCBI GI NO: 10241685 NR Description: S-adenosylmethionine decarboxylase
  misc_feature (1)..(180): NCBI GI NO: 28566348 NR Description: S-adenosylmethionine decarboxylase
  misc_feature (1)..(176): NCBI GI NO: 31980105 NR Description: S-adenosylmethionine decarboxylase proenzyme

SEQ ID NO: 34475 - DNA, 902 bp, Zea mays subsp. mays; identical to SEQ ID NO: 29704
  misc_feature (1)..(902): Ceres Seq. ID no. 12341316

SEQ ID NO: 34476 - protein, 213 aa, Zea mays subsp. mays; identical to SEQ ID NO: 29705
  peptide (1)..(213): Ceres Seq. ID no. 12341317
  misc_feature (29)..(204): NCBI GI NO: 34393473 NR Description: bifunctional phosphopantetheine adenylyltransferase dephospho CoA kinase-like
  misc_feature (40)..(204): NCBI GI NO: 15224138 NR Description: hypothetical protein; protein id: At2g18250.1
  misc_feature (43)..(194): NCBI GI NO: 25143409 NR Description: Cytidylyltransferase and Dephospho-CoA kinase (51
  misc_feature (31)..(194): NCBI GI NO: 39589394 NR Description: Hypothetical protein CBG22156
  misc_feature (1)..(193): NCBI GI NO: 31213039 NR Description: ENSANGP00000014315 [Anopheles gambiae]
  misc_feature (56)..(205): NCBI GI NO: 6321716 NR Description: Protein required for cell viability; Ygr277cp
  misc_feature (51)..(193): NCBI GI NO: 20094940 NR Description: Predicted nucleotidyltransferase of the HIGHsuperfamily
  misc_feature (40)..(193): NCBI GI NO: 24658602 NR Description: CG10575-PA [Drosophila melanogaster]
  misc_feature (56)..(194): NCBI GI NO: 20465246 NR Description: bifunctional phosphopantetheine adenylyltransferase / dephospho CoA kinase
  misc_feature (51)..(194): NCBI GI NO: 27229125 NR Description: CoA synthase

SEQ ID NO: 34477 - protein, 188 aa, Zea mays subsp. mays; identical to SEQ ID NO: 29706
  peptide (1)..(188): Ceres Seq. ID no. 12341318
  misc_feature (4)..(179): NCBI GI NO: 34393473 NR Description: bifunctional phosphopantetheine adenylyltransferase dephospho CoA kinase-like
  misc_feature (15)..(179): NCBI GI NO: 15224138 NR Description: hypothetical protein; protein id: At2g18250.1
  misc_feature (18)..(169): NCBI GI NO: 25143409 NR Description: Cytidylyltransferase and Dephospho-CoA kinase (51
  misc_feature (6)..(169): NCBI GI NO: 39589394 NR Description: Hypothetical protein CBG22156
  misc_feature (1)..(168): NCBI GI NO: 31213039 NR Description: ENSANGP00000014315 [Anopheles gambiae]
  misc_feature (31)..(180): NCBI GI NO: 6321716 NR Description: Protein required for cell viability; Ygr277cp
  misc_feature (26)..(168): NCBI GI NO: 20094940 NR Description: Predicted nucleotidyltransferase of the HIGHsuperfamily
  misc_feature (15)..(168): NCBI GI NO: 24658602 NR Description: CG10575-PA [Drosophila melanogaster]
  misc_feature (31)..(169): NCBI GI NO: 20465246 NR Description: bifunctional phosphopantetheine adenylyltransferase / dephospho CoA kinase
  misc_feature (26)..(169): NCBI GI NO: 27229125 NR Description: CoA synthase

SEQ ID NO: 34478 - protein, 123 aa, Zea mays subsp. mays; identical to SEQ ID NO: 29707
  peptide (1)..(123): Ceres Seq. ID no. 12341319
  misc_feature (1)..(114): NCBI GI NO: 34393473 NR Description: bifunctional phosphopantetheine adenylyltransferase dephospho CoA kinase-like
  misc_feature (1)..(114): NCBI GI NO: 15224138 NR Description: hypothetical protein; protein id: At2g18250.1
  misc_feature (1)..(104): NCBI GI NO: 25143409 NR Description: Cytidylyltransferase and Dephospho-CoA kinase (51
  misc_feature (1)..(104): NCBI GI NO: 39589394 NR Description: Hypothetical protein CBG22156
  misc_feature (1)..(103): NCBI GI NO: 31213039 NR Description: ENSANGP00000014315 [Anopheles gambiae]
  misc_feature (1)..(115): NCBI GI NO: 6321716 NR Description: Protein required for cell viability; Ygr277cp
  misc_feature (1)..(103): NCBI GI NO: 20094940 NR Description: Predicted nucleotidyltransferase of the HIGHsuperfamily
  misc_feature (1)..(103): NCBI GI NO: 24658602 NR Description: CG10575-PA [Drosophila melanogaster]
  misc_feature (1)..(104): NCBI GI NO: 20465246 NR Description: bifunctional phosphopantetheine adenylyltransferase / dephospho CoA kinase
  misc_feature (1)..(104): NCBI GI NO: 27229125 NR Description: CoA synthase

SEQ ID NO: 34479 - DNA, 960 bp, Zea mays subsp. mays
  misc_feature (1)..(960): Ceres Seq. ID no. 12344622
gactgccatcttcttccgcttctaacttccgttccgcaaattgaaagctcggcgttgccctgcctcgagctcgaaggactgtccctatacgtcgttgtccagctcctcgcatattgtggcctggtgcagattggagatccgcccggacttggatcgagtcctcctgtctttggacattcattggagtgctccattcattaggcagcatgcctaagataaagacaagccgtgtcaagtatcctgaaggatgggagcttattgaaccaacaatccgtgagttggatgccaaaatgagagaagctgaaaatgatccacatgatgggaagagaaagtgtgaagctctctggcctattttccgcatttctcatcaaaggagccgctacatatacgatctttactacagaaggaaggagatatcacaggagctttatgagttctgcctagaccagggttatgcagaccgtaacctgattgcaaagtggaaaaagccaggttacgagcgcctttgctgcctccggtgcatacagacacgtgaccacaacttcgcaacgacctgcgtctgccgcgtccccaagcatctgagggaggagcaggtgatagaatgtgtccactgcggctgcaggggttgtgccagcggtgactaatcttgtcatcatgtcgttcggctcacgagtcacgactcaccatcgcaaccttaaccggatgaggtgccctgctgtgaacatggatccggctgcggtgattagcattagtttattgggtaaactagtatggggaggactaaatttcctcacgtttggatgtttctaactgttatgtactactatgacgctctctcgtgtcacaattgcttgcgttaaattagtggcgcttttgcattttattgagtctgttaattggctactgttgtgggttctaacaatattaaattttatattttatatttttcaacgatttttc

SEQ ID NO: 34480 - protein, 145 aa, Zea mays subsp. mays
  peptide (1)..(145): Ceres Seq. ID no. 12344623
  misc_feature (1)..(143): Pfam Name: Pfam Description:  G10 protein
  misc_feature (1)..(145): NCBI GI NO: 34908438 NR Description: putative G10 protein
  misc_feature (1)..(145): NCBI GI NO: 15233517 NR Description: G10 - like protein; protein id: At4g21110
  misc_feature (1)..(145): NCBI GI NO: 5852181 NR Description: zhb0011.1 [Oryza sativa (indica cultivar-group)]
  misc_feature (1)..(144): NCBI GI NO: 544359 NR Description: G10 PROTEIN HOMOLOG
  misc_feature (1)..(142): NCBI GI NO: 15029378 NR Description: G10 protein [Branchiostoma belcheri]
  misc_feature (2)..(142): NCBI GI NO: 15128111 NR Description: G10-like protein [Branchiostoma belcheri]
  misc_feature (1)..(142): NCBI GI NO: 120625 NR Description: G10 PROTEIN
  misc_feature (1)..(142): NCBI GI NO: 32171175 NR Description: maternal G10 transcript [Homo sapiens]
  misc_feature (1)..(142): NCBI GI NO: 31207407 NR Description: ENSANGP00000020650 [Anopheles gambiae]
  misc_feature (1)..(140): NCBI GI NO: 16758328 NR Description: maternal G10 transcript [Rattus norvegicus]
MPKIKTSRVKYPEGWELIEPTIRELDAKMREAENDPHDGKRKCEALWPIFRISHQRSRYIYDLYYRRKEISQELYEFCLDQGYADRNLIAKWKKPGYERLCCLRCIQTRDHNFATTCVCRVPKHLREEQVIECVHCGCRGCASGD

SEQ ID NO: 34481 - protein, 117 aa, Zea mays subsp. mays
  peptide (1)..(117): Ceres Seq. ID no. 12344624
  misc_feature (1)..(115): Pfam Name: Pfam Description:  G10 protein
  misc_feature (1)..(117): NCBI GI NO: 34908438 NR Description: putative G10 protein
  misc_feature (1)..(117): NCBI GI NO: 15233517 NR Description: G10 - like protein; protein id: At4g21110
  misc_feature (1)..(117): NCBI GI NO: 5852181 NR Description: zhb0011.1 [Oryza sativa (indica cultivar-group)]
  misc_feature (1)..(116): NCBI GI NO: 544359 NR Description: G10 PROTEIN HOMOLOG
  misc_feature (1)..(114): NCBI GI NO: 15029378 NR Description: G10 protein [Branchiostoma belcheri]
  misc_feature (1)..(114): NCBI GI NO: 15128111 NR Description: G10-like protein [Branchiostoma belcheri]
  misc_feature (1)..(114): NCBI GI NO: 120625 NR Description: G10 PROTEIN
  misc_feature (1)..(114): NCBI GI NO: 32171175 NR Description: maternal G10 transcript [Homo sapiens]
  misc_feature (1)..(114): NCBI GI NO: 31207407 NR Description: ENSANGP00000020650 [Anopheles gambiae]
  misc_feature (1)..(112): NCBI GI NO: 16758328 NR Description: maternal G10 transcript [Rattus norvegicus]
MREAENDPHDGKRKCEALWPIFRISHQRSRYIYDLYYRRKEISQELYEFCLDQGYADRNLIAKWKKPGYERLCCLRCIQTRDHNFATTCVCRVPKHLREEQVIECVHCGCRGCASGD

SEQ ID NO: 34482 - DNA, 2419 bp, Zea mays subsp. mays
  misc_feature (1)..(2419): Ceres Seq. ID no. 12358117
atgtgggctcatctcttccttatcgacgctgtggccgcccagccgcccacgttgcctcctccctgagacaatccccacgccaccgcgcaccggagacgaacctgaggagagaaaaatctgcgcccgtcagtgtgctcgcctacttctacgctccgctcgttcccccaaatagttcctcggcttcgctcccttcccctccctgctccggctccggtttgcacacagtaagaaaagatggcgctgccatccatgagtcttgcggcaaagggtgtgcttcccttctcagcacgtacctcgagtggtgtcacacaaaggccggtgtcagtgaccgcttccttggagcacaaaaccagcgatgccagaaggaagttcctaaaacttgcgcttgggaaccttggagttggactgcccaccttgttgggcgctaagaaagctctcgctgatgagcaaggcgtctcgtcctcgaggatgtcttattcgaggttccttgagtatcttgacaaggatagagtgaagaaggttgatttgtttgagaatgggacaattgctattgtggaggccatttctcctgagcttggtaaccgcatgcaaagagtccgtgtgcagcttcctggtctaagccaggagcttcttcagaagttgagggagaagaacatcgattttgctgctcacagcaaccaggaagactctggttctcttctgttcaaccttattggaaatttggcattcccgcttatccttatcggtggtctgtttttactttcaagaagggcacagggtggcctcggtggacccaatggtcctggctttccccttggttttggtcaatctagggccaagtttcagatggaacccaacactggtgttacatttgatgatgttgctggtgtcgatgaagcgaagcaagacttcatggaagtggttgagttcttgaagaaacccgaaaggttcactgctgttggtgctcgcattcctaagggtgttctgcttgtcggtcctcctgggacgggtaaaactttgcttgccaaggcaattgcaggagaggctggcgtgccatttttctcaatttcaggttctgagtttgtggagatgtttgttggtgttggagcttccagagttcgtgaccttttcaagaaggccaaggagaatgctccttgcatagtgtttgttgatgaaattgatgctgttggaaggcaaagaggtacaggtattggtggtggaaatgatgaaagggagcagactctcaatcaactactaactgagatggatggtttcgagggcaacactggaattattgttattgctgccactaaccgggctgacatcttggattccgctttacttagacctgggcgttttgatagacaggtgtctgtcgacgttcctgatgtacgtggaaggacagagattctaaaagtgcatggtagcaacaagaagtttgattctgatgtttctcttgatgtcatagcaatgagaacacctgggttcagcggagcagacttggcaaaccttctgaatgaagcagccattctggctggaagacggggaaggacagcaatttcttcaaaagagattgatgattctattgacagaattgtagctggtatggaagggactgtgatgacagactggaagagcaaaagtcttgttgcttaccatgaagttgggcatgcaatttgcggaactttgacgcctggccatgatcctgtccaaaaggttaccttagttccaaggggtcaagctcgtggtcttacatggtttatcccgatggatgacccaacactcatctccaggcagcaactttttgccagaattgttggcggccttggtggtagagctgctgaggaggtcatatttggagagcctgaggtgaccactggagctgctggtgacttgcagcaaattactggcttagccaagcagatggttgtgacattcggtatgtctgaaattggtccatggtctctgatggagggtggagcgcagagtggggacgtcatcatgagaatgatggcaaggaactccatgtcagagaagctcgcggaggacattgattcggccgtgaagcagttgtcggatgaggcctacgagatcgctttgaggcacattagaaacaacagggaggccattgacaaaatcgttgaggtgctcattgagaaggagacagtgaccggagacgagttccgggcgatcctttctgagtttgccgagatccctgttgagaaccgggttcccccagccacaccggcggccgcgctcccagcctaaaccctagccttgtaggggaggattttcttgttgtatggtgttcatattttggattcttggtgtacactaactctactaaatctgccggattttcggtacacgacatgtaagatgtaacttactcatggtgaattaatagtaaaatgtaatt

SEQ ID NO: 34483 - protein, 677 aa, Zea mays subsp. mays
  peptide (1)..(677): Ceres Seq. ID no. 12358118
  misc_feature (442)..(653): Pfam Name: Pfam Description:  Peptidase family M41
  misc_feature (16)..(674): NCBI GI NO: 4325041 NR Description: FtsH-like protein Pftf precursor
  misc_feature (13)..(674): NCBI GI NO: 3808101 NR Description: chloroplast protease [Capsicum annuum]
  misc_feature (1)..(657): NCBI GI NO: 6692685 NR Description: F12K11.22 [Arabidopsis thaliana]
  misc_feature (3)..(662): NCBI GI NO: 18417611 NR Description: FtsH protease, putative; protein id: At5g15250.1
  misc_feature (179)..(677): NCBI GI NO: 21954076 NR Description: putative FtsH protease [Arabidopsis thaliana]
  misc_feature (74)..(664): NCBI GI NO: 11465793 NR Description: ORF25 [Porphyra purpurea]
  misc_feature (72)..(661): NCBI GI NO: 11467752 NR Description: hypothetical chloroplast RF25 [Guillardia theta]
  misc_feature (72)..(668): NCBI GI NO: 23123765 NR Description: hypothetical protein [Nostoc punctiforme]
  misc_feature (70)..(668): NCBI GI NO: 37522147 NR Description: cell division protein [Gloeobacter violaceus]
  misc_feature (78)..(659): NCBI GI NO: 16329797 NR Description: cell division protein; FtsH
MALPSMSLAAKGVLPFSARTSSGVTQRPVSVTASLEHKTSDARRKFLKLALGNLGVGLPTLLGAKKALADEQGVSSSRMSYSRFLEYLDKDRVKKVDLFENGTIAIVEAISPELGNRMQRVRVQLPGLSQELLQKLREKNIDFAAHSNQEDSGSLLFNLIGNLAFPLILIGGLFLLSRRAQGGLGGPNGPGFPLGFGQSRAKFQMEPNTGVTFDDVAGVDEAKQDFMEVVEFLKKPERFTAVGARIPKGVLLVGPPGTGKTLLAKAIAGEAGVPFFSISGSEFVEMFVGVGASRVRDLFKKAKENAPCIVFVDEIDAVGRQRGTGIGGGNDEREQTLNQLLTEMDGFEGNTGIIVIAATNRADILDSALLRPGRFDRQVSVDVPDVRGRTEILKVHGSNKKFDSDVSLDVIAMRTPGFSGADLANLLNEAAILAGRRGRTAISSKEIDDSIDRIVAGMEGTVMTDWKSKSLVAYHEVGHAICGTLTPGHDPVQKVTLVPRGQARGLTWFIPMDDPTLISRQQLFARIVGGLGGRAAEEVIFGEPEVTTGAAGDLQQITGLAKQMVVTFGMSEIGPWSLMEGGAQSGDVIMRMMARNSMSEKLAEDIDSAVKQLSDEAYEIALRHIRNNREAIDKIVEVLIEKETVTGDEFRAILSEFAEIPVENRVPPATPAAALPA

SEQ ID NO: 34484 - protein, 672 aa, Zea mays subsp. mays
  peptide (1)..(672): Ceres Seq. ID no. 12358119
  misc_feature (437)..(648): Pfam Name: Pfam Description:  Peptidase family M41
  misc_feature (11)..(669): NCBI GI NO: 4325041 NR Description: FtsH-like protein Pftf precursor
  misc_feature (8)..(669): NCBI GI NO: 3808101 NR Description: chloroplast protease [Capsicum annuum]
  misc_feature (1)..(652): NCBI GI NO: 6692685 NR Description: F12K11.22 [Arabidopsis thaliana]
  misc_feature (1)..(657): NCBI GI NO: 18417611 NR Description: FtsH protease, putative; protein id: At5g15250.1
  misc_feature (174)..(672): NCBI GI NO: 21954076 NR Description: putative FtsH protease [Arabidopsis thaliana]
  misc_feature (69)..(659): NCBI GI NO: 11465793 NR Description: ORF25 [Porphyra purpurea]
  misc_feature (67)..(656): NCBI GI NO: 11467752 NR Description: hypothetical chloroplast RF25 [Guillardia theta]
  misc_feature (67)..(663): NCBI GI NO: 23123765 NR Description: hypothetical protein [Nostoc punctiforme]
  misc_feature (65)..(663): NCBI GI NO: 37522147 NR Description: cell division protein [Gloeobacter violaceus]
  misc_feature (73)..(654): NCBI GI NO: 16329797 NR Description: cell division protein; FtsH
MSLAAKGVLPFSARTSSGVTQRPVSVTASLEHKTSDARRKFLKLALGNLGVGLPTLLGAKKALADEQGVSSSRMSYSRFLEYLDKDRVKKVDLFENGTIAIVEAISPELGNRMQRVRVQLPGLSQELLQKLREKNIDFAAHSNQEDSGSLLFNLIGNLAFPLILIGGLFLLSRRAQGGLGGPNGPGFPLGFGQSRAKFQMEPNTGVTFDDVAGVDEAKQDFMEVVEFLKKPERFTAVGARIPKGVLLVGPPGTGKTLLAKAIAGEAGVPFFSISGSEFVEMFVGVGASRVRDLFKKAKENAPCIVFVDEIDAVGRQRGTGIGGGNDEREQTLNQLLTEMDGFEGNTGIIVIAATNRADILDSALLRPGRFDRQVSVDVPDVRGRTEILKVHGSNKKFDSDVSLDVIAMRTPGFSGADLANLLNEAAILAGRRGRTAISSKEIDDSIDRIVAGMEGTVMTDWKSKSLVAYHEVGHAICGTLTPGHDPVQKVTLVPRGQARGLTWFIPMDDPTLISRQQLFARIVGGLGGRAAEEVIFGEPEVTTGAAGDLQQITGLAKQMVVTFGMSEIGPWSLMEGGAQSGDVIMRMMARNSMSEKLAEDIDSAVKQLSDEAYEIALRHIRNNREAIDKIVEVLIEKETVTGDEFRAILSEFAEIPVENRVPPATPAAALPA

SEQ ID NO: 34485 - protein, 599 aa, Zea mays subsp. mays
  peptide (1)..(599): Ceres Seq. ID no. 12358120
  misc_feature (364)..(575): Pfam Name: Pfam Description:  Peptidase family M41
  misc_feature (1)..(596): NCBI GI NO: 4325041 NR Description: FtsH-like protein Pftf precursor
  misc_feature (1)..(596): NCBI GI NO: 3808101 NR Description: chloroplast protease [Capsicum annuum]
  misc_feature (1)..(579): NCBI GI NO: 6692685 NR Description: F12K11.22 [Arabidopsis thaliana]
  misc_feature (1)..(584): NCBI GI NO: 18417611 NR Description: FtsH protease, putative; protein id: At5g15250.1
  misc_feature (101)..(599): NCBI GI NO: 21954076 NR Description: putative FtsH protease [Arabidopsis thaliana]
  misc_feature (1)..(586): NCBI GI NO: 11465793 NR Description: ORF25 [Porphyra purpurea]
  misc_feature (1)..(583): NCBI GI NO: 11467752 NR Description: hypothetical chloroplast RF25 [Guillardia theta]
  misc_feature (1)..(590): NCBI GI NO: 23123765 NR Description: hypothetical protein [Nostoc punctiforme]
  misc_feature (1)..(590): NCBI GI NO: 37522147 NR Description: cell division protein [Gloeobacter violaceus]
  misc_feature (1)..(581): NCBI GI NO: 16329797 NR Description: cell division protein; FtsH
MSYSRFLEYLDKDRVKKVDLFENGTIAIVEAISPELGNRMQRVRVQLPGLSQELLQKLREKNIDFAAHSNQEDSGSLLFNLIGNLAFPLILIGGLFLLSRRAQGGLGGPNGPGFPLGFGQSRAKFQMEPNTGVTFDDVAGVDEAKQDFMEVVEFLKKPERFTAVGARIPKGVLLVGPPGTGKTLLAKAIAGEAGVPFFSISGSEFVEMFVGVGASRVRDLFKKAKENAPCIVFVDEIDAVGRQRGTGIGGGNDEREQTLNQLLTEMDGFEGNTGIIVIAATNRADILDSALLRPGRFDRQVSVDVPDVRGRTEILKVHGSNKKFDSDVSLDVIAMRTPGFSGADLANLLNEAAILAGRRGRTAISSKEIDDSIDRIVAGMEGTVMTDWKSKSLVAYHEVGHAICGTLTPGHDPVQKVTLVPRGQARGLTWFIPMDDPTLISRQQLFARIVGGLGGRAAEEVIFGEPEVTTGAAGDLQQITGLAKQMVVTFGMSEIGPWSLMEGGAQSGDVIMRMMARNSMSEKLAEDIDSAVKQLSDEAYEIALRHIRNNREAIDKIVEVLIEKETVTGDEFRAILSEFAEIPVENRVPPATPAAALPA

SEQ ID NO: 34486 - DNA, 1984 bp, Zea mays subsp. mays
  misc_feature (1)..(1984): Ceres Seq. ID no. 12365052
atccacaccccggtcggctagtcccaaggctgctgccgccgcctgctgctaggggatcgcttgctttcctcggaccactctgccgaccacatctacaccgcatcaacggtccttccaagtgagctccaatcccctgtctgtagatggagagggtgctcaaggatgacgccgtcgaggagaagggcgagcgcgccaggatggcatcgtttgttggggccatggcaatctcggatttggtgaagaccacattgggcccaaaaggaatggacaagatcctgcaatcaactggcagaggacgtaatgttactgttacaaatgatggggctaccattttgaagtcacttcacattgacaatcctgctgcaaaggtccttgttgacatctcaaaagttcaagatgatgaagttggtgatgggacaacttctgttgttgttctagctggagaacttttgaaggaggctgagaagttaattaacatgaaaattcatccaatgactattattgcaggttacagaatggctctcgagtgtgccagagattctttgctaaaaaagaccatggacaacaaagaaaatacagataaattcagatctgatctcatgaatattgctatgactactcttagttcaaaaatactttcccaagacaaggagtacttcgctgaacttgcggttgatgctgtcttgaggcttaagggtagcaccaacttggaatctattcaaattctgaagaaacctggaggatctcttaaggattcctttttggacgaagggttcattcttgacaagaaaattggcattgggcagcccaaacgcattgagaatgccaaaattttggttgcaaacactgctatggacacagataaagttaagatatatggagcacgggtccgggtggattcaatgtctaaggttgcagatattgaagctgctgagaagcagaaaatgagagagaaagtccaaaagatcatagcacacgggatcaactgttttgtcaacaggcagttaatctataacttccctgaggaactctttgctgacgctggcatacttgcaattgagcatgctgactttgagggcattgaacggctggctcttgttactggtggtgagatcgcatcaacttttgataatccagagtctgttaagcttggtcactgcaaggtcattgaagagattatgattggggaggacaggctaatccatttctctggggttgcgatggggcaggcttgcaccattgtcctaaggggggctagtgagcatgtgctcgatgaggctgagaggtccttgcatgatgccttgtgcgtgttgtcccagacggtaaatgatacccgtgtcttgtttggaggcggatggcctgagatggtgatggccaaagaagtggatgaacttgcaaggaagacccctgggaagaaatcccatgctatcgatgctttctcacatgctctgcaagccatcccaacaatcatagctgacaatgctggtttggatagcgctgatttgatctctcagctacgagctgagcaccacaaagagaactccactgctggaattgatgtcatcacaggcactgttggggacatgcaaaagctagggattcaagagtcgttcaaggtgaagcaggccattcttctgtctgcaacagaggctgcggagatgatcctcagggtcgatgagatcataacctgtgccccgcgcagaagagaggataggatgtgatattacacgctgtttctcgatgtagcgggatgctcattaccctagttttgaggggtattatggtttaggggcgctcaagttggtcagatttcgagtgtttttggcccctaagcaactggtacttgttatttggttgaaacaatcagccttaggtttgtgttctacattctcatgctgtaccgtttggtagcgagttacgtcgtacgatatgcttgttccatattgtttttctattccttttaacgtaagaatgggcttgtctt

SEQ ID NO: 34487 - protein, 525 aa, Zea mays subsp. mays
  peptide (1)..(525): Ceres Seq. ID no. 12365053
  misc_feature (28)..(518): Pfam Name: Pfam Description:  TCP-1/cpn60 chaperonin family
  misc_feature (1)..(525): NCBI GI NO: 15242093 NR Description: T-complex protein 1, beta subunit
  misc_feature (4)..(521): NCBI GI NO: 27503862 NR Description: Similar to chaperonin subunit 2 (beta)
  misc_feature (4)..(521): NCBI GI NO: 5453603 NR Description: chaperonin containing TCP1, subunit 2
  misc_feature (4)..(521): NCBI GI NO: 22654291 NR Description: T-complex protein 1, beta subunit
  misc_feature (4)..(521): NCBI GI NO: 6671700 NR Description: chaperonin subunit 2 (beta) [Mus musculus]
  misc_feature (3)..(522): NCBI GI NO: 17066722 NR Description: CCT chaperonin beta subunit
  misc_feature (4)..(500): NCBI GI NO: 21105454 NR Description: chaperonin-containing TCP-1 complex beta chain
  misc_feature (3)..(524): NCBI GI NO: 18858175 NR Description: CG7033-PA [Drosophila melanogaster]
  misc_feature (3)..(524): NCBI GI NO: 24640724 NR Description: CG7033-PB [Drosophila melanogaster]
  misc_feature (1)..(523): NCBI GI NO: 27769226 NR Description: Similar to chaperonin subunit 7 (eta)
MERVLKDDAVEEKGERARMASFVGAMAISDLVKTTLGPKGMDKILQSTGRGRNVTVTNDGATILKSLHIDNPAAKVLVDISKVQDDEVGDGTTSVVVLAGELLKEAEKLINMKIHPMTIIAGYRMALECARDSLLKKTMDNKENTDKFRSDLMNIAMTTLSSKILSQDKEYFAELAVDAVLRLKGSTNLESIQILKKPGGSLKDSFLDEGFILDKKIGIGQPKRIENAKILVANTAMDTDKVKIYGARVRVDSMSKVADIEAAEKQKMREKVQKIIAHGINCFVNRQLIYNFPEELFADAGILAIEHADFEGIERLALVTGGEIASTFDNPESVKLGHCKVIEEIMIGEDRLIHFSGVAMGQACTIVLRGASEHVLDEAERSLHDALCVLSQTVNDTRVLFGGGWPEMVMAKEVDELARKTPGKKSHAIDAFSHALQAIPTIIADNAGLDSADLISQLRAEHHKENSTAGIDVITGTVGDMQKLGIQESFKVKQAILLSATEAAEMILRVDEIITCAPRRREDRM

SEQ ID NO: 34488 - protein, 507 aa, Zea mays subsp. mays
  peptide (1)..(507): Ceres Seq. ID no. 12365054
  misc_feature (10)..(500): Pfam Name: Pfam Description:  TCP-1/cpn60 chaperonin family
  misc_feature (1)..(507): NCBI GI NO: 15242093 NR Description: T-complex protein 1, beta subunit
  misc_feature (1)..(503): NCBI GI NO: 27503862 NR Description: Similar to chaperonin subunit 2 (beta)
  misc_feature (1)..(503): NCBI GI NO: 5453603 NR Description: chaperonin containing TCP1, subunit 2
  misc_feature (1)..(503): NCBI GI NO: 22654291 NR Description: T-complex protein 1, beta subunit
  misc_feature (1)..(503): NCBI GI NO: 6671700 NR Description: chaperonin subunit 2 (beta) [Mus musculus]
  misc_feature (1)..(504): NCBI GI NO: 17066722 NR Description: CCT chaperonin beta subunit
  misc_feature (1)..(482): NCBI GI NO: 21105454 NR Description: chaperonin-containing TCP-1 complex beta chain
  misc_feature (1)..(506): NCBI GI NO: 18858175 NR Description: CG7033-PA [Drosophila melanogaster]
  misc_feature (1)..(506): NCBI GI NO: 24640724 NR Description: CG7033-PB [Drosophila melanogaster]
  misc_feature (1)..(505): NCBI GI NO: 27769226 NR Description: Similar to chaperonin subunit 7 (eta)
MASFVGAMAISDLVKTTLGPKGMDKILQSTGRGRNVTVTNDGATILKSLHIDNPAAKVLVDISKVQDDEVGDGTTSVVVLAGELLKEAEKLINMKIHPMTIIAGYRMALECARDSLLKKTMDNKENTDKFRSDLMNIAMTTLSSKILSQDKEYFAELAVDAVLRLKGSTNLESIQILKKPGGSLKDSFLDEGFILDKKIGIGQPKRIENAKILVANTAMDTDKVKIYGARVRVDSMSKVADIEAAEKQKMREKVQKIIAHGINCFVNRQLIYNFPEELFADAGILAIEHADFEGIERLALVTGGEIASTFDNPESVKLGHCKVIEEIMIGEDRLIHFSGVAMGQACTIVLRGASEHVLDEAERSLHDALCVLSQTVNDTRVLFGGGWPEMVMAKEVDELARKTPGKKSHAIDAFSHALQAIPTIIADNAGLDSADLISQLRAEHHKENSTAGIDVITGTVGDMQKLGIQESFKVKQAILLSATEAAEMILRVDEIITCAPRRREDRM

SEQ ID NO: 34489 - protein, 500 aa, Zea mays subsp. mays
  peptide (1)..(500): Ceres Seq. ID no. 12365055
  misc_feature (3)..(493): Pfam Name: Pfam Description:  TCP-1/cpn60 chaperonin family
  misc_feature (1)..(500): NCBI GI NO: 15242093 NR Description: T-complex protein 1, beta subunit
  misc_feature (1)..(496): NCBI GI NO: 27503862 NR Description: Similar to chaperonin subunit 2 (beta)
  misc_feature (1)..(496): NCBI GI NO: 5453603 NR Description: chaperonin containing TCP1, subunit 2
  misc_feature (1)..(496): NCBI GI NO: 22654291 NR Description: T-complex protein 1, beta subunit
  misc_feature (1)..(496): NCBI GI NO: 6671700 NR Description: chaperonin subunit 2 (beta) [Mus musculus]
  misc_feature (1)..(497): NCBI GI NO: 17066722 NR Description: CCT chaperonin beta subunit
  misc_feature (1)..(475): NCBI GI NO: 21105454 NR Description: chaperonin-containing TCP-1 complex beta chain
  misc_feature (1)..(499): NCBI GI NO: 18858175 NR Description: CG7033-PA [Drosophila melanogaster]
  misc_feature (1)..(499): NCBI GI NO: 24640724 NR Description: CG7033-PB [Drosophila melanogaster]
  misc_feature (1)..(498): NCBI GI NO: 27769226 NR Description: Similar to chaperonin subunit 7 (eta)
MAISDLVKTTLGPKGMDKILQSTGRGRNVTVTNDGATILKSLHIDNPAAKVLVDISKVQDDEVGDGTTSVVVLAGELLKEAEKLINMKIHPMTIIAGYRMALECARDSLLKKTMDNKENTDKFRSDLMNIAMTTLSSKILSQDKEYFAELAVDAVLRLKGSTNLESIQILKKPGGSLKDSFLDEGFILDKKIGIGQPKRIENAKILVANTAMDTDKVKIYGARVRVDSMSKVADIEAAEKQKMREKVQKIIAHGINCFVNRQLIYNFPEELFADAGILAIEHADFEGIERLALVTGGEIASTFDNPESVKLGHCKVIEEIMIGEDRLIHFSGVAMGQACTIVLRGASEHVLDEAERSLHDALCVLSQTVNDTRVLFGGGWPEMVMAKEVDELARKTPGKKSHAIDAFSHALQAIPTIIADNAGLDSADLISQLRAEHHKENSTAGIDVITGTVGDMQKLGIQESFKVKQAILLSATEAAEMILRVDEIITCAPRRREDRM

SEQ ID NO: 34490 - DNA, 2671 bp, Zea mays subsp. mays
  misc_feature (1)..(2671): Ceres Seq. ID no. 12414664
gcatctcgcattctcgccggtgctgctgcaattcacgccacccccggccaaccgcctgaaaactacctctgccgccggcgccgccatccccaacatggcgagccaaggggagccctcggcctctgcttccgatccgaaggagaagaaggactactcgacggcgatactagagaggaaaaagtcaccgaaccgccttgtcgtcgacgaggccaccaacgacgataactccgtcgtcgcactgcaccctgacaccatggagaggctgcagctcttccgcggcgatactgtgctcctcaagggtaagaagaggaaagacactatttgcattgtccttgcggatgagacctgtgaggagccaaaggttcggatgaacaaggttgtccgccagaacctgagggtgaggcttggtgatgtggtttctgtccaccagtgccaggatgtgaaatatgggaagcgtgtgcacattcttccaattgatgatacagttgaaggcattacagggaacctgtttgatgccttcttgaaaccatacttcctagaagcatacaggcccgtgaggaaaggagaccttttccttgtcaggggtggaatgagaagcgtggaattcaaagtgatagagactgacccttctgaatattgtatcgttgccccagatactgaaatattttgtgatggggagcctattaagagagaggatgaggagcgtcttgatgaagttggttatgatgatgttggtggagttagaaagcaaatggcccaaatcagagagcttgttgagcttccactacgccatcctcagcttttcaaatctattggtgtgaagccaccaaagggcatattgctgtatgggccacctggttctggaaagactcttattgctcgtgctgttgcaaatgagactggagcctttttctttctgatcaatggcccagagattatgtcgaagttagcaggagagagtgagagcaatctcagaaaggcatttgaagaagcagagaagaatgctccatctatcattttcattgatgaaattgattccattgcacccaagagagaaaagaccaatggagaagtagaacgtcgtattgtttcacagctactgactcttatggatggactcaaatctcgttcccatgttattgttatgggtgctacaaaccggccaaacagcattgatcctgctcttagaagatttggaaggtttgaccgggaaattgacattggagttcctgatgaagttggccggcttgaggttctccgtattcacactaagaacatgaagctagctgaagatgttaatttggaactcatttcaaaggatacccatggatacgttggtgctgatcttgctgccctttgcactgaggctgctcttcagtgcattcgtgagaagatggacatcatagatcttgaggatgagacaatagatgcagagatattgaactcgatggctgttacaaatgaccatttcaagactgcgcttggaacaagcaacccatctgctctccgtgaaactgttgttgaagtcccaaatgtcttgggaggatattggtgggctggagaatgtcaagagagagctccaggagactgttcaatatcctgtggagcatccagagaagttcgagaagtttggcatgtctccatccaaaggagttctgttttatggtcctcctggttgtggtaaaaccttgttggcaaaggcaattgccaatgagtgccaagctaacttcatcagtgtcaagggtcctgaattgcttaccatgtggtttggtgagagtgaagccaacgtccgcgaaatttttgataaggctcgccaatctgctccttgtgtcctcttctttgatgagcttgactcaattgcaactcagagaggaagtagtgtgggtgatgctgggggcgcggctgatagagtgcttaatcagctactgaccgagatggatggcatgaacgccaagaaaactgtgttcattattggtgctacaaacaggcctgacatcattgatcctgctcttctgaggccagggcgtcttaaccagctgatctacattccactgcctgatgagcagtctaggctccagatcttcaaggcctgcctaaggaagtcccctgtggcaaaggatgtggacctgaatgctcttgctaagtacacacaagggttcagtggagcagatatcacagaaatttgccagcgtgcgtgcaaatatgcaatcagagagaacattgagaaggacattgagagggaaaggcggatgaaggacaaccctgaggcgatggaggaagatgaagtggacgagattgccgagatcaaggcagctcatttcgaggagtctatgaagtattctcggcgcagtgtcagtgatgctgatatccgcaagtaccaggcgttcgcccagacgttgcagcagtcccgtgggttcggcagtgagttccgcttctcagagcaatcggcgacagctagtgctgctgcagccgatccgtttgcttctgccggtgccgcggctgacgatgacgatctatacagctaggtgtccttttgggttggttctgggttgtgcaatatcagtctcatcagtcatctgtttaaaactctgagtatacttagacacgggatgtcatgcaatgatatttgttttccgtacatttggacgttgagataatgcctgtttatttt

SEQ ID NO: 34491 - protein, 560 aa, Zea mays subsp. mays
  peptide (1)..(560): Ceres Seq. ID no. 12414665
  misc_feature (278)..(462): Pfam Name: AAA Pfam Description: ATPase family associated with various cellular activities
  misc_feature (58)..(331): NCBI GI NO: 23612274 NR Description: cell division cycle protein 48 homologue, putative
  misc_feature (352)..(512): NCBI GI NO: 23612274 NR Description: cell division cycle protein 48 homologue, putative
  misc_feature (31)..(495): NCBI GI NO: 23612492 NR Description: cell division cycle ATPase, putative
  misc_feature (466)..(512): NCBI GI NO: 23612492 NR Description: cell division cycle ATPase, putative
  misc_feature (30)..(473): NCBI GI NO: 23481659 NR Description: putative cell division cycle ATPase
  misc_feature (65)..(512): NCBI GI NO: 15669345 NR Description: cell division control protein 48
  misc_feature (72)..(512): NCBI GI NO: 15790615 NR Description: cell division cycle protein; Cdc48c
  misc_feature (167)..(512): NCBI GI NO: 20090664 NR Description: hypothetical protein
  misc_feature (167)..(512): NCBI GI NO: 21226350 NR Description: Cell division cycle protein
  misc_feature (204)..(462): NCBI GI NO: 20093924 NR Description: ATPase of the AAA+ class
HLAFSPVLLQFTPPPANRLKTTSAAGAAIPNMASQGEPSASASDPKEKKDYSTAILERKKSPNRLVVDEATNDDNSVVALHPDTMERLQLFRGDTVLLKGKKRKDTICIVLADETCEEPKVRMNKVVRQNLRVRLGDVVSVHQCQDVKYGKRVHILPIDDTVEGITGNLFDAFLKPYFLEAYRPVRKGDLFLVRGGMRSVEFKVIETDPSEYCIVAPDTEIFCDGEPIKREDEERLDEVGYDDVGGVRKQMAQIRELVELPLRHPQLFKSIGVKPPKGILLYGPPGSGKTLIARAVANETGAFFFLINGPEIMSKLAGESESNLRKAFEEAEKNAPSIIFIDEIDSIAPKREKTNGEVERRIVSQLLTLMDGLKSRSHVIVMGATNRPNSIDPALRRFGRFDREIDIGVPDEVGRLEVLRIHTKNMKLAEDVNLELISKDTHGYVGADLAALCTEAALQCIREKMDIIDLEDETIDAEILNSMAVTNDHFKTALGTSNPSALRETVVEVPNVLGGYWWAGECQERAPGDCSISCGASREVREVWHVSIQRSSVLWSSWLW

SEQ ID NO: 34492 - protein, 529 aa, Zea mays subsp. mays
  peptide (1)..(529): Ceres Seq. ID no. 12414666
  misc_feature (247)..(431): Pfam Name: AAA Pfam Description: ATPase family associated with various cellular activities
  misc_feature (27)..(300): NCBI GI NO: 23612274 NR Description: cell division cycle protein 48 homologue, putative
  misc_feature (321)..(481): NCBI GI NO: 23612274 NR Description: cell division cycle protein 48 homologue, putative
  misc_feature (1)..(464): NCBI GI NO: 23612492 NR Description: cell division cycle ATPase, putative
  misc_feature (435)..(481): NCBI GI NO: 23612492 NR Description: cell division cycle ATPase, putative
  misc_feature (1)..(442): NCBI GI NO: 23481659 NR Description: putative cell division cycle ATPase
  misc_feature (34)..(481): NCBI GI NO: 15669345 NR Description: cell division control protein 48
  misc_feature (41)..(481): NCBI GI NO: 15790615 NR Description: cell division cycle protein; Cdc48c
  misc_feature (136)..(481): NCBI GI NO: 20090664 NR Description: hypothetical protein
  misc_feature (136)..(481): NCBI GI NO: 21226350 NR Description: Cell division cycle protein
  misc_feature (173)..(431): NCBI GI NO: 20093924 NR Description: ATPase of the AAA+ class
MASQGEPSASASDPKEKKDYSTAILERKKSPNRLVVDEATNDDNSVVALHPDTMERLQLFRGDTVLLKGKKRKDTICIVLADETCEEPKVRMNKVVRQNLRVRLGDVVSVHQCQDVKYGKRVHILPIDDTVEGITGNLFDAFLKPYFLEAYRPVRKGDLFLVRGGMRSVEFKVIETDPSEYCIVAPDTEIFCDGEPIKREDEERLDEVGYDDVGGVRKQMAQIRELVELPLRHPQLFKSIGVKPPKGILLYGPPGSGKTLIARAVANETGAFFFLINGPEIMSKLAGESESNLRKAFEEAEKNAPSIIFIDEIDSIAPKREKTNGEVERRIVSQLLTLMDGLKSRSHVIVMGATNRPNSIDPALRRFGRFDREIDIGVPDEVGRLEVLRIHTKNMKLAEDVNLELISKDTHGYVGADLAALCTEAALQCIREKMDIIDLEDETIDAEILNSMAVTNDHFKTALGTSNPSALRETVVEVPNVLGGYWWAGECQERAPGDCSISCGASREVREVWHVSIQRSSVLWSSWLW

SEQ ID NO: 34493 - protein, 476 aa, Zea mays subsp. mays
  peptide (1)..(476): Ceres Seq. ID no. 12414667
  misc_feature (194)..(378): Pfam Name: AAA Pfam Description: ATPase family associated with various cellular activities
  misc_feature (1)..(247): NCBI GI NO: 23612274 NR Description: cell division cycle protein 48 homologue, putative
  misc_feature (268)..(428): NCBI GI NO: 23612274 NR Description: cell division cycle protein 48 homologue, putative
  misc_feature (1)..(411): NCBI GI NO: 23612492 NR Description: cell division cycle ATPase, putative
  misc_feature (382)..(428): NCBI GI NO: 23612492 NR Description: cell division cycle ATPase, putative
  misc_feature (1)..(389): NCBI GI NO: 23481659 NR Description: putative cell division cycle ATPase
  misc_feature (1)..(428): NCBI GI NO: 15669345 NR Description: cell division control protein 48
  misc_feature (1)..(428): NCBI GI NO: 15790615 NR Description: cell division cycle protein; Cdc48c
  misc_feature (83)..(428): NCBI GI NO: 20090664 NR Description: hypothetical protein
  misc_feature (83)..(428): NCBI GI NO: 21226350 NR Description: Cell division cycle protein
  misc_feature (120)..(378): NCBI GI NO: 20093924 NR Description: ATPase of the AAA+ class
MERLQLFRGDTVLLKGKKRKDTICIVLADETCEEPKVRMNKVVRQNLRVRLGDVVSVHQCQDVKYGKRVHILPIDDTVEGITGNLFDAFLKPYFLEAYRPVRKGDLFLVRGGMRSVEFKVIETDPSEYCIVAPDTEIFCDGEPIKREDEERLDEVGYDDVGGVRKQMAQIRELVELPLRHPQLFKSIGVKPPKGILLYGPPGSGKTLIARAVANETGAFFFLINGPEIMSKLAGESESNLRKAFEEAEKNAPSIIFIDEIDSIAPKREKTNGEVERRIVSQLLTLMDGLKSRSHVIVMGATNRPNSIDPALRRFGRFDREIDIGVPDEVGRLEVLRIHTKNMKLAEDVNLELISKDTHGYVGADLAALCTEAALQCIREKMDIIDLEDETIDAEILNSMAVTNDHFKTALGTSNPSALRETVVEVPNVLGGYWWAGECQERAPGDCSISCGASREVREVWHVSIQRSSVLWSSWLW

SEQ ID NO: 34494 - DNA, 1112 bp, Zea mays subsp. mays
  misc_feature (1)..(1112): Ceres Seq. ID no. 13493435
gtcttctcgcgatggggagcaccggcgacacgacgatggccgaggcggaggcgccggcgccggtgggtgactacgagctgctggagcgcctgggggggcgtcccccgtacacgtccgtgtggcgagcggtctcccggtccaccggcacgcccgtggctgtgaagcaggtgcggctcaccggcctccccgcgcgcctccgcgacagcctcgactgcgaggtccgcttcctcgccgccgtcagccaccccaacatcatccgcctcatcgacgtcgtccagacccagagctgcctttacctcgtcctggagctctgcgagggcggggacctggcggccttcatccggcgcaatgggagcgtagacgagcgcgtggccagaaattttatgaaacagatcggagctggcttacaagtgctgcaccggcaccatgtcgtccaccgggacttgaaacctcagaatatcctgctctcttctccgagaagcagcgatgcgatcctcaagatatctgattttggtcttgcaaggtttcttggacccggggagtacgcagacacatcttgtggttcttgtttgtacatggccccagaagttgctgtttcaaaagtacaatgacaaggtagacatgtggagcatcggcgcgatcctatttgagctcttgaatggctacccgccattctatggcagaagcaacgtgcagctgcttcagtacatcaacagaagcacgtctctcccgttctcggaaccactggcgtctaccttaggccccgattgtgtcgatatatgcaccaggctactatgcactaatccagtgaagcgtctgtccttccaagagttcttggaccaccgcttcttcagagtatgagtgcccaagccatggggaccaccgggcagcgacatgatctgaagaacatcaagaagtttcttgtccttggagtgctgactgactctgttataaagcgttcagaaattgatgcccagtgctcgtcgtcttggttttctgttcgcgtccatttccttctccaaagagccatgtggccaacgtttcaatctgttgtgatctggtctgtactgtttcaatctgctaacagtaggagttttaaagatatttagtcc

SEQ ID NO: 34495 - protein, 202 aa, Zea mays subsp. mays
  peptide (1)..(202): Ceres Seq. ID no. 13493436
  misc_feature (15)..(196): NCBI GI NO: 38345825 NR Description: OSJNBa0070M12.8
  misc_feature (37)..(196): NCBI GI NO: 7770326 NR Description: F27J15.5 [Arabidopsis thaliana]
  misc_feature (37)..(196): NCBI GI NO: 30694500 NR Description: protein kinase family [Arabidopsis thaliana]
  misc_feature (16)..(196): NCBI GI NO: 18412205 NR Description: protein kinase family [Arabidopsis thaliana]
  misc_feature (16)..(196): NCBI GI NO: 11358841 NR Description: serine/threonine- protein kinase-like protein -Arabidopsis thaliana
  misc_feature (21)..(196): NCBI GI NO: 30687274 NR Description: protein kinase family [Arabidopsis thaliana]
  misc_feature (21)..(196): NCBI GI NO: 20268768 NR Description: unknown protein [Arabidopsis thaliana]
  misc_feature (21)..(196): NCBI GI NO: 30693945 NR Description: protein kinase family [Arabidopsis thaliana]
  misc_feature (21)..(196): NCBI GI NO: 25287591 NR Description: probable protein kinase
  misc_feature (61)..(196): NCBI GI NO: 26452168 NR Description: unknown protein [Arabidopsis thaliana]
LLAMGSTGDTTMAEAEAPAPVGDYELLERLGGRPPYTSVWRAVSRSTGTPVAVKQVRLTGLPARLRDSLDCEVRFLAAVSHPNIIRLIDVVQTQSCLYLVLELCEGGDLAAFIRRNGSVDERVARNFMKQIGAGLQVLHRHHVVHRDLKPQNILLSSPRSSDAILKISDFGLARFLGPGEYADTSCGSCLYMAPEVAVSKVQ

SEQ ID NO: 34496 - protein, 199 aa, Zea mays subsp. mays
  peptide (1)..(199): Ceres Seq. ID no. 13493437
  misc_feature (12)..(193): NCBI GI NO: 38345825 NR Description: OSJNBa0070M12.8
  misc_feature (34)..(193): NCBI GI NO: 7770326 NR Description: F27J15.5 [Arabidopsis thaliana]
  misc_feature (34)..(193): NCBI GI NO: 30694500 NR Description: protein kinase family [Arabidopsis thaliana]
  misc_feature (13)..(193): NCBI GI NO: 18412205 NR Description: protein kinase family [Arabidopsis thaliana]
  misc_feature (13)..(193): NCBI GI NO: 11358841 NR Description: serine/threonine- protein kinase-like protein -Arabidopsis thaliana
  misc_feature (18)..(193): NCBI GI NO: 30687274 NR Description: protein kinase family [Arabidopsis thaliana]
  misc_feature (18)..(193): NCBI GI NO: 20268768 NR Description: unknown protein [Arabidopsis thaliana]
  misc_feature (18)..(193): NCBI GI NO: 30693945 NR Description: protein kinase family [Arabidopsis thaliana]
  misc_feature (18)..(193): NCBI GI NO: 25287591 NR Description: probable protein kinase
  misc_feature (58)..(193): NCBI GI NO: 26452168 NR Description: unknown protein [Arabidopsis thaliana]
MGSTGDTTMAEAEAPAPVGDYELLERLGGRPPYTSVWRAVSRSTGTPVAVKQVRLTGLPARLRDSLDCEVRFLAAVSHPNIIRLIDVVQTQSCLYLVLELCEGGDLAAFIRRNGSVDERVARNFMKQIGAGLQVLHRHHVVHRDLKPQNILLSSPRSSDAILKISDFGLARFLGPGEYADTSCGSCLYMAPEVAVSKVQ

SEQ ID NO: 34497 - protein, 191 aa, Zea mays subsp. mays
  peptide (1)..(191): Ceres Seq. ID no. 13493438
  misc_feature (4)..(185): NCBI GI NO: 38345825 NR Description: OSJNBa0070M12.8
  misc_feature (26)..(185): NCBI GI NO: 7770326 NR Description: F27J15.5 [Arabidopsis thaliana]
  misc_feature (26)..(185): NCBI GI NO: 30694500 NR Description: protein kinase family [Arabidopsis thaliana]
  misc_feature (5)..(185): NCBI GI NO: 18412205 NR Description: protein kinase family [Arabidopsis thaliana]
  misc_feature (5)..(185): NCBI GI NO: 11358841 NR Description: serine/threonine- protein kinase-like protein -Arabidopsis thaliana
  misc_feature (10)..(185): NCBI GI NO: 30687274 NR Description: protein kinase family [Arabidopsis thaliana]
  misc_feature (10)..(185): NCBI GI NO: 20268768 NR Description: unknown protein [Arabidopsis thaliana]
  misc_feature (10)..(185): NCBI GI NO: 30693945 NR Description: protein kinase family [Arabidopsis thaliana]
  misc_feature (10)..(185): NCBI GI NO: 25287591 NR Description: probable protein kinase
  misc_feature (50)..(185): NCBI GI NO: 26452168 NR Description: unknown protein [Arabidopsis thaliana]
MAEAEAPAPVGDYELLERLGGRPPYTSVWRAVSRSTGTPVAVKQVRLTGLPARLRDSLDCEVRFLAAVSHPNIIRLIDVVQTQSCLYLVLELCEGGDLAAFIRRNGSVDERVARNFMKQIGAGLQVLHRHHVVHRDLKPQNILLSSPRSSDAILKISDFGLARFLGPGEYADTSCGSCLYMAPEVAVSKVQ

SEQ ID NO: 34498 - DNA, 1229 bp, Zea mays subsp. mays
  misc_feature (1)..(1229): Ceres Seq. ID no. 12414660
aaattccacccctcgccgccatctccgtctctctctctcccgcaaccaagcagttcaactcacacccgaagcggcgccgctagggtttgctccgacagccgcgaaacctagtccttactgcgccctcccacagaggccgtcattcactaatctagctgctacgcttcgcttcccactccgattgggagctagggtttagcttatctctgagctcagcttcgggtcgcggcacgcggcatggcggggtacggggaagagaaccagaacgccatgaacgggtacgaggaggaagaggaggaagaagaggttgaagaagtcgaggaggtgtacgaagaggaggaggagggggacggggagggggaaggagacgagggggcagccgccgaggcagcagcgatggcggccgagacgagaagtgtcgatggaggccggggcctagcggaggccgttgggaatgttgatgccggaggcgaggatgagagggatgcagattctagcggcggtgacgcttcggggaaggttttcgtagggggtgtagcctgggagacaactgaagaaacattcacaaagcattttcagaagtatggagctataactgattctgtgatcatgaaggacaagcatactaggatgcctcgtggatttggatttgttacattttccgatccgtctgtgcttgacagggttctagaggatgaacatgtcatagatggaaggacggttgaagtcaaaaggactgttccaaaagagctgtcgtcaaaagatggccctaagacaaaaaagatctttgtgggtggtatcccaccatctcttaccgaagataaattaaaggagcacttctcatcgtacgggaaggtggttgagcatcagattatgcttgatcatagcactggacgttcacggggctttggatttgtcacatttgaaagcgaggatgctgttgaaagggttatgtcagaggggagaatgcatgatcttggagggaagcaggtcacttctttatctctcattgtgttctgtgttggtaaatatcattggcatgtaagcagttctgcagttgtcaggttcaattagcaaatggtctaacctggcatgttgtctataattttgttgttgttaacttagttttggttagtaatcatgaagatgcgattctgtctgtacaatataactgatgtgtctgggagtttttgaacattgatcattgtttgtttagtactttctcttcc

SEQ ID NO: 34499 - protein, 278 aa, Zea mays subsp. mays
  peptide (1)..(278): Ceres Seq. ID no. 12414661
  misc_feature (183)..(252): Pfam Name: a.k.a. RRM, RBD, or RNP domain Pfam Description: RNA recognition motif.
  misc_feature (57)..(252): NCBI GI NO: 15220810 NR Description: RRM-containing RNA-binding protein, putative
  misc_feature (77)..(253): NCBI GI NO: 30682550 NR Description: RNA recognition motif (RRM)-containing protein
  misc_feature (77)..(252): NCBI GI NO: 30682553 NR Description: RNA recognition motif (RRM)-containing protein
  misc_feature (75)..(252): NCBI GI NO: 15242719 NR Description: RRM-containing RNA-binding protein, putative
  misc_feature (94)..(252): NCBI GI NO: 8778468 NR Description: F1L3.34 [Arabidopsis thaliana]
  misc_feature (76)..(252): NCBI GI NO: 35215091 NR Description: putative heterogeneous nuclear ribonucleoprotein A3homolog 1
  misc_feature (93)..(252): NCBI GI NO: 22328624 NR Description: heterogeneous nuclear ribonucleoprotein
  misc_feature (93)..(252): NCBI GI NO: 9758187 NR Description: RNA-binding protein-like [Arabidopsis thaliana]
  misc_feature (93)..(252): NCBI GI NO: 18423760 NR Description: heterogeneous nuclear ribonucleoprotein
  misc_feature (93)..(252): NCBI GI NO: 22531168 NR Description: RNA-binding protein-like [Arabidopsis thaliana]
MAGYGEENQNAMNGYEEEEEEEEVEEVEEVYEEEEEGDGEGEGDEGAAAEAAAMAAETRSVDGGRGLAEAVGNVDAGGEDERDADSSGGDASGKVFVGGVAWETTEETFTKHFQKYGAITDSVIMKDKHTRMPRGFGFVTFSDPSVLDRVLEDEHVIDGRTVEVKRTVPKELSSKDGPKTKKIFVGGIPPSLTEDKLKEHFSSYGKVVEHQIMLDHSTGRSRGFGFVTFESEDAVERVMSEGRMHDLGGKQVTSLSLIVFCVGKYHWHVSSSAVVRFN

SEQ ID NO: 34500 - protein, 267 aa, Zea mays subsp. mays
  peptide (1)..(267): Ceres Seq. ID no. 12414662
  misc_feature (172)..(241): Pfam Name: a.k.a. RRM, RBD, or RNP domain Pfam Description: RNA recognition motif.
  misc_feature (46)..(241): NCBI GI NO: 15220810 NR Description: RRM-containing RNA-binding protein, putative
  misc_feature (66)..(242): NCBI GI NO: 30682550 NR Description: RNA recognition motif (RRM)-containing protein
  misc_feature (66)..(241): NCBI GI NO: 30682553 NR Description: RNA recognition motif (RRM)-containing protein
  misc_feature (64)..(241): NCBI GI NO: 15242719 NR Description: RRM-containing RNA-binding protein, putative
  misc_feature (83)..(241): NCBI GI NO: 8778468 NR Description: F1L3.34 [Arabidopsis thaliana]
  misc_feature (65)..(241): NCBI GI NO: 35215091 NR Description: putative heterogeneous nuclear ribonucleoprotein A3homolog 1
  misc_feature (82)..(241): NCBI GI NO: 22328624 NR Description: heterogeneous nuclear ribonucleoprotein
  misc_feature (82)..(241): NCBI GI NO: 9758187 NR Description: RNA-binding protein-like [Arabidopsis thaliana]
  misc_feature (82)..(241): NCBI GI NO: 18423760 NR Description: heterogeneous nuclear ribonucleoprotein
  misc_feature (82)..(241): NCBI GI NO: 22531168 NR Description: RNA-binding protein-like [Arabidopsis thaliana]
MNGYEEEEEEEEVEEVEEVYEEEEEGDGEGEGDEGAAAEAAAMAAETRSVDGGRGLAEAVGNVDAGGEDERDADSSGGDASGKVFVGGVAWETTEETFTKHFQKYGAITDSVIMKDKHTRMPRGFGFVTFSDPSVLDRVLEDEHVIDGRTVEVKRTVPKELSSKDGPKTKKIFVGGIPPSLTEDKLKEHFSSYGKVVEHQIMLDHSTGRSRGFGFVTFESEDAVERVMSEGRMHDLGGKQVTSLSLIVFCVGKYHWHVSSSAVVRFN

SEQ ID NO: 34501 - protein, 225 aa, Zea mays subsp. mays
  peptide (1)..(225): Ceres Seq. ID no. 12414663
  misc_feature (130)..(199): Pfam Name: a.k.a. RRM, RBD, or RNP domain Pfam Description: RNA recognition motif.
  misc_feature (4)..(199): NCBI GI NO: 15220810 NR Description: RRM-containing RNA-binding protein, putative
  misc_feature (24)..(200): NCBI GI NO: 30682550 NR Description: RNA recognition motif (RRM)-containing protein
  misc_feature (24)..(199): NCBI GI NO: 30682553 NR Description: RNA recognition motif (RRM)-containing protein
  misc_feature (22)..(199): NCBI GI NO: 15242719 NR Description: RRM-containing RNA-binding protein, putative
  misc_feature (41)..(199): NCBI GI NO: 8778468 NR Description: F1L3.34 [Arabidopsis thaliana]
  misc_feature (23)..(199): NCBI GI NO: 35215091 NR Description: putative heterogeneous nuclear ribonucleoprotein A3homolog 1
  misc_feature (40)..(199): NCBI GI NO: 22328624 NR Description: heterogeneous nuclear ribonucleoprotein
  misc_feature (40)..(199): NCBI GI NO: 9758187 NR Description: RNA-binding protein-like [Arabidopsis thaliana]
  misc_feature (40)..(199): NCBI GI NO: 18423760 NR Description: heterogeneous nuclear ribonucleoprotein
  misc_feature (40)..(199): NCBI GI NO: 22531168 NR Description: RNA-binding protein-like [Arabidopsis thaliana]
MAAETRSVDGGRGLAEAVGNVDAGGEDERDADSSGGDASGKVFVGGVAWETTEETFTKHFQKYGAITDSVIMKDKHTRMPRGFGFVTFSDPSVLDRVLEDEHVIDGRTVEVKRTVPKELSSKDGPKTKKIFVGGIPPSLTEDKLKEHFSSYGKVVEHQIMLDHSTGRSRGFGFVTFESEDAVERVMSEGRMHDLGGKQVTSLSLIVFCVGKYHWHVSSSAVVRFN

SEQ ID NO: 34502 - DNA, 2019 bp, Zea mays subsp. mays
  misc_feature (1)..(2019): Ceres Seq. ID no. 12359674
acccgcgatctccgcgaccgcaagcagctcggcaggcaggcctccaccgctccaccacctccactcggtctacgtgctccgtcaccaaacccacccgggccaacgccgaagcaaccccccctccgtccccagatccggcgccgcctccgccctcacttacactagcacgcacggcggacacgtcgcctcccccgcgcgatctgatgcaggcgcacgcggtggccagcggcgatgcggtggaagcttaactcctccgtctacaagcgcgtgccgtccagggaaaccgccatggaacccgacgtcgagacgccaatgagaatgacggacggcggcggcagcggcgcggggccgtcgtggcgcatgtcgttgccgcatgtctgtgtcgccacgctcacctcgttcctctttggataccactccggggtggtgaacgagcccttggaggtcatctccgctgaccttggcttcgccggcaacactcttgctgaagggctcgtggtgagtatctgtttgggaggagcttttgttgggtgcctcttcagcggctccatcgcagatggtattgggcgacgccgtgcgttccagctcagtgcgctgcctatgattattggtgctgccataagtgctctctccaatagtttggagggtatgctccttggaagatttttggtaggaacagggatgggattgggtccaccagtagcttcactttatataacggaggtttctccttctacagtgaggggtacatatggtagctttgttcagattgcaacctgccttggaattatagtatcactactcattggtacacctgtcaaagatattgatagatggtggagagtgtgtttctgggttgccgttatcccagcaactttacaagctctcggtatggagttttgtgctgagagccctcagtggctttataagtgtggaaaaataagtgaagcagagatgcaatttgaaaagcttttaggtccccttcatgtaaaatctgccatggcagaactttctagatatgaaagagtagatgatggagaaagtgtcaagtactcagagttgttctatggtcgccacttcaatgttgtttttattggcacaacgctctttgctttacaacagttatccggcataaattctgtgttctatttctcatcaactgtattcagaagtgtgggggtgccctctaaccttgccaacatatgcatggggatttctaatctatcaggatcaattgtagcaatgcttctaatggacaagctaggtagaaaagtgcttctttcagggagttttcttgggatggcttttgcaatggggcttcaggctgttggagcaaaccgtcagtatcttggttctgcatgtgtatatctttcagttggtggcattctgttgtttgtcttgtcattttcactaggagcaggccctgtcccaggacttcttttgcctgagattttccctaataaaatccgagctaaggctatggctctctgcatgtctgtacattggatcgtgaacttctttgttagtttgatgttcttgcgtcttctggagcaacttggtccacagcttctctacacaatattttcgtcagtctgtgtggtagcctcaatatttgtgaggcgccatgtgttggagacgaagggaaagactttacaagagatagaggtttcactcctgcaaccacaataaaggtacatatttgacgtggctggaaccttgggcaggctgtttgctgaacagaaacaagctggccctgcagaagttgattcctgaagtcatcggcaacgccctacaaatggtctcagggaagttccagatatgcgcctgcgacagctagggcggtgtttccatagagcatcatgtactgaagttatgcctgtatcgcccgccctagataggatattttcatacttgtgttgtcatctgttctatctatgagtcgtaatatcagaaaaaaaaggtactactgttttaccgttgatgagcacagttgaaaaaaggaactatcatcttcatttt

SEQ ID NO: 34503 - protein, 485 aa, Zea mays subsp. mays
  peptide (1)..(485): Ceres Seq. ID no. 12359675
  misc_feature (48)..(481): Pfam Name: and other Pfam Description: Sugar
  misc_feature (7)..(485): NCBI GI NO: 27261731 NR Description: sugar transporter [Citrus unshiu]
  misc_feature (7)..(482): NCBI GI NO: 15220399 NR Description: integral membrane protein, putative
  misc_feature (11)..(482): NCBI GI NO: 30699453 NR Description: hexose transporter, putative
  misc_feature (56)..(482): NCBI GI NO: 25308946 NR Description: probable sugar transporter, 77409-81599
  misc_feature (56)..(482): NCBI GI NO: 7715596 NR Description: F20B17.24 [Arabidopsis thaliana]
  misc_feature (124)..(482): NCBI GI NO: 19347894 NR Description: putative hexose transporter protein
  misc_feature (1)..(481): NCBI GI NO: 15625046 NR Description: hexose transporter pGlT [Olea europaea]
  misc_feature (7)..(481): NCBI GI NO: 18417892 NR Description: sugar transporter-like protein
  misc_feature (16)..(481): NCBI GI NO: 8347246 NR Description: hexose transporter [Solanum tuberosum]
  misc_feature (7)..(481): NCBI GI NO: 8347250 NR Description: hexose transporter [Arabidopsis thaliana]
MRWKLNSSVYKRVPSRETAMEPDVETPMRMTDGGGSGAGPSWRMSLPHVCVATLTSFLFGYHSGVVNEPLEVISADLGFAGNTLAEGLVVSICLGGAFVGCLFSGSIADGIGRRRAFQLSALPMIIGAAISALSNSLEGMLLGRFLVGTGMGLGPPVASLYITEVSPSTVRGTYGSFVQIATCLGIIVSLLIGTPVKDIDRWWRVCFWVAVIPATLQALGMEFCAESPQWLYKCGKISEAEMQFEKLLGPLHVKSAMAELSRYERVDDGESVKYSELFYGRHFNVVFIGTTLFALQQLSGINSVFYFSSTVFRSVGVPSNLANICMGISNLSGSIVAMLLMDKLGRKVLLSGSFLGMAFAMGLQAVGANRQYLGSACVYLSVGGILLFVLSFSLGAGPVPGLLLPEIFPNKIRAKAMALCMSVHWIVNFFVSLMFLRLLEQLGPQLLYTIFSSVCVVASIFVRRHVLETKGKTLQEIEVSLLQPQ

SEQ ID NO: 34504 - protein, 466 aa, Zea mays subsp. mays
  peptide (1)..(466): Ceres Seq. ID no. 12359676
  misc_feature (29)..(462): Pfam Name: and other Pfam Description: Sugar
  misc_feature (1)..(466): NCBI GI NO: 27261731 NR Description: sugar transporter [Citrus unshiu]
  misc_feature (1)..(463): NCBI GI NO: 15220399 NR Description: integral membrane protein, putative
  misc_feature (1)..(463): NCBI GI NO: 30699453 NR Description: hexose transporter, putative
  misc_feature (37)..(463): NCBI GI NO: 25308946 NR Description: probable sugar transporter, 77409-81599
  misc_feature (37)..(463): NCBI GI NO: 7715596 NR Description: F20B17.24 [Arabidopsis thaliana]
  misc_feature (105)..(463): NCBI GI NO: 19347894 NR Description: putative hexose transporter protein
  misc_feature (1)..(462): NCBI GI NO: 15625046 NR Description: hexose transporter pGlT [Olea europaea]
  misc_feature (1)..(462): NCBI GI NO: 18417892 NR Description: sugar transporter-like protein
  misc_feature (1)..(462): NCBI GI NO: 8347246 NR Description: hexose transporter [Solanum tuberosum]
  misc_feature (1)..(462): NCBI GI NO: 8347250 NR Description: hexose transporter [Arabidopsis thaliana]
MEPDVETPMRMTDGGGSGAGPSWRMSLPHVCVATLTSFLFGYHSGVVNEPLEVISADLGFAGNTLAEGLVVSICLGGAFVGCLFSGSIADGIGRRRAFQLSALPMIIGAAISALSNSLEGMLLGRFLVGTGMGLGPPVASLYITEVSPSTVRGTYGSFVQIATCLGIIVSLLIGTPVKDIDRWWRVCFWVAVIPATLQALGMEFCAESPQWLYKCGKISEAEMQFEKLLGPLHVKSAMAELSRYERVDDGESVKYSELFYGRHFNVVFIGTTLFALQQLSGINSVFYFSSTVFRSVGVPSNLANICMGISNLSGSIVAMLLMDKLGRKVLLSGSFLGMAFAMGLQAVGANRQYLGSACVYLSVGGILLFVLSFSLGAGPVPGLLLPEIFPNKIRAKAMALCMSVHWIVNFFVSLMFLRLLEQLGPQLLYTIFSSVCVVASIFVRRHVLETKGKTLQEIEVSLLQPQ

SEQ ID NO: 34505 - protein, 458 aa, Zea mays subsp. mays
  peptide (1)..(458): Ceres Seq. ID no. 12359677
  misc_feature (21)..(454): Pfam Name: and other Pfam Description: Sugar
  misc_feature (1)..(458): NCBI GI NO: 27261731 NR Description: sugar transporter [Citrus unshiu]
  misc_feature (1)..(455): NCBI GI NO: 15220399 NR Description: integral membrane protein, putative
  misc_feature (1)..(455): NCBI GI NO: 30699453 NR Description: hexose transporter, putative
  misc_feature (29)..(455): NCBI GI NO: 25308946 NR Description: probable sugar transporter, 77409-81599
  misc_feature (29)..(455): NCBI GI NO: 7715596 NR Description: F20B17.24 [Arabidopsis thaliana]
  misc_feature (97)..(455): NCBI GI NO: 19347894 NR Description: putative hexose transporter protein
  misc_feature (1)..(454): NCBI GI NO: 15625046 NR Description: hexose transporter pGlT [Olea europaea]
  misc_feature (1)..(454): NCBI GI NO: 18417892 NR Description: sugar transporter-like protein
  misc_feature (1)..(454): NCBI GI NO: 8347246 NR Description: hexose transporter [Solanum tuberosum]
  misc_feature (1)..(454): NCBI GI NO: 8347250 NR Description: hexose transporter [Arabidopsis thaliana]
MRMTDGGGSGAGPSWRMSLPHVCVATLTSFLFGYHSGVVNEPLEVISADLGFAGNTLAEGLVVSICLGGAFVGCLFSGSIADGIGRRRAFQLSALPMIIGAAISALSNSLEGMLLGRFLVGTGMGLGPPVASLYITEVSPSTVRGTYGSFVQIATCLGIIVSLLIGTPVKDIDRWWRVCFWVAVIPATLQALGMEFCAESPQWLYKCGKISEAEMQFEKLLGPLHVKSAMAELSRYERVDDGESVKYSELFYGRHFNVVFIGTTLFALQQLSGINSVFYFSSTVFRSVGVPSNLANICMGISNLSGSIVAMLLMDKLGRKVLLSGSFLGMAFAMGLQAVGANRQYLGSACVYLSVGGILLFVLSFSLGAGPVPGLLLPEIFPNKIRAKAMALCMSVHWIVNFFVSLMFLRLLEQLGPQLLYTIFSSVCVVASIFVRRHVLETKGKTLQEIEVSLLQPQ

SEQ ID NO: 34506 - DNA, 921 bp, Zea mays subsp. mays
  misc_feature (1)..(921): Ceres Seq. ID no. 12414856
atttttagacgacacccctacccgacccgatcggcgggagagcacgagacgccagcgccatccatcgcggcaaaagccgagacgacccaggaatctcggcaccgtcgcccccctttctctctcgctcaaaagttgctgctggagccctctcccctctctccgaccaccaaccatggatgaggcgcaagttgtggagtcaaaggatggaaccatctcggttgcttctgcatttgctggttatcaggaagctgtgcaagacagggatcacaaattcttgacaaaagcagtggaagaagcatatcgaggagtcgattgcggtgacggaggtccattcggagcagttgtcgtctgtaatgacgaagtagtagtcagctgccataacatggttctgaagcacactgaccctactgcgcatgctgaagtaactgcaattagagaggcttgcaaaaagcttgggaaaattgagctctcagactgcgaaatttacgcgtcctgcgagccatgcccaatgtgctttagtgcagttcatctctcccgaatcaagaggctggtttatggggccaaggcagaggctgccatcgccattggatttgatgacttcattgcagatgctctgagaggcactgggttctaccagaaggccaacttggagatcaagaaagctgacggcaatggtgcattgatcgctgagcaagtctttgaaaagactaaagagaagttccagatgtactgatgctgagcagaagagagatctcagatttgtacaatgcttactcataaggacaagaaataatacagtgcccaaatgtccattgtttcgggaaaaaaatctcaattccactgttcaacattttgatgatgcctgaatttcttgttaacagacacaagattgttatttgctgtaaaatgtgcagttgatgg

SEQ ID NO: 34507 - protein, 243 aa, Zea mays subsp. mays
  peptide (1)..(243): Ceres Seq. ID no. 12414857
  misc_feature (85)..(187): Pfam Name: Pfam Description:  Cytidine and deoxycytidylate deaminase zinc-binding region
  misc_feature (58)..(243): NCBI GI NO: 40714681 NR Description: putative deoxycytidine deaminase
  misc_feature (64)..(243): NCBI GI NO: 23928436 NR Description: putative cytidine deaminase [Zea mays]
  misc_feature (63)..(243): NCBI GI NO: 3204108 NR Description: putative cytidine deaminase
  misc_feature (58)..(243): NCBI GI NO: 15241124 NR Description: putative cytidine deaminase - like
  misc_feature (58)..(243): NCBI GI NO: 18266045 NR Description: deoxycytidine deaminase [Brassica oleracea]
  misc_feature (128)..(242): NCBI GI NO: 15229953 NR Description: unknown protein; protein id: At3g05300.1
  misc_feature (91)..(241): NCBI GI NO: 23021911 NR Description: hypothetical protein
  misc_feature (90)..(243): NCBI GI NO: 17554608 NR Description: Cytidine, cytosine, dCTP et al deaminase
  misc_feature (88)..(199): NCBI GI NO: 39591749 NR Description: Hypothetical protein CBG18226
  misc_feature (90)..(222): NCBI GI NO: 39582012 NR Description: Hypothetical protein CBG09150
FLDDTPTRPDRRESTRRQRHPSRQKPRRPRNLGTVAPLSLSLKSCCWSPLPSLRPPTMDEAQVVESKDGTISVASAFAGYQEAVQDRDHKFLTKAVEEAYRGVDCGDGGPFGAVVVCNDEVVVSCHNMVLKHTDPTAHAEVTAIREACKKLGKIELSDCEIYASCEPCPMCFSAVHLSRIKRLVYGAKAEAAIAIGFDDFIADALRGTGFYQKANLEIKKADGNGALIAEQVFEKTKEKFQMY

SEQ ID NO: 34508 - protein, 186 aa, Zea mays subsp. mays
  peptide (1)..(186): Ceres Seq. ID no. 12414858
  misc_feature (28)..(130): Pfam Name: Pfam Description:  Cytidine and deoxycytidylate deaminase zinc-binding region
  misc_feature (1)..(186): NCBI GI NO: 40714681 NR Description: putative deoxycytidine deaminase
  misc_feature (7)..(186): NCBI GI NO: 23928436 NR Description: putative cytidine deaminase [Zea mays]
  misc_feature (6)..(186): NCBI GI NO: 3204108 NR Description: putative cytidine deaminase
  misc_feature (1)..(186): NCBI GI NO: 15241124 NR Description: putative cytidine deaminase - like
  misc_feature (1)..(186): NCBI GI NO: 18266045 NR Description: deoxycytidine deaminase [Brassica oleracea]
  misc_feature (71)..(185): NCBI GI NO: 15229953 NR Description: unknown protein; protein id: At3g05300.1
  misc_feature (34)..(184): NCBI GI NO: 23021911 NR Description: hypothetical protein
  misc_feature (33)..(186): NCBI GI NO: 17554608 NR Description: Cytidine, cytosine, dCTP et al deaminase
  misc_feature (31)..(142): NCBI GI NO: 39591749 NR Description: Hypothetical protein CBG18226
  misc_feature (33)..(165): NCBI GI NO: 39582012 NR Description: Hypothetical protein CBG09150
MDEAQVVESKDGTISVASAFAGYQEAVQDRDHKFLTKAVEEAYRGVDCGDGGPFGAVVVCNDEVVVSCHNMVLKHTDPTAHAEVTAIREACKKLGKIELSDCEIYASCEPCPMCFSAVHLSRIKRLVYGAKAEAAIAIGFDDFIADALRGTGFYQKANLEIKKADGNGALIAEQVFEKTKEKFQMY

SEQ ID NO: 34509 - DNA, 939 bp, Zea mays subsp. mays
  misc_feature (1)..(939): Ceres Seq. ID no. 12346943
aaaaacaagaagccgtacctgtacggtcttctctatagagggagcaattggagagagagagaaagaacagcgaaaaatggtcgatgccggcgacataacggccggagggccgccgcgcgctcacgaggaggagcaagcgggaactccggcatacggttcggtggtcctcggcggcacttttgaccgcctccacgacggccaccgccgccttctcaaggcctccgcggatttggggagagaccggatcgtggtgggcgtctgcacgggacctatgctcgccaagaaggagtatgcggagcttattgagcccgttgacaagcgcatcaagggtgtggaggattacatcaagtctataaagccagaactgatagtacaagtggagcctattgaggacccttatggcccatccataactgatgagaagttggatgccattattgtcagtaaggagacattaaatggtggactggctgtaaataggaaaagagaagagaaagggttcccactgttgaaggttgaggttgttgatctcctttccggcggtgtggagggggaaaaattgagttcttctgctttaaggaaacttgaggcagaacaagctcaacaaagtgaaacaaaatctggtagccttgaagcttcttagggaggaaattgaatactttgatctggttagctgaatgcacaaatacgggggtgatctgctccaagctcagtgtgaacaaaaaatatgatcagagctgacagtttggttacctttctagaggaataatcttcgaacactggcccatggccctgtaacagtattgctctaaccttctaaaatcaacctggcaacatagactctcccctactaaccaaatttacaaattttgtattggcaatgccatctgaatgttaaaaggaaatcttcttgggtttgtataaatatctacaattgtg

SEQ ID NO: 34510 - protein, 213 aa, Zea mays subsp. mays
  peptide (1)..(213): Ceres Seq. ID no. 12346944
  misc_feature (29)..(204): NCBI GI NO: 34393473 NR Description: bifunctional phosphopantetheine adenylyltransferase dephospho CoA kinase-like
  misc_feature (40)..(204): NCBI GI NO: 15224138 NR Description: hypothetical protein; protein id: At2g18250.1
  misc_feature (43)..(194): NCBI GI NO: 25143409 NR Description: Cytidylyltransferase and Dephospho-CoA kinase (51
  misc_feature (31)..(194): NCBI GI NO: 39589394 NR Description: Hypothetical protein CBG22156
  misc_feature (56)..(205): NCBI GI NO: 6321716 NR Description: Protein required for cell viability; Ygr277cp
  misc_feature (37)..(193): NCBI GI NO: 31213039 NR Description: ENSANGP00000014315 [Anopheles gambiae]
  misc_feature (51)..(193): NCBI GI NO: 20094940 NR Description: Predicted nucleotidyltransferase of the HIGHsuperfamily
  misc_feature (40)..(193): NCBI GI NO: 24658602 NR Description: CG10575-PA [Drosophila melanogaster]
  misc_feature (56)..(194): NCBI GI NO: 20465246 NR Description: bifunctional phosphopantetheine adenylyltransferase / dephospho CoA kinase
  misc_feature (51)..(194): NCBI GI NO: 27229125 NR Description: CoA synthase
KTRSRTCTVFSIEGAIGEREKEQRKMVDAGDITAGGPPRAHEEEQAGTPAYGSVVLGGTFDRLHDGHRRLLKASADLGRDRIVVGVCTGPMLAKKEYAELIEPVDKRIKGVEDYIKSIKPELIVQVEPIEDPYGPSITDEKLDAIIVSKETLNGGLAVNRKREEKGFPLLKVEVVDLLSGGVEGEKLSSSALRKLEAEQAQQSETKSGSLEAS

SEQ ID NO: 34511 - protein, 188 aa, Zea mays subsp. mays; identical to SEQ ID NO: 29706
  peptide (1)..(188): Ceres Seq. ID no. 12346945
  misc_feature (4)..(179): NCBI GI NO: 34393473 NR Description: bifunctional phosphopantetheine adenylyltransferase dephospho CoA kinase-like
  misc_feature (15)..(179): NCBI GI NO: 15224138 NR Description: hypothetical protein; protein id: At2g18250.1
  misc_feature (18)..(169): NCBI GI NO: 25143409 NR Description: Cytidylyltransferase and Dephospho-CoA kinase (51
  misc_feature (6)..(169): NCBI GI NO: 39589394 NR Description: Hypothetical protein CBG22156
  misc_feature (31)..(180): NCBI GI NO: 6321716 NR Description: Protein required for cell viability; Ygr277cp
  misc_feature (12)..(168): NCBI GI NO: 31213039 NR Description: ENSANGP00000014315 [Anopheles gambiae]
  misc_feature (26)..(168): NCBI GI NO: 20094940 NR Description: Predicted nucleotidyltransferase of the HIGHsuperfamily
  misc_feature (15)..(168): NCBI GI NO: 24658602 NR Description: CG10575-PA [Drosophila melanogaster]
  misc_feature (31)..(169): NCBI GI NO: 20465246 NR Description: bifunctional phosphopantetheine adenylyltransferase / dephospho CoA kinase
  misc_feature (26)..(169): NCBI GI NO: 27229125 NR Description: CoA synthase

SEQ ID NO: 34512 - protein, 123 aa, Zea mays subsp. mays; identical to SEQ ID NO: 29707
  peptide (1)..(123): Ceres Seq. ID no. 12346946
  misc_feature (1)..(114): NCBI GI NO: 34393473 NR Description: bifunctional phosphopantetheine adenylyltransferase dephospho CoA kinase-like
  misc_feature (1)..(114): NCBI GI NO: 15224138 NR Description: hypothetical protein; protein id: At2g18250.1
  misc_feature (1)..(104): NCBI GI NO: 25143409 NR Description: Cytidylyltransferase and Dephospho-CoA kinase (51
  misc_feature (1)..(104): NCBI GI NO: 39589394 NR Description: Hypothetical protein CBG22156
  misc_feature (1)..(115): NCBI GI NO: 6321716 NR Description: Protein required for cell viability; Ygr277cp
  misc_feature (1)..(103): NCBI GI NO: 31213039 NR Description: ENSANGP00000014315 [Anopheles gambiae]
  misc_feature (1)..(103): NCBI GI NO: 20094940 NR Description: Predicted nucleotidyltransferase of the HIGHsuperfamily
  misc_feature (1)..(103): NCBI GI NO: 24658602 NR Description: CG10575-PA [Drosophila melanogaster]
  misc_feature (1)..(104): NCBI GI NO: 20465246 NR Description: bifunctional phosphopantetheine adenylyltransferase / dephospho CoA kinase
  misc_feature (1)..(104): NCBI GI NO: 27229125 NR Description: CoA synthase

SEQ ID NO: 34513 - DNA, 896 bp, Zea mays subsp. mays
  misc_feature (1)..(896): Ceres Seq. ID no. 13494469
accacatctccagtcctccactgacaagccgccgccgctcttccacccccaccacccacccacctctccccggcctcgcacccatggccacgactttgatggttgcagccaccacctcctgctccccgggccgcgccgcgccgcgcctgaagccggtggcctcctcctcctccagcagcagcagcagcagctcggcgcggccgcggcggcccttggcgcagcagctcccgcggctgctggcgacggcggcggcggcggcggtggcagccgcgccgctcccggcgctggcggagcagatggagaaggccgcactgtttgacttcaacctgacgctcccggcgatcgcgaccgagttcctgctgctcatggtggcgctggacaagctctacttcacgccgctaggcaagttcatggatgagcgggacgccaagatccgcggtgagctcggcgatgtcaagggcgcctccgaggaggtgaagcagctggaggaccaggcggcggccatcatgaaggcggcgcgcgccgagatcgcggcggcgcttaacaagatgaagaaggagaccaccgcggagctggaggccaagctggacgagggacgcagccgtgtggaggccgagctcgtagaggcgctcgccaacctcgaggcgcagaaggaggaggctgtcaaggcgctcgacgcccagatcgcctcgctcagtgatgagatcgtcaagaaggtgctcccatccgcgtgatgaaaccaaaccggccctgccttatcctacgactatagttacatgaacatcataaattaatgataattttgaagaaaattggccgatgactccgacactttactcatgaaagattattggatgggttgtgtccaccgcctgtgttgggcgtggattggttgt

SEQ ID NO: 34514 - protein, 243 aa, Zea mays subsp. mays
  peptide (1)..(243): Ceres Seq. ID no. 13494470
  misc_feature (28)..(243): NCBI GI NO: 29367413 NR Description: H+-transporting ATP synthase chain 9-like protein
  misc_feature (33)..(242): NCBI GI NO: 15236722 NR Description: H+-transporting ATP synthase chain 9
  misc_feature (33)..(242): NCBI GI NO: 14596171 NR Description: H+-transporting ATP synthase-like protein
  misc_feature (25)..(241): NCBI GI NO: 461595 NR Description: ATP synthase B' chain, chloroplast precursor
  misc_feature (25)..(241): NCBI GI NO: 448445 NR Description: CF0 ATP synthase:SUBUNIT=9
  misc_feature (65)..(241): NCBI GI NO: 5902610 NR Description: CFO ATP synthase subunit II precursor
  misc_feature (93)..(240): NCBI GI NO: 461596 NR Description: ATP synthase B' chain (Subunit II)
  misc_feature (104)..(240): NCBI GI NO: 22297975 NR Description: H+-transporting ATP synthase chain b'
  misc_feature (92)..(242): NCBI GI NO: 11465711 NR Description: ATP synthase CF0 B' chain [Porphyra purpurea]
  misc_feature (95)..(240): NCBI GI NO: 2493072 NR Description: ATP synthase B' chain (Subunit II)
HISSPPLTSRRRSSTPTTHPPLPGLAPMATTLMVAATTSCSPGRAAPRLKPVASSSSSSSSSSSARPRRPLAQQLPRLLATAAAAAVAAAPLPALAEQMEKAALFDFNLTLPAIATEFLLLMVALDKLYFTPLGKFMDERDAKIRGELGDVKGASEEVKQLEDQAAAIMKAARAEIAAALNKMKKETTAELEAKLDEGRSRVEAELVEALANLEAQKEEAVKALDAQIASLSDEIVKKVLPSA

SEQ ID NO: 34515 - protein, 216 aa, Zea mays subsp. mays
  peptide (1)..(216): Ceres Seq. ID no. 13494471
  misc_feature (1)..(216): NCBI GI NO: 29367413 NR Description: H+-transporting ATP synthase chain 9-like protein
  misc_feature (6)..(215): NCBI GI NO: 15236722 NR Description: H+-transporting ATP synthase chain 9
  misc_feature (6)..(215): NCBI GI NO: 14596171 NR Description: H+-transporting ATP synthase-like protein
  misc_feature (1)..(214): NCBI GI NO: 461595 NR Description: ATP synthase B' chain, chloroplast precursor
  misc_feature (1)..(214): NCBI GI NO: 448445 NR Description: CF0 ATP synthase:SUBUNIT=9
  misc_feature (38)..(214): NCBI GI NO: 5902610 NR Description: CFO ATP synthase subunit II precursor
  misc_feature (66)..(213): NCBI GI NO: 461596 NR Description: ATP synthase B' chain (Subunit II)
  misc_feature (77)..(213): NCBI GI NO: 22297975 NR Description: H+-transporting ATP synthase chain b'
  misc_feature (65)..(215): NCBI GI NO: 11465711 NR Description: ATP synthase CF0 B' chain [Porphyra purpurea]
  misc_feature (68)..(213): NCBI GI NO: 2493072 NR Description: ATP synthase B' chain (Subunit II)
MATTLMVAATTSCSPGRAAPRLKPVASSSSSSSSSSSARPRRPLAQQLPRLLATAAAAAVAAAPLPALAEQMEKAALFDFNLTLPAIATEFLLLMVALDKLYFTPLGKFMDERDAKIRGELGDVKGASEEVKQLEDQAAAIMKAARAEIAAALNKMKKETTAELEAKLDEGRSRVEAELVEALANLEAQKEEAVKALDAQIASLSDEIVKKVLPSA

SEQ ID NO: 34516 - protein, 211 aa, Zea mays subsp. mays
  peptide (1)..(211): Ceres Seq. ID no. 13494472
  misc_feature (1)..(211): NCBI GI NO: 29367413 NR Description: H+-transporting ATP synthase chain 9-like protein
  misc_feature (1)..(210): NCBI GI NO: 15236722 NR Description: H+-transporting ATP synthase chain 9
  misc_feature (1)..(210): NCBI GI NO: 14596171 NR Description: H+-transporting ATP synthase-like protein
  misc_feature (1)..(209): NCBI GI NO: 461595 NR Description: ATP synthase B' chain, chloroplast precursor
  misc_feature (1)..(209): NCBI GI NO: 448445 NR Description: CF0 ATP synthase:SUBUNIT=9
  misc_feature (33)..(209): NCBI GI NO: 5902610 NR Description: CFO ATP synthase subunit II precursor
  misc_feature (61)..(208): NCBI GI NO: 461596 NR Description: ATP synthase B' chain (Subunit II)
  misc_feature (72)..(208): NCBI GI NO: 22297975 NR Description: H+-transporting ATP synthase chain b'
  misc_feature (60)..(210): NCBI GI NO: 11465711 NR Description: ATP synthase CF0 B' chain [Porphyra purpurea]
  misc_feature (63)..(208): NCBI GI NO: 2493072 NR Description: ATP synthase B' chain (Subunit II)
MVAATTSCSPGRAAPRLKPVASSSSSSSSSSSARPRRPLAQQLPRLLATAAAAAVAAAPLPALAEQMEKAALFDFNLTLPAIATEFLLLMVALDKLYFTPLGKFMDERDAKIRGELGDVKGASEEVKQLEDQAAAIMKAARAEIAAALNKMKKETTAELEAKLDEGRSRVEAELVEALANLEAQKEEAVKALDAQIASLSDEIVKKVLPSA

SEQ ID NO: 34517 - DNA, 1486 bp, Zea mays subsp. mays
  misc_feature (1)..(1486): Ceres Seq. ID no. 13499131
aaaattcgtcacaggtctcctggtccaggccgccgccggttcaatctctcctctgacttctccggctgtcctcgactgcgaacccgatctcgattcgatccccaagccatcccatggcggctgccctctcctcgcggcgtgccctgcacagcctccaccgccgcctcctcttccacccctccccctcacccgccgccgcacgccgcgcgctacccacttccactcgcagccccatccccgcacactcccccaccttctccttctccttctactcctcctcccgcttcttcaccaccgcgcgccccgatgcgaggctgcggcacgggatgctgccgcagcggctgataggcggggtcaggtcggtggcgaacggtgggtcgaaactgggaccgctgggtcagggggtcaaggggctggggcggcccatggaggcggcgaggagcgcggccgcgcggtaccgcgcggccgtcggcctgcaggtcgaggccttctggcggcgcaactccatgatcctcgtcggtgcggggggagtcatcgtctgtttcttgctctggaggatcatgttcggcatcgccagcaccttcgtcggcctctccgagggtatggccaagtacggcttcctcgcccttgccaccgccattgtcgcctttgccggtatgtatgcccgggcaaggttaaccataaaccctgacaaggtttaccggctggctatgacaaaactcaatacatctgctgccatccttgaagttatgggtgcgcccctaactggtactgatgtcagagcatatgttatgtctggaggaggcccgaaactgaaggacttcaaatttaagcttggcagtaaacggtgcttcctcattttccccatcaaaggatcagaaagaaggggcctcgtaagtgttgaggccaagaagaaaaatggacagtatgacatgaagctactagctgttgacataccaatggcatcaggtcctgaccagcggctgttcctcgtcggtgatgaacaagagtacaaggtgggcggggggcttgatatctgagctgcgagacccgatcgtaaaagctatggccgcggagaaggagtttgactatctcgacgagagagaggatgaggaggacgagcggagggagcgtgaggaggcggagcaagaggaagcggaagcattgaggcgcgaggaggaaaggctgcgccaggagggtgaagagcgtaggcggcgggaggaggctgagagcctggagaaagctacgtgacatgacttactgtactgactttccaccttgccttgtgcattgtcttctacctctgtctctaccggagtgtagcgatcagcggtttccacagcaggagattgcttccgagttcacttgagtttctggtggtcagttcggcgtcactagtctcaaagttgttgagaaggaaggaataattttgacggttacgcgacaggtcacttcggcgaagcaatgtaatttatagtggttgatc

SEQ ID NO: 34518 - protein, 308 aa, Zea mays subsp. mays
  peptide (1)..(308): Ceres Seq. ID no. 13499132
  misc_feature (1)..(306): NCBI GI NO: 34896160 NR Description: hypothetical protein~similar to Arabidopsisthaliana chromosome 3
  misc_feature (99)..(306): NCBI GI NO: 15228922 NR Description: expressed protein [Arabidopsis thaliana]
  misc_feature (99)..(306): NCBI GI NO: 15226745 NR Description: expressed protein [Arabidopsis thaliana]
MAAALSSRRALHSLHRRLLFHPSPSPAAARRALPTSTRSPIPAHSPTFSFSFYSSSRFFTTARPDARLRHGMLPQRLIGGVRSVANGGSKLGPLGQGVKGLGRPMEAARSAAARYRAAVGLQVEAFWRRNSMILVGAGGVIVCFLLWRIMFGIASTFVGLSEGMAKYGFLALATAIVAFAGMYARARLTINPDKVYRLAMTKLNTSAAILEVMGAPLTGTDVRAYVMSGGGPKLKDFKFKLGSKRCFLIFPIKGSERRGLVSVEAKKKNGQYDMKLLAVDIPMASGPDQRLFLVGDEQEYKVGGGLDI

SEQ ID NO: 34519 - protein, 237 aa, Zea mays subsp. mays
  peptide (1)..(237): Ceres Seq. ID no. 13499133
  misc_feature (1)..(235): NCBI GI NO: 34896160 NR Description: hypothetical protein~similar to Arabidopsisthaliana chromosome 3
  misc_feature (28)..(235): NCBI GI NO: 15228922 NR Description: expressed protein [Arabidopsis thaliana]
  misc_feature (28)..(235): NCBI GI NO: 15226745 NR Description: expressed protein [Arabidopsis thaliana]
MLPQRLIGGVRSVANGGSKLGPLGQGVKGLGRPMEAARSAAARYRAAVGLQVEAFWRRNSMILVGAGGVIVCFLLWRIMFGIASTFVGLSEGMAKYGFLALATAIVAFAGMYARARLTINPDKVYRLAMTKLNTSAAILEVMGAPLTGTDVRAYVMSGGGPKLKDFKFKLGSKRCFLIFPIKGSERRGLVSVEAKKKNGQYDMKLLAVDIPMASGPDQRLFLVGDEQEYKVGGGLDI

SEQ ID NO: 34520 - protein, 229 aa, Zea mays subsp. mays
  peptide (1)..(229): Ceres Seq. ID no. 13499134
KFVTGLLVQAAAGSISPLTSPAVLDCEPDLDSIPKPSHGGCPLLAACPAQPPPPPPLPPLPLTRRRTPRATHFHSQPHPRTLPHLLLLLLLLLPLLHHRAPRCEAAARDAAAAADRRGQVGGERWVETGTAGSGGQGAGAAHGGGEERGRAVPRGRRPAGRGLLAAQLHDPRRCGGSHRLFLALEDHVRHRQHLRRPLRGYGQVRLPRPCHRHCRLCRYVCPGKVNHKP

SEQ ID NO: 34521 - DNA, 900 bp, Zea mays subsp. mays
  misc_feature (1)..(900): Ceres Seq. ID no. 12414562
  misc_feature (578)..(578): n is a, c, t, g, unknown, or other
  misc_feature (559)..(559): n is a, c, t, g, unknown, or other
  misc_feature (620)..(620): n is a, c, t, g, unknown, or other
  misc_feature (594)..(594): n is a, c, t, g, unknown, or other
  misc_feature (513)..(513): n is a, c, t, g, unknown, or other
tcttccttatccagatggcggcgccggccaactccaccaccttctccggcgacgtgtgggcggagctccgcctggccgacgcccgcgacgtgccgcacatccaccgcctcatacaccatatggccgagttcgagctgctcaccgacctcttcgccgccaccgaagagctcctcacgtccacgctcttcccatcgccgacgccgcctcccttcacctccttcacagccctcgtccttgacctatcccccacccccatcctcccggactcctcttccaccatcgcctcccgccgcctcgacctctccgcgtccccgctcgcagacccggaggccgccaccttcgcctccccgcgcggcggcgggcgcgtcactgccgggttcgtgatctgcttccccaactactccaccttcctctccaagcccgggctgtacgttgaggacatcttcgtgcgcgcaccctggcgccgccgcggccttggccggatgatgctgtctgccgtcgccggcagggccnccgagctcgggatgggccgggtggagtggtgcgtgctcgactggancaagaacgccatcgacttntacgaggggatgggcnccgatgtgctcccgcagtggcgcatntgccggctcgccggcgcagcccttgacaaatacaaggtcagccagaaggaggccgccggtgggaaggctgcagagtaggagggcctggaaattcgcttattgagagtgcctgccaataataaaggtggtggatttgcttgcgctgcttagctctggcatggtttagaactagatgattagtgattcagtgcatttgatcagctcattagggcgagatgggcaatcgggacttgttgtggtataaaccttgctgcattatgctagactgtcttctgatttg

SEQ ID NO: 34522 - protein, 231 aa, Zea mays subsp. mays
  peptide (1)..(231): Ceres Seq. ID no. 12414563
  misc_feature (122)..(197): Pfam Name: GNAT Pfam Description: Acetyltransferase
  misc_feature (5)..(217): NCBI GI NO: 15225009 NR Description: unknown protein; protein id: At2g39020.1
  misc_feature (8)..(214): NCBI GI NO: 18404927 NR Description: expressed protein; protein id: At2g39030
  misc_feature (18)..(214): NCBI GI NO: 15451162 NR Description: Unknown protein [Arabidopsis thaliana]
  misc_feature (2)..(222): NCBI GI NO: 5852154 NR Description: tyramine hydroxycinnamoyltransferase
  misc_feature (5)..(222): NCBI GI NO: 17369608 NR Description: Tyramine N-feruloyltransferase 4/11
  misc_feature (5)..(222): NCBI GI NO: 17380562 NR Description: Tyramine N-feruloyltransferase 10/30
  misc_feature (125)..(216): NCBI GI NO: 22982569 NR Description: hypothetical protein [Burkholderia fungorum]
  misc_feature (20)..(62): NCBI GI NO: 22982569 NR Description: hypothetical protein [Burkholderia fungorum]
  misc_feature (120)..(216): NCBI GI NO: 22976703 NR Description: hypothetical protein [Ralstonia metallidurans]
  misc_feature (9)..(217): NCBI GI NO: 19908257 NR Description: N-hydroxycinnamoyl-CoA: tyramine N-hydroxycinnamoyltransferase THT1-3
  misc_feature (171)..(171): Xaa is any aa, unknown or other
  misc_feature (186)..(186): Xaa is any aa, unknown or other
  misc_feature (192)..(192): Xaa is any aa, unknown or other
  misc_feature (198)..(198): Xaa is any aa, unknown or other
  misc_feature (206)..(206): Xaa is any aa, unknown or other
FLIQMAAPANSTTFSGDVWAELRLADARDVPHIHRLIHHMAEFELLTDLFAATEELLTSTLFPSPTPPPFTSFTALVLDLSPTPILPDSSSTIASRRLDLSASPLADPEAATFASPRGGGRVTAGFVICFPNYSTFLSKPGLYVEDIFVRAPWRRRGLGRMMLSAVAGRAXELGMGRVEWCVLDWXKNAIDXYEGMGXDVLPQWRXCRLAGAALDKYKVSQKEAAGGKAAE

SEQ ID NO: 34523 - protein, 227 aa, Zea mays subsp. mays
  peptide (1)..(227): Ceres Seq. ID no. 12414564
  misc_feature (118)..(193): Pfam Name: GNAT Pfam Description: Acetyltransferase
  misc_feature (1)..(213): NCBI GI NO: 15225009 NR Description: unknown protein; protein id: At2g39020.1
  misc_feature (4)..(210): NCBI GI NO: 18404927 NR Description: expressed protein; protein id: At2g39030
  misc_feature (14)..(210): NCBI GI NO: 15451162 NR Description: Unknown protein [Arabidopsis thaliana]
  misc_feature (1)..(218): NCBI GI NO: 5852154 NR Description: tyramine hydroxycinnamoyltransferase
  misc_feature (1)..(218): NCBI GI NO: 17369608 NR Description: Tyramine N-feruloyltransferase 4/11
  misc_feature (1)..(218): NCBI GI NO: 17380562 NR Description: Tyramine N-feruloyltransferase 10/30
  misc_feature (121)..(212): NCBI GI NO: 22982569 NR Description: hypothetical protein [Burkholderia fungorum]
  misc_feature (16)..(58): NCBI GI NO: 22982569 NR Description: hypothetical protein [Burkholderia fungorum]
  misc_feature (116)..(212): NCBI GI NO: 22976703 NR Description: hypothetical protein [Ralstonia metallidurans]
  misc_feature (5)..(213): NCBI GI NO: 19908257 NR Description: N-hydroxycinnamoyl-CoA: tyramine N-hydroxycinnamoyltransferase THT1-3
  misc_feature (167)..(167): Xaa is any aa, unknown or other
  misc_feature (182)..(182): Xaa is any aa, unknown or other
  misc_feature (188)..(188): Xaa is any aa, unknown or other
  misc_feature (194)..(194): Xaa is any aa, unknown or other
  misc_feature (202)..(202): Xaa is any aa, unknown or other
MAAPANSTTFSGDVWAELRLADARDVPHIHRLIHHMAEFELLTDLFAATEELLTSTLFPSPTPPPFTSFTALVLDLSPTPILPDSSSTIASRRLDLSASPLADPEAATFASPRGGGRVTAGFVICFPNYSTFLSKPGLYVEDIFVRAPWRRRGLGRMMLSAVAGRAXELGMGRVEWCVLDWXKNAIDXYEGMGXDVLPQWRXCRLAGAALDKYKVSQKEAAGGKAAE

SEQ ID NO: 34524 - protein, 192 aa, Zea mays subsp. mays
  peptide (1)..(192): Ceres Seq. ID no. 12414565
  misc_feature (83)..(158): Pfam Name: GNAT Pfam Description: Acetyltransferase
  misc_feature (1)..(178): NCBI GI NO: 15225009 NR Description: unknown protein; protein id: At2g39020.1
  misc_feature (1)..(175): NCBI GI NO: 18404927 NR Description: expressed protein; protein id: At2g39030
  misc_feature (1)..(175): NCBI GI NO: 15451162 NR Description: Unknown protein [Arabidopsis thaliana]
  misc_feature (1)..(183): NCBI GI NO: 5852154 NR Description: tyramine hydroxycinnamoyltransferase
  misc_feature (1)..(183): NCBI GI NO: 17369608 NR Description: Tyramine N-feruloyltransferase 4/11
  misc_feature (1)..(183): NCBI GI NO: 17380562 NR Description: Tyramine N-feruloyltransferase 10/30
  misc_feature (86)..(177): NCBI GI NO: 22982569 NR Description: hypothetical protein [Burkholderia fungorum]
  misc_feature (1)..(23): NCBI GI NO: 22982569 NR Description: hypothetical protein [Burkholderia fungorum]
  misc_feature (81)..(177): NCBI GI NO: 22976703 NR Description: hypothetical protein [Ralstonia metallidurans]
  misc_feature (1)..(178): NCBI GI NO: 19908257 NR Description: N-hydroxycinnamoyl-CoA: tyramine N-hydroxycinnamoyltransferase THT1-3
  misc_feature (132)..(132): Xaa is any aa, unknown or other
  misc_feature (147)..(147): Xaa is any aa, unknown or other
  misc_feature (153)..(153): Xaa is any aa, unknown or other
  misc_feature (159)..(159): Xaa is any aa, unknown or other
  misc_feature (167)..(167): Xaa is any aa, unknown or other
MAEFELLTDLFAATEELLTSTLFPSPTPPPFTSFTALVLDLSPTPILPDSSSTIASRRLDLSASPLADPEAATFASPRGGGRVTAGFVICFPNYSTFLSKPGLYVEDIFVRAPWRRRGLGRMMLSAVAGRAXELGMGRVEWCVLDWXKNAIDXYEGMGXDVLPQWRXCRLAGAALDKYKVSQKEAAGGKAAE

SEQ ID NO: 34525 - DNA, 2286 bp, Zea mays subsp. mays
  misc_feature (1)..(2286): Ceres Seq. ID no. 12414637
atctgcctctctcttcccctccctctctggaaccagggtggttgtcaagcggtgttggagttgggagtccttgccattggtacaagagcaagaagcaaggacagggaggggcgagaggaggaagaaagcgagggacactagaaaggtgcttgctttgtttccagttgcttcttctctctccctgggcgggagagaaagaagcaggagagatatgggcgagatggtcgtggccgggtatggcatggacaaggctctgcgggccagcgtcagcttcgacacgccatgcggcgcgctgctgcgcgagcttgagcaaatatggacagagattggggagcgtgaacaagataaagatcgcatgttccttgaactggaaacaggagtgcatgcgtgtgtaccgtagaaaggttgatagtgccaatgctgagagagcccagctccgtcagtcactgatggccaaagaagcagagcttaaagctctagttgcttctatcggggaaaatggcccacgatttacggtggatgaaaagcacacatcgttgaaagatcaaacttgctgcagtggcacctcttttggaagatcttagagtaaagaaacaagacagagtcaaacaaatctcaaatgtgcaatgtcaaatcgagaagataaaagcacaaatttctgatcacaattatcaggacagtgatggttccatcaaacaacttaacgatgaccatgacttatcgaccagaagaatttctgatcttcaaatgcaactgcgtaatctacagaaggagaagtccgatcgtcttcagaaggtttttatatatgtggatgaagtgcacagcctatgtgcagtgcttgggatggattttccaaagactgtaaaagaggtccacccgagtttgcatggatccaactctgaaaattcaacaaatattagtgatagcactcttgaaggtcttactcagactatcctgaagctcaaagcagaaaagaagacaagagttttaaagttgcaagagactgtagaaaaacttcacaagttatggaatctgatggagtcaactgagaaagagaggatacacttctctgaagtagctgctattcttggatctactgaggaagagatcaattctccaggcattctgtcattagagacaattcagaagactgaagaggaagtcgaaaagctaactgtacaaaaaactagtagaatgaaggagcttgttctcaagaaaaggttagaactagaaggcatctgtagaaatgcacacatggagcctgatatgagcacagcaccagagaagatcaccgcgctgattgattccggtttagtggatccttgcgaactcctttccagcattgaagtgcaaataacaaaagcaaatgaagagtccttaacgaggaaagatatcatggagagagtggataaatggctatcagcttgtgatgaagagacttggcttgaggaatataaccaagatgataataggtatagtgctggcaggggtgcccacttgaatcttaagcgtgcagagaaggcaaggataactgtccaaaagattccaactatgattgacagcttgatagccaaaacttttgcatgggaggatgaaagaaatgtgccatttttatatgatgggattcgtttggttgccattttggaagagcaaaaactcagaagggcacaaagggaggaagagaagagacgcagccgggatcagaggaagctgcacagtttattgcttaaggagaaggagttgattttcgggtccaaacctagtcctagaaagacaagcagcttcaataggaggaccagcaaccaccatccaaacgcaaatggcgctggattcatgactccggtgccacgccgagtttcagctggcagtgccaccccagagcttctgaccccacgctcgtattctggccggtacaacaactacttcaaggagaacaggcgcctgacagctgcaccactgaacttctcagttggttccaaggaggatagcatgtcatccttcgcatccatcagtggctcggaacctgattcgccattgtttttgcactaagtgttggttagggaggagacttcttggtgagaagggtggatagcctcaagatcggaccattgtgtgtgtgtgtgtgtggcagctgttaacattgctgattggtaacaacaggttgtgacaagtttagatgcgattgcttgtagatataatatctaacattcatggttctgctgtacttccaaatttaagttgtaagtcgtttggttaggaaggatgcaatgcccaagtgtgcaatgt

SEQ ID NO: 34526 - protein, 433 aa, Zea mays subsp. mays
  peptide (1)..(433): Ceres Seq. ID no. 12414638
  misc_feature (1)..(429): Pfam Name: MAP65/ASE1 family Pfam Description: Microtubule associated protein
  misc_feature (1)..(433): NCBI GI NO: 27357984 NR Description: Unknown protein
  misc_feature (1)..(430): NCBI GI NO: 25410943 NR Description: hypothetical protein At2g01910
  misc_feature (1)..(430): NCBI GI NO: 30677965 NR Description: microtubule associated protein (MAP65/ASE1) family
  misc_feature (1)..(431): NCBI GI NO: 21539547 NR Description: unknown protein [Arabidopsis thaliana]
  misc_feature (81)..(431): NCBI GI NO: 8778239 NR Description: F10B6.9 [Arabidopsis thaliana]
  misc_feature (1)..(85): NCBI GI NO: 8778239 NR Description: F10B6.9 [Arabidopsis thaliana]
  misc_feature (1)..(424): NCBI GI NO: 15240485 NR Description: putative protein; protein id: At5g55230.1
  misc_feature (1)..(411): NCBI GI NO: 28301942 NR Description: unknown protein
  misc_feature (1)..(429): NCBI GI NO: 11558254 NR Description: microtubule-associated protein MAP65-1b
  misc_feature (1)..(429): NCBI GI NO: 11558256 NR Description: microtubule-associated protein MAP65-1c
MQLRNLQKEKSDRLQKVFIYVDEVHSLCAVLGMDFPKTVKEVHPSLHGSNSENSTNISDSTLEGLTQTILKLKAEKKTRVLKLQETVEKLHKLWNLMESTEKERIHFSEVAAILGSTEEEINSPGILSLETIQKTEEEVEKLTVQKTSRMKELVLKKRLELEGICRNAHMEPDMSTAPEKITALIDSGLVDPCELLSSIEVQITKANEESLTRKDIMERVDKWLSACDEETWLEEYNQDDNRYSAGRGAHLNLKRAEKARITVQKIPTMIDSLIAKTFAWEDERNVPFLYDGIRLVAILEEQKLRRAQREEEKRRSRDQRKLHSLLLKEKELIFGSKPSPRKTSSFNRRTSNHHPNANGAGFMTPVPRRVSAGSATPELLTPRSYSGRYNNYFKENRRLTAAPLNFSVGSKEDSMSSFASISGSEPDSPLFLH

SEQ ID NO: 34527 - protein, 401 aa, Zea mays subsp. mays
  peptide (1)..(401): Ceres Seq. ID no. 12414639
  misc_feature (1)..(397): Pfam Name: MAP65/ASE1 family Pfam Description: Microtubule associated protein
  misc_feature (1)..(401): NCBI GI NO: 27357984 NR Description: Unknown protein
  misc_feature (1)..(398): NCBI GI NO: 25410943 NR Description: hypothetical protein At2g01910
  misc_feature (1)..(398): NCBI GI NO: 30677965 NR Description: microtubule associated protein (MAP65/ASE1) family
  misc_feature (1)..(399): NCBI GI NO: 21539547 NR Description: unknown protein [Arabidopsis thaliana]
  misc_feature (49)..(399): NCBI GI NO: 8778239 NR Description: F10B6.9 [Arabidopsis thaliana]
  misc_feature (1)..(53): NCBI GI NO: 8778239 NR Description: F10B6.9 [Arabidopsis thaliana]
  misc_feature (1)..(392): NCBI GI NO: 15240485 NR Description: putative protein; protein id: At5g55230.1
  misc_feature (1)..(379): NCBI GI NO: 28301942 NR Description: unknown protein
  misc_feature (1)..(397): NCBI GI NO: 11558254 NR Description: microtubule-associated protein MAP65-1b
  misc_feature (1)..(397): NCBI GI NO: 11558256 NR Description: microtubule-associated protein MAP65-1c
MDFPKTVKEVHPSLHGSNSENSTNISDSTLEGLTQTILKLKAEKKTRVLKLQETVEKLHKLWNLMESTEKERIHFSEVAAILGSTEEEINSPGILSLETIQKTEEEVEKLTVQKTSRMKELVLKKRLELEGICRNAHMEPDMSTAPEKITALIDSGLVDPCELLSSIEVQITKANEESLTRKDIMERVDKWLSACDEETWLEEYNQDDNRYSAGRGAHLNLKRAEKARITVQKIPTMIDSLIAKTFAWEDERNVPFLYDGIRLVAILEEQKLRRAQREEEKRRSRDQRKLHSLLLKEKELIFGSKPSPRKTSSFNRRTSNHHPNANGAGFMTPVPRRVSAGSATPELLTPRSYSGRYNNYFKENRRLTAAPLNFSVGSKEDSMSSFASISGSEPDSPLFLH

SEQ ID NO: 34528 - protein, 337 aa, Zea mays subsp. mays
  peptide (1)..(337): Ceres Seq. ID no. 12414640
  misc_feature (1)..(333): Pfam Name: MAP65/ASE1 family Pfam Description: Microtubule associated protein
  misc_feature (1)..(337): NCBI GI NO: 27357984 NR Description: Unknown protein
  misc_feature (1)..(334): NCBI GI NO: 25410943 NR Description: hypothetical protein At2g01910
  misc_feature (1)..(334): NCBI GI NO: 30677965 NR Description: microtubule associated protein (MAP65/ASE1) family
  misc_feature (1)..(335): NCBI GI NO: 21539547 NR Description: unknown protein [Arabidopsis thaliana]
  misc_feature (1)..(335): NCBI GI NO: 8778239 NR Description: F10B6.9 [Arabidopsis thaliana]
  misc_feature (1)..(328): NCBI GI NO: 15240485 NR Description: putative protein; protein id: At5g55230.1
  misc_feature (1)..(315): NCBI GI NO: 28301942 NR Description: unknown protein
  misc_feature (1)..(333): NCBI GI NO: 11558254 NR Description: microtubule-associated protein MAP65-1b
  misc_feature (1)..(333): NCBI GI NO: 11558256 NR Description: microtubule-associated protein MAP65-1c
  misc_feature (1)..(333): NCBI GI NO: 11558252 NR Description: microtubule-associated protein MAP65-1a
MESTEKERIHFSEVAAILGSTEEEINSPGILSLETIQKTEEEVEKLTVQKTSRMKELVLKKRLELEGICRNAHMEPDMSTAPEKITALIDSGLVDPCELLSSIEVQITKANEESLTRKDIMERVDKWLSACDEETWLEEYNQDDNRYSAGRGAHLNLKRAEKARITVQKIPTMIDSLIAKTFAWEDERNVPFLYDGIRLVAILEEQKLRRAQREEEKRRSRDQRKLHSLLLKEKELIFGSKPSPRKTSSFNRRTSNHHPNANGAGFMTPVPRRVSAGSATPELLTPRSYSGRYNNYFKENRRLTAAPLNFSVGSKEDSMSSFASISGSEPDSPLFLH

SEQ ID NO: 34529 - DNA, 1289 bp, Zea mays subsp. mays
  misc_feature (1)..(1289): Ceres Seq. ID no. 13492669
ctttgttgcctacagcctgtaacctactaccacaccaagctaatctgggtgaggtatcccgtgctcagcgcactattgaagccgtggagaagctgttgctgcaggggatgggttcagttattgaatccaaggacattattggaatctacaggactccattattggatgaccacggacaagtccgttaccatattcaccaaaagcaagtacaggttaccggatgtcatcgtggaaacgcaaatgtccgttatgcatggcttccttgctccaaaagcactgtgcatgtaatgatgctgaatggtgttttgcaagttgataagcctcccaataagtgtgcagcctatggagagggcactctccttacaccagcaaatcgttcggatgcctgtgtgaaatactctgatgttgatgaaaatggcattgtccgtatgatgttgtgccgtgtaataatggggaacgtagaaatagttcaccctggatctaagcagtgccaacctagtaataagtattttgatagtggagtagacgaccttaaaaatccacggcattacgttgtgtgggatatgaatctgaatagtcatatctattctgagtttgtagtcactgtcaaattgccttctaaaaccaaagattcctttgtatcgcaagaaaactgtcagaattcgtctgatctatcactggtgttgaactctagttcacctgattgtatttcacaggagatgaacctggaggcacctccagcattgggaggtggatgtgcagcccccatgctaggagattcgatggaaaaggctccaagctcaccttggatgcctttctccatgctgtttgcagcgatctctaccaaagtgtctcctgagaatatggacgtgattattggttgctatgaagagtttaagagcaagaaaataagccgaggtgaactagtgaagaagctgaggcatgtagttggtgatagagtgctaatatcgacgataatgcgtctccaagataagttacctccagtggataagcgtgaggaaccagacacatcggcgtccaaggtggtggcggaaccatgagatgggtgtcaggaggtgggcgaggaatgcagaaagggaggaaccagccgacttgacatagaaaaccctgtgggaagcagcaactatgaagcctcttgcatcagtcttgtgcatggaggctgctgtttgttctctgtatcgtaggtgtctacgtttgcgaggaaattgtatccggtgtttctctttcttcaaattaaaccacgcacatgcagctgccgtactttttgg

SEQ ID NO: 34530 - protein, 352 aa, Zea mays subsp. mays
  peptide (1)..(352): Ceres Seq. ID no. 13492670
  misc_feature (1)..(341): NCBI GI NO: 37537150 NR Description: putative CEO protein
  misc_feature (22)..(340): NCBI GI NO: 29126336 NR Description: putative CEO protein
  misc_feature (22)..(234): NCBI GI NO: 29126337 NR Description: putative CEO protein
  misc_feature (26)..(331): NCBI GI NO: 30692664 NR Description: expressed protein [Arabidopsis thaliana]
  misc_feature (26)..(331): NCBI GI NO: 18398335 NR Description: expressed protein [Arabidopsis thaliana]
  misc_feature (26)..(331): NCBI GI NO: 11044957 NR Description: ceo protein [Arabidopsis thaliana]
  misc_feature (26)..(331): NCBI GI NO: 14150488 NR Description: ATP8 [Arabidopsis thaliana]
  misc_feature (26)..(332): NCBI GI NO: 15810143 NR Description: unknown protein [Arabidopsis thaliana]
  misc_feature (26)..(332): NCBI GI NO: 18403862 NR Description: expressed protein [Arabidopsis thaliana]
  misc_feature (26)..(331): NCBI GI NO: 25403152 NR Description: unknown protein [imported] - Arabidopsis thaliana
LLPTACNLLPHQANLGEVSRAQRTIEAVEKLLLQGMGSVIESKDIIGIYRTPLLDDHGQVRYHIHQKQVQVTGCHRGNANVRYAWLPCSKSTVHVMMLNGVLQVDKPPNKCAAYGEGTLLTPANRSDACVKYSDVDENGIVRMMLCRVIMGNVEIVHPGSKQCQPSNKYFDSGVDDLKNPRHYVVWDMNLNSHIYSEFVVTVKLPSKTKDSFVSQENCQNSSDLSLVLNSSSPDCISQEMNLEAPPALGGGCAAPMLGDSMEKAPSSPWMPFSMLFAAISTKVSPENMDVIIGCYEEFKSKKISRGELVKKLRHVVGDRVLISTIMRLQDKLPPVDKREEPDTSASKVVAEP

SEQ ID NO: 34531 - protein, 317 aa, Zea mays subsp. mays
  peptide (1)..(317): Ceres Seq. ID no. 13492671
  misc_feature (1)..(306): NCBI GI NO: 37537150 NR Description: putative CEO protein
  misc_feature (1)..(305): NCBI GI NO: 29126336 NR Description: putative CEO protein
  misc_feature (1)..(199): NCBI GI NO: 29126337 NR Description: putative CEO protein
  misc_feature (1)..(296): NCBI GI NO: 30692664 NR Description: expressed protein [Arabidopsis thaliana]
  misc_feature (1)..(296): NCBI GI NO: 18398335 NR Description: expressed protein [Arabidopsis thaliana]
  misc_feature (1)..(296): NCBI GI NO: 11044957 NR Description: ceo protein [Arabidopsis thaliana]
  misc_feature (1)..(296): NCBI GI NO: 14150488 NR Description: ATP8 [Arabidopsis thaliana]
  misc_feature (1)..(297): NCBI GI NO: 15810143 NR Description: unknown protein [Arabidopsis thaliana]
  misc_feature (1)..(297): NCBI GI NO: 18403862 NR Description: expressed protein [Arabidopsis thaliana]
  misc_feature (1)..(296): NCBI GI NO: 25403152 NR Description: unknown protein [imported] - Arabidopsis thaliana
MGSVIESKDIIGIYRTPLLDDHGQVRYHIHQKQVQVTGCHRGNANVRYAWLPCSKSTVHVMMLNGVLQVDKPPNKCAAYGEGTLLTPANRSDACVKYSDVDENGIVRMMLCRVIMGNVEIVHPGSKQCQPSNKYFDSGVDDLKNPRHYVVWDMNLNSHIYSEFVVTVKLPSKTKDSFVSQENCQNSSDLSLVLNSSSPDCISQEMNLEAPPALGGGCAAPMLGDSMEKAPSSPWMPFSMLFAAISTKVSPENMDVIIGCYEEFKSKKISRGELVKKLRHVVGDRVLISTIMRLQDKLPPVDKREEPDTSASKVVAEP

SEQ ID NO: 34532 - protein, 257 aa, Zea mays subsp. mays
  peptide (1)..(257): Ceres Seq. ID no. 13492672
  misc_feature (1)..(246): NCBI GI NO: 37537150 NR Description: putative CEO protein
  misc_feature (1)..(245): NCBI GI NO: 29126336 NR Description: putative CEO protein
  misc_feature (1)..(139): NCBI GI NO: 29126337 NR Description: putative CEO protein
  misc_feature (1)..(236): NCBI GI NO: 30692664 NR Description: expressed protein [Arabidopsis thaliana]
  misc_feature (1)..(236): NCBI GI NO: 18398335 NR Description: expressed protein [Arabidopsis thaliana]
  misc_feature (1)..(236): NCBI GI NO: 11044957 NR Description: ceo protein [Arabidopsis thaliana]
  misc_feature (1)..(236): NCBI GI NO: 14150488 NR Description: ATP8 [Arabidopsis thaliana]
  misc_feature (1)..(237): NCBI GI NO: 15810143 NR Description: unknown protein [Arabidopsis thaliana]
  misc_feature (1)..(237): NCBI GI NO: 18403862 NR Description: expressed protein [Arabidopsis thaliana]
  misc_feature (1)..(236): NCBI GI NO: 25403152 NR Description: unknown protein [imported] - Arabidopsis thaliana
MMLNGVLQVDKPPNKCAAYGEGTLLTPANRSDACVKYSDVDENGIVRMMLCRVIMGNVEIVHPGSKQCQPSNKYFDSGVDDLKNPRHYVVWDMNLNSHIYSEFVVTVKLPSKTKDSFVSQENCQNSSDLSLVLNSSSPDCISQEMNLEAPPALGGGCAAPMLGDSMEKAPSSPWMPFSMLFAAISTKVSPENMDVIIGCYEEFKSKKISRGELVKKLRHVVGDRVLISTIMRLQDKLPPVDKREEPDTSASKVVAEP

SEQ ID NO: 34533 - DNA, 1091 bp, Zea mays subsp. mays
  misc_feature (1)..(1091): Ceres Seq. ID no. 12414629
gcacgcgcgcgcacgacgcacagatacctttcctctcttctcccgtcccctcttacgcggcaaccccggcgcggcatggcgagcccgtcctcctcctctttcccgtcccggaaggccctgagcaagatcgcctgcaggcgcctgcagaaggagctaacggagtggcaggtcaacccgcccgccggcttcgagcacagggtcaccgacaacctccagagttccttggcggcggcagctagctcacgtcccggcgaaccctcgtcggtggccaagggccgttacaggatgaaacaacaacaaaaaaggtgggtcgtcgatgtagccggggcaccaggcacgctctacaccggcgagacctacaaactgcaggtggatttctccgagcattatcccatggaggcacctcaggttatatttctgcatccagcaccgatgcatccacacatttacagtaatggacacatctgtttagatatattgtatgattcgtggtccccagcaatgactgtcagttctatctgtatcagcatattatctatgctgtccagctcaccagcaaagcaacgcccagccgataacgatcgctatgtcaggaactgtcgcaatgggaggtcaccaaaggagaccacgtggtggttccatgacgacactgtgtgatgggtgtttccggctgttgtcctgcccgcattttagttgccagactacatgggagatgatctaggcatatttcaagcgacccatttgaccagaaactaacacgctcttctggtttgtaaatcagtgtgcatcagcgtcaggtctctgtacttgttgatccttacaccgtctatagtatgtagaataatgtttgtatctttgtcaatttacggaacagacatgaaatgcaggtcactgttgacttgcaagatttctgaatccttctagttgaaagttgaaacgagggttatatatgcttggtagtctgctccagatgcagcagctttagctctagttccacttaactctagctcaaactatggcagagctcttttgggagtggctgtgtgatcgtgtaataatatagctgttgtgtgagtattgcaaaattctgt

SEQ ID NO: 34534 - protein, 218 aa, Zea mays subsp. mays
  peptide (1)..(218): Ceres Seq. ID no. 12414630
  misc_feature (93)..(218): NCBI GI NO: 481811 NR Description: ubiquitin-conjugating enzyme UBC2-1
  misc_feature (30)..(72): NCBI GI NO: 481811 NR Description: ubiquitin-conjugating enzyme UBC2-1
  misc_feature (93)..(218): NCBI GI NO: 18401461 NR Description: E2, ubiquitin-conjugating enzyme 15
  misc_feature (30)..(72): NCBI GI NO: 18401461 NR Description: E2, ubiquitin-conjugating enzyme 15
  misc_feature (93)..(218): NCBI GI NO: 18410856 NR Description: E2, ubiquitin-conjugating enzyme 16
  misc_feature (30)..(72): NCBI GI NO: 18410856 NR Description: E2, ubiquitin-conjugating enzyme 16
  misc_feature (93)..(218): NCBI GI NO: 2801444 NR Description: ubiquitin-conjugating enzyme 16
  misc_feature (30)..(72): NCBI GI NO: 2801444 NR Description: ubiquitin-conjugating enzyme 16
  misc_feature (93)..(218): NCBI GI NO: 18419831 NR Description: E2, ubiquitin-conjugating enzyme 17
  misc_feature (30)..(72): NCBI GI NO: 18419831 NR Description: E2, ubiquitin-conjugating enzyme 17
ARARTTHRYLSSLLPSPLTRQPRRGMASPSSSSFPSRKALSKIACRRLQKELTEWQVNPPAGFEHRVTDNLQSSLAAAASSRPGEPSSVAKGRYRMKQQQKRWVVDVAGAPGTLYTGETYKLQVDFSEHYPMEAPQVIFLHPAPMHPHIYSNGHICLDILYDSWSPAMTVSSICISILSMLSSSPAKQRPADNDRYVRNCRNGRSPKETTWWFHDDTV

SEQ ID NO: 34535 - protein, 193 aa, Zea mays subsp. mays
  peptide (1)..(193): Ceres Seq. ID no. 12414631
  misc_feature (68)..(193): NCBI GI NO: 481811 NR Description: ubiquitin-conjugating enzyme UBC2-1
  misc_feature (5)..(47): NCBI GI NO: 481811 NR Description: ubiquitin-conjugating enzyme UBC2-1
  misc_feature (68)..(193): NCBI GI NO: 18401461 NR Description: E2, ubiquitin-conjugating enzyme 15
  misc_feature (5)..(47): NCBI GI NO: 18401461 NR Description: E2, ubiquitin-conjugating enzyme 15
  misc_feature (68)..(193): NCBI GI NO: 18410856 NR Description: E2, ubiquitin-conjugating enzyme 16
  misc_feature (5)..(47): NCBI GI NO: 18410856 NR Description: E2, ubiquitin-conjugating enzyme 16
  misc_feature (68)..(193): NCBI GI NO: 2801444 NR Description: ubiquitin-conjugating enzyme 16
  misc_feature (5)..(47): NCBI GI NO: 2801444 NR Description: ubiquitin-conjugating enzyme 16
  misc_feature (68)..(193): NCBI GI NO: 18419831 NR Description: E2, ubiquitin-conjugating enzyme 17
  misc_feature (5)..(47): NCBI GI NO: 18419831 NR Description: E2, ubiquitin-conjugating enzyme 17
MASPSSSSFPSRKALSKIACRRLQKELTEWQVNPPAGFEHRVTDNLQSSLAAAASSRPGEPSSVAKGRYRMKQQQKRWVVDVAGAPGTLYTGETYKLQVDFSEHYPMEAPQVIFLHPAPMHPHIYSNGHICLDILYDSWSPAMTVSSICISILSMLSSSPAKQRPADNDRYVRNCRNGRSPKETTWWFHDDTV

SEQ ID NO: 34536 - protein, 123 aa, Zea mays subsp. mays
  peptide (1)..(123): Ceres Seq. ID no. 12414632
  misc_feature (1)..(123): NCBI GI NO: 481811 NR Description: ubiquitin-conjugating enzyme UBC2-1
  misc_feature (1)..(123): NCBI GI NO: 18401461 NR Description: E2, ubiquitin-conjugating enzyme 15
  misc_feature (1)..(123): NCBI GI NO: 18410856 NR Description: E2, ubiquitin-conjugating enzyme 16
  misc_feature (1)..(123): NCBI GI NO: 2801444 NR Description: ubiquitin-conjugating enzyme 16
  misc_feature (1)..(123): NCBI GI NO: 18419831 NR Description: E2, ubiquitin-conjugating enzyme 17
  misc_feature (1)..(92): NCBI GI NO: 34897008 NR Description: putative ubiquitin-conjugating enzyme E2
  misc_feature (1)..(123): NCBI GI NO: 18422281 NR Description: E2, ubiquitin-conjugating enzyme 18
  misc_feature (1)..(123): NCBI GI NO: 4090259 NR Description: ubiquitin-conjugating enzyme E2
  misc_feature (27)..(123): NCBI GI NO: 25293670 NR Description: ubiquitin-conjugating enzyme 18
  misc_feature (1)..(64): NCBI GI NO: 25293672 NR Description: protein F27F5.13 [imported] - Arabidopsis thaliana
MKQQQKRWVVDVAGAPGTLYTGETYKLQVDFSEHYPMEAPQVIFLHPAPMHPHIYSNGHICLDILYDSWSPAMTVSSICISILSMLSSSPAKQRPADNDRYVRNCRNGRSPKETTWWFHDDTV

SEQ ID NO: 34537 - DNA, 1530 bp, Zea mays subsp. mays
  misc_feature (1)..(1530): Ceres Seq. ID no. 12358125
aatacgatcaggtctagatcttatcggattatcgttttttgttgcctaggcgtgatgtgatttcgttggattgctgttggaagctattttttctgatctggatcggcctaaaagcaactccaagaacgagttctaaacttgagccttaaaatttgtgttaggaccttatttgatttatttaggatctccaacaaccaggccttaaaatcaggatacccagcttccatcttctctgccaggcaacgcgcttttttctagcatatccttctcgtcagctacgcattcgttcgcaatcggccgcatgaggcccacatcatccttcctcaagggctgcacagttaagcgcgacggctgcacatcacggctgcaaggtacagctcgacggctgctggtaggggcatcagcattaccgcatcatccctgcacggtaggcccttgacccctgcacaatacggctggacggctacgagacgagtggtggcggagtctgctcgctggaggttgggtgcgtggacgaggtgaatagttcatttagaacctgctgcagatttgcaacaaaaacatgtatgcaactaggagatctatgatccatctcgaagatgaagaattagatgatgaacttgaccacctcatgcttctcatgatgggtgaatatcggaagaggaagcataagcagcgaaagaagcatcgaggttcagtttttggacacaaggtttacaatcaaaatagagatgaacacgggcaagaagcaaatactggacacccatctcctcctagctgttcactcttaagtgctggaagatcttttgctgggactcaaaatgtttcaagcctgcagaaggatgaagcatggaaagtgaatgtacgcatccatggttgtgatcttgaacagggttatttatgtggaacgatggaagcgcttaatgttccattagcagatacacctgttgtgactttctgggagggggagatagtggatgctaaaaattacacttttttcactggaaagtgggaggcatcaccagatgatgatataagacattggtccaagttcccatcatttacgcctcttctgggtcagattgagacagatggtggcaagtctctggactttagcaactatccttatatatttatgagatggaaagagcaatattttgtcaacgttggagtcgactgtgggttaaccatcgctggtttctactacgtctgcttttcttgtagcgatggctccattaatggattttattatgatccaaatagcagtccatttcagaagctcgagctgaagtgtaccaatgagaaaaaatccgggttcaccttttcatcctacgagctgcagtgacaggacagatgccctcgacagacaactttctgttagcatatagtgtgtgtactgaactcgtactccctaatgaaaggaatgagtggtcgtttacgtaacagtttgttttctagcaagactaagcaaactgtcactttgtaatctgcagaagcatcctgtcctttctaaaatctaccttttgtatt

SEQ ID NO: 34538 - protein, 260 aa, Zea mays subsp. mays
  peptide (1)..(260): Ceres Seq. ID no. 12358126
  misc_feature (60)..(260): NCBI GI NO: 29150393 NR Description: unknown protein
  misc_feature (80)..(170): NCBI GI NO: 15224341 NR Description: hypothetical protein; protein id: At2g37680.1
  misc_feature (184)..(235): NCBI GI NO: 15224341 NR Description: hypothetical protein; protein id: At2g37680.1
  misc_feature (168)..(260): NCBI GI NO: 34895748 NR Description: P0024G09.20
  misc_feature (74)..(243): NCBI GI NO: 40747141 NR Description: hypothetical protein AN1179.2
  misc_feature (64)..(242): NCBI GI NO: 23111007 NR Description: hypothetical protein MGC3048 [Homo sapiens]
  misc_feature (64)..(242): NCBI GI NO: 12848536 NR Description: unnamed protein product [Mus musculus]
  misc_feature (64)..(242): NCBI GI NO: 34328469 NR Description: RIKEN cDNA 4933439F18 [Mus musculus]
  misc_feature (64)..(242): NCBI GI NO: 34870809 NR Description: similar to RIKEN cDNA 4933439F18
  misc_feature (64)..(242): NCBI GI NO: 18676842 NR Description: unnamed protein product [Homo sapiens]
MYATRRSMIHLEDEELDDELDHLMLLMMGEYRKRKHKQRKKHRGSVFGHKVYNQNRDEHGQEANTGHPSPPSCSLLSAGRSFAGTQNVSSLQKDEAWKVNVRIHGCDLEQGYLCGTMEALNVPLADTPVVTFWEGEIVDAKNYTFFTGKWEASPDDDIRHWSKFPSFTPLLGQIETDGGKSLDFSNYPYIFMRWKEQYFVNVGVDCGLTIAGFYYVCFSCSDGSINGFYYDPNSSPFQKLELKCTNEKKSGFTFSSYELQ

SEQ ID NO: 34539 - protein, 253 aa, Zea mays subsp. mays
  peptide (1)..(253): Ceres Seq. ID no. 12358127
  misc_feature (53)..(253): NCBI GI NO: 29150393 NR Description: unknown protein
  misc_feature (73)..(163): NCBI GI NO: 15224341 NR Description: hypothetical protein; protein id: At2g37680.1
  misc_feature (177)..(228): NCBI GI NO: 15224341 NR Description: hypothetical protein; protein id: At2g37680.1
  misc_feature (161)..(253): NCBI GI NO: 34895748 NR Description: P0024G09.20
  misc_feature (67)..(236): NCBI GI NO: 40747141 NR Description: hypothetical protein AN1179.2
  misc_feature (57)..(235): NCBI GI NO: 23111007 NR Description: hypothetical protein MGC3048 [Homo sapiens]
  misc_feature (57)..(235): NCBI GI NO: 12848536 NR Description: unnamed protein product [Mus musculus]
  misc_feature (57)..(235): NCBI GI NO: 34328469 NR Description: RIKEN cDNA 4933439F18 [Mus musculus]
  misc_feature (57)..(235): NCBI GI NO: 34870809 NR Description: similar to RIKEN cDNA 4933439F18
  misc_feature (57)..(235): NCBI GI NO: 18676842 NR Description: unnamed protein product [Homo sapiens]
MIHLEDEELDDELDHLMLLMMGEYRKRKHKQRKKHRGSVFGHKVYNQNRDEHGQEANTGHPSPPSCSLLSAGRSFAGTQNVSSLQKDEAWKVNVRIHGCDLEQGYLCGTMEALNVPLADTPVVTFWEGEIVDAKNYTFFTGKWEASPDDDIRHWSKFPSFTPLLGQIETDGGKSLDFSNYPYIFMRWKEQYFVNVGVDCGLTIAGFYYVCFSCSDGSINGFYYDPNSSPFQKLELKCTNEKKSGFTFSSYELQ

SEQ ID NO: 34540 - protein, 237 aa, Zea mays subsp. mays
  peptide (1)..(237): Ceres Seq. ID no. 12358128
  misc_feature (37)..(237): NCBI GI NO: 29150393 NR Description: unknown protein
  misc_feature (57)..(147): NCBI GI NO: 15224341 NR Description: hypothetical protein; protein id: At2g37680.1
  misc_feature (161)..(212): NCBI GI NO: 15224341 NR Description: hypothetical protein; protein id: At2g37680.1
  misc_feature (145)..(237): NCBI GI NO: 34895748 NR Description: P0024G09.20
  misc_feature (51)..(220): NCBI GI NO: 40747141 NR Description: hypothetical protein AN1179.2
  misc_feature (41)..(219): NCBI GI NO: 23111007 NR Description: hypothetical protein MGC3048 [Homo sapiens]
  misc_feature (41)..(219): NCBI GI NO: 12848536 NR Description: unnamed protein product [Mus musculus]
  misc_feature (41)..(219): NCBI GI NO: 34328469 NR Description: RIKEN cDNA 4933439F18 [Mus musculus]
  misc_feature (41)..(219): NCBI GI NO: 34870809 NR Description: similar to RIKEN cDNA 4933439F18
  misc_feature (41)..(219): NCBI GI NO: 18676842 NR Description: unnamed protein product [Homo sapiens]
MLLMMGEYRKRKHKQRKKHRGSVFGHKVYNQNRDEHGQEANTGHPSPPSCSLLSAGRSFAGTQNVSSLQKDEAWKVNVRIHGCDLEQGYLCGTMEALNVPLADTPVVTFWEGEIVDAKNYTFFTGKWEASPDDDIRHWSKFPSFTPLLGQIETDGGKSLDFSNYPYIFMRWKEQYFVNVGVDCGLTIAGFYYVCFSCSDGSINGFYYDPNSSPFQKLELKCTNEKKSGFTFSSYELQ

SEQ ID NO: 34541 - DNA, 864 bp, Zea mays subsp. mays
  misc_feature (1)..(864): Ceres Seq. ID no. 12367137
gcacgagaccattacctagaacatcctaatcaaaaaacccctcaacgaagcctctggtgcctcggccaccgcagcagcctggccctgccccggcccccgggcgtggtgtcaggtctcaggtgtggtggcgctttctcctctccggcacggtggccgcgtcatcccagctctcccgcgcggcggcggcggccgtttcctctcctgcgctcctcctgccgcacacagccagaaaattgcagctgaagtttgtttgaggataagcgacagctttgcgagtccttcgtgttgaaggagaaattgtagctgaagtgaaaaaacagcagggaacaatggcactatcacgaagtatgagagcatgtttgcacagtggaagacttgcacttcttgccatattggtctctggtggaattgtattgcaaatcttggcttgtgctctctataacaactggtggccaatgctaacagttctcatgtatcttatcctaccaatgcccctcatatttttcctgggttctgatacttcctccatgatgtccaatgggggagacggctgggtgaacttcacgaaattcttgacgggcgcatcaatagtagggagcatcgccattccgtcgatcctgaagcatgcgggcgtcattggatggggagccctgacgatggagctgtcatcctttgtggtctttggcgtggcaatcctgtggttcctccagatgaacggtgaagacgagtacagcggagtgttctaatccaaacctgctggttctcttgccagcgtggcactctgtgctgtgcatggtagttgtgaactgggctgtactgctacaacaggggaagcattgccctgggacctgatttactgacacc

SEQ ID NO: 34542 - protein, 138 aa, Zea mays subsp. mays
  peptide (1)..(138): Ceres Seq. ID no. 12367138
  misc_feature (7)..(134): NCBI GI NO: 18398420 NR Description: Expressed protein; protein id: At1g32410
  misc_feature (7)..(135): NCBI GI NO: 21554354 NR Description: unknown [Arabidopsis thaliana]
  misc_feature (7)..(126): NCBI GI NO: 25518386 NR Description: hypothetical protein F5D14
  misc_feature (16)..(134): NCBI GI NO: 12322900 NR Description: unknown protein; 72859-71336
  misc_feature (16)..(134): NCBI GI NO: 16648828 NR Description: AT3g11530/F24K9_21 [Arabidopsis thaliana]
  misc_feature (22)..(134): NCBI GI NO: 18399269 NR Description: expressed protein; protein id: At3g11530
  misc_feature (54)..(134): NCBI GI NO: 34905898 NR Description: P0458E05.25
  misc_feature (19)..(134): NCBI GI NO: 38103616 NR Description: hypothetical protein MG04054.4
  misc_feature (26)..(133): NCBI GI NO: 6322504 NR Description: Vacuolar Protein Sorting; Vps55p
  misc_feature (12)..(138): NCBI GI NO: 24762759 NR Description: CG30423-PB [Drosophila melanogaster]
MALSRSMRACLHSGRLALLAILVSGGIVLQILACALYNNWWPMLTVLMYLILPMPLIFFLGSDTSSMMSNGGDGWVNFTKFLTGASIVGSIAIPSILKHAGVIGWGALTMELSSFVVFGVAILWFLQMNGEDEYSGVF

SEQ ID NO: 34543 - protein, 132 aa, Zea mays subsp. mays
  peptide (1)..(132): Ceres Seq. ID no. 12367139
  misc_feature (1)..(128): NCBI GI NO: 18398420 NR Description: Expressed protein; protein id: At1g32410
  misc_feature (1)..(129): NCBI GI NO: 21554354 NR Description: unknown [Arabidopsis thaliana]
  misc_feature (1)..(120): NCBI GI NO: 25518386 NR Description: hypothetical protein F5D14
  misc_feature (10)..(128): NCBI GI NO: 12322900 NR Description: unknown protein; 72859-71336
  misc_feature (10)..(128): NCBI GI NO: 16648828 NR Description: AT3g11530/F24K9_21 [Arabidopsis thaliana]
  misc_feature (16)..(128): NCBI GI NO: 18399269 NR Description: expressed protein; protein id: At3g11530
  misc_feature (48)..(128): NCBI GI NO: 34905898 NR Description: P0458E05.25
  misc_feature (13)..(128): NCBI GI NO: 38103616 NR Description: hypothetical protein MG04054.4
  misc_feature (20)..(127): NCBI GI NO: 6322504 NR Description: Vacuolar Protein Sorting; Vps55p
  misc_feature (6)..(132): NCBI GI NO: 24762759 NR Description: CG30423-PB [Drosophila melanogaster]
MRACLHSGRLALLAILVSGGIVLQILACALYNNWWPMLTVLMYLILPMPLIFFLGSDTSSMMSNGGDGWVNFTKFLTGASIVGSIAIPSILKHAGVIGWGALTMELSSFVVFGVAILWFLQMNGEDEYSGVF

SEQ ID NO: 34544 - protein, 96 aa, Zea mays subsp. mays
  peptide (1)..(96): Ceres Seq. ID no. 12367140
  misc_feature (1)..(92): NCBI GI NO: 18398420 NR Description: Expressed protein; protein id: At1g32410
  misc_feature (1)..(93): NCBI GI NO: 21554354 NR Description: unknown [Arabidopsis thaliana]
  misc_feature (1)..(84): NCBI GI NO: 25518386 NR Description: hypothetical protein F5D14
  misc_feature (1)..(92): NCBI GI NO: 12322900 NR Description: unknown protein; 72859-71336
  misc_feature (1)..(92): NCBI GI NO: 16648828 NR Description: AT3g11530/F24K9_21 [Arabidopsis thaliana]
  misc_feature (1)..(92): NCBI GI NO: 18399269 NR Description: expressed protein; protein id: At3g11530
  misc_feature (12)..(92): NCBI GI NO: 34905898 NR Description: P0458E05.25
  misc_feature (1)..(92): NCBI GI NO: 38103616 NR Description: hypothetical protein MG04054.4
  misc_feature (1)..(91): NCBI GI NO: 6322504 NR Description: Vacuolar Protein Sorting; Vps55p
  misc_feature (1)..(96): NCBI GI NO: 24762759 NR Description: CG30423-PB [Drosophila melanogaster]
MLTVLMYLILPMPLIFFLGSDTSSMMSNGGDGWVNFTKFLTGASIVGSIAIPSILKHAGVIGWGALTMELSSFVVFGVAILWFLQMNGEDEYSGVF

SEQ ID NO: 34545 - DNA, 618 bp, Zea mays subsp. mays
  misc_feature (1)..(618): Ceres Seq. ID no. 12414840
cttcttattgtttgggagttatctccgttttgtctaccggtggggaagtatcagtgcaaaccatgtgggatttagcaattctgactcatcggagaatcatatgggtccaggccatcagcgaaatatgtctgactgcgacatggatgcaacattttactggatagggatggcatctatagctactattactgtactgttaccgactatcttgggcataactgcattgttcacaaagctaggattaatggtcgctggtggtattgtgctggcatcttttatgacatacgcagcggagcatcttgcaatctcagtcttcaacaagggtcaaaaatacaggaatgcgtcaagaactcgaagcttttgtttttaacgtttaagtaaaaaatccttgttgcattgtaggtagttttgtacacaaaaagaatgatgattcatttttaacacgtggccttcctgcccatggcccctttttttgtagcgctgatgtcacgccaacttgtggtaaataggtttccgacattgtttctgtagcacagttggcatgaagattacagacatgttttgggatcgtgacccgcttttactcgcttatattgatgtttatggtgagattgtcgt

SEQ ID NO: 34546 - protein, 122 aa, Zea mays subsp. mays
  peptide (1)..(122): Ceres Seq. ID no. 12414841
  misc_feature (1)..(122): NCBI GI NO: 18087513 NR Description: AT5g18480/F20L16_200 [Arabidopsis thaliana]
  misc_feature (1)..(122): NCBI GI NO: 22326882 NR Description: putative protein; protein id: At5g18480
  misc_feature (84)..(110): NCBI GI NO: 38568059 NR Description: OSJNBa0073E02.8
  misc_feature (1)..(23): NCBI GI NO: 38568059 NR Description: OSJNBa0073E02.8
FLLFGSYLRFVYRWGSISANHVGFSNSDSSENHMGPGHQRNMSDCDMDATFYWIGMASIATITVLLPTILGITALFTKLGLMVAGGIVLASFMTYAAEHLAISVFNKGQKYRNASRTRSFCF

SEQ ID NO: 34547 - protein, 89 aa, Zea mays subsp. mays
  peptide (1)..(89): Ceres Seq. ID no. 12414842
  misc_feature (1)..(89): NCBI GI NO: 18087513 NR Description: AT5g18480/F20L16_200 [Arabidopsis thaliana]
  misc_feature (1)..(89): NCBI GI NO: 22326882 NR Description: putative protein; protein id: At5g18480
  misc_feature (51)..(77): NCBI GI NO: 38568059 NR Description: OSJNBa0073E02.8
MGPGHQRNMSDCDMDATFYWIGMASIATITVLLPTILGITALFTKLGLMVAGGIVLASFMTYAAEHLAISVFNKGQKYRNASRTRSFCF

SEQ ID NO: 34548 - protein, 81 aa, Zea mays subsp. mays
  peptide (1)..(81): Ceres Seq. ID no. 12414843
  misc_feature (1)..(81): NCBI GI NO: 18087513 NR Description: AT5g18480/F20L16_200 [Arabidopsis thaliana]
  misc_feature (1)..(81): NCBI GI NO: 22326882 NR Description: putative protein; protein id: At5g18480
  misc_feature (43)..(69): NCBI GI NO: 38568059 NR Description: OSJNBa0073E02.8
MSDCDMDATFYWIGMASIATITVLLPTILGITALFTKLGLMVAGGIVLASFMTYAAEHLAISVFNKGQKYRNASRTRSFCF

SEQ ID NO: 34549 - DNA, 1992 bp, Zea mays subsp. mays
  misc_feature (1)..(1992): Ceres Seq. ID no. 12347466
accacgtccaaaacgtttggagcccttttcctaatcttgctgctaccgctcgctccctctccccggccatttctctcatttcgccctccctccgccggctagggttactgccaccgccttccacccctccccgactgcccgtgggtggaggaggctggttggcgtgcagggtacctcggcggcggagatggagccggacttctcgaccgtgggcgggcccagctttgagttcgctttcaacgaggccaacttctccgaccgggaattgcggatcgaggtcgtcgcgggggattacgaccgccggggtccactggcggcggttccggaggaggtggcctcgccgactgggcgcgccatcggaagcgccgacgcgaggagctcttcaaggagaaagaatctacaacctacatgtcagaccaaactaattttaatgaagtcgaagcagaagagtgtgatgcatatgaagaaaatcaagaggaacctgtagcaatgatggaaggatctccacctgatgttgatcaagatggtgatgatgagcaaggtattgatccatcttgggctgctgtggttacgccggttttacgagtcaagacaatttatatcagttcggcgattcttgctgcgaagagtcctttctttttcaagcttttctcaaacggcatgaaagaatcggaccagagacatgcaacccttagaattactgactcagaggaaattgccctcatggagcttttaagctttatgtatagtggaaagttgacaactactgagcccactcttcttctggatatcttgatggctgccgacaaatttgaggttgtttcatgcatgaggtactgcagccagttgctcacaagcttgcagatgaccacagaatctgcacttctctacctagatctcccttgctcagtttcaatggcagctgcagttcaacctctgacagatgcagctaaggattttctcgctgtaaagtacaaggatttgattaagttccaagatgaagtgatgaacatccctcgtgctggaatcgaagccatcttgtcaagtaatgacctccaggtggcatctgaagataccatctatgacttcttactcagatgggcccgtgcacaatacccgaaatcagaagagagacgtgaggtccttagttctcggctgctccctcttgtgcgattcagtcatatgacgtgtaggaagctgcggaaggtcctagcctgcacagatatagaccacgagcaagcaaccaagtgtgtcaccgaggctcttctgttcaaagctgatgcaccacaccggcaacgagctcttgcagcggacgcaataacctgccggaaattcgccgagcgggcttacaagtacagaccactcaaagttgttgagtttgatcggccctacccacagtgcatagcatacttggatctcaagcgcgacgagtgctctcgactctttcctgcagggcggatatactcgcaagcgttccaccttgcagggcagggtttcttcctctcggctcactgtaacatggagcagcaaagcgcgttctactgcttcgggctcttcctggggatgcaagagaagggctccacgagtgtgacagtggactacgagttcgctgcaaggacgagaccatccggcgagtttgtgagcaagtacaagggtaactacacattcaccggtggaaaggctgttggatacaggaatctctttgcaatcccatggcagaagttcttggccgatgacagcctcttcttcgtggatgggatgctgcatctgagagccgagcttacgataaagcaaccctagagcaatggtctctgtatagtggtagttgttacgacagatgaaaaagatatcggatgggaaacctcacgagttccagttcgctgcaagtttccagatttgccggtatctcactgccaatgagcttgtttgcctccgtaacggcgcagggtgtataatggcttatttattcctagtatatacaaatacaagttg

SEQ ID NO: 34550 - protein, 463 aa, Zea mays subsp. mays
  peptide (1)..(463): Ceres Seq. ID no. 12347467
  misc_feature (47)..(151): Pfam Name: Pfam Description:  BTB/POZ domain
  misc_feature (1)..(462): NCBI GI NO: 18412063 NR Description: putative protein; protein id: At3g61600
  misc_feature (1)..(462): NCBI GI NO: 30695452 NR Description: POZ domain protein family [Arabidopsis thaliana]
  misc_feature (1)..(462): NCBI GI NO: 11282344 NR Description: hypothetical protein F2A19
  misc_feature (1)..(462): NCBI GI NO: 18407023 NR Description: expressed protein; protein id: At2g46260
  misc_feature (1)..(462): NCBI GI NO: 25352317 NR Description: hypothetical protein At2g46260
  misc_feature (1)..(462): NCBI GI NO: 21536778 NR Description: unknown [Arabidopsis thaliana]
  misc_feature (1)..(461): NCBI GI NO: 15234082 NR Description: hypothetical protein; protein id: At4g01160.1
  misc_feature (190)..(432): NCBI GI NO: 27948452 NR Description: GAMYB-binding protein
  misc_feature (19)..(255): NCBI GI NO: 26984582 NR Description: SI:dZ198M22
  misc_feature (57)..(255): NCBI GI NO: 38194229 NR Description: actinfilin [Homo sapiens]
MSDQTNFNEVEAEECDAYEENQEEPVAMMEGSPPDVDQDGDDEQGIDPSWAAVVTPVLRVKTIYISSAILAAKSPFFFKLFSNGMKESDQRHATLRITDSEEIALMELLSFMYSGKLTTTEPTLLLDILMAADKFEVVSCMRYCSQLLTSLQMTTESALLYLDLPCSVSMAAAVQPLTDAAKDFLAVKYKDLIKFQDEVMNIPRAGIEAILSSNDLQVASEDTIYDFLLRWARAQYPKSEERREVLSSRLLPLVRFSHMTCRKLRKVLACTDIDHEQATKCVTEALLFKADAPHRQRALAADAITCRKFAERAYKYRPLKVVEFDRPYPQCIAYLDLKRDECSRLFPAGRIYSQAFHLAGQGFFLSAHCNMEQQSAFYCFGLFLGMQEKGSTSVTVDYEFAARTRPSGEFVSKYKGNYTFTGGKAVGYRNLFAIPWQKFLADDSLFFVDGMLHLRAELTIKQP

SEQ ID NO: 34551 - protein, 436 aa, Zea mays subsp. mays
  peptide (1)..(436): Ceres Seq. ID no. 12347468
  misc_feature (20)..(124): Pfam Name: Pfam Description:  BTB/POZ domain
  misc_feature (1)..(435): NCBI GI NO: 18412063 NR Description: putative protein; protein id: At3g61600
  misc_feature (1)..(435): NCBI GI NO: 30695452 NR Description: POZ domain protein family [Arabidopsis thaliana]
  misc_feature (1)..(435): NCBI GI NO: 11282344 NR Description: hypothetical protein F2A19
  misc_feature (1)..(435): NCBI GI NO: 18407023 NR Description: expressed protein; protein id: At2g46260
  misc_feature (1)..(435): NCBI GI NO: 25352317 NR Description: hypothetical protein At2g46260
  misc_feature (1)..(435): NCBI GI NO: 21536778 NR Description: unknown [Arabidopsis thaliana]
  misc_feature (1)..(434): NCBI GI NO: 15234082 NR Description: hypothetical protein; protein id: At4g01160.1
  misc_feature (163)..(405): NCBI GI NO: 27948452 NR Description: GAMYB-binding protein
  misc_feature (1)..(228): NCBI GI NO: 26984582 NR Description: SI:dZ198M22
  misc_feature (30)..(228): NCBI GI NO: 38194229 NR Description: actinfilin [Homo sapiens]
MMEGSPPDVDQDGDDEQGIDPSWAAVVTPVLRVKTIYISSAILAAKSPFFFKLFSNGMKESDQRHATLRITDSEEIALMELLSFMYSGKLTTTEPTLLLDILMAADKFEVVSCMRYCSQLLTSLQMTTESALLYLDLPCSVSMAAAVQPLTDAAKDFLAVKYKDLIKFQDEVMNIPRAGIEAILSSNDLQVASEDTIYDFLLRWARAQYPKSEERREVLSSRLLPLVRFSHMTCRKLRKVLACTDIDHEQATKCVTEALLFKADAPHRQRALAADAITCRKFAERAYKYRPLKVVEFDRPYPQCIAYLDLKRDECSRLFPAGRIYSQAFHLAGQGFFLSAHCNMEQQSAFYCFGLFLGMQEKGSTSVTVDYEFAARTRPSGEFVSKYKGNYTFTGGKAVGYRNLFAIPWQKFLADDSLFFVDGMLHLRAELTIKQP

SEQ ID NO: 34552 - protein, 435 aa, Zea mays subsp. mays
  peptide (1)..(435): Ceres Seq. ID no. 12347469
  misc_feature (19)..(123): Pfam Name: Pfam Description:  BTB/POZ domain
  misc_feature (1)..(434): NCBI GI NO: 18412063 NR Description: putative protein; protein id: At3g61600
  misc_feature (1)..(434): NCBI GI NO: 30695452 NR Description: POZ domain protein family [Arabidopsis thaliana]
  misc_feature (1)..(434): NCBI GI NO: 11282344 NR Description: hypothetical protein F2A19
  misc_feature (1)..(434): NCBI GI NO: 18407023 NR Description: expressed protein; protein id: At2g46260
  misc_feature (1)..(434): NCBI GI NO: 25352317 NR Description: hypothetical protein At2g46260
  misc_feature (1)..(434): NCBI GI NO: 21536778 NR Description: unknown [Arabidopsis thaliana]
  misc_feature (1)..(433): NCBI GI NO: 15234082 NR Description: hypothetical protein; protein id: At4g01160.1
  misc_feature (162)..(404): NCBI GI NO: 27948452 NR Description: GAMYB-binding protein
  misc_feature (1)..(227): NCBI GI NO: 26984582 NR Description: SI:dZ198M22
  misc_feature (29)..(227): NCBI GI NO: 38194229 NR Description: actinfilin [Homo sapiens]
MEGSPPDVDQDGDDEQGIDPSWAAVVTPVLRVKTIYISSAILAAKSPFFFKLFSNGMKESDQRHATLRITDSEEIALMELLSFMYSGKLTTTEPTLLLDILMAADKFEVVSCMRYCSQLLTSLQMTTESALLYLDLPCSVSMAAAVQPLTDAAKDFLAVKYKDLIKFQDEVMNIPRAGIEAILSSNDLQVASEDTIYDFLLRWARAQYPKSEERREVLSSRLLPLVRFSHMTCRKLRKVLACTDIDHEQATKCVTEALLFKADAPHRQRALAADAITCRKFAERAYKYRPLKVVEFDRPYPQCIAYLDLKRDECSRLFPAGRIYSQAFHLAGQGFFLSAHCNMEQQSAFYCFGLFLGMQEKGSTSVTVDYEFAARTRPSGEFVSKYKGNYTFTGGKAVGYRNLFAIPWQKFLADDSLFFVDGMLHLRAELTIKQP

SEQ ID NO: 34553 - DNA, 1115 bp, Zea mays subsp. mays
  misc_feature (1)..(1115): Ceres Seq. ID no. 12414625
aaatccttatcggcgactcggcgtcggaggctcggagcccacgaccacgaccgcttccacgccctcgaccccgaacccccaatcccggacgcgaccgctgaaccctagcatactccggccatctgccgccggccccggcgatcccccgccatggcctcccccgagggcacaacgtgggtcttcgactgtccccttatggacgacctcgcggtcgccgccgacttcgcggcagcccccgcgggaggatttttctgggcagcgccgccgtcgctgcagccgcaggcgccagtgcagtctgtcgttgccgcgtcggctcccaacccatgtatggaaatcagtagctctgtggactgtggtcaggaaaaagaacagccaacaaataaacgtccaaggtcagaaagtactacagaatcaagcacaaaagcatccagggagaaaattagaagggacaagctgaacgagagattcttggaattgggtgccattttggagccagggaaaactcctaaaatggacaaaacagctatattgagtgatgctattcgtgtagtaggtgaattgcgtagtgaagcaaaaagctcaaggattcaaatgagaatctccaagagaagattaaagagctgaaggccgagaagaatgagctgcgagacgagaagcaaaggctgaaggccgagaaggagagcctggagcagcagatcaagttcctgaatgcccggccaagcctcgtaccacaccacccagtgatcccagcctctgcgttccctgctccccaggggccagcagccgccgccaggcacaagctgatgatgcctgtgattggctaccctggattcccgatgtggcagttcatgccgccttcagatgttgacacctctgatgaccctaggtcttgtcctcctgtggcgtagaagccgtgcgaaatcctgttggaaagaggcgatgctgccttccattgattcaaatcttgatcggtccgcagtgttgctggtgtagttgattccagaactgaaggggatgttacatgtgtcggacggtgacatggggtgatctgatgacccctttgtatattatatatggtatggtataaataaattccgtgaccagaagctaatgtc

SEQ ID NO: 34554 - protein, 157 aa, Zea mays subsp. mays
  peptide (1)..(157): Ceres Seq. ID no. 12414626
  misc_feature (90)..(138): Pfam Name: Pfam Description:  Helix-loop-helix DNA-binding domain
  misc_feature (18)..(142): NCBI GI NO: 38636768 NR Description: helix-loop-helix-like protein
  misc_feature (54)..(142): NCBI GI NO: 29367409 NR Description: helix-loop-helix-like protein
  misc_feature (1)..(157): NCBI GI NO: 15239706 NR Description: bHLH protein; protein id: At5g54680
  misc_feature (1)..(157): NCBI GI NO: 21592325 NR Description: bHLH transcription factor, putative
  misc_feature (72)..(142): NCBI GI NO: 15223710 NR Description: bHLH protein; protein id: At1g51070
  misc_feature (60)..(141): NCBI GI NO: 20127030 NR Description: putative bHLH transcription factor
  misc_feature (60)..(141): NCBI GI NO: 22331274 NR Description: bHLH protein; protein id: At3g23210
  misc_feature (60)..(141): NCBI GI NO: 30682847 NR Description: bHLH protein [Arabidopsis thaliana]
  misc_feature (60)..(141): NCBI GI NO: 18414212 NR Description: bHLH protein; protein id: At4g14410
  misc_feature (56)..(140): NCBI GI NO: 7487183 NR Description: hypothetical protein T19K4
MASPEGTTWVFDCPLMDDLAVAADFAAAPAGGFFWAAPPSLQPQAPVQSVVAASAPNPCMEISSSVDCGQEKEQPTNKRPRSESTTESSTKASREKIRRDKLNERFLELGAILEPGKTPKMDKTAILSDAIRVVGELRSEAKSSRIQMRISKRRLKS

SEQ ID NO: 34555 - protein, 151 aa, Zea mays subsp. mays
  peptide (1)..(151): Ceres Seq. ID no. 12414627
NPYRRLGVGGSEPTTTTASTPSTPNPQSRTRPLNPSILRPSAAGPGDPPPWPPPRAQRGSSTVPLWTTSRSPPTSRQPPREDFSGQRRRRCSRRRQCSLSLPRRLPTHVWKSVALWTVVRKKNSQQINVQGQKVLQNQAQKHPGRKLEGTS

SEQ ID NO: 34556 - protein, 142 aa, Zea mays subsp. mays
  peptide (1)..(142): Ceres Seq. ID no. 12414628
  misc_feature (75)..(123): Pfam Name: Pfam Description:  Helix-loop-helix DNA-binding domain
  misc_feature (3)..(127): NCBI GI NO: 38636768 NR Description: helix-loop-helix-like protein
  misc_feature (39)..(127): NCBI GI NO: 29367409 NR Description: helix-loop-helix-like protein
  misc_feature (1)..(142): NCBI GI NO: 15239706 NR Description: bHLH protein; protein id: At5g54680
  misc_feature (1)..(142): NCBI GI NO: 21592325 NR Description: bHLH transcription factor, putative
  misc_feature (57)..(127): NCBI GI NO: 15223710 NR Description: bHLH protein; protein id: At1g51070
  misc_feature (45)..(126): NCBI GI NO: 20127030 NR Description: putative bHLH transcription factor
  misc_feature (45)..(126): NCBI GI NO: 22331274 NR Description: bHLH protein; protein id: At3g23210
  misc_feature (45)..(126): NCBI GI NO: 30682847 NR Description: bHLH protein [Arabidopsis thaliana]
  misc_feature (45)..(126): NCBI GI NO: 18414212 NR Description: bHLH protein; protein id: At4g14410
  misc_feature (41)..(125): NCBI GI NO: 7487183 NR Description: hypothetical protein T19K4
MDDLAVAADFAAAPAGGFFWAAPPSLQPQAPVQSVVAASAPNPCMEISSSVDCGQEKEQPTNKRPRSESTTESSTKASREKIRRDKLNERFLELGAILEPGKTPKMDKTAILSDAIRVVGELRSEAKSSRIQMRISKRRLKS

SEQ ID NO: 34557 - DNA, 1056 bp, Zea mays subsp. mays
  misc_feature (1)..(1056): Ceres Seq. ID no. 12347077
aaccatacctccgaggctccgaccaaaacaccagggtcccagtgctcttggctctaagatggcggcgccggaaccggaggccaagctggaagccgtaaccccatctcggtcccacgagctgccaccggagtccgaatccgacgcccctgcctccaccggcacccaggagctaaagccgtgggagcagcacgccgcggtgatcaacctcccgcgctacgactaccgcgcatcagggtccctcctcctccgttcgcattccggcttcctcatcacgtgccccatcaagcgtgaaaaaagtgcaaccaaggaagccattcccatccttgaagagtaccatgcaaattgctgtgtttctgaacatgcagaaccatgtgatgtgaaaaatgcaattaagaaaagaaaactgtgctcggaggcatcaggaagtttagaagaggcagtaacgaatgggaatagtagcagtgtttcagaatcaattggaagcaccggaaacacaagctcaccccagtccaaggtgaatgacaatgttgacagggcttcaaatctctcactggttaagctatcaagaagtggcttgctcttctttaaatttcctagtggaggcgttcatgtagttgagatgcttactgaaatacttcattcactcagatccgggaaactcaaatctccacaatggtgccaccgcatattcccaattcaagaaacttgcattctatcagaagaagacctgcatgccactgtgtcaaagttattccttgacttctcgaggagcaagacaaacgaagacaagcctataaagtttgcggttgcctataatagaaggggcattgatgagacagagaagaacagtaatgaaggttcaaaccagcagactttgatggatagggagcaatgtttcaaagtggtagctgctgctgtcaaatccgttgctgagaactcagtggttgatcttagatcgcctgaggtaaccttacccgacaattgtcaacagcttgcatagttactcgctactggttggatgacaaacaacatcgtacttgttaagatccaaattgg

SEQ ID NO: 34558 - protein, 332 aa, Zea mays subsp. mays
  peptide (1)..(332): Ceres Seq. ID no. 12347078
  misc_feature (55)..(322): NCBI GI NO: 14334964 NR Description: unknown protein [Arabidopsis thaliana]
  misc_feature (55)..(322): NCBI GI NO: 24030215 NR Description: unknown protein [Arabidopsis thaliana]
  misc_feature (55)..(276): NCBI GI NO: 15220918 NR Description: hypothetical protein; protein id: At1g09290.1
  misc_feature (55)..(276): NCBI GI NO: 25372975 NR Description: hypothetical protein
TIPPRLRPKHQGPSALGSKMAAPEPEAKLEAVTPSRSHELPPESESDAPASTGTQELKPWEQHAAVINLPRYDYRASGSLLLRSHSGFLITCPIKREKSATKEAIPILEEYHANCCVSEHAEPCDVKNAIKKRKLCSEASGSLEEAVTNGNSSSVSESIGSTGNTSSPQSKVNDNVDRASNLSLVKLSRSGLLFFKFPSGGVHVVEMLTEILHSLRSGKLKSPQWCHRIFPIQETCILSEEDLHATVSKLFLDFSRSKTNEDKPIKFAVAYNRRGIDETEKNSNEGSNQQTLMDREQCFKVVAAAVKSVAENSVVDLRSPEVTLPDNCQQLA

SEQ ID NO: 34559 - protein, 313 aa, Zea mays subsp. mays
  peptide (1)..(313): Ceres Seq. ID no. 12347079
  misc_feature (36)..(303): NCBI GI NO: 14334964 NR Description: unknown protein [Arabidopsis thaliana]
  misc_feature (36)..(303): NCBI GI NO: 24030215 NR Description: unknown protein [Arabidopsis thaliana]
  misc_feature (36)..(257): NCBI GI NO: 15220918 NR Description: hypothetical protein; protein id: At1g09290.1
  misc_feature (36)..(257): NCBI GI NO: 25372975 NR Description: hypothetical protein
MAAPEPEAKLEAVTPSRSHELPPESESDAPASTGTQELKPWEQHAAVINLPRYDYRASGSLLLRSHSGFLITCPIKREKSATKEAIPILEEYHANCCVSEHAEPCDVKNAIKKRKLCSEASGSLEEAVTNGNSSSVSESIGSTGNTSSPQSKVNDNVDRASNLSLVKLSRSGLLFFKFPSGGVHVVEMLTEILHSLRSGKLKSPQWCHRIFPIQETCILSEEDLHATVSKLFLDFSRSKTNEDKPIKFAVAYNRRGIDETEKNSNEGSNQQTLMDREQCFKVVAAAVKSVAENSVVDLRSPEVTLPDNCQQLA

SEQ ID NO: 34560 - DNA, 1437 bp, Zea mays subsp. mays
  misc_feature (1)..(1437): Ceres Seq. ID no. 12347187
aatctgccatcttcgtctatccctttcgtctcagttttgcagtttctactgctgtctttgctctgaaatccaaccgaaatctcagaggaaagtaggaaacctcgttcgggaacctgctttagtgagactccaatccttgggcgccattgccgcctgttttttgtgctaggaaaggcgctgtctgattcctgtatatttattttggcattgctttcagctgcaacaaaactaaccatggatggcactagctttgatctgacagagcacgaaggttcaaatctgtctccgtttctactcaaactttttaatgagtgggatgatcgcaagacaaggggcttgtttcaccatgacatcagttcctgtgaaacaaaggtgctacctggagtacataattttgtggcaacattaattgaaggacgtgaccaaaagaagcggccaactgagttcacaatgaaccaagttctccagccatttgttagtgagaagttcaatttcacaaaagtcagcccgttggaggtgatctttagattcaatgacactgagaaagaccctgcacaatattttgatggtgttcctgatactgtttcagcttcttctagtgccatcttgattaatgtgagcccaattggctactgccatgtgctattgactcccaagatccaggactgtttgccgcaaaggattgatcaagagagcttcttaatagccatgtatgttgcaagagaagcaaggactcccttcttcagagttggttataacagcctgggcggctttgcaactatcaaccaccttcacttccaggcatactacctgaaagtacagtatccagttgaaaaggcaatcacggagaagctcaagaccctagggaatagcgtgagcatttttcacctggtggattacccagtcaatggctttgtgttcgaaggtggtgcgagcctggaagatttgtcagatgtggtctccaaagtctgcatcttcctgcaagagaacaacagacctttcaatgtcctcatctctgaatctggcaagagaattttccttctaccacagtgctatgcggagaagcagcttctcggaaaggcgagccaagagttcctcgacatgagaatcaatccagcaatctgggagctcagtggtcatctggtactgaagcggaggaaggactacgaggaggcctctgaagcaaacatacgcaggtttttggttgaagcagctctttctgaaacagaatttcaggagctgaaccgatgcgtgctcgacttcctgaccagctctcttggttgaaactcggatgtaggttcctatagacagtaacagttctgaggttccagttaaaacagttgtgctggtactgttaccttatgatggtatatcatgtagtagtatttctgatttgactcgtcagctctgcgatgaaataatgtcttctccggcttc

SEQ ID NO: 34561 - protein, 349 aa, Zea mays subsp. mays
  peptide (1)..(349): Ceres Seq. ID no. 12347188
  misc_feature (46)..(347): NCBI GI NO: 34907712 NR Description: P0035F12.16
  misc_feature (4)..(342): NCBI GI NO: 15240467 NR Description: putative protein; protein id: At5g55120
  misc_feature (1)..(347): NCBI GI NO: 15810139 NR Description: unknown protein [Arabidopsis thaliana]
  misc_feature (1)..(347): NCBI GI NO: 18416877 NR Description: putative protein; protein id: At4g26850
  misc_feature (1)..(347): NCBI GI NO: 7452423 NR Description: hypothetical protein F10M23
  misc_feature (1)..(347): NCBI GI NO: 21070346 NR Description: VTC2 [Arabidopsis thaliana]
  misc_feature (17)..(345): NCBI GI NO: 34527348 NR Description: unnamed protein product [Homo sapiens]
  misc_feature (17)..(345): NCBI GI NO: 24059751 NR Description: hypothetical protein [Macaca fascicularis]
  misc_feature (16)..(341): NCBI GI NO: 27677438 NR Description: similar to CG3552-PC
  misc_feature (16)..(341): NCBI GI NO: 26351153 NR Description: unnamed protein product [Mus musculus]
MDGTSFDLTEHEGSNLSPFLLKLFNEWDDRKTRGLFHHDISSCETKVLPGVHNFVATLIEGRDQKKRPTEFTMNQVLQPFVSEKFNFTKVSPLEVIFRFNDTEKDPAQYFDGVPDTVSASSSAILINVSPIGYCHVLLTPKIQDCLPQRIDQESFLIAMYVAREARTPFFRVGYNSLGGFATINHLHFQAYYLKVQYPVEKAITEKLKTLGNSVSIFHLVDYPVNGFVFEGGASLEDLSDVVSKVCIFLQENNRPFNVLISESGKRIFLLPQCYAEKQLLGKASQEFLDMRINPAIWELSGHLVLKRRKDYEEASEANIRRFLVEAALSETEFQELNRCVLDFLTSSLG

SEQ ID NO: 34562 - protein, 277 aa, Zea mays subsp. mays
  peptide (1)..(277): Ceres Seq. ID no. 12347189
  misc_feature (1)..(275): NCBI GI NO: 34907712 NR Description: P0035F12.16
  misc_feature (1)..(270): NCBI GI NO: 15240467 NR Description: putative protein; protein id: At5g55120
  misc_feature (1)..(275): NCBI GI NO: 15810139 NR Description: unknown protein [Arabidopsis thaliana]
  misc_feature (1)..(275): NCBI GI NO: 18416877 NR Description: putative protein; protein id: At4g26850
  misc_feature (1)..(275): NCBI GI NO: 7452423 NR Description: hypothetical protein F10M23
  misc_feature (1)..(275): NCBI GI NO: 21070346 NR Description: VTC2 [Arabidopsis thaliana]
  misc_feature (1)..(273): NCBI GI NO: 34527348 NR Description: unnamed protein product [Homo sapiens]
  misc_feature (1)..(273): NCBI GI NO: 24059751 NR Description: hypothetical protein [Macaca fascicularis]
  misc_feature (1)..(269): NCBI GI NO: 27677438 NR Description: similar to CG3552-PC
  misc_feature (1)..(269): NCBI GI NO: 26351153 NR Description: unnamed protein product [Mus musculus]
MNQVLQPFVSEKFNFTKVSPLEVIFRFNDTEKDPAQYFDGVPDTVSASSSAILINVSPIGYCHVLLTPKIQDCLPQRIDQESFLIAMYVAREARTPFFRVGYNSLGGFATINHLHFQAYYLKVQYPVEKAITEKLKTLGNSVSIFHLVDYPVNGFVFEGGASLEDLSDVVSKVCIFLQENNRPFNVLISESGKRIFLLPQCYAEKQLLGKASQEFLDMRINPAIWELSGHLVLKRRKDYEEASEANIRRFLVEAALSETEFQELNRCVLDFLTSSLG

SEQ ID NO: 34563 - protein, 191 aa, Zea mays subsp. mays
  peptide (1)..(191): Ceres Seq. ID no. 12347190
  misc_feature (1)..(189): NCBI GI NO: 34907712 NR Description: P0035F12.16
  misc_feature (1)..(184): NCBI GI NO: 15240467 NR Description: putative protein; protein id: At5g55120
  misc_feature (1)..(189): NCBI GI NO: 15810139 NR Description: unknown protein [Arabidopsis thaliana]
  misc_feature (1)..(189): NCBI GI NO: 18416877 NR Description: putative protein; protein id: At4g26850
  misc_feature (1)..(189): NCBI GI NO: 7452423 NR Description: hypothetical protein F10M23
  misc_feature (1)..(189): NCBI GI NO: 21070346 NR Description: VTC2 [Arabidopsis thaliana]
  misc_feature (1)..(187): NCBI GI NO: 34527348 NR Description: unnamed protein product [Homo sapiens]
  misc_feature (1)..(187): NCBI GI NO: 24059751 NR Description: hypothetical protein [Macaca fascicularis]
  misc_feature (1)..(183): NCBI GI NO: 27677438 NR Description: similar to CG3552-PC
  misc_feature (1)..(183): NCBI GI NO: 26351153 NR Description: unnamed protein product [Mus musculus]
MYVAREARTPFFRVGYNSLGGFATINHLHFQAYYLKVQYPVEKAITEKLKTLGNSVSIFHLVDYPVNGFVFEGGASLEDLSDVVSKVCIFLQENNRPFNVLISESGKRIFLLPQCYAEKQLLGKASQEFLDMRINPAIWELSGHLVLKRRKDYEEASEANIRRFLVEAALSETEFQELNRCVLDFLTSSLG

SEQ ID NO: 34564 - DNA, 1318 bp, Zea mays subsp. mays
  misc_feature (1)..(1318): Ceres Seq. ID no. 12374566
acacacacgaacccacgaacgcaggctcccgagaacgcagcccccattggatttggaagcttctccatgggacaccgagcctcgtagacgaagcagaggggaccagagaaaccgaggagcaagaagcagggagccatggcgttcctcctgcccaagctcacaacgccgtcctgcaagttgcccccgagccccctcctcaagccccagctcgtcccgccgggccacggcggcggcaagatccaaggctcctccgtctccggctctggcgcggcgcaggtcgcggccccgggccacctcagcctcctgctcctgctcagcgcctcgcagcaggcggccggccccgcggccaagtcgacggcgaccaagaaccggggcaagggcggcggggatccgcaaaggtcggatttttacctcaacctcggcaccgcggtgcgcacgctgcgggacgacctgcccgacgtcttcgtccgggaatccaactacgatatctaccgtgaagacatcacatttgtcgacccactaaacactttccacggcattgacaactacaagaccatcttctgggcactcagatttcacgggcgcctgctgttcagagaaatcgggctcgatgtatcacgcatctggcagctgacagagaactcgatcgttgtccggtgggagctgtggggcactccccgtgtcccatgggagtcatacggctgcttcagcgggacgtcgaggtacaaggtcgacaggaacgggaaaatctacgagcacagagtcgacaacttggcgctggacttcccacgatcagtagccagagtgggcagcatcgctgacatggtagtcgccacgccgagccccaatttgacgttttggaatgcggttgtgacaggcgatggttgctcgtggacaaagctttatgaagccgtggtggaagctgtggaacgggaagagcatagttccactggcattggccctgttggctgcagcttcggttgcggctgtggctgcagtttttgaaatgcaaactgctgtagcttgagctgcttgttcataggatggaacgagctccagggctagttgtttggttgttcctaggggaaatgtatagatcaatatatatgggcacacaaatcacggtatactgatatctctttgtatactgtagctataggacagcaaatttagataaaacacgtactagatggctatatttgattacccttgtgaccttgtgttatacagggccacaggggtagtgctttcactgctttctttcatatgcgatacacagatcttttgggtgtggtttgcccaatattagacacagttt

SEQ ID NO: 34565 - protein, 289 aa, Zea mays subsp. mays
  peptide (1)..(289): Ceres Seq. ID no. 12374567
  misc_feature (1)..(280): NCBI GI NO: 38347356 NR Description: OSJNBa0070C17.17
  misc_feature (1)..(280): NCBI GI NO: 15219209 NR Description: unknown protein; protein id: At1g16320
  misc_feature (1)..(268): NCBI GI NO: 18412399 NR Description: expressed protein; protein id: At1g79510
  misc_feature (25)..(210): NCBI GI NO: 34904098 NR Description: unnamed protein product
  misc_feature (85)..(238): NCBI GI NO: 18407008 NR Description: Expressed protein; protein id: At2g46220
  misc_feature (85)..(224): NCBI GI NO: 25408977 NR Description: hypothetical protein At2g46220
  misc_feature (93)..(208): NCBI GI NO: 17228448 NR Description: hypothetical protein [Nostoc sp. PCC 7120]
  misc_feature (88)..(208): NCBI GI NO: 23126421 NR Description: hypothetical protein [Nostoc punctiforme]
  misc_feature (99)..(208): NCBI GI NO: 23040676 NR Description: hypothetical protein
  misc_feature (99)..(208): NCBI GI NO: 17230193 NR Description: hypothetical protein [Nostoc sp. PCC 7120]
MAFLLPKLTTPSCKLPPSPLLKPQLVPPGHGGGKIQGSSVSGSGAAQVAAPGHLSLLLLLSASQQAAGPAAKSTATKNRGKGGGDPQRSDFYLNLGTAVRTLRDDLPDVFVRESNYDIYREDITFVDPLNTFHGIDNYKTIFWALRFHGRLLFREIGLDVSRIWQLTENSIVVRWELWGTPRVPWESYGCFSGTSRYKVDRNGKIYEHRVDNLALDFPRSVARVGSIADMVVATPSPNLTFWNAVVTGDGCSWTKLYEAVVEAVEREEHSSTGIGPVGCSFGCGCGCSF

SEQ ID NO: 34566 - protein, 173 aa, Zea mays subsp. mays
  peptide (1)..(173): Ceres Seq. ID no. 12374568
  misc_feature (27)..(173): NCBI GI NO: 32699068 NR Description: hypothetical protein FLJ35107 [Homo sapiens]
  misc_feature (48)..(173): NCBI GI NO: 11359723 NR Description: proteophosphoglycan, membrane-associated
  misc_feature (48)..(173): NCBI GI NO: 13592175 NR Description: ppg3 [Leishmania major]
HTRTHERRLPRTQPPLDLEASPWDTEPRRRSRGDQRNRGARSREPWRSSCPSSQRRPASCPRAPSSSPSSSRRATAAARSKAPPSPALARRRSRPRATSASCSCSAPRSRRPAPRPSRRRPRTGARAAGIRKGRIFTSTSAPRCARCGTTCPTSSSGNPTTISTVKTSHLSTH

SEQ ID NO: 34567 - protein, 164 aa, Zea mays subsp. mays
  peptide (1)..(164): Ceres Seq. ID no. 12374569
THEPTNAGSRERSPHWIWKLLHGTPSLVDEAEGTRETEEQEAGSHGVPPAQAHNAVLQVAPEPPPQAPARPAGPRRRQDPRLLRLRLWRGAGRGPGPPQPPAPAQRLAAGGRPRGQVDGDQEPGQGRRGSAKVGFLPQPRHRGAHAAGRPARRLRPGIQLRYLP

SEQ ID NO: 34568 - DNA, 1081 bp, Zea mays subsp. mays
  misc_feature (1)..(1081): Ceres Seq. ID no. 12341888
gcatgcatatgatgatgacaaatggtcaagtctgtatgaagattttgacgacggtgtcggcgaagaatcaattcttcctctggaatctgattcaactggtgattttgtggacattgactctgcatcacctacctttcctagtgacgatgcaatggaatcatcaattaccaattcatttgctcggaattgttcaattaatggcactccaagtttagtttctgccatgaaaggaacacgtgtgaagaagggaatcacgacaaagttgagcgtttcttgggcccctgatgtatacgaccctcctattacttctgactcgcacacggtgaaagggcaccatacgagttcaactaagagtaactacaaatacaagacctccaagagcagcaatatcactagaaggaaaaaggacaagaagcattctaggcacagtagtagcaatgggggtggcagcaaaagagacaagaagcattcttaccgcaggtagtgccagcagcagcagcagagctattaccagtggttctctatattgtgacgcgtacagtggtggtggcatcagcagcagaactgttcctgaatctgccaagatatctccattggtggtagctgaaaatgtcacaccgcaagagatggttcctatactgaagacactggaaccaatcaaatgtactaccagctgcggcaaagagaagccatttgccttgctgtcgcgccagttttcccctgcaaggtacaaggggatgttcaccttttggaaccaaaaccaactgacttcttgacaatttgctatgcggaagctcacctgaaagttcccttgccaagggctgttcggatcccctccaaactttagagcttcaaaaaatttagagcattttagctcacttttgagctctaatctaaggttgaccaaagtttagatctaactgagctttacctctaaagtttagagaaggaaatctaaacatgccctaatttgattttatcaaagattgttgctattgttctcttcgttaccatgtttgtttcgcctgtctgaaacttcagagatcatgttttggaaaattgcttggcaaagtgcttgtgt

SEQ ID NO: 34569 - protein, 160 aa, Zea mays subsp. mays
  peptide (1)..(160): Ceres Seq. ID no. 12341889
  misc_feature (13)..(160): NCBI GI NO: 30687157 NR Description: expressed protein [Arabidopsis thaliana]
HAYDDDKWSSLYEDFDDGVGEESILPLESDSTGDFVDIDSASPTFPSDDAMESSITNSFARNCSINGTPSLVSAMKGTRVKKGITTKLSVSWAPDVYDPPITSDSHTVKGHHTSSTKSNYKYKTSKSSNITRRKKDKKHSRHSSSNGGGSKRDKKHSYRR

SEQ ID NO: 34570 - protein, 112 aa, Zea mays subsp. mays
  peptide (1)..(112): Ceres Seq. ID no. 12341890
MGVAAKETRSILTAGSASSSSRAITSGSLYCDAYSGGGISSRTVPESAKISPLVVAENVTPQEMVPILKTLEPIKCTTSCGKEKPFALLSRQFSPARYKGMFTFWNQNQLTS

SEQ ID NO: 34571 - protein, 110 aa, Zea mays subsp. mays
  peptide (1)..(110): Ceres Seq. ID no. 12341891
  misc_feature (1)..(110): NCBI GI NO: 30687157 NR Description: expressed protein [Arabidopsis thaliana]
MESSITNSFARNCSINGTPSLVSAMKGTRVKKGITTKLSVSWAPDVYDPPITSDSHTVKGHHTSSTKSNYKYKTSKSSNITRRKKDKKHSRHSSSNGGGSKRDKKHSYRR

SEQ ID NO: 34572 - DNA, 1016 bp, Zea mays subsp. mays
  misc_feature (1)..(1016): Ceres Seq. ID no. 12367141
aaccttttgccgtcttgcggcggccttctgctccgccgctcgttctcatctcttgcagcggcctggggaaaaagaggaggagagatcggagatgaaggcgtgtgcgaaggctgcgggggagaggctgccgctggtctgtgctccgtcaactaggcagcctctagctcggagctttgttaaggtaagaagattaccctctcaacatgagacgaagtcacaagtatcctgctcagttagggtgtcagaaaacacagctcacagaatagatgccacagcagaaaacattttcccagcaatgaaagatcatgtcttgaaagcaactgatgcaatcaacagaggagaagtgattgcggtgcctactgataccatatacgggtttgcatgtgatgcatgctctgcaggagcagttaatcgtatttatgagatcaaaggacgcatacaaacacggcctctggcaatttgtgttggtgatgtctcagacatatcacggtttgctttagtggaccacttgccacatggcttgcttgatagtctacttcctgggcctgtcactattgttctaaaacgaggtgaaaacagcatattagagagatcacttaatcctggcttggatagcattggagttcgtgtgccggatctggatttcatacgttccattgttcgtggtactggaagtgcacttgcacttaccagcgccaacttaagcggacagcctagtagtgtctgtgtcaaagatttcgagggtttatggccacattgttcatatgtctttgatggtggagtacttccttctgggcgtgctggttcaacaatcgttgatctaataacaccaggagtttacaagatattgagggacggaagctcaaggaaggaaacagcagcagtgctcggcaagttcggctttgttgaagcgttgtaactactcggcactttaagaaagttagcacgatcaaagagtggctgtcttatccacagtatatcttgtttaattagtgatacattagagcttttgttgc

SEQ ID NO: 34573 - protein, 305 aa, Zea mays subsp. mays
  peptide (1)..(305): Ceres Seq. ID no. 12367142
  misc_feature (108)..(286): Pfam Name: Pfam Description:  yrdC domain
  misc_feature (95)..(299): NCBI GI NO: 9759323 NR Description: gene_id:MUP24
  misc_feature (104)..(302): NCBI GI NO: 23956354 NR Description: hypothetical protein MGC38336 [Mus musculus]
  misc_feature (104)..(302): NCBI GI NO: 30908964 NR Description: ischemia/reperfusion inducible protein
  misc_feature (104)..(302): NCBI GI NO: 30691316 NR Description: YRDC protein [Homo sapiens]
  misc_feature (104)..(302): NCBI GI NO: 31088868 NR Description: ischemia/reperfusion inducible protein
  misc_feature (113)..(303): NCBI GI NO: 28573691 NR Description: CG33005-PB [Drosophila melanogaster]
  misc_feature (121)..(302): NCBI GI NO: 28278078 NR Description: Similar to hypothetical protein MGC38336
  misc_feature (95)..(189): NCBI GI NO: 18424373 NR Description: putative protein; protein id: At5g60590
  misc_feature (99)..(303): NCBI GI NO: 39591298 NR Description: Hypothetical protein CBG20783
  misc_feature (100)..(286): NCBI GI NO: 15888068 NR Description: AGR_C_1315p [Agrobacterium tumefaciens]
TFCRLAAAFCSAARSHLLQRPGEKEEERSEMKACAKAAGERLPLVCAPSTRQPLARSFVKVRRLPSQHETKSQVSCSVRVSENTAHRIDATAENIFPAMKDHVLKATDAINRGEVIAVPTDTIYGFACDACSAGAVNRIYEIKGRIQTRPLAICVGDVSDISRFALVDHLPHGLLDSLLPGPVTIVLKRGENSILERSLNPGLDSIGVRVPDLDFIRSIVRGTGSALALTSANLSGQPSSVCVKDFEGLWPHCSYVFDGGVLPSGRAGSTIVDLITPGVYKILRDGSSRKETAAVLGKFGFVEAL

SEQ ID NO: 34574 - protein, 275 aa, Zea mays subsp. mays
  peptide (1)..(275): Ceres Seq. ID no. 12367143
  misc_feature (78)..(256): Pfam Name: Pfam Description:  yrdC domain
  misc_feature (65)..(269): NCBI GI NO: 9759323 NR Description: gene_id:MUP24
  misc_feature (74)..(272): NCBI GI NO: 23956354 NR Description: hypothetical protein MGC38336 [Mus musculus]
  misc_feature (74)..(272): NCBI GI NO: 30908964 NR Description: ischemia/reperfusion inducible protein
  misc_feature (74)..(272): NCBI GI NO: 30691316 NR Description: YRDC protein [Homo sapiens]
  misc_feature (74)..(272): NCBI GI NO: 31088868 NR Description: ischemia/reperfusion inducible protein
  misc_feature (83)..(273): NCBI GI NO: 28573691 NR Description: CG33005-PB [Drosophila melanogaster]
  misc_feature (91)..(272): NCBI GI NO: 28278078 NR Description: Similar to hypothetical protein MGC38336
  misc_feature (65)..(159): NCBI GI NO: 18424373 NR Description: putative protein; protein id: At5g60590
  misc_feature (69)..(273): NCBI GI NO: 39591298 NR Description: Hypothetical protein CBG20783
  misc_feature (70)..(256): NCBI GI NO: 15888068 NR Description: AGR_C_1315p [Agrobacterium tumefaciens]
MKACAKAAGERLPLVCAPSTRQPLARSFVKVRRLPSQHETKSQVSCSVRVSENTAHRIDATAENIFPAMKDHVLKATDAINRGEVIAVPTDTIYGFACDACSAGAVNRIYEIKGRIQTRPLAICVGDVSDISRFALVDHLPHGLLDSLLPGPVTIVLKRGENSILERSLNPGLDSIGVRVPDLDFIRSIVRGTGSALALTSANLSGQPSSVCVKDFEGLWPHCSYVFDGGVLPSGRAGSTIVDLITPGVYKILRDGSSRKETAAVLGKFGFVEAL

SEQ ID NO: 34575 - protein, 207 aa, Zea mays subsp. mays
  peptide (1)..(207): Ceres Seq. ID no. 12367144
  misc_feature (10)..(188): Pfam Name: Pfam Description:  yrdC domain
  misc_feature (1)..(201): NCBI GI NO: 9759323 NR Description: gene_id:MUP24
  misc_feature (6)..(204): NCBI GI NO: 23956354 NR Description: hypothetical protein MGC38336 [Mus musculus]
  misc_feature (6)..(204): NCBI GI NO: 30908964 NR Description: ischemia/reperfusion inducible protein
  misc_feature (6)..(204): NCBI GI NO: 30691316 NR Description: YRDC protein [Homo sapiens]
  misc_feature (6)..(204): NCBI GI NO: 31088868 NR Description: ischemia/reperfusion inducible protein
  misc_feature (15)..(205): NCBI GI NO: 28573691 NR Description: CG33005-PB [Drosophila melanogaster]
  misc_feature (23)..(204): NCBI GI NO: 28278078 NR Description: Similar to hypothetical protein MGC38336
  misc_feature (1)..(91): NCBI GI NO: 18424373 NR Description: putative protein; protein id: At5g60590
  misc_feature (1)..(205): NCBI GI NO: 39591298 NR Description: Hypothetical protein CBG20783
  misc_feature (2)..(188): NCBI GI NO: 15888068 NR Description: AGR_C_1315p [Agrobacterium tumefaciens]
MKDHVLKATDAINRGEVIAVPTDTIYGFACDACSAGAVNRIYEIKGRIQTRPLAICVGDVSDISRFALVDHLPHGLLDSLLPGPVTIVLKRGENSILERSLNPGLDSIGVRVPDLDFIRSIVRGTGSALALTSANLSGQPSSVCVKDFEGLWPHCSYVFDGGVLPSGRAGSTIVDLITPGVYKILRDGSSRKETAAVLGKFGFVEAL

SEQ ID NO: 34576 - DNA, 594 bp, Zea mays subsp. mays
  misc_feature (1)..(594): Ceres Seq. ID no. 13564163
cagaccactcaaggtcgttgagtttgatcggccctatccacagtgcatagcatacttggatctcaagcgcgaggagtgctctcgactctttcctgcaggccggatatactcgcaagcgttccacctcgcagggcagggcttcttcctctcagctcactgtaacatggaacagcaaagcaccttctactgctttggcctgttcctggggatgcaagagaagggctcaacgagcgtgaccgtggactatgagtttgctgcaagaacgagaccatccggcgagtttgtgagcaagtataagggtaactacacatttaccggtgggaaggcagttgggtacaggaatctctttggaatcccgtggcaggcgttcatggccgatgacagcctcttcttcatcgacgggatgctgcatctgagagctgagcttacgataaagcaacctacgtagatgtgctgccgtcggattaagtgtgtccagtcatgggtgatgtggaaaatgctgtgtgctgcagatatcctttttvtttttwwccttttgttcacgcaccttaatccttacattaatagacagtttggtgatgacaaaatataaag

SEQ ID NO: 34577 - protein, 148 aa, Zea mays subsp. mays
  peptide (1)..(148): Ceres Seq. ID no. 13564164
  misc_feature (1)..(148): NCBI GI NO: 11282344 NR Description: hypothetical protein F2A19
  misc_feature (1)..(148): NCBI GI NO: 30695452 NR Description: POZ domain protein family [Arabidopsis thaliana]
  misc_feature (1)..(146): NCBI GI NO: 18412063 NR Description: POZ domain protein family [Arabidopsis thaliana]
  misc_feature (1)..(146): NCBI GI NO: 18407023 NR Description: POZ domain protein family [Arabidopsis thaliana]
  misc_feature (1)..(146): NCBI GI NO: 25352317 NR Description: hypothetical protein At2g46260
  misc_feature (1)..(146): NCBI GI NO: 21536778 NR Description: unknown [Arabidopsis thaliana]
  misc_feature (1)..(116): NCBI GI NO: 27948452 NR Description: GAMYB-binding protein
  misc_feature (1)..(145): NCBI GI NO: 15234082 NR Description: POZ domain protein family [Arabidopsis thaliana]
RPLKVVEFDRPYPQCIAYLDLKREECSRLFPAGRIYSQAFHLAGQGFFLSAHCNMEQQSTFYCFGLFLGMQEKGSTSVTVDYEFAARTRPSGEFVSKYKGNYTFTGGKAVGYRNLFGIPWQAFMADDSLFFIDGMLHLRAELTIKQPT

SEQ ID NO: 34578 - protein, 94 aa, Zea mays subsp. mays
  peptide (1)..(94): Ceres Seq. ID no. 13564165
  misc_feature (1)..(94): NCBI GI NO: 11282344 NR Description: hypothetical protein F2A19
  misc_feature (1)..(94): NCBI GI NO: 30695452 NR Description: POZ domain protein family [Arabidopsis thaliana]
  misc_feature (1)..(92): NCBI GI NO: 18412063 NR Description: POZ domain protein family [Arabidopsis thaliana]
  misc_feature (1)..(92): NCBI GI NO: 18407023 NR Description: POZ domain protein family [Arabidopsis thaliana]
  misc_feature (1)..(92): NCBI GI NO: 21536778 NR Description: unknown [Arabidopsis thaliana]
  misc_feature (1)..(92): NCBI GI NO: 25352317 NR Description: hypothetical protein At2g46260
  misc_feature (1)..(62): NCBI GI NO: 27948452 NR Description: GAMYB-binding protein
  misc_feature (1)..(91): NCBI GI NO: 15234082 NR Description: POZ domain protein family [Arabidopsis thaliana]
MEQQSTFYCFGLFLGMQEKGSTSVTVDYEFAARTRPSGEFVSKYKGNYTFTGGKAVGYRNLFGIPWQAFMADDSLFFIDGMLHLRAELTIKQPT

SEQ ID NO: 34579 - protein, 79 aa, Zea mays subsp. mays
  peptide (1)..(79): Ceres Seq. ID no. 13564166
  misc_feature (1)..(79): NCBI GI NO: 11282344 NR Description: hypothetical protein F2A19
  misc_feature (1)..(79): NCBI GI NO: 30695452 NR Description: POZ domain protein family [Arabidopsis thaliana]
  misc_feature (1)..(77): NCBI GI NO: 18412063 NR Description: POZ domain protein family [Arabidopsis thaliana]
  misc_feature (1)..(77): NCBI GI NO: 18407023 NR Description: POZ domain protein family [Arabidopsis thaliana]
  misc_feature (1)..(77): NCBI GI NO: 21536778 NR Description: unknown [Arabidopsis thaliana]
  misc_feature (1)..(77): NCBI GI NO: 25352317 NR Description: hypothetical protein At2g46260
  misc_feature (1)..(47): NCBI GI NO: 27948452 NR Description: GAMYB-binding protein
  misc_feature (1)..(76): NCBI GI NO: 15234082 NR Description: POZ domain protein family [Arabidopsis thaliana]
MQEKGSTSVTVDYEFAARTRPSGEFVSKYKGNYTFTGGKAVGYRNLFGIPWQAFMADDSLFFIDGMLHLRAELTIKQPT

SEQ ID NO: 34580 - DNA, 1144 bp, Zea mays subsp. mays
  misc_feature (1)..(1144): Ceres Seq. ID no. 12340675
acgaccttctagttctagatgattctcaaacccacttccgggctgccgccgaggttatctacaacaccgagcagcgagaaggggttggtgtccagcacgaattgaatcgtcgccagaagtcatggcggattcggccacttcccgtccaaccgttctcgtcaccggcgccggcggccgcacaggccaaattgtctacaacaaactgaaagagaggtctgagcagttcgtggcaagagggctagtcaggacagaggagagcaagcagaagattggggcagccggtgatgtttacgttgctgacataagagacgcggatcgtctagcacctgctgtacaaggtgtggatgcgctcataatcctcaccagtgctgccccgaaaatgaaaccgggtttcgaccctagcaaaggtggacggcccgagttctactacgaagacggaatgtaccctgaacaggtggattggcttggccaaaagaatcagatcgatgctgctaaagctgctggagtgaagcatattgtgctggtgggatctatgggaggaacaaatcctaaccatccgctgaacagcatgggtaatggcaatatactggtatggaagcgcaaagcagaacagtatttggcagacagtggaatcccttatacaatcataaggccaggaggtctacaagacaaggacggaggagtgagagagctacttgtggggaaagacgatgaacttctccagactgacacaaagtcgattcctagagccgatgtggctgaggtttgtgtccaggctctgcagtacgaagaggccaagttcaaggcatttgatttggcctcaaagcctgaaggtgtgggcacgccaacaaaggactttagggcactgttctcccagatcactgctcggttttgagcgagctgctgggaagcctactcgagttctagattttatggtgtcacaatccattttatcgtgggcttgtcctggagatacaaccaggtagcttgttggagctgcggtttggtgcaattgcaaccaggtagcttgtatcaatccattttatggtgcattgtttgcttgtacactgctgaatgtcgtctggttgccaattgtgtgaactgttgacagccattaaaacaagttatttggaaccctgtttgc

SEQ ID NO: 34581 - protein, 257 aa, Zea mays subsp. mays
  peptide (1)..(257): Ceres Seq. ID no. 12340676
  misc_feature (1)..(257): NCBI GI NO: 34897418 NR Description: unknown protein
  misc_feature (4)..(257): NCBI GI NO: 18404496 NR Description: expressed protein; protein id: At2g37660
  misc_feature (1)..(257): NCBI GI NO: 14719331 NR Description: putative 3-beta hydroxysteroiddehydrogenase/isomerase protein
  misc_feature (9)..(257): NCBI GI NO: 18413869 NR Description: putative protein; protein id: At5g02240
  misc_feature (4)..(257): NCBI GI NO: 7485430 NR Description: hypothetical protein At2g37660
  misc_feature (9)..(252): NCBI GI NO: 11358410 NR Description: hypothetical protein T7H20
  misc_feature (96)..(253): NCBI GI NO: 16330694 NR Description: hypothetical protein [Synechocystis sp. PCC 6803]
  misc_feature (96)..(253): NCBI GI NO: 23130188 NR Description: hypothetical protein [Nostoc punctiforme]
  misc_feature (1)..(250): NCBI GI NO: 30689062 NR Description: expressed protein [Arabidopsis thaliana]
  misc_feature (96)..(252): NCBI GI NO: 17230243 NR Description: hypothetical protein [Nostoc sp. PCC 7120]
MADSATSRPTVLVTGAGGRTGQIVYNKLKERSEQFVARGLVRTEESKQKIGAAGDVYVADIRDADRLAPAVQGVDALIILTSAAPKMKPGFDPSKGGRPEFYYEDGMYPEQVDWLGQKNQIDAAKAAGVKHIVLVGSMGGTNPNHPLNSMGNGNILVWKRKAEQYLADSGIPYTIIRPGGLQDKDGGVRELLVGKDDELLQTDTKSIPRADVAEVCVQALQYEEAKFKAFDLASKPEGVGTPTKDFRALFSQITARF

SEQ ID NO: 34582 - protein, 171 aa, Zea mays subsp. mays
  peptide (1)..(171): Ceres Seq. ID no. 12340677
  misc_feature (1)..(171): NCBI GI NO: 34897418 NR Description: unknown protein
  misc_feature (1)..(171): NCBI GI NO: 18404496 NR Description: expressed protein; protein id: At2g37660
  misc_feature (1)..(171): NCBI GI NO: 14719331 NR Description: putative 3-beta hydroxysteroiddehydrogenase/isomerase protein
  misc_feature (1)..(171): NCBI GI NO: 18413869 NR Description: putative protein; protein id: At5g02240
  misc_feature (1)..(171): NCBI GI NO: 7485430 NR Description: hypothetical protein At2g37660
  misc_feature (1)..(166): NCBI GI NO: 11358410 NR Description: hypothetical protein T7H20
  misc_feature (10)..(167): NCBI GI NO: 16330694 NR Description: hypothetical protein [Synechocystis sp. PCC 6803]
  misc_feature (10)..(167): NCBI GI NO: 23130188 NR Description: hypothetical protein [Nostoc punctiforme]
  misc_feature (1)..(164): NCBI GI NO: 30689062 NR Description: expressed protein [Arabidopsis thaliana]
  misc_feature (10)..(166): NCBI GI NO: 17230243 NR Description: hypothetical protein [Nostoc sp. PCC 7120]
MKPGFDPSKGGRPEFYYEDGMYPEQVDWLGQKNQIDAAKAAGVKHIVLVGSMGGTNPNHPLNSMGNGNILVWKRKAEQYLADSGIPYTIIRPGGLQDKDGGVRELLVGKDDELLQTDTKSIPRADVAEVCVQALQYEEAKFKAFDLASKPEGVGTPTKDFRALFSQITARF

SEQ ID NO: 34583 - protein, 151 aa, Zea mays subsp. mays
  peptide (1)..(151): Ceres Seq. ID no. 12340678
  misc_feature (1)..(151): NCBI GI NO: 34897418 NR Description: unknown protein
  misc_feature (1)..(151): NCBI GI NO: 18404496 NR Description: expressed protein; protein id: At2g37660
  misc_feature (1)..(151): NCBI GI NO: 14719331 NR Description: putative 3-beta hydroxysteroiddehydrogenase/isomerase protein
  misc_feature (1)..(151): NCBI GI NO: 18413869 NR Description: putative protein; protein id: At5g02240
  misc_feature (1)..(151): NCBI GI NO: 7485430 NR Description: hypothetical protein At2g37660
  misc_feature (1)..(146): NCBI GI NO: 11358410 NR Description: hypothetical protein T7H20
  misc_feature (1)..(147): NCBI GI NO: 16330694 NR Description: hypothetical protein [Synechocystis sp. PCC 6803]
  misc_feature (1)..(147): NCBI GI NO: 23130188 NR Description: hypothetical protein [Nostoc punctiforme]
  misc_feature (1)..(144): NCBI GI NO: 30689062 NR Description: expressed protein [Arabidopsis thaliana]
  misc_feature (1)..(146): NCBI GI NO: 17230243 NR Description: hypothetical protein [Nostoc sp. PCC 7120]
MYPEQVDWLGQKNQIDAAKAAGVKHIVLVGSMGGTNPNHPLNSMGNGNILVWKRKAEQYLADSGIPYTIIRPGGLQDKDGGVRELLVGKDDELLQTDTKSIPRADVAEVCVQALQYEEAKFKAFDLASKPEGVGTPTKDFRALFSQITARF

SEQ ID NO: 34584 - DNA, 1683 bp, Zea mays subsp. mays
  misc_feature (1)..(1683): Ceres Seq. ID no. 12435135
aagttccagagccctccagagcaaaaaaaatatattatcgaatactaaagcattttcctcatcgatagaatatagaattttaaaaagggagcgaaataggtttttcctttttgcagctccgtcgtccaccaacctcctccgatccggccgccgcagcgtagccgaattgtcccctcgctagcttctccggccggctagaggctgtttcaggcggcctcgatctcctccgcgcggctgaggaaggagatcacgcggttgctcaggggctggggcgtgcatgatgggattttggttgattccgatggagactccgggcgaggcttctgtggaagcacgagcttcttccgccacaagatcgccgccatgctcgcctcctcctcctgcttcttatagatcccaccccctcgccgtcgtcgtcggcacggcagctagctcgctagcttctgtacataggtcgacgcgccatatagatactagtctcggattaagcgataattaaggcaaagaatctccaagtttgcttcgttcttgcattgaaccatggagtctggacggctcatcttcaacgcgccgggctctggcgccgggcagatgctcttcctcgactgcggcgcaggcggcggtcccggcggcggcttgttccatcgaggcgggagaccgatgcttggccttgaagaagggcgcggcgtaaaacggcccttcttcacctcgcccgacgagctcctcgaggaagagtactacgacgagcagctgccggagaagaagcgccgcctcaccccagagcaggtgcttctgctggagaggagcttcgaggaggagaacaagctggagccggagcgcaagacggagctggcgcgcaagctgggcctgcagcctcgccaggtggccgtctggttccagaaccgccgcgcccggtggaagaccaagcagctcgagcgcgacttcgaccgcctcaaggcctccttcgacgctctccgagcggaccagcgacgccctcctccaggacaacaaccgcctccgctcacaggttgtgtcgttgaccgagaagctgcaagagaaggaggatgcgacggagggcggcgccaccgctgacaccgccgcgccggcggtggacgtcgaggcttccctggccgacgacgtcgaggagccagcagagcctgcggcgacgttcgaggtgctgcaggaggtgaagtccgaggacaggctgagcaccggcagcggcgggagcgcggtggtggacgcggacgcgctgctgtacggcaggtttgccgcggcagttgatagcagcgtggagtcgtacttccccggcggcgaggaccactaccacgactgcgggacgatgggccccgtgaaccatggcgccggaggaggcatccagtcggacgacgacggcgccggcagcgacgaggggtgcagctactacgccgacgaagccgccgccgccgccgccgccgcgttcttcgccggacacgccacccaccaccacgcggacgaggacgaggacgccggccagatcagctggtggatgtggaactagacgttcgatcttcccacgccgatcgatcgaccgtcttcgaatcctgtgtcaacaagaagaaaaaagaatcgtgccgtgatttttctttgcgcaacgctgctgtaagcctgtaatggtgaatttctagctatggttatgccgttatg

SEQ ID NO: 34585 - protein, 183 aa, Zea mays subsp. mays
  peptide (1)..(183): Ceres Seq. ID no. 12435136
  misc_feature (74)..(128): Pfam Name: Pfam Description:  Homeobox domain
  misc_feature (1)..(148): NCBI GI NO: 37573050 NR Description: homeodomain leucine zipper protein
  misc_feature (1)..(148): NCBI GI NO: 5006855 NR Description: homeodomain leucine zipper protein [Oryza sativa]
  misc_feature (1)..(145): NCBI GI NO: 18034441 NR Description: homeodomain leucine zipper protein CPHB-5
  misc_feature (1)..(145): NCBI GI NO: 15232122 NR Description: homeobox-leucine zipper protein HAT5
  misc_feature (69)..(145): NCBI GI NO: 15148920 NR Description: homeodomain leucine zipper protein HDZ3
  misc_feature (70)..(145): NCBI GI NO: 166754 NR Description: homeobox protein
  misc_feature (36)..(148): NCBI GI NO: 15148918 NR Description: homeodomain leucine zipper protein HDZ2
  misc_feature (49)..(148): NCBI GI NO: 21623495 NR Description: homeobox protein PpHB7 [Physcomitrella patens]
  misc_feature (49)..(148): NCBI GI NO: 27531102 NR Description: homeobox protein Pphb7 long form
  misc_feature (54)..(148): NCBI GI NO: 7446244 NR Description: homeotic protein - carrot
MESGRLIFNAPGSGAGQMLFLDCGAGGGPGGGLFHRGGRPMLGLEEGRGVKRPFFTSPDELLEEEYYDEQLPEKKRRLTPEQVLLLERSFEEENKLEPERKTELARKLGLQPRQVAVWFQNRRARWKTKQLERDFDRLKASFDALRADQRRPPPGQQPPPLTGCVVDREAAREGGCDGGRRHR

SEQ ID NO: 34586 - protein, 166 aa, Zea mays subsp. mays
  peptide (1)..(166): Ceres Seq. ID no. 12435137
  misc_feature (57)..(111): Pfam Name: Pfam Description:  Homeobox domain
  misc_feature (1)..(131): NCBI GI NO: 37573050 NR Description: homeodomain leucine zipper protein
  misc_feature (1)..(131): NCBI GI NO: 5006855 NR Description: homeodomain leucine zipper protein [Oryza sativa]
  misc_feature (1)..(128): NCBI GI NO: 18034441 NR Description: homeodomain leucine zipper protein CPHB-5
  misc_feature (1)..(128): NCBI GI NO: 15232122 NR Description: homeobox-leucine zipper protein HAT5
  misc_feature (52)..(128): NCBI GI NO: 15148920 NR Description: homeodomain leucine zipper protein HDZ3
  misc_feature (53)..(128): NCBI GI NO: 166754 NR Description: homeobox protein
  misc_feature (19)..(131): NCBI GI NO: 15148918 NR Description: homeodomain leucine zipper protein HDZ2
  misc_feature (32)..(131): NCBI GI NO: 21623495 NR Description: homeobox protein PpHB7 [Physcomitrella patens]
  misc_feature (32)..(131): NCBI GI NO: 27531102 NR Description: homeobox protein Pphb7 long form
  misc_feature (37)..(131): NCBI GI NO: 7446244 NR Description: homeotic protein - carrot
MLFLDCGAGGGPGGGLFHRGGRPMLGLEEGRGVKRPFFTSPDELLEEEYYDEQLPEKKRRLTPEQVLLLERSFEEENKLEPERKTELARKLGLQPRQVAVWFQNRRARWKTKQLERDFDRLKASFDALRADQRRPPPGQQPPPLTGCVVDREAAREGGCDGGRRHR

SEQ ID NO: 34587 - protein, 143 aa, Zea mays subsp. mays
  peptide (1)..(143): Ceres Seq. ID no. 12435138
  misc_feature (34)..(88): Pfam Name: Pfam Description:  Homeobox domain
  misc_feature (1)..(108): NCBI GI NO: 37573050 NR Description: homeodomain leucine zipper protein
  misc_feature (1)..(108): NCBI GI NO: 5006855 NR Description: homeodomain leucine zipper protein [Oryza sativa]
  misc_feature (1)..(105): NCBI GI NO: 18034441 NR Description: homeodomain leucine zipper protein CPHB-5
  misc_feature (1)..(105): NCBI GI NO: 15232122 NR Description: homeobox-leucine zipper protein HAT5
  misc_feature (29)..(105): NCBI GI NO: 15148920 NR Description: homeodomain leucine zipper protein HDZ3
  misc_feature (30)..(105): NCBI GI NO: 166754 NR Description: homeobox protein
  misc_feature (1)..(108): NCBI GI NO: 15148918 NR Description: homeodomain leucine zipper protein HDZ2
  misc_feature (9)..(108): NCBI GI NO: 21623495 NR Description: homeobox protein PpHB7 [Physcomitrella patens]
  misc_feature (9)..(108): NCBI GI NO: 27531102 NR Description: homeobox protein Pphb7 long form
  misc_feature (14)..(108): NCBI GI NO: 7446244 NR Description: homeotic protein - carrot
MLGLEEGRGVKRPFFTSPDELLEEEYYDEQLPEKKRRLTPEQVLLLERSFEEENKLEPERKTELARKLGLQPRQVAVWFQNRRARWKTKQLERDFDRLKASFDALRADQRRPPPGQQPPPLTGCVVDREAAREGGCDGGRRHR

SEQ ID NO: 34588 - DNA, 1961 bp, Zea mays subsp. mays
  misc_feature (1)..(1961): Ceres Seq. ID no. 12367287
gcatccgcatctctctctctcgcgcgcgccgcccttcccagcgccgtcggctgccgctcctcccctccaccgccgcctctgctccgcccgtcctcgcgccgtcgcgaccgctgcggcttcgtctctccccattgtctgtcccctctcaacgcactctacgacggaccgatgacttgacggatctgggggtttgtctagggtgggtgaacggaaggggatggagttcacggagtcgttcaagcagacgggcccgtgctccttctcccccgactcgcgcttccttgctattgccgtagactaccgtctcgtcgtccgcgacgtactctcactgaaggtggtacaattattttcatgcgtggacaagataagctctgtagaatgggcaccagattcagaatacattttatgtggactttacaagcgacccatggtgcaagcttggtcactgagtcaacctgattggacctgcaagattgatgaaggtccagcagggattgcatatgctcgctggagtcctgacagtcgtcatatattaactacatctgagtttcagctccgtctcactgtgtggtctctcgtaaatacagcatgcgtacatgtccagtggccaaaacatggttctaaaggtgtttctttcaccaaagacgggaaatttgctgcaatctgtaccagacgtgattgcaaggattacattaatttactatcatgtcactcttgggaaataatgactgtctttgctattgacacggtagacttagctggtgttgaatggtcaccatatgatagtgctattgttgtttgggattcacttcttgaatataaggttctgatatattcgccagacggaaggtgcttgttcaagtatctagcttatgaaagtgggttgggtgtgaaaactgttgcttggtcaccatgtggacagtttttagcagtgggcagctatgatcaagcagtacggactttgaatcacttgacgtggaaaacttttgcggagttctcacatgcagggtatattcgtagtccttgcaatgctgctatatataaggaagtggatgacccatggcaacttgatatgtcagaattatgtctaagtgaaggcctctctcgaaacatgccagacaatggtgcagaaaatggcaccgagggaggaggctctagagttaaatatgctgtgatggatgttcccatcaccttaccttcgttgaaaccagcttttgacaagcctaaccccaaacaaggcattggtatgctgtcatggagcagcgacagccactatttcttcaccaggaatgacaacatgccaactgttctctggatatgggatatatgccgccttgagcttgccgctgtgctcgtgcagaaagatccaattcgtgctgcagcatgggaccctacctgcacacgccttgttttatgcacagagagccctcacttgtacatgtggacgccatccggtgcctgctgtgtcaacatcccctttctgaacttccgaatcgttgatttgaagtggagctcgaatgggagctgtctcctcctgaaggagcgcgaatctttctgctgtgccacaatcatatctgccctgcctgaggaagaacctgatcattctgatgatacttctgaagatgaatgagtggcctcatggtatgtctagcagcttatgcgaatggaactgggaactaacagtacaaatgatcttgtgatggtgaatgagtgacactgactgactacttagctacttgtagaatccagagtggattgcgataccatgaatcgataaggtcatttcgctgcttagatggcaaatgctctatcaccaggcactacagaatggacagagaactgtgtggttctatttgttgtattcttgctcttgtttgtctgttgtagtttctccaaggttgtactgcttgaccttacttgttggatcttaatcttacatatccagtcaccagggtattttc

SEQ ID NO: 34589 - protein, 470 aa, Zea mays subsp. mays
  peptide (1)..(470): Ceres Seq. ID no. 12367288
  misc_feature (374)..(410): Pfam Name: Pfam Description:  WD domain, G-beta repeat
  misc_feature (1)..(470): NCBI GI NO: 37536890 NR Description: putative WD-40 protein
  misc_feature (1)..(293): NCBI GI NO: 15240819 NR Description: WD-repeat protein-like; protein id: At5g07590.1
  misc_feature (1)..(447): NCBI GI NO: 16445434 NR Description: WD repeat domain 8 protein
  misc_feature (1)..(447): NCBI GI NO: 17380347 NR Description: WD-repeat protein 8
  misc_feature (1)..(447): NCBI GI NO: 7020525 NR Description: unnamed protein product [Homo sapiens]
  misc_feature (1)..(447): NCBI GI NO: 10946908 NR Description: WD repeat domain 8; DD57 [Mus musculus]
  misc_feature (1)..(447): NCBI GI NO: 26342120 NR Description: unnamed protein product [Mus musculus]
  misc_feature (1)..(450): NCBI GI NO: 29791584 NR Description: Similar to WD repeat domain 8 [Danio rerio]
  misc_feature (1)..(420): NCBI GI NO: 12803559 NR Description: Similar to hypothetical protein FLJ20430
  misc_feature (1)..(366): NCBI GI NO: 38174120 NR Description: Unknown (protein for MGC:75994)
MEFTESFKQTGPCSFSPDSRFLAIAVDYRLVVRDVLSLKVVQLFSCVDKISSVEWAPDSEYILCGLYKRPMVQAWSLSQPDWTCKIDEGPAGIAYARWSPDSRHILTTSEFQLRLTVWSLVNTACVHVQWPKHGSKGVSFTKDGKFAAICTRRDCKDYINLLSCHSWEIMTVFAIDTVDLAGVEWSPYDSAIVVWDSLLEYKVLIYSPDGRCLFKYLAYESGLGVKTVAWSPCGQFLAVGSYDQAVRTLNHLTWKTFAEFSHAGYIRSPCNAAIYKEVDDPWQLDMSELCLSEGLSRNMPDNGAENGTEGGGSRVKYAVMDVPITLPSLKPAFDKPNPKQGIGMLSWSSDSHYFFTRNDNMPTVLWIWDICRLELAAVLVQKDPIRAAAWDPTCTRLVLCTESPHLYMWTPSGACCVNIPFLNFRIVDLKWSSNGSCLLLKERESFCCATIISALPEEEPDHSDDTSEDE

SEQ ID NO: 34590 - protein, 400 aa, Zea mays subsp. mays
  peptide (1)..(400): Ceres Seq. ID no. 12367289
  misc_feature (304)..(340): Pfam Name: Pfam Description:  WD domain, G-beta repeat
  misc_feature (1)..(400): NCBI GI NO: 37536890 NR Description: putative WD-40 protein
  misc_feature (1)..(223): NCBI GI NO: 15240819 NR Description: WD-repeat protein-like; protein id: At5g07590.1
  misc_feature (1)..(377): NCBI GI NO: 16445434 NR Description: WD repeat domain 8 protein
  misc_feature (1)..(377): NCBI GI NO: 17380347 NR Description: WD-repeat protein 8
  misc_feature (1)..(377): NCBI GI NO: 7020525 NR Description: unnamed protein product [Homo sapiens]
  misc_feature (1)..(377): NCBI GI NO: 10946908 NR Description: WD repeat domain 8; DD57 [Mus musculus]
  misc_feature (1)..(377): NCBI GI NO: 26342120 NR Description: unnamed protein product [Mus musculus]
  misc_feature (1)..(380): NCBI GI NO: 29791584 NR Description: Similar to WD repeat domain 8 [Danio rerio]
  misc_feature (1)..(350): NCBI GI NO: 12803559 NR Description: Similar to hypothetical protein FLJ20430
  misc_feature (1)..(296): NCBI GI NO: 38174120 NR Description: Unknown (protein for MGC:75994)
MVQAWSLSQPDWTCKIDEGPAGIAYARWSPDSRHILTTSEFQLRLTVWSLVNTACVHVQWPKHGSKGVSFTKDGKFAAICTRRDCKDYINLLSCHSWEIMTVFAIDTVDLAGVEWSPYDSAIVVWDSLLEYKVLIYSPDGRCLFKYLAYESGLGVKTVAWSPCGQFLAVGSYDQAVRTLNHLTWKTFAEFSHAGYIRSPCNAAIYKEVDDPWQLDMSELCLSEGLSRNMPDNGAENGTEGGGSRVKYAVMDVPITLPSLKPAFDKPNPKQGIGMLSWSSDSHYFFTRNDNMPTVLWIWDICRLELAAVLVQKDPIRAAAWDPTCTRLVLCTESPHLYMWTPSGACCVNIPFLNFRIVDLKWSSNGSCLLLKERESFCCATIISALPEEEPDHSDDTSEDE

SEQ ID NO: 34591 - protein, 301 aa, Zea mays subsp. mays
  peptide (1)..(301): Ceres Seq. ID no. 12367290
  misc_feature (205)..(241): Pfam Name: Pfam Description:  WD domain, G-beta repeat
  misc_feature (1)..(301): NCBI GI NO: 37536890 NR Description: putative WD-40 protein
  misc_feature (1)..(124): NCBI GI NO: 15240819 NR Description: WD-repeat protein-like; protein id: At5g07590.1
  misc_feature (1)..(278): NCBI GI NO: 16445434 NR Description: WD repeat domain 8 protein
  misc_feature (1)..(278): NCBI GI NO: 17380347 NR Description: WD-repeat protein 8
  misc_feature (1)..(278): NCBI GI NO: 7020525 NR Description: unnamed protein product [Homo sapiens]
  misc_feature (1)..(278): NCBI GI NO: 10946908 NR Description: WD repeat domain 8; DD57 [Mus musculus]
  misc_feature (1)..(278): NCBI GI NO: 26342120 NR Description: unnamed protein product [Mus musculus]
  misc_feature (1)..(281): NCBI GI NO: 29791584 NR Description: Similar to WD repeat domain 8 [Danio rerio]
  misc_feature (1)..(251): NCBI GI NO: 12803559 NR Description: Similar to hypothetical protein FLJ20430
  misc_feature (1)..(197): NCBI GI NO: 38174120 NR Description: Unknown (protein for MGC:75994)
MTVFAIDTVDLAGVEWSPYDSAIVVWDSLLEYKVLIYSPDGRCLFKYLAYESGLGVKTVAWSPCGQFLAVGSYDQAVRTLNHLTWKTFAEFSHAGYIRSPCNAAIYKEVDDPWQLDMSELCLSEGLSRNMPDNGAENGTEGGGSRVKYAVMDVPITLPSLKPAFDKPNPKQGIGMLSWSSDSHYFFTRNDNMPTVLWIWDICRLELAAVLVQKDPIRAAAWDPTCTRLVLCTESPHLYMWTPSGACCVNIPFLNFRIVDLKWSSNGSCLLLKERESFCCATIISALPEEEPDHSDDTSEDE

SEQ ID NO: 34592 - DNA, 2560 bp, Zea mays subsp. mays
  misc_feature (1)..(2560): Ceres Seq. ID no. 12414504
  misc_feature (2164)..(2164): n is a, c, t, g, unknown, or other
  misc_feature (2256)..(2256): n is a, c, t, g, unknown, or other
  misc_feature (2261)..(2261): n is a, c, t, g, unknown, or other
  misc_feature (2327)..(2327): n is a, c, t, g, unknown, or other
  misc_feature (2344)..(2344): n is a, c, t, g, unknown, or other
  misc_feature (2352)..(2352): n is a, c, t, g, unknown, or other
  misc_feature (2353)..(2353): n is a, c, t, g, unknown, or other
  misc_feature (2354)..(2354): n is a, c, t, g, unknown, or other
  misc_feature (2357)..(2357): n is a, c, t, g, unknown, or other
  misc_feature (2358)..(2358): n is a, c, t, g, unknown, or other
  misc_feature (2359)..(2359): n is a, c, t, g, unknown, or other
  misc_feature (2361)..(2361): n is a, c, t, g, unknown, or other
  misc_feature (2362)..(2362): n is a, c, t, g, unknown, or other
  misc_feature (2078)..(2078): n is a, c, t, g, unknown, or other
  misc_feature (2091)..(2091): n is a, c, t, g, unknown, or other
gttcggcattactccacttcactccctccctccctcacctctggctcatcagtgcctgcctcactaacctcaccattactgaaatgcagagctcgcataaataggcaggacccgtggtgctactctcctgtccccttccggccttttccccccttctggagcttggggggaggcactctgcaccttcgtcttcgtcttggcgtcctccagcgctctgccttcctgagctggcttcttgtccgcagatccatggcgaaggactacccagcttctccgaaagctcagcagctccaggaatccaagaagcagcgcctgacatacatcctcgtcgtaagcgcgctctgcatcgccttctacgtccttggcgcatggcagaacaccacgcttccaaagcccataggcaactcggcgatcacccgggttggctgcgatcccactgccgccacggcacagtcctctggctctgtgccgtcgtttgggccaggctccggcgaggtgcttgacttcgacgcacaccaccggctcaccatcaacaacacggacggcgatggggaactgcagcagttcccggcgtgccctctcaacttcagtgagtacacgccgtgtgaggaccgtaggcgcgggcgccggttcgaccgaaacatgctagtgtatcgggagcgccactgtcctggcaaggacgagcaggtccgatgcctcatcccagcaccgcctgggtacaggacccccttcaagtggcctcgtagcagggactacgcctatttcaacaacatcccccacaaggagctcagcattgagaaggcggtgcagaactggatccaggttgagggcgacaagttcaagttccccggtggtggcactatgttcccgcgtggtgctgatgcctacatagatgacatcaataagctcatctcgttatcagatgggaagatcaggacggctgttgacacaggttgcggggttgctagttggggagcttacttgctgaagagaaacatcatcgccatgtcatttgcgccgagagacacgcaccaagctcaggtgcaattcgcgctggaaagaggtgtccctgccatcattggcgtcatggcgaagcagcggttgccttacccatctagggcgttcgatatggcacattgctcgcgctgtctgattccttgggatgaacacgatggactgtaccttgctgaagtcgataggattctgaggccaggaggatactggatcctctcgggacctccgatcaattggaagacacaccacagggggtgggagaggacgaaggacgacctcaagcgggagcaggacaagatcgaggatgttgcgaggagcctttgctggaacaaggtggttgagaagggggatctgtccatctggcagaagcccaagaatcaccttgagtgtgccaacattaagaagacatataagacaccccatatctgcaagagtgacaatcctgatgctgcctggtacacacagatggaagcctgtgttactccactgcctgaagtgagcaaccagggagaagtggctgggggagcggtggagaaatggccagagagggcgttcttggttccccccaggatcaaaaggggcatgattccaggactggacgccaagaagtttgacgaggacaagaagctttgggagaagagggtggcctactacaagcgcaccataccaattgcagagaacaggtacagaaatgtgatggacatgaacgccaacatgggtgggttcgctgcttctctagtgaagtaccccgtgtgggtgatgaatgtcgtccctgttaactccgaccgggacaccctcggggcaatatacgagcgagggttcatcggcacgtaccaggactggtgcgaagctttctcgacgtatccaagaacatatgacctcctgcatgctgacaatctgtttagcatctaccaagacaggtgcgatataactggcatcctcttggagatggacagaatattaaggcccgagggcacagctatcatccgcgacacagtcgacgtgctcacgaaggtccaggcaataaccaagcggatgcggtgggagagccgcatcatggaccncgaggacggcccnttcaacccggagaaggtcctcatggcggtcaagacgtactggaccgccgaagccgaggaggagcactagcacncgagtgacaccgagctcacttgaaagcgtgaaccaagcctgttctacacttctactaccggtcgagagggatggcgtcagcgttttgcgtcncagtntagtatgtatgtcccttttcaccttttctctagttctttgtagctagctacaatcagatgggaagntaagggagagttttganacgggggnnnggnnngnntggttggtcctctagttgagatacaggaagcggttttgtagcaggggaaggtttcgctggtcttgcgtaggttcctggccctgtttcacgaggggttgaactaggttttagtttgtaatgcgatggcaccgggcaggcattgttaatcgtatattggggtgaccataatagtaacaggtatttatttagttttcatct

SEQ ID NO: 34593 - protein, 719 aa, Zea mays subsp. mays
  peptide (1)..(719): Ceres Seq. ID no. 12414505
  misc_feature (198)..(708): Pfam Name: Pfam Description:  Putative methyltransferase
  misc_feature (94)..(712): NCBI GI NO: 18398763 NR Description: unknown protein; protein id: At1g33170.1
  misc_feature (67)..(718): NCBI GI NO: 24413975 NR Description: hypothetical protein~similar to Oryza sativachromosome 10
  misc_feature (99)..(719): NCBI GI NO: 15235080 NR Description: putative protein; protein id: At4g10440.1
  misc_feature (387)..(712): NCBI GI NO: 9665165 NR Description: Unknown Protein [Arabidopsis thaliana]
  misc_feature (94)..(387): NCBI GI NO: 9665165 NR Description: Unknown Protein [Arabidopsis thaliana]
  misc_feature (100)..(718): NCBI GI NO: 15225560 NR Description: hypothetical protein; protein id: At2g45750.1
  misc_feature (87)..(718): NCBI GI NO: 15236921 NR Description: hypothetical protein; protein id: At4g00750.1
  misc_feature (97)..(713): NCBI GI NO: 34898042 NR Description: OSJNBa0038F22.19
  misc_feature (99)..(719): NCBI GI NO: 18396075 NR Description: expressed protein; protein id: At1g26850
  misc_feature (94)..(716): NCBI GI NO: 18071395 NR Description: hypothetical protein [Oryza sativa]
  misc_feature (693)..(693): Xaa is any aa, unknown or other
  misc_feature (697)..(697): Xaa is any aa, unknown or other
VRHYSTSLPPSLTSGSSVPASLTSPLLKCRARINRQDPWCYSPVPFRPFPPFWSLGGGTLHLRLRLGVLQRSAFLSWLLVRRSMAKDYPASPKAQQLQESKKQRLTYILVVSALCIAFYVLGAWQNTTLPKPIGNSAITRVGCDPTAATAQSSGSVPSFGPGSGEVLDFDAHHRLTINNTDGDGELQQFPACPLNFSEYTPCEDRRRGRRFDRNMLVYRERHCPGKDEQVRCLIPAPPGYRTPFKWPRSRDYAYFNNIPHKELSIEKAVQNWIQVEGDKFKFPGGGTMFPRGADAYIDDINKLISLSDGKIRTAVDTGCGVASWGAYLLKRNIIAMSFAPRDTHQAQVQFALERGVPAIIGVMAKQRLPYPSRAFDMAHCSRCLIPWDEHDGLYLAEVDRILRPGGYWILSGPPINWKTHHRGWERTKDDLKREQDKIEDVARSLCWNKVVEKGDLSIWQKPKNHLECANIKKTYKTPHICKSDNPDAAWYTQMEACVTPLPEVSNQGEVAGGAVEKWPERAFLVPPRIKRGMIPGLDAKKFDEDKKLWEKRVAYYKRTIPIAENRYRNVMDMNANMGGFAASLVKYPVWVMNVVPVNSDRDTLGAIYERGFIGTYQDWCEAFSTYPRTYDLLHADNLFSIYQDRCDITGILLEMDRILRPEGTAIIRDTVDVLTKVQAITKRMRWESRIMDXEDGXFNPEKVLMAVKTYWTAEAEEEH

SEQ ID NO: 34594 - protein, 636 aa, Zea mays subsp. mays
  peptide (1)..(636): Ceres Seq. ID no. 12414506
  misc_feature (115)..(625): Pfam Name: Pfam Description:  Putative methyltransferase
  misc_feature (11)..(629): NCBI GI NO: 18398763 NR Description: unknown protein; protein id: At1g33170.1
  misc_feature (1)..(635): NCBI GI NO: 24413975 NR Description: hypothetical protein~similar to Oryza sativachromosome 10
  misc_feature (16)..(636): NCBI GI NO: 15235080 NR Description: putative protein; protein id: At4g10440.1
  misc_feature (304)..(629): NCBI GI NO: 9665165 NR Description: Unknown Protein [Arabidopsis thaliana]
  misc_feature (11)..(304): NCBI GI NO: 9665165 NR Description: Unknown Protein [Arabidopsis thaliana]
  misc_feature (17)..(635): NCBI GI NO: 15225560 NR Description: hypothetical protein; protein id: At2g45750.1
  misc_feature (4)..(635): NCBI GI NO: 15236921 NR Description: hypothetical protein; protein id: At4g00750.1
  misc_feature (14)..(630): NCBI GI NO: 34898042 NR Description: OSJNBa0038F22.19
  misc_feature (16)..(636): NCBI GI NO: 18396075 NR Description: expressed protein; protein id: At1g26850
  misc_feature (11)..(633): NCBI GI NO: 18071395 NR Description: hypothetical protein [Oryza sativa]
  misc_feature (610)..(610): Xaa is any aa, unknown or other
  misc_feature (614)..(614): Xaa is any aa, unknown or other
MAKDYPASPKAQQLQESKKQRLTYILVVSALCIAFYVLGAWQNTTLPKPIGNSAITRVGCDPTAATAQSSGSVPSFGPGSGEVLDFDAHHRLTINNTDGDGELQQFPACPLNFSEYTPCEDRRRGRRFDRNMLVYRERHCPGKDEQVRCLIPAPPGYRTPFKWPRSRDYAYFNNIPHKELSIEKAVQNWIQVEGDKFKFPGGGTMFPRGADAYIDDINKLISLSDGKIRTAVDTGCGVASWGAYLLKRNIIAMSFAPRDTHQAQVQFALERGVPAIIGVMAKQRLPYPSRAFDMAHCSRCLIPWDEHDGLYLAEVDRILRPGGYWILSGPPINWKTHHRGWERTKDDLKREQDKIEDVARSLCWNKVVEKGDLSIWQKPKNHLECANIKKTYKTPHICKSDNPDAAWYTQMEACVTPLPEVSNQGEVAGGAVEKWPERAFLVPPRIKRGMIPGLDAKKFDEDKKLWEKRVAYYKRTIPIAENRYRNVMDMNANMGGFAASLVKYPVWVMNVVPVNSDRDTLGAIYERGFIGTYQDWCEAFSTYPRTYDLLHADNLFSIYQDRCDITGILLEMDRILRPEGTAIIRDTVDVLTKVQAITKRMRWESRIMDXEDGXFNPEKVLMAVKTYWTAEAEEEH

SEQ ID NO: 34595 - protein, 505 aa, Zea mays subsp. mays
  peptide (1)..(505): Ceres Seq. ID no. 12414507
  misc_feature (1)..(494): Pfam Name: Pfam Description:  Putative methyltransferase
  misc_feature (1)..(498): NCBI GI NO: 18398763 NR Description: unknown protein; protein id: At1g33170.1
  misc_feature (1)..(504): NCBI GI NO: 24413975 NR Description: hypothetical protein~similar to Oryza sativachromosome 10
  misc_feature (1)..(505): NCBI GI NO: 15235080 NR Description: putative protein; protein id: At4g10440.1
  misc_feature (173)..(498): NCBI GI NO: 9665165 NR Description: Unknown Protein [Arabidopsis thaliana]
  misc_feature (1)..(173): NCBI GI NO: 9665165 NR Description: Unknown Protein [Arabidopsis thaliana]
  misc_feature (1)..(504): NCBI GI NO: 15225560 NR Description: hypothetical protein; protein id: At2g45750.1
  misc_feature (1)..(504): NCBI GI NO: 15236921 NR Description: hypothetical protein; protein id: At4g00750.1
  misc_feature (1)..(499): NCBI GI NO: 34898042 NR Description: OSJNBa0038F22.19
  misc_feature (1)..(505): NCBI GI NO: 18396075 NR Description: expressed protein; protein id: At1g26850
  misc_feature (1)..(502): NCBI GI NO: 18071395 NR Description: hypothetical protein [Oryza sativa]
  misc_feature (479)..(479): Xaa is any aa, unknown or other
  misc_feature (483)..(483): Xaa is any aa, unknown or other
MLVYRERHCPGKDEQVRCLIPAPPGYRTPFKWPRSRDYAYFNNIPHKELSIEKAVQNWIQVEGDKFKFPGGGTMFPRGADAYIDDINKLISLSDGKIRTAVDTGCGVASWGAYLLKRNIIAMSFAPRDTHQAQVQFALERGVPAIIGVMAKQRLPYPSRAFDMAHCSRCLIPWDEHDGLYLAEVDRILRPGGYWILSGPPINWKTHHRGWERTKDDLKREQDKIEDVARSLCWNKVVEKGDLSIWQKPKNHLECANIKKTYKTPHICKSDNPDAAWYTQMEACVTPLPEVSNQGEVAGGAVEKWPERAFLVPPRIKRGMIPGLDAKKFDEDKKLWEKRVAYYKRTIPIAENRYRNVMDMNANMGGFAASLVKYPVWVMNVVPVNSDRDTLGAIYERGFIGTYQDWCEAFSTYPRTYDLLHADNLFSIYQDRCDITGILLEMDRILRPEGTAIIRDTVDVLTKVQAITKRMRWESRIMDXEDGXFNPEKVLMAVKTYWTAEAEEEH

SEQ ID NO: 34596 - DNA, 1668 bp, Zea mays subsp. mays
  misc_feature (1)..(1668): Ceres Seq. ID no. 12355794
atttatgaaacggaccattgaatgtgctcaagtcttctttcctccagaatcccccatctgagcaagggcgccgccgccgtcggctagcgccgcagcattgacgtggacgccgaccctctccggcagccgcttgcagcgcgtcccttccccgctcccgcggcatggactgcgcaaagaggagggcggtggcggacctccacgacgagctgatggtggagatcttctcgcgcgtgcccgtcaaagacctccgccgttgcacgtgcgtgtgcaaatcttggtgcaacatcatcaccgaccccctcaacggcaagaagctgccccagaccctggaaggcttcttccaaggcgtcgtcggagggcctcacaactacggccaattcaccagcctgtcggggagcggagaacgcgtgcctccggtcgacccttccttctccttcatcacggcaatgctgcctggcgtggagcattggtcctcttggattcttgcaacgggctcctgctctttgggtgcacccgggaggacaagttcgggtacatcgtgacaaaccctgcgactgaggaattgatgactgtgcccaccagctcctgctcttgtcctcctccaccttcggttggtggggaaagatatgcgcacacctttctgatgtttaaccctgctgtctcctcgcacttccacttggtccagatctgggaggataatgcggtgaaggaggtggaaacggtacactcttactcgtctgaaaccaaggcatggagtgacaggtcaagcaagtgggggcgaggtgaagagggcggtgaatggaagctgtggggtgaatccgtgattggattgacgcgtggctgggctttggtcgatggtctgctgcattttcttgtcttcgatcttcagaaacaagagaatgtgataattgcagtggatggggaagggaaaacttgtaggatcatcggctggcatggtaaggatgtgagaacaattgcttttattggtcaatcccaaaaccatctacactgcatcggtgtgaatttgcaattacatcaaggctcccaagtgcgcttcacgcaaatgtcgatctgggttcttgaggactatgatacagaagcatggatcctaaagcacaatgtgagctcttcgcagttctttgaattactgagtcacccaatcaaagacttccatattgtggccattcatccagatcacaattcgttcatccttgttcagcactggaaccagaaactggtatcatataacatggatactcaggaactgcatggtctctgcactcttggaaagggctatgtgattattaccccatatgttccctgtttcttggagtcatcggttcttgccaccaaacactgaggttgttgtttctggggacttctctgcatgttcaacaagagcctgatcatccaagtgtggggcaaggtgatctagtctgatggtgctttaatgtccttttgtaatgctttgagaaagctgtttacaggacaacatggttagttctatgatatatcagtgagaaagctgtttacaggacagtattgttagttctatgatatatcaaattagatcacacttaattgctggccaatataggtattagcttcggttttttgttgtgattattcaatattgaatgcgcacctgcgcacctatggtattgcccg

SEQ ID NO: 34597 - protein, 264 aa, Zea mays subsp. mays
  peptide (1)..(264): Ceres Seq. ID no. 12355795
  misc_feature (5)..(257): NCBI GI NO: 34898810 NR Description: OJ1131_E05.32
  misc_feature (75)..(257): NCBI GI NO: 34898788 NR Description: OJ1131_E05.20
  misc_feature (75)..(257): NCBI GI NO: 34898790 NR Description: OJ1131_E05.21
  misc_feature (64)..(258): NCBI GI NO: 34898796 NR Description: OJ1131_E05.24
  misc_feature (5)..(257): NCBI GI NO: 33146481 NR Description: unknown protein
  misc_feature (63)..(257): NCBI GI NO: 34898802 NR Description: OJ1131_E05.28
  misc_feature (63)..(257): NCBI GI NO: 33146479 NR Description: receptor-like kinase-like
  misc_feature (63)..(264): NCBI GI NO: 37536818 NR Description: hypothetical protein
MTVPTSSCSCPPPPSVGGERYAHTFLMFNPAVSSHFHLVQIWEDNAVKEVETVHSYSSETKAWSDRSSKWGRGEEGGEWKLWGESVIGLTRGWALVDGLLHFLVFDLQKQENVIIAVDGEGKTCRIIGWHGKDVRTIAFIGQSQNHLHCIGVNLQLHQGSQVRFTQMSIWVLEDYDTEAWILKHNVSSSQFFELLSHPIKDFHIVAIHPDHNSFILVQHWNQKLVSYNMDTQELHGLCTLGKGYVIITPYVPCFLESSVLATKH

SEQ ID NO: 34598 - protein, 238 aa, Zea mays subsp. mays
  peptide (1)..(238): Ceres Seq. ID no. 12355796
  misc_feature (1)..(231): NCBI GI NO: 34898810 NR Description: OJ1131_E05.32
  misc_feature (49)..(231): NCBI GI NO: 34898788 NR Description: OJ1131_E05.20
  misc_feature (49)..(231): NCBI GI NO: 34898790 NR Description: OJ1131_E05.21
  misc_feature (38)..(232): NCBI GI NO: 34898796 NR Description: OJ1131_E05.24
  misc_feature (1)..(231): NCBI GI NO: 33146481 NR Description: unknown protein
  misc_feature (37)..(231): NCBI GI NO: 34898802 NR Description: OJ1131_E05.28
  misc_feature (37)..(231): NCBI GI NO: 33146479 NR Description: receptor-like kinase-like
  misc_feature (37)..(238): NCBI GI NO: 37536818 NR Description: hypothetical protein
MFNPAVSSHFHLVQIWEDNAVKEVETVHSYSSETKAWSDRSSKWGRGEEGGEWKLWGESVIGLTRGWALVDGLLHFLVFDLQKQENVIIAVDGEGKTCRIIGWHGKDVRTIAFIGQSQNHLHCIGVNLQLHQGSQVRFTQMSIWVLEDYDTEAWILKHNVSSSQFFELLSHPIKDFHIVAIHPDHNSFILVQHWNQKLVSYNMDTQELHGLCTLGKGYVIITPYVPCFLESSVLATKH

SEQ ID NO: 34599 - DNA, 1621 bp, Zea mays subsp. mays
  misc_feature (1)..(1621): Ceres Seq. ID no. 12374562
acacacaaacacatcagcattcagcaatagctaatcgagcatcgtcgccttagctcctctcctctcctcttctctccgtcgtcgtggaacttctctccgccggctgccatataaaggaggaagaagagaacagcaacgctagctagccggccggcctccgtcgtcgccggcgtcgtcgactagctagctaactctcgatctccagttcctgcccccgccccacgcccggccgtcgtcgatcgtcagcaatataatggcaggaggcctcttctccatggctcacccggccgtcaccctctccggcatcgcaggaaacatcatctccttcctggtgttccttgcaccagtggcgacgttcctgcaggtgtaccggaagaagtcgacgggcgggttcagctcggtgccgtacgtggtggcgctcttcagctcggtgctgtggatcttctacgcgctggtgaagaccaactcgaggccgctgctgaccatcaacgccttcggctgcggcgtggaggcggcctacatagtcctctacctggcgtacgcgccgcggcgggcgcgcctgcggactctggcctacttcttcctgctggacgtggcggccttcgcgctcgtcgtcgccgtcacgctcttcgccgtccgcgagccccaccgcgtcaagttcctcggcagcgtctgcctcgccttctccatggccgtcttcgtcgcgccgctcagcatcatcgtcaaggtggtcaagaccaagagcgtcgagttcctgcccatcagcctctccttctgcctcacgctcagcgccgtcgcctggttctgctacggcctcttcaccaaggacccctttgtcatgtaccccaacgtcggcggcttcttcttcagctgcgtccagatgggcctctacttctggtaccgcaagccccgcccggcggccaagaacaacgccgtgctgccgacgaccacggacggcggcaacgcggtgcaggtgcaggggcaggtcatcgagctggcgcccaacacggtggccatcctgtcggtgagccccatccccatcgtgggcgtgcacaagatcgaggtggtggagcagcagcacaaggaggccgccgtggccgccgagacccgccggatggccgccgcaaacccggacggcgccatgccggaggtcatcgagatcgtccccgccgccgccgcggtgtgacccaacgccaatcaccatgcaccgtacacaccctgctagcttcttattagctagctcggatgacgtacgacagtttggtggcaagtggctggcagctcaagcatgcagatgcaggcatcgtcgtctgctatagttggtcgtttagttggttaattgttggattattattgcgtatctctctcgtgtgcgtcgtagccttgtctcagttcagttcagtgtcgaatcaagtagtagtagctgttgtttgcattggatctgacaatgcatgcatgctaataattatggtggtgtgatggtcttggtcgatctggtgtatgtaatgtacgtacgcgcgcggtacgtacgtagtcgtctacgtacgccgtgtcaacgtcgtagatctctacgggaagatgataagactgtaacatgcagggcatgcatctatttatactt

SEQ ID NO: 34600 - protein, 310 aa, Zea mays subsp. mays
  peptide (1)..(310): Ceres Seq. ID no. 12374563
  misc_feature (17)..(101): Pfam Name: Pfam Description:  MtN3/saliva family
  misc_feature (7)..(247): NCBI GI NO: 1619602 NR Description: MtN3 [Medicago truncatula]
  misc_feature (4)..(217): NCBI GI NO: 15240040 NR Description: senescence-associated protein
  misc_feature (4)..(217): NCBI GI NO: 21593422 NR Description: senescence-associated protein (SAG29)
  misc_feature (14)..(219): NCBI GI NO: 15241265 NR Description: MtN3-like protein; protein id: At5g50790
  misc_feature (5)..(270): NCBI GI NO: 21554178 NR Description: similar to MtN3 protein [Arabidopsis thaliana]
  misc_feature (5)..(270): NCBI GI NO: 15225014 NR Description: similar to MtN3 protein; protein id: At2g39060
  misc_feature (5)..(217): NCBI GI NO: 15229019 NR Description: MTN3-like protein; protein id: At3g48740
  misc_feature (17)..(241): NCBI GI NO: 14715258 NR Description: N3 like protein [Medicago truncatula]
  misc_feature (17)..(217): NCBI GI NO: 11345413 NR Description: NEC1 [Petunia x hybrida]
  misc_feature (17)..(226): NCBI GI NO: 15241278 NR Description: MtN3-like protein; protein id: At5g50800
MAGGLFSMAHPAVTLSGIAGNIISFLVFLAPVATFLQVYRKKSTGGFSSVPYVVALFSSVLWIFYALVKTNSRPLLTINAFGCGVEAAYIVLYLAYAPRRARLRTLAYFFLLDVAAFALVVAVTLFAVREPHRVKFLGSVCLAFSMAVFVAPLSIIVKVVKTKSVEFLPISLSFCLTLSAVAWFCYGLFTKDPFVMYPNVGGFFFSCVQMGLYFWYRKPRPAAKNNAVLPTTTDGGNAVQVQGQVIELAPNTVAILSVSPIPIVGVHKIEVVEQQHKEAAVAAETRRMAAANPDGAMPEVIEIVPAAAAV

SEQ ID NO: 34601 - protein, 303 aa, Zea mays subsp. mays
  peptide (1)..(303): Ceres Seq. ID no. 12374564
  misc_feature (10)..(94): Pfam Name: Pfam Description:  MtN3/saliva family
  misc_feature (1)..(240): NCBI GI NO: 1619602 NR Description: MtN3 [Medicago truncatula]
  misc_feature (1)..(210): NCBI GI NO: 15240040 NR Description: senescence-associated protein
  misc_feature (1)..(210): NCBI GI NO: 21593422 NR Description: senescence-associated protein (SAG29)
  misc_feature (7)..(212): NCBI GI NO: 15241265 NR Description: MtN3-like protein; protein id: At5g50790
  misc_feature (1)..(263): NCBI GI NO: 21554178 NR Description: similar to MtN3 protein [Arabidopsis thaliana]
  misc_feature (1)..(263): NCBI GI NO: 15225014 NR Description: similar to MtN3 protein; protein id: At2g39060
  misc_feature (1)..(210): NCBI GI NO: 15229019 NR Description: MTN3-like protein; protein id: At3g48740
  misc_feature (10)..(234): NCBI GI NO: 14715258 NR Description: N3 like protein [Medicago truncatula]
  misc_feature (10)..(210): NCBI GI NO: 11345413 NR Description: NEC1 [Petunia x hybrida]
  misc_feature (10)..(219): NCBI GI NO: 15241278 NR Description: MtN3-like protein; protein id: At5g50800
MAHPAVTLSGIAGNIISFLVFLAPVATFLQVYRKKSTGGFSSVPYVVALFSSVLWIFYALVKTNSRPLLTINAFGCGVEAAYIVLYLAYAPRRARLRTLAYFFLLDVAAFALVVAVTLFAVREPHRVKFLGSVCLAFSMAVFVAPLSIIVKVVKTKSVEFLPISLSFCLTLSAVAWFCYGLFTKDPFVMYPNVGGFFFSCVQMGLYFWYRKPRPAAKNNAVLPTTTDGGNAVQVQGQVIELAPNTVAILSVSPIPIVGVHKIEVVEQQHKEAAVAAETRRMAAANPDGAMPEVIEIVPAAAAV

SEQ ID NO: 34602 - protein, 165 aa, Zea mays subsp. mays
  peptide (1)..(165): Ceres Seq. ID no. 12374565
  misc_feature (1)..(102): NCBI GI NO: 1619602 NR Description: MtN3 [Medicago truncatula]
  misc_feature (1)..(72): NCBI GI NO: 15240040 NR Description: senescence-associated protein
  misc_feature (1)..(72): NCBI GI NO: 21593422 NR Description: senescence-associated protein (SAG29)
  misc_feature (1)..(74): NCBI GI NO: 15241265 NR Description: MtN3-like protein; protein id: At5g50790
  misc_feature (1)..(125): NCBI GI NO: 21554178 NR Description: similar to MtN3 protein [Arabidopsis thaliana]
  misc_feature (1)..(125): NCBI GI NO: 15225014 NR Description: similar to MtN3 protein; protein id: At2g39060
  misc_feature (1)..(72): NCBI GI NO: 15229019 NR Description: MTN3-like protein; protein id: At3g48740
  misc_feature (1)..(96): NCBI GI NO: 14715258 NR Description: N3 like protein [Medicago truncatula]
  misc_feature (1)..(72): NCBI GI NO: 11345413 NR Description: NEC1 [Petunia x hybrida]
  misc_feature (1)..(81): NCBI GI NO: 15241278 NR Description: MtN3-like protein; protein id: At5g50800
MAVFVAPLSIIVKVVKTKSVEFLPISLSFCLTLSAVAWFCYGLFTKDPFVMYPNVGGFFFSCVQMGLYFWYRKPRPAAKNNAVLPTTTDGGNAVQVQGQVIELAPNTVAILSVSPIPIVGVHKIEVVEQQHKEAAVAAETRRMAAANPDGAMPEVIEIVPAAAAV

SEQ ID NO: 34603 - DNA, 1091 bp, Zea mays subsp. mays
  misc_feature (1)..(1091): Ceres Seq. ID no. 12365120
atgattatggatatgctggggcctagtttgtgggattcatggaattcattaggccaatccatgccatcggaaatggtggcttgcattgccatggagtccatttccatcttggaaagcatgcattctaaaggatatgtgcatggagacgtcaaacctgagaactttcttctggggcagccttcaacgcctcatgaaaagaaactttatcttgtggatcttggattagcaacaaagtggagagatactgctaatgggcagcatgttagttatgatcaacgtcctgatgcctttagaggaacagtcagatatgctagtgtccatgcacatttaggaagaaccgctagcaggagagatgatttggagtcacttgcctatacactagtattccttcaccggggcaggttgccatggcagggatatcagggtgataataaatcatttttggtgtgcaagagaaagatgagtacctcacctgaggccctctgcggcatatgtcctcaacctttcaaggagtttcttgaggccgttgtcaacatgaagtttgatgaagagccaaactattccaagttgatttcattgtttgacagtttaattggaccaatcccttccattagaccaatcaatactgatggagcccaaaaggtagggcagaagcgtgccaggttgcttaatgatgacgacgaccatgtaaaaaagaagattcggctgggtgctcctgcaacacagtggatttcagtatacaattcaaggcaacctatgaagcagaggtaccactataatgtggctgatgcaaggttagcgcaacatgtggagaaaggaaatgaggatggtttgttgataagttcaatatcatcatgcgcaaatctttgggcaatcattatggatgcaggaactggcttctcagctcaagtttatgagctatcttcacactttcttcataaggagtggatcatggaacaatgggataaaagtttctacatcagttctgttgctggctccaacaatggaagttctattgtagtgatgtcaaaaggcacaccatatacacagcaatcttataaagtcagtgattcctttccatttaagtggat

SEQ ID NO: 34604 - protein, 363 aa, Zea mays subsp. mays
  peptide (1)..(363): Ceres Seq. ID no. 12365121
  misc_feature (1)..(362): NCBI GI NO: 15231321 NR Description: casein kinase, putative; protein id: At3g13670
  misc_feature (1)..(362): NCBI GI NO: 15228670 NR Description: putative casein kinase; protein id: At3g03940.1
  misc_feature (1)..(362): NCBI GI NO: 15238765 NR Description: casein kinase-like protein; protein id: At5g18190
  misc_feature (1)..(362): NCBI GI NO: 30682888 NR Description: protein kinase family [Arabidopsis thaliana]
  misc_feature (1)..(362): NCBI GI NO: 34909952 NR Description: putative casein kinase
  misc_feature (1)..(362): NCBI GI NO: 28269422 NR Description: putative serine/threonine protein kinase
  misc_feature (1)..(362): NCBI GI NO: 34394436 NR Description: putative casein kinase 1, delta isoform 1
  misc_feature (18)..(362): NCBI GI NO: 6006848 NR Description: unknown protein, 5' partial [Arabidopsis thaliana]
  misc_feature (1)..(362): NCBI GI NO: 34903604 NR Description: casein kinase-like protein
  misc_feature (1)..(362): NCBI GI NO: 18139937 NR Description: serine/threonine protein kinase
MIMDMLGPSLWDSWNSLGQSMPSEMVACIAMESISILESMHSKGYVHGDVKPENFLLGQPSTPHEKKLYLVDLGLATKWRDTANGQHVSYDQRPDAFRGTVRYASVHAHLGRTASRRDDLESLAYTLVFLHRGRLPWQGYQGDNKSFLVCKRKMSTSPEALCGICPQPFKEFLEAVVNMKFDEEPNYSKLISLFDSLIGPIPSIRPINTDGAQKVGQKRARLLNDDDDHVKKKIRLGAPATQWISVYNSRQPMKQRYHYNVADARLAQHVEKGNEDGLLISSISSCANLWAIIMDAGTGFSAQVYELSSHFLHKEWIMEQWDKSFYISSVAGSNNGSSIVVMSKGTPYTQQSYKVSDSFPFKW

SEQ ID NO: 34605 - protein, 361 aa, Zea mays subsp. mays
  peptide (1)..(361): Ceres Seq. ID no. 12365122
  misc_feature (1)..(360): NCBI GI NO: 15231321 NR Description: casein kinase, putative; protein id: At3g13670
  misc_feature (1)..(360): NCBI GI NO: 15228670 NR Description: putative casein kinase; protein id: At3g03940.1
  misc_feature (1)..(360): NCBI GI NO: 15238765 NR Description: casein kinase-like protein; protein id: At5g18190
  misc_feature (1)..(360): NCBI GI NO: 30682888 NR Description: protein kinase family [Arabidopsis thaliana]
  misc_feature (1)..(360): NCBI GI NO: 34909952 NR Description: putative casein kinase
  misc_feature (1)..(360): NCBI GI NO: 28269422 NR Description: putative serine/threonine protein kinase
  misc_feature (1)..(360): NCBI GI NO: 34394436 NR Description: putative casein kinase 1, delta isoform 1
  misc_feature (16)..(360): NCBI GI NO: 6006848 NR Description: unknown protein, 5' partial [Arabidopsis thaliana]
  misc_feature (1)..(360): NCBI GI NO: 34903604 NR Description: casein kinase-like protein
  misc_feature (1)..(360): NCBI GI NO: 18139937 NR Description: serine/threonine protein kinase
MDMLGPSLWDSWNSLGQSMPSEMVACIAMESISILESMHSKGYVHGDVKPENFLLGQPSTPHEKKLYLVDLGLATKWRDTANGQHVSYDQRPDAFRGTVRYASVHAHLGRTASRRDDLESLAYTLVFLHRGRLPWQGYQGDNKSFLVCKRKMSTSPEALCGICPQPFKEFLEAVVNMKFDEEPNYSKLISLFDSLIGPIPSIRPINTDGAQKVGQKRARLLNDDDDHVKKKIRLGAPATQWISVYNSRQPMKQRYHYNVADARLAQHVEKGNEDGLLISSISSCANLWAIIMDAGTGFSAQVYELSSHFLHKEWIMEQWDKSFYISSVAGSNNGSSIVVMSKGTPYTQQSYKVSDSFPFKW

SEQ ID NO: 34606 - protein, 359 aa, Zea mays subsp. mays
  peptide (1)..(359): Ceres Seq. ID no. 12365123
  misc_feature (1)..(358): NCBI GI NO: 15231321 NR Description: casein kinase, putative; protein id: At3g13670
  misc_feature (1)..(358): NCBI GI NO: 15228670 NR Description: putative casein kinase; protein id: At3g03940.1
  misc_feature (1)..(358): NCBI GI NO: 15238765 NR Description: casein kinase-like protein; protein id: At5g18190
  misc_feature (1)..(358): NCBI GI NO: 30682888 NR Description: protein kinase family [Arabidopsis thaliana]
  misc_feature (1)..(358): NCBI GI NO: 34909952 NR Description: putative casein kinase
  misc_feature (1)..(358): NCBI GI NO: 28269422 NR Description: putative serine/threonine protein kinase
  misc_feature (1)..(358): NCBI GI NO: 34394436 NR Description: putative casein kinase 1, delta isoform 1
  misc_feature (14)..(358): NCBI GI NO: 6006848 NR Description: unknown protein, 5' partial [Arabidopsis thaliana]
  misc_feature (1)..(358): NCBI GI NO: 34903604 NR Description: casein kinase-like protein
  misc_feature (1)..(358): NCBI GI NO: 18139937 NR Description: serine/threonine protein kinase
MLGPSLWDSWNSLGQSMPSEMVACIAMESISILESMHSKGYVHGDVKPENFLLGQPSTPHEKKLYLVDLGLATKWRDTANGQHVSYDQRPDAFRGTVRYASVHAHLGRTASRRDDLESLAYTLVFLHRGRLPWQGYQGDNKSFLVCKRKMSTSPEALCGICPQPFKEFLEAVVNMKFDEEPNYSKLISLFDSLIGPIPSIRPINTDGAQKVGQKRARLLNDDDDHVKKKIRLGAPATQWISVYNSRQPMKQRYHYNVADARLAQHVEKGNEDGLLISSISSCANLWAIIMDAGTGFSAQVYELSSHFLHKEWIMEQWDKSFYISSVAGSNNGSSIVVMSKGTPYTQQSYKVSDSFPFKW

SEQ ID NO: 34607 - DNA, 1705 bp, Zea mays subsp. mays
  misc_feature (1)..(1705): Ceres Seq. ID no. 12374558
gtacggttaaagttgtggcaggaggagtgggggcgcgggagagatgataaggatggcggcagcgtctcagccgccatcgtcagccttgcggatgcacgggtgcggcggcgcggcttctgcgtcgtccgcgcccgtgcgcctcttcacggagtcgcggggtagagtcgtggcgtcgattgggaggggcaggaggcggaggcgcgccatctcgtgctgctcgtctccagacgcagatggccctcgccccgccgcgccaccgacctccgcagcgccttccgacgggtcgatacagctctattcccagatcgagagggtaatcacggaggcggcaaagcagtcccgggaaggctggggttcgactggagattggaccgaagtcgagggatcatgggtgttgagaccgaagtccttggagccatcatttgttgtccactttgttggaggaatttttgttggagccgctccccagatcacataccgcttcttcctcgagtgtctcgcgaacaggggagctttggtgattgctacgccttatgcgagcggctttgaccatttcttcattgcagatgaagttcaatttaagtttgacaggtgtttgagaaacttggatgagcctgtaaatgatctcccaacgtttggtgttggacattcattgggatctgttatccacatgttgattggatcaagatatgctgtgcagcgaagtggaaatgtactgatgtcctttaacaacaaggaggcaagctctgcgatcccactattttcacctgtaattgttcctatgtcacagagttttggccctatattctcccaattggcatcgtatccaacaatccggtttggggcagaagcagctattaagcagcttgagaatctaagcccacctgttgttaagcaacttctacctttacttcaacaacttcctccgttgtatatggacctaataaaagggcgggaggacttcattccaaaaccagaagagacacgccgcctgataaaatcctactatggaatttctcggaatctcttaataaagtttaaagatgatcaaattgatgaaacctctacccttgcacaagtactaagctctgaagcagctattagctcattgcttgatatgtcaattcgatcacttcctggggatcatgggttaccattacaacaggttcttcctgatgttccaccagcaatggctgatgcagtgaaccgcggaggtgaacttctgacaaatctgacaacaggcacaccatgggaggctgttgctaaggaggttggcaccactttgggtactgactcaggcattctacgagcacagatctcaaaagacgttgaaactcttgttgatgtaattgcttcatggacatcttcaaattctggtccaagactacttcgcccatgatcacccagctgtctgcgtacagaaatgttagtaacagtgaagagcaacatgatttaatgatgcattgtgagtaacaaaaagttagattgcacttcagtgcggctgtcttagtattttagatccatactatagttcagaaaaaagtgaagatatgtatttatatggtgtatttttgaaccaagatattttgatagaaggaaactttataaggaatagaaatagaatgatagattctggatacggtaaagctgctaagctgtatgaaaggagtcttggcaattcaataattggcaattcagcatttcg

SEQ ID NO: 34608 - protein, 451 aa, Zea mays subsp. mays
  peptide (1)..(451): Ceres Seq. ID no. 12374559
  misc_feature (1)..(270): NCBI GI NO: 38347589 NR Description: OSJNBa0042I15.2
  misc_feature (277)..(450): NCBI GI NO: 38347589 NR Description: OSJNBa0042I15.2
  misc_feature (42)..(451): NCBI GI NO: 15238825 NR Description: putative protein; protein id: At5g47860
  misc_feature (190)..(438): NCBI GI NO: 38569178 NR Description: OJ000315_02.20
  misc_feature (108)..(253): NCBI GI NO: 17228580 NR Description: hypothetical protein [Nostoc sp. PCC 7120]
  misc_feature (306)..(374): NCBI GI NO: 17228580 NR Description: hypothetical protein [Nostoc sp. PCC 7120]
  misc_feature (108)..(238): NCBI GI NO: 16329812 NR Description: hypothetical protein [Synechocystis sp. PCC 6803]
  misc_feature (252)..(374): NCBI GI NO: 16329812 NR Description: hypothetical protein [Synechocystis sp. PCC 6803]
  misc_feature (108)..(253): NCBI GI NO: 23039808 NR Description: hypothetical protein
  misc_feature (284)..(376): NCBI GI NO: 23039808 NR Description: hypothetical protein
MIRMAAASQPPSSALRMHGCGGAASASSAPVRLFTESRGRVVASIGRGRRRRRAISCCSSPDADGPRPAAPPTSAAPSDGSIQLYSQIERVITEAAKQSREGWGSTGDWTEVEGSWVLRPKSLEPSFVVHFVGGIFVGAAPQITYRFFLECLANRGALVIATPYASGFDHFFIADEVQFKFDRCLRNLDEPVNDLPTFGVGHSLGSVIHMLIGSRYAVQRSGNVLMSFNNKEASSAIPLFSPVIVPMSQSFGPIFSQLASYPTIRFGAEAAIKQLENLSPPVVKQLLPLLQQLPPLYMDLIKGREDFIPKPEETRRLIKSYYGISRNLLIKFKDDQIDETSTLAQVLSSEAAISSLLDMSIRSLPGDHGLPLQQVLPDVPPAMADAVNRGGELLTNLTTGTPWEAVAKEVGTTLGTDSGILRAQISKDVETLVDVIASWTSSNSGPRLLRP

SEQ ID NO: 34609 - protein, 448 aa, Zea mays subsp. mays
  peptide (1)..(448): Ceres Seq. ID no. 12374560
  misc_feature (1)..(267): NCBI GI NO: 38347589 NR Description: OSJNBa0042I15.2
  misc_feature (274)..(447): NCBI GI NO: 38347589 NR Description: OSJNBa0042I15.2
  misc_feature (39)..(448): NCBI GI NO: 15238825 NR Description: putative protein; protein id: At5g47860
  misc_feature (187)..(435): NCBI GI NO: 38569178 NR Description: OJ000315_02.20
  misc_feature (105)..(250): NCBI GI NO: 17228580 NR Description: hypothetical protein [Nostoc sp. PCC 7120]
  misc_feature (303)..(371): NCBI GI NO: 17228580 NR Description: hypothetical protein [Nostoc sp. PCC 7120]
  misc_feature (105)..(235): NCBI GI NO: 16329812 NR Description: hypothetical protein [Synechocystis sp. PCC 6803]
  misc_feature (249)..(371): NCBI GI NO: 16329812 NR Description: hypothetical protein [Synechocystis sp. PCC 6803]
  misc_feature (105)..(250): NCBI GI NO: 23039808 NR Description: hypothetical protein
  misc_feature (281)..(373): NCBI GI NO: 23039808 NR Description: hypothetical protein
MAAASQPPSSALRMHGCGGAASASSAPVRLFTESRGRVVASIGRGRRRRRAISCCSSPDADGPRPAAPPTSAAPSDGSIQLYSQIERVITEAAKQSREGWGSTGDWTEVEGSWVLRPKSLEPSFVVHFVGGIFVGAAPQITYRFFLECLANRGALVIATPYASGFDHFFIADEVQFKFDRCLRNLDEPVNDLPTFGVGHSLGSVIHMLIGSRYAVQRSGNVLMSFNNKEASSAIPLFSPVIVPMSQSFGPIFSQLASYPTIRFGAEAAIKQLENLSPPVVKQLLPLLQQLPPLYMDLIKGREDFIPKPEETRRLIKSYYGISRNLLIKFKDDQIDETSTLAQVLSSEAAISSLLDMSIRSLPGDHGLPLQQVLPDVPPAMADAVNRGGELLTNLTTGTPWEAVAKEVGTTLGTDSGILRAQISKDVETLVDVIASWTSSNSGPRLLRP

SEQ ID NO: 34610 - protein, 435 aa, Zea mays subsp. mays
  peptide (1)..(435): Ceres Seq. ID no. 12374561
  misc_feature (1)..(254): NCBI GI NO: 38347589 NR Description: OSJNBa0042I15.2
  misc_feature (261)..(434): NCBI GI NO: 38347589 NR Description: OSJNBa0042I15.2
  misc_feature (26)..(435): NCBI GI NO: 15238825 NR Description: putative protein; protein id: At5g47860
  misc_feature (174)..(422): NCBI GI NO: 38569178 NR Description: OJ000315_02.20
  misc_feature (92)..(237): NCBI GI NO: 17228580 NR Description: hypothetical protein [Nostoc sp. PCC 7120]
  misc_feature (290)..(358): NCBI GI NO: 17228580 NR Description: hypothetical protein [Nostoc sp. PCC 7120]
  misc_feature (92)..(222): NCBI GI NO: 16329812 NR Description: hypothetical protein [Synechocystis sp. PCC 6803]
  misc_feature (236)..(358): NCBI GI NO: 16329812 NR Description: hypothetical protein [Synechocystis sp. PCC 6803]
  misc_feature (92)..(237): NCBI GI NO: 23039808 NR Description: hypothetical protein
  misc_feature (268)..(360): NCBI GI NO: 23039808 NR Description: hypothetical protein
MHGCGGAASASSAPVRLFTESRGRVVASIGRGRRRRRAISCCSSPDADGPRPAAPPTSAAPSDGSIQLYSQIERVITEAAKQSREGWGSTGDWTEVEGSWVLRPKSLEPSFVVHFVGGIFVGAAPQITYRFFLECLANRGALVIATPYASGFDHFFIADEVQFKFDRCLRNLDEPVNDLPTFGVGHSLGSVIHMLIGSRYAVQRSGNVLMSFNNKEASSAIPLFSPVIVPMSQSFGPIFSQLASYPTIRFGAEAAIKQLENLSPPVVKQLLPLLQQLPPLYMDLIKGREDFIPKPEETRRLIKSYYGISRNLLIKFKDDQIDETSTLAQVLSSEAAISSLLDMSIRSLPGDHGLPLQQVLPDVPPAMADAVNRGGELLTNLTTGTPWEAVAKEVGTTLGTDSGILRAQISKDVETLVDVIASWTSSNSGPRLLRP

SEQ ID NO: 34611 - DNA, 902 bp, Zea mays subsp. mays
  misc_feature (1)..(902): Ceres Seq. ID no. 12414821
agacacggaggtacaggagcgagggggaaagtgggatggtagtgggggcatcatcggtgtccggcgccgcggcttccggaggtacctctggtacggctccgccgcggaaggggaagtcgtgcaagggctgcctttactactcgtcagtgctcaagtcccgcggctacaacccaatctgcgttgggatcccccgttccatcccccaagttcctaactacgtggtggatgagcctaaggaggacgcgacagcgcaggggcatgatctcaggcggttcaggtacgggtgcgcgggttactccatattcgtgaacagggacggccaaggtggtgagggcgagggcaagacgttgttgccgtattgcaggggcctcgagttattggtggacagcagattggtcgagagaaaaccatccgcagctgaacaagctccagcacatgttacaaaggatgcagctaccacccgctctcaccaacaaggacaacagagacctgcgaacttgtcgaggcaggaattcttggagaggtttaagaagagtgctggactggtcgcttcaggggtcgcgaagaatctaaacaaaacggccaattatatcaaggaaaatattcatgacatattgtaccacgatcgtcgcccaccaaagtagtagccatgccgacttgctgagtcccagaacgaagcacagcagccccagctccgtcactgattatgcaaatggagccttccaggattccaacttcactcgctttacttgcataatcttgtaatttagggctgcatatgtacatgcaatttaacttgctgcttgtttgaagcggaaaatcagatttcgtttggtgtaatcggaagacgatgatattggttgaattttgactgaaaattcgagaaacagcatttctcgatg

SEQ ID NO: 34612 - protein, 213 aa, Zea mays subsp. mays
  peptide (1)..(213): Ceres Seq. ID no. 12414822
  misc_feature (36)..(213): NCBI GI NO: 15230397 NR Description: putative protein; protein id: At3g51100.1
TRRYRSEGESGMVVGASSVSGAAASGGTSGTAPPRKGKSCKGCLYYSSVLKSRGYNPICVGIPRSIPQVPNYVVDEPKEDATAQGHDLRRFRYGCAGYSIFVNRDGQGGEGEGKTLLPYCRGLELLVDSRLVERKPSAAEQAPAHVTKDAATTRSHQQGQQRPANLSRQEFLERFKKSAGLVASGVAKNLNKTANYIKENIHDILYHDRRPPK

SEQ ID NO: 34613 - protein, 202 aa, Zea mays subsp. mays
  peptide (1)..(202): Ceres Seq. ID no. 12414823
  misc_feature (25)..(202): NCBI GI NO: 15230397 NR Description: putative protein; protein id: At3g51100.1
MVVGASSVSGAAASGGTSGTAPPRKGKSCKGCLYYSSVLKSRGYNPICVGIPRSIPQVPNYVVDEPKEDATAQGHDLRRFRYGCAGYSIFVNRDGQGGEGEGKTLLPYCRGLELLVDSRLVERKPSAAEQAPAHVTKDAATTRSHQQGQQRPANLSRQEFLERFKKSAGLVASGVAKNLNKTANYIKENIHDILYHDRRPPK

SEQ ID NO: 34614 - DNA, 2305 bp, Zea mays subsp. mays
  misc_feature (1)..(2305): Ceres Seq. ID no. 12374507
acacgacatctcgtgtctctgttgggagcttcttcaacatctcgtctctctcatcctccgacgccatccgctcccgccccggccgagccgcgcgttgtgtatggattccaaaagcaatcatacaggggctatggcgaggccttacaaacctaagaatatcctcattacaggagctgctggttttatcgcctcccatgtcgcaatccgcattaccaagaagtaccccgattacaagattatcgtccttgacaaacttgactactgctctaatctgaagaacctgcttcctgtgagctcatcaccaaacttcaagtttgtgaagggtgatattgcaagtgttgatcttgtcaacttccttcttgtcacagagaacattgataccataatgcacttcgcggcccagacacatgtcgacaattcatttgggaattctttcgaatttaccaagaacaatatttatggtacacatgtacttcttgaggcctgcaggattagtggccagatcaagaggttcatccatgtcagcactgatgaggtctatggggagactgacgaggatgcagttgttggcaaccatgaagcatcacagctgcttcctacaaacccatatgcagccaccaaagcgggagcggagatgcttgtaatggcatatgggagatcctatggactgccagttatcactactcggggaaacaatgtctatggcccaaatcagttccctgagaagcttatcccaaagttcattctcttggccatgagaggggagcccctccctatccatggtgatggagtcaatgttcgtagctacctctattgtgaggatgttgcggaggcatttgaggtcattcttcatcatggagaagttggacatgtttataatattggaacaaaaagggagaggacagtgcttgatgtggcaaaagatgtttgcagactcttcaatcttgaacctgacaaagtcatcatgtttgtcgagaacagacctttcaatgaccagaggtatttcttggacgatgagaagctcaagagccttggatgggctgagcgcaccccatgggaagaaggcttaaaaaaggcaatggagtggtatgtagcaaaatctgattattggggtgatgtttctggggccttactgcctcatccaaggacattgatgatgccagggtgcgagggctcagaggagattaaaggaatactcagccggtttaataacattcaaacaaaggtcggttcaacatcagataatgctccagaaccgcatgccttcaagttcttgatatatggcaggacaggatggatcggcggacttcttgggaaaatatgtgagaagaaaggaattccgtatgaatatggaaatggccgcttgcaagagcgttcttcactagtcctagacatccaaactattaagccaacacatgtcttcaatgccgctggtgtgactggaaggcccaatgttgactggtgtgaatcgcacaagccggacaccatccgtaccaatgttgtgggcaccttgaatctagcagatgtatgtaggaagcatggcttattgatgatgaactatgccactgggtgcatatttgaatacgatgcacatcatcctgaagggtcaggtatcggcttcaaagaggaagatacaccaaattttactggttcgttctactcgaagacgaaggcaatggtcgaggaattattgaaggagtatgagaacgtctgcactctgcgagttcggatgccgatatcctctgacctcagcaacccgcggaacttcgtgacaaagatcagccgttacaacaaggtggtgaacatccccaacagcatgacgatattggacgaactcctgcccatctcagtggagatggcgaagaggaacctgcggggcatctataacttcaccaaccccggcgtcgtcagccacaacgagatcctagagatgtacaagcagtacatcgaccctagcttcaagtggacaaacttcaccctcgaggagcaggcgaaggtcatcgttgctccgcgaagcaacaacgagatggacgcaaccaagctgaagaacgagttccccgagctgctgtcgatcaaggactctttgatcaagtacgtctttgagcccaacagaaaggtgcccacagactgaagtccgaagggctggcacagctgataccgtacaacacagcaaccattagtgttagactatgtgtgtgggccagcactactttacttttgggctgtcggtctattagggttagagtcctgtgagtctatatattgtacctcatctcttatacaatacatttttgggctgcgagcc

SEQ ID NO: 34615 - protein, 709 aa, Zea mays subsp. mays
  peptide (1)..(709): Ceres Seq. ID no. 12374508
  misc_feature (53)..(363): Pfam Name: Pfam Description:  NAD dependent epimerase/dehydratase family
  misc_feature (48)..(705): NCBI GI NO: 15218420 NR Description: dTDP-glucose 4,6-dehydratase, putative
  misc_feature (48)..(705): NCBI GI NO: 15231926 NR Description: dTDP-glucose 4,6-dehydratase, putative
  misc_feature (48)..(705): NCBI GI NO: 25405640 NR Description: hypothetical protein F22G10.13
  misc_feature (212)..(705): NCBI GI NO: 18404494 NR Description: dTDP-D-glucose 4,6-dehydratase, putative
  misc_feature (212)..(705): NCBI GI NO: 15081769 NR Description: At1g53500/F22G10_13 [Arabidopsis thaliana]
  misc_feature (415)..(705): NCBI GI NO: 18407710 NR Description: expressed protein; protein id: At1g63000
  misc_feature (421)..(705): NCBI GI NO: 21593701 NR Description: unknown [Arabidopsis thaliana]
  misc_feature (415)..(705): NCBI GI NO: 14423536 NR Description: Unknown protein [Arabidopsis thaliana]
  misc_feature (439)..(707): NCBI GI NO: 2982303 NR Description: hypothetical protein [Picea mariana]
  misc_feature (48)..(357): NCBI GI NO: 17531421 NR Description: 4 6-dehydratase (71.1 kD) [Caenorhabditis elegans]
HDISCLCWELLQHLVSLILRRHPLPPRPSRALCMDSKSNHTGAMARPYKPKNILITGAAGFIASHVAIRITKKYPDYKIIVLDKLDYCSNLKNLLPVSSSPNFKFVKGDIASVDLVNFLLVTENIDTIMHFAAQTHVDNSFGNSFEFTKNNIYGTHVLLEACRISGQIKRFIHVSTDEVYGETDEDAVVGNHEASQLLPTNPYAATKAGAEMLVMAYGRSYGLPVITTRGNNVYGPNQFPEKLIPKFILLAMRGEPLPIHGDGVNVRSYLYCEDVAEAFEVILHHGEVGHVYNIGTKRERTVLDVAKDVCRLFNLEPDKVIMFVENRPFNDQRYFLDDEKLKSLGWAERTPWEEGLKKAMEWYVAKSDYWGDVSGALLPHPRTLMMPGCEGSEEIKGILSRFNNIQTKVGSTSDNAPEPHAFKFLIYGRTGWIGGLLGKICEKKGIPYEYGNGRLQERSSLVLDIQTIKPTHVFNAAGVTGRPNVDWCESHKPDTIRTNVVGTLNLADVCRKHGLLMMNYATGCIFEYDAHHPEGSGIGFKEEDTPNFTGSFYSKTKAMVEELLKEYENVCTLRVRMPISSDLSNPRNFVTKISRYNKVVNIPNSMTILDELLPISVEMAKRNLRGIYNFTNPGVVSHNEILEMYKQYIDPSFKWTNFTLEEQAKVIVAPRSNNEMDATKLKNEFPELLSIKDSLIKYVFEPNRKVPTD

SEQ ID NO: 34616 - protein, 676 aa, Zea mays subsp. mays
  peptide (1)..(676): Ceres Seq. ID no. 12374509
  misc_feature (20)..(330): Pfam Name: Pfam Description:  NAD dependent epimerase/dehydratase family
  misc_feature (15)..(672): NCBI GI NO: 15218420 NR Description: dTDP-glucose 4,6-dehydratase, putative
  misc_feature (15)..(672): NCBI GI NO: 15231926 NR Description: dTDP-glucose 4,6-dehydratase, putative
  misc_feature (15)..(672): NCBI GI NO: 25405640 NR Description: hypothetical protein F22G10.13
  misc_feature (179)..(672): NCBI GI NO: 18404494 NR Description: dTDP-D-glucose 4,6-dehydratase, putative
  misc_feature (179)..(672): NCBI GI NO: 15081769 NR Description: At1g53500/F22G10_13 [Arabidopsis thaliana]
  misc_feature (382)..(672): NCBI GI NO: 18407710 NR Description: expressed protein; protein id: At1g63000
  misc_feature (388)..(672): NCBI GI NO: 21593701 NR Description: unknown [Arabidopsis thaliana]
  misc_feature (382)..(672): NCBI GI NO: 14423536 NR Description: Unknown protein [Arabidopsis thaliana]
  misc_feature (406)..(674): NCBI GI NO: 2982303 NR Description: hypothetical protein [Picea mariana]
  misc_feature (15)..(324): NCBI GI NO: 17531421 NR Description: 4 6-dehydratase (71.1 kD) [Caenorhabditis elegans]
MDSKSNHTGAMARPYKPKNILITGAAGFIASHVAIRITKKYPDYKIIVLDKLDYCSNLKNLLPVSSSPNFKFVKGDIASVDLVNFLLVTENIDTIMHFAAQTHVDNSFGNSFEFTKNNIYGTHVLLEACRISGQIKRFIHVSTDEVYGETDEDAVVGNHEASQLLPTNPYAATKAGAEMLVMAYGRSYGLPVITTRGNNVYGPNQFPEKLIPKFILLAMRGEPLPIHGDGVNVRSYLYCEDVAEAFEVILHHGEVGHVYNIGTKRERTVLDVAKDVCRLFNLEPDKVIMFVENRPFNDQRYFLDDEKLKSLGWAERTPWEEGLKKAMEWYVAKSDYWGDVSGALLPHPRTLMMPGCEGSEEIKGILSRFNNIQTKVGSTSDNAPEPHAFKFLIYGRTGWIGGLLGKICEKKGIPYEYGNGRLQERSSLVLDIQTIKPTHVFNAAGVTGRPNVDWCESHKPDTIRTNVVGTLNLADVCRKHGLLMMNYATGCIFEYDAHHPEGSGIGFKEEDTPNFTGSFYSKTKAMVEELLKEYENVCTLRVRMPISSDLSNPRNFVTKISRYNKVVNIPNSMTILDELLPISVEMAKRNLRGIYNFTNPGVVSHNEILEMYKQYIDPSFKWTNFTLEEQAKVIVAPRSNNEMDATKLKNEFPELLSIKDSLIKYVFEPNRKVPTD

SEQ ID NO: 34617 - protein, 666 aa, Zea mays subsp. mays
  peptide (1)..(666): Ceres Seq. ID no. 12374510
  misc_feature (10)..(320): Pfam Name: Pfam Description:  NAD dependent epimerase/dehydratase family
  misc_feature (5)..(662): NCBI GI NO: 15218420 NR Description: dTDP-glucose 4,6-dehydratase, putative
  misc_feature (5)..(662): NCBI GI NO: 15231926 NR Description: dTDP-glucose 4,6-dehydratase, putative
  misc_feature (5)..(662): NCBI GI NO: 25405640 NR Description: hypothetical protein F22G10.13
  misc_feature (169)..(662): NCBI GI NO: 18404494 NR Description: dTDP-D-glucose 4,6-dehydratase, putative
  misc_feature (169)..(662): NCBI GI NO: 15081769 NR Description: At1g53500/F22G10_13 [Arabidopsis thaliana]
  misc_feature (372)..(662): NCBI GI NO: 18407710 NR Description: expressed protein; protein id: At1g63000
  misc_feature (378)..(662): NCBI GI NO: 21593701 NR Description: unknown [Arabidopsis thaliana]
  misc_feature (372)..(662): NCBI GI NO: 14423536 NR Description: Unknown protein [Arabidopsis thaliana]
  misc_feature (396)..(664): NCBI GI NO: 2982303 NR Description: hypothetical protein [Picea mariana]
  misc_feature (5)..(314): NCBI GI NO: 17531421 NR Description: 4 6-dehydratase (71.1 kD) [Caenorhabditis elegans]
MARPYKPKNILITGAAGFIASHVAIRITKKYPDYKIIVLDKLDYCSNLKNLLPVSSSPNFKFVKGDIASVDLVNFLLVTENIDTIMHFAAQTHVDNSFGNSFEFTKNNIYGTHVLLEACRISGQIKRFIHVSTDEVYGETDEDAVVGNHEASQLLPTNPYAATKAGAEMLVMAYGRSYGLPVITTRGNNVYGPNQFPEKLIPKFILLAMRGEPLPIHGDGVNVRSYLYCEDVAEAFEVILHHGEVGHVYNIGTKRERTVLDVAKDVCRLFNLEPDKVIMFVENRPFNDQRYFLDDEKLKSLGWAERTPWEEGLKKAMEWYVAKSDYWGDVSGALLPHPRTLMMPGCEGSEEIKGILSRFNNIQTKVGSTSDNAPEPHAFKFLIYGRTGWIGGLLGKICEKKGIPYEYGNGRLQERSSLVLDIQTIKPTHVFNAAGVTGRPNVDWCESHKPDTIRTNVVGTLNLADVCRKHGLLMMNYATGCIFEYDAHHPEGSGIGFKEEDTPNFTGSFYSKTKAMVEELLKEYENVCTLRVRMPISSDLSNPRNFVTKISRYNKVVNIPNSMTILDELLPISVEMAKRNLRGIYNFTNPGVVSHNEILEMYKQYIDPSFKWTNFTLEEQAKVIVAPRSNNEMDATKLKNEFPELLSIKDSLIKYVFEPNRKVPTD

SEQ ID NO: 34618 - DNA, 812 bp, Zea mays subsp. mays
  misc_feature (1)..(812): Ceres Seq. ID no. 13499119
ccagcctcgccgccccaccaccccagcattgccttaccttgccttgccttgccctgccctccattccacctccacctcgccgcccaaatccccccacccaacaatcccccatggggtcgcaggccatcgaggcgcaccgcgcgggcgcggaggtgtaccgcggcgcggcgctgtgcgcggagaagtcgacggagctgctggcagaggcgcacctcccgctgggcctgctgccgctggccgacatggaggaggtcggctacaaccgcgccacgggcttcgtgtggctgcgccagaggaagtcgctcacgcacacgttccgcccgatcgcgcgccaggtctcgtacgccgccgaggtcaccgccttcgtggaggaccggcggatgaggcgcatgaccggggtcaagaccaaggagctcctcatctgggtcaccctctccgacatgttcgtcgacagggacgacccctccaagatcaccttcaagacgcccaccgggctcggcaggacctaccccgtctccgccttcgctaaggaaggcgccggtgacgacggcgcggcggccaagcacaaggatgatgcccccgccccgaccgccgccggtaaggctgctgccagcaagtgaggtgcgcggcgtccggagctttttaccttgccgtagtcgccatacttgcctccccaataatggcgtttgtaccccctctacctgcttcaaattagtgtgttttatgaatggaaacgaccatccaactttccatccgtccttgcaatgtgtcacggcgggatgtttttactacacatcagctttaccagttcc

SEQ ID NO: 34619 - protein, 205 aa, Zea mays subsp. mays
  peptide (1)..(205): Ceres Seq. ID no. 13499120
  misc_feature (40)..(183): Pfam Name: Pfam Description:  Protein of unknown function, DUF538
  misc_feature (37)..(203): NCBI GI NO: 34903866 NR Description: unnamed protein product
  misc_feature (37)..(175): NCBI GI NO: 34915410 NR Description: hypothetical protein~similar to Arabidopsisthaliana chromosome1
  misc_feature (37)..(175): NCBI GI NO: 34915422 NR Description: hypothetical protein~similar to Arabidopsisthaliana chromosome1
  misc_feature (37)..(175): NCBI GI NO: 33146557 NR Description: unknown protein
  misc_feature (37)..(175): NCBI GI NO: 34915418 NR Description: hypothetical protein~similar to Arabidopsisthaliana chromosome1
  misc_feature (37)..(175): NCBI GI NO: 34915426 NR Description: hypothetical protein~similar to Arabidopsisthaliana chromosome1
  misc_feature (37)..(177): NCBI GI NO: 18422648 NR Description: expressed protein [Arabidopsis thaliana]
  misc_feature (43)..(205): NCBI GI NO: 18391006 NR Description: expressed protein [Arabidopsis thaliana]
  misc_feature (42)..(175): NCBI GI NO: 34915430 NR Description: hypothetical protein~similar to Arabidopsisthaliana chromosome3
SLAAPPPQHCLTLPCLALPSIPPPPRRPNPPTQQSPMGSQAIEAHRAGAEVYRGAALCAEKSTELLAEAHLPLGLLPLADMEEVGYNRATGFVWLRQRKSLTHTFRPIARQVSYAAEVTAFVEDRRMRRMTGVKTKELLIWVTLSDMFVDRDDPSKITFKTPTGLGRTYPVSAFAKEGAGDDGAAAKHKDDAPAPTAAGKAAASK

SEQ ID NO: 34620 - protein, 175 aa, Zea mays subsp. mays
  peptide (1)..(175): Ceres Seq. ID no. 13499121
QPRRPTTPALPYLALPCPALHSTSTSPPKSPHPTIPHGVAGHRGAPRGRGGVPRRGAVRGEVDGAAGRGAPPAGPAAAGRHGGGRLQPRHGLRVAAPEEVAHAHVPPDRAPGLVRRRGHRLRGGPADEAHDRGQDQGAPHLGHPLRHVRRQGRPLQDHLQDAHRARQDLPRLRLR

SEQ ID NO: 34621 - protein, 169 aa, Zea mays subsp. mays
  peptide (1)..(169): Ceres Seq. ID no. 13499122
  misc_feature (4)..(147): Pfam Name: Pfam Description:  Protein of unknown function, DUF538
  misc_feature (1)..(167): NCBI GI NO: 34903866 NR Description: unnamed protein product
  misc_feature (1)..(139): NCBI GI NO: 34915410 NR Description: hypothetical protein~similar to Arabidopsisthaliana chromosome1
  misc_feature (1)..(139): NCBI GI NO: 34915422 NR Description: hypothetical protein~similar to Arabidopsisthaliana chromosome1
  misc_feature (1)..(139): NCBI GI NO: 33146557 NR Description: unknown protein
  misc_feature (1)..(139): NCBI GI NO: 34915418 NR Description: hypothetical protein~similar to Arabidopsisthaliana chromosome1
  misc_feature (1)..(139): NCBI GI NO: 34915426 NR Description: hypothetical protein~similar to Arabidopsisthaliana chromosome1
  misc_feature (1)..(141): NCBI GI NO: 18422648 NR Description: expressed protein [Arabidopsis thaliana]
  misc_feature (7)..(169): NCBI GI NO: 18391006 NR Description: expressed protein [Arabidopsis thaliana]
  misc_feature (6)..(139): NCBI GI NO: 34915430 NR Description: hypothetical protein~similar to Arabidopsisthaliana chromosome3
MGSQAIEAHRAGAEVYRGAALCAEKSTELLAEAHLPLGLLPLADMEEVGYNRATGFVWLRQRKSLTHTFRPIARQVSYAAEVTAFVEDRRMRRMTGVKTKELLIWVTLSDMFVDRDDPSKITFKTPTGLGRTYPVSAFAKEGAGDDGAAAKHKDDAPAPTAAGKAAASK

SEQ ID NO: 34622 - DNA, 2006 bp, Zea mays subsp. mays
  misc_feature (1)..(2006): Ceres Seq. ID no. 13499123
accgatcgcggggccgatcgagtctgctgaagcctcgcctcgcctcgcagaagaagcagcgtgagtaaaaaacccgcagggtgcagacgaaaacctcgtccgtttccgtcgtcttcctcctccctccgtctcccttcacccggcctcggtgggtccgctccccagccacgcgccgctctcttatttaaccccggccccggcctccgctccgccactcgcgcacccatcacaccccctaaccactccacctccctcagcagccctcacggccactacccactgcggctgtaccacctgtacggctgcactgtccgtcgatcggctttgcaccacacgtccgcgcgctcgctccgtcggtgtcggtagccatggcgctggcggggacgggggtgttcgcggagatcctggacagcgaggtgtacaggtactacgccgacggggagtggcgcagctccgcctccggcaagtccgtcgccatcgtcaaccccaccacccgcaagacgcagtacagggtgcaagcatgcacgcaggaggaggtgaacaaggcgatggacgcggccaaggtcgcgcagaaggcatgggcccggacgccgctgtggaagcgtgcggagctcctccacaaggcggccgcgatcctcaaggagcacaaggcccccatcgccgagtgccttgtcaaggagatagccaagccggccaaggatgccgtttctgaggttgtccggtctggggatttggtgtcgtacacagctgaggagggtgtgcggatactcggggagggcaagctgcttgtttcggatagcttccctggtaatgaacgaaacaagtactgtctgagctccaagataccccttggagtagttttggcaatcccgccgttcaactatcctgtcaacttagcagtttctaagattggcccagcactaattgcaggcaatgctcttgtgctaaagcctccaactcagggcgctgtggctgcacttcatatggtacactgcttccacctggctggtttcccgaaaggtttgatcagttgtgtgactgggaagggttctgaaataggagattttcttacaatgcatcctggagtcaactgcataagttttactggtggcgatactggtatagccatttcaaagaaggctggaatggtccctcttcagatggagcttgggggaaaagatgcttgcattgtgctagaggatgcagatctggatttggtttccgcaaatatagtaaagggtggcttctcatacagtggccagaggtgcactgctgtcaaagtagtgctgatcatggaatcgattgctgatgctgtggtacagaaggttaatgccaagttggcgaaactgaaagttggcccacctgaggacgactctgatatcaccccggttgtaacagaatcctcagccaacttcatcgagggtctggtgatggatgcaaaggagaaaggagcaactttctgccaggagtacaggagagaaggcaaccttatctggccgttgctgctggatcatgtccgccctgacatgaggatcgcatgggaggagccttttgggcctgtcttgcctgtgattaggattaactcagttgaggaaggcatccaccattgcaatgccagtaatttcggcctacagggatgcatttttacaagagacatcaacaaggcaatcctgatcagtgatgcaatggagactggaactgtgcagatcaactctgcaccggctcgtgggcctgatcatttccccttccagggactgaaagacagtggcattgggtcccaggggataacaaacagcattaacatgatgaccaaggtgaagagcactgtcataaacctgccgtcaccatcctacaccatgggctgagatattcttgttaagtgttctatagctccatgagcaatgtagagagttaaatgtttcatagccacgtgagatttggacgctatttacacctcagttcttcctgcagaagatcttttgcagtttaaagaataaagtgcgttg

SEQ ID NO: 34623 - protein, 498 aa, Zea mays subsp. mays
  peptide (1)..(498): Ceres Seq. ID no. 13499124
  misc_feature (1)..(498): NCBI GI NO: 2494075 NR Description: NADP-DEPENDENT GLYCERALDEHYDE-3-PHOSPHATEDEHYDROGENASE
  misc_feature (2)..(498): NCBI GI NO: 19880027 NR Description: glyceraldehyde-3-phosphate dehydrogenase
  misc_feature (3)..(498): NCBI GI NO: 3913711 NR Description: NADP-dependent glyceraldehyde-3-phosphatedehydrogenase
  misc_feature (3)..(498): NCBI GI NO: 2494076 NR Description: NADP-DEPENDENT GLYCERALDEHYDE-3-PHOSPHATEDEHYDROGENASE
  misc_feature (24)..(498): NCBI GI NO: 29367371 NR Description: NADH-dependent glyceraldehyde-3-phosphatedehydrogenase
  misc_feature (3)..(498): NCBI GI NO: 1084372 NR Description: glyceraldehyde-3-phosphate dehydrogenase
  misc_feature (3)..(498): NCBI GI NO: 6425093 NR Description: nonreversible glyceraldehyde-3-phosphatedehydrogenase
  misc_feature (3)..(498): NCBI GI NO: 15224111 NR Description: NADP-dependent glyceraldehyde-3-phosphatedehydrogenase
  misc_feature (3)..(498): NCBI GI NO: 21780314 NR Description: nonphosphorylating glyceraldehyde-3-phosphatedehydrogenase
  misc_feature (3)..(498): NCBI GI NO: 21780317 NR Description: nonphosphorylating glyceraldehyde-3-phosphatedehydrogenase
MALAGTGVFAEILDSEVYRYYADGEWRSSASGKSVAIVNPTTRKTQYRVQACTQEEVNKAMDAAKVAQKAWARTPLWKRAELLHKAAAILKEHKAPIAECLVKEIAKPAKDAVSEVVRSGDLVSYTAEEGVRILGEGKLLVSDSFPGNERNKYCLSSKIPLGVVLAIPPFNYPVNLAVSKIGPALIAGNALVLKPPTQGAVAALHMVHCFHLAGFPKGLISCVTGKGSEIGDFLTMHPGVNCISFTGGDTGIAISKKAGMVPLQMELGGKDACIVLEDADLDLVSANIVKGGFSYSGQRCTAVKVVLIMESIADAVVQKVNAKLAKLKVGPPEDDSDITPVVTESSANFIEGLVMDAKEKGATFCQEYRREGNLIWPLLLDHVRPDMRIAWEEPFGPVLPVIRINSVEEGIHHCNASNFGLQGCIFTRDINKAILISDAMETGTVQINSAPARGPDHFPFQGLKDSGIGSQGITNSINMMTKVKSTVINLPSPSYTMG

SEQ ID NO: 34624 - protein, 438 aa, Zea mays subsp. mays
  peptide (1)..(438): Ceres Seq. ID no. 13499125
  misc_feature (1)..(438): NCBI GI NO: 2494075 NR Description: NADP-DEPENDENT GLYCERALDEHYDE-3-PHOSPHATEDEHYDROGENASE
  misc_feature (1)..(438): NCBI GI NO: 19880027 NR Description: glyceraldehyde-3-phosphate dehydrogenase
  misc_feature (1)..(438): NCBI GI NO: 3913711 NR Description: NADP-dependent glyceraldehyde-3-phosphatedehydrogenase
  misc_feature (1)..(438): NCBI GI NO: 2494076 NR Description: NADP-DEPENDENT GLYCERALDEHYDE-3-PHOSPHATEDEHYDROGENASE
  misc_feature (1)..(438): NCBI GI NO: 29367371 NR Description: NADH-dependent glyceraldehyde-3-phosphatedehydrogenase
  misc_feature (1)..(438): NCBI GI NO: 1084372 NR Description: glyceraldehyde-3-phosphate dehydrogenase
  misc_feature (1)..(438): NCBI GI NO: 6425093 NR Description: nonreversible glyceraldehyde-3-phosphatedehydrogenase
  misc_feature (1)..(438): NCBI GI NO: 15224111 NR Description: NADP-dependent glyceraldehyde-3-phosphatedehydrogenase
  misc_feature (1)..(438): NCBI GI NO: 21780314 NR Description: nonphosphorylating glyceraldehyde-3-phosphatedehydrogenase
  misc_feature (1)..(438): NCBI GI NO: 21780317 NR Description: nonphosphorylating glyceraldehyde-3-phosphatedehydrogenase
MDAAKVAQKAWARTPLWKRAELLHKAAAILKEHKAPIAECLVKEIAKPAKDAVSEVVRSGDLVSYTAEEGVRILGEGKLLVSDSFPGNERNKYCLSSKIPLGVVLAIPPFNYPVNLAVSKIGPALIAGNALVLKPPTQGAVAALHMVHCFHLAGFPKGLISCVTGKGSEIGDFLTMHPGVNCISFTGGDTGIAISKKAGMVPLQMELGGKDACIVLEDADLDLVSANIVKGGFSYSGQRCTAVKVVLIMESIADAVVQKVNAKLAKLKVGPPEDDSDITPVVTESSANFIEGLVMDAKEKGATFCQEYRREGNLIWPLLLDHVRPDMRIAWEEPFGPVLPVIRINSVEEGIHHCNASNFGLQGCIFTRDINKAILISDAMETGTVQINSAPARGPDHFPFQGLKDSGIGSQGITNSINMMTKVKSTVINLPSPSYTMG

SEQ ID NO: 34625 - protein, 293 aa, Zea mays subsp. mays
  peptide (1)..(293): Ceres Seq. ID no. 13499126
  misc_feature (1)..(293): NCBI GI NO: 2494075 NR Description: NADP-DEPENDENT GLYCERALDEHYDE-3-PHOSPHATEDEHYDROGENASE
  misc_feature (1)..(293): NCBI GI NO: 19880027 NR Description: glyceraldehyde-3-phosphate dehydrogenase
  misc_feature (1)..(293): NCBI GI NO: 3913711 NR Description: NADP-dependent glyceraldehyde-3-phosphatedehydrogenase
  misc_feature (1)..(293): NCBI GI NO: 2494076 NR Description: NADP-DEPENDENT GLYCERALDEHYDE-3-PHOSPHATEDEHYDROGENASE
  misc_feature (1)..(293): NCBI GI NO: 29367371 NR Description: NADH-dependent glyceraldehyde-3-phosphatedehydrogenase
  misc_feature (1)..(293): NCBI GI NO: 1084372 NR Description: glyceraldehyde-3-phosphate dehydrogenase
  misc_feature (1)..(293): NCBI GI NO: 6425093 NR Description: nonreversible glyceraldehyde-3-phosphatedehydrogenase
  misc_feature (1)..(293): NCBI GI NO: 15224111 NR Description: NADP-dependent glyceraldehyde-3-phosphatedehydrogenase
  misc_feature (1)..(293): NCBI GI NO: 21780314 NR Description: nonphosphorylating glyceraldehyde-3-phosphatedehydrogenase
  misc_feature (1)..(293): NCBI GI NO: 21780317 NR Description: nonphosphorylating glyceraldehyde-3-phosphatedehydrogenase
MVHCFHLAGFPKGLISCVTGKGSEIGDFLTMHPGVNCISFTGGDTGIAISKKAGMVPLQMELGGKDACIVLEDADLDLVSANIVKGGFSYSGQRCTAVKVVLIMESIADAVVQKVNAKLAKLKVGPPEDDSDITPVVTESSANFIEGLVMDAKEKGATFCQEYRREGNLIWPLLLDHVRPDMRIAWEEPFGPVLPVIRINSVEEGIHHCNASNFGLQGCIFTRDINKAILISDAMETGTVQINSAPARGPDHFPFQGLKDSGIGSQGITNSINMMTKVKSTVINLPSPSYTMG

SEQ ID NO: 34626 - DNA, 841 bp, Zea mays subsp. mays
  misc_feature (1)..(841): Ceres Seq. ID no. 12347087
atctctctactcactcttcctgtctcctcgtcttgctggagccagtattaacagatccgggttcgagcgtccagtctcgccggacctccgactggcggtcgctgctatctctctggtaccgcggtctcttgcgcgcttctctccattcgctcccactcaccggcttgggggaatgaaggatgtggtagggagcccggggacctggagtggcatggcgctgcggttgtcgcaatgcgtgtccgctggcgcatccatgggcgctatggccacagcgtacggcttctccaactacactgctttctgctacttgattgcttcaatgggcctacaacttctttggagttttggccttgcttgtcttgatgtctactctttgaagactaaaagagatcttcacaaccctgtgcttgtaagcctttttgttgttggggactgggtcactgcaattctgtcgtttgctgccgcgtcggcgtccgcgggcgtgaccatcctgttcgagagggacgtccacttctgcaggatgtacccgcagttgtcgtgcggccggtacgcgctctcggtggtgctggcgttcatcacctggtccttcatcgcaacttctgctgtctccatgttctggttgctgccgtcgctctgatgtggcacggaaggagcctgccgtgtcgtcctgtttagatccgtttgcttcagcagctggttgatgccctgggtcgctctgggttgtgtgcttaagtaactatcaggatcctgatcttaaccggatgtactctgctggagacgagaaattatctagtgtatttgttaaaacaatgaggtggtttatcttcttatttcttttttt

SEQ ID NO: 34627 - protein, 211 aa, Zea mays subsp. mays
  peptide (1)..(211): Ceres Seq. ID no. 12347088
  misc_feature (63)..(194): Pfam Name: DUF588 Pfam Description: Domain of unknown function
  misc_feature (58)..(208): NCBI GI NO: 15241672 NR Description: putative protein; protein id: At5g02060.1
  misc_feature (58)..(211): NCBI GI NO: 18409932 NR Description: putative protein; protein id: At3g53850
  misc_feature (58)..(210): NCBI GI NO: 30686969 NR Description: expressed protein [Arabidopsis thaliana]
  misc_feature (92)..(211): NCBI GI NO: 11357817 NR Description: hypothetical protein F5K20
  misc_feature (58)..(210): NCBI GI NO: 18401722 NR Description: expressed protein; protein id: At2g28370
  misc_feature (58)..(208): NCBI GI NO: 25408537 NR Description: hypothetical protein At2g37200
  misc_feature (58)..(208): NCBI GI NO: 30687069 NR Description: expressed protein [Arabidopsis thaliana]
  misc_feature (58)..(180): NCBI GI NO: 7939530 NR Description: gb|AAD20689
  misc_feature (65)..(196): NCBI GI NO: 26006486 NR Description: Unknown protein
  misc_feature (58)..(211): NCBI GI NO: 22330130 NR Description: hypothetical protein; protein id: At1g49405.1
SLYSLFLSPRLAGASINRSGFERPVSPDLRLAVAAISLVPRSLARFSPFAPTHRLGGMKDVVGSPGTWSGMALRLSQCVSAGASMGAMATAYGFSNYTAFCYLIASMGLQLLWSFGLACLDVYSLKTKRDLHNPVLVSLFVVGDWVTAILSFAAASASAGVTILFERDVHFCRMYPQLSCGRYALSVVLAFITWSFIATSAVSMFWLLPSL

SEQ ID NO: 34628 - protein, 154 aa, Zea mays subsp. mays
  peptide (1)..(154): Ceres Seq. ID no. 12347089
  misc_feature (6)..(137): Pfam Name: DUF588 Pfam Description: Domain of unknown function
  misc_feature (1)..(151): NCBI GI NO: 15241672 NR Description: putative protein; protein id: At5g02060.1
  misc_feature (1)..(154): NCBI GI NO: 18409932 NR Description: putative protein; protein id: At3g53850
  misc_feature (1)..(153): NCBI GI NO: 30686969 NR Description: expressed protein [Arabidopsis thaliana]
  misc_feature (35)..(154): NCBI GI NO: 11357817 NR Description: hypothetical protein F5K20
  misc_feature (1)..(153): NCBI GI NO: 18401722 NR Description: expressed protein; protein id: At2g28370
  misc_feature (1)..(151): NCBI GI NO: 25408537 NR Description: hypothetical protein At2g37200
  misc_feature (1)..(151): NCBI GI NO: 30687069 NR Description: expressed protein [Arabidopsis thaliana]
  misc_feature (1)..(123): NCBI GI NO: 7939530 NR Description: gb|AAD20689
  misc_feature (8)..(139): NCBI GI NO: 26006486 NR Description: Unknown protein
  misc_feature (1)..(154): NCBI GI NO: 22330130 NR Description: hypothetical protein; protein id: At1g49405.1
MKDVVGSPGTWSGMALRLSQCVSAGASMGAMATAYGFSNYTAFCYLIASMGLQLLWSFGLACLDVYSLKTKRDLHNPVLVSLFVVGDWVTAILSFAAASASAGVTILFERDVHFCRMYPQLSCGRYALSVVLAFITWSFIATSAVSMFWLLPSL

SEQ ID NO: 34629 - protein, 141 aa, Zea mays subsp. mays
  peptide (1)..(141): Ceres Seq. ID no. 12347090
  misc_feature (1)..(124): Pfam Name: DUF588 Pfam Description: Domain of unknown function
  misc_feature (1)..(138): NCBI GI NO: 15241672 NR Description: putative protein; protein id: At5g02060.1
  misc_feature (1)..(141): NCBI GI NO: 18409932 NR Description: putative protein; protein id: At3g53850
  misc_feature (1)..(140): NCBI GI NO: 30686969 NR Description: expressed protein [Arabidopsis thaliana]
  misc_feature (22)..(141): NCBI GI NO: 11357817 NR Description: hypothetical protein F5K20
  misc_feature (1)..(140): NCBI GI NO: 18401722 NR Description: expressed protein; protein id: At2g28370
  misc_feature (1)..(138): NCBI GI NO: 25408537 NR Description: hypothetical protein At2g37200
  misc_feature (1)..(138): NCBI GI NO: 30687069 NR Description: expressed protein [Arabidopsis thaliana]
  misc_feature (1)..(110): NCBI GI NO: 7939530 NR Description: gb|AAD20689
  misc_feature (1)..(126): NCBI GI NO: 26006486 NR Description: Unknown protein
  misc_feature (1)..(141): NCBI GI NO: 22330130 NR Description: hypothetical protein; protein id: At1g49405.1
MALRLSQCVSAGASMGAMATAYGFSNYTAFCYLIASMGLQLLWSFGLACLDVYSLKTKRDLHNPVLVSLFVVGDWVTAILSFAAASASAGVTILFERDVHFCRMYPQLSCGRYALSVVLAFITWSFIATSAVSMFWLLPSL

SEQ ID NO: 34630 - DNA, 1227 bp, Zea mays subsp. mays
  misc_feature (1)..(1227): Ceres Seq. ID no. 12347785
gcaagccacaaacccgcaccacggcaccagcgggcagcggccaccctagtcagccagtcggaacgaagccgcgcctcgcgccctcccctcgcgaccaccactgcttccagttctggtgcagtgtggaagagcgcccagtgggagagattcagagagaggcggcgatggcgcggcatttcgtgctgaacaccggcgccaaggtcccctatgttgggctcggcacatggcagtctgaccccggcgtcgtcggcaacgccgtctacgccgccgtcaaggcgggttaccgacacatcgattgtgccagagtttacggaaatgagaaggagattggtttggcgctgaagaagctatttgaagagggtgtagtgaagcgagaagatatgtttatcacctctaagttgtggaatgatcatcatgctcctgaagatgtgcctgaggcactaaatcacagcctgaatgatttgcagcttgagtacctggatctttatcttatccattggccatttagagtcaagaagggagcaaataccagtcctgaaaatttcgttacacctgacatccctgctacttggggggcaatggaaaagttatatgatgctggcaaagctcgtgccattggtgtgagtaacttttcctcaaagaaattgggtgacttgcttgctgtagctcgtgtacctccagccgttgatcaggtggaatgtcatcctggttggcagcaaactaagctccatagcttttgtcagtcaactggtgttcaactgcttactcaccactaggttcacctggtacaacttggatgaatggtaatgtccttaaagaaccaataatcatctcaatagctgagaaactcggaaaaactcctgcacaagtggctctgcgctggaacattcagatgggtcacagtgttcttccaaaaagcacgaatgaagaaaggataaagcaaaaccttgatgtttatgattggtcgattccagatgacttgctcgcaaagttctctgagattaagcaggataggctacttagaggcaacttcattgttaatcctgagagcgcttacaagacccatgaggagctctgggacggtgaactctaggaaggacaccgttgttttatcgtgagcagggagcagcgttccattagggtctgccatatcattttatctcctaatttgcgctttatctgaaatgaaggttcagtgctcggaagctctgatgccatcctttatcg

SEQ ID NO: 34631 - protein, 257 aa, Zea mays subsp. mays
  peptide (1)..(257): Ceres Seq. ID no. 12347786
  misc_feature (55)..(253): NCBI GI NO: 34908280 NR Description: putative aldose reductase
  misc_feature (55)..(253): NCBI GI NO: 34908276 NR Description: putative aldose reductase
  misc_feature (57)..(253): NCBI GI NO: 30687261 NR Description: aldo/keto reductase family [Arabidopsis thaliana]
  misc_feature (57)..(253): NCBI GI NO: 25283479 NR Description: probable alcohol dehydrogenase
  misc_feature (59)..(253): NCBI GI NO: 30687247 NR Description: aldo/keto reductase family [Arabidopsis thaliana]
  misc_feature (63)..(253): NCBI GI NO: 28393400 NR Description: putative aldo/keto reductase
  misc_feature (57)..(253): NCBI GI NO: 13160397 NR Description: aldose reductase [Digitalis purpurea]
  misc_feature (53)..(253): NCBI GI NO: 7431112 NR Description: abscisic acid activated protein - alfalfa
  misc_feature (59)..(253): NCBI GI NO: 7431114 NR Description: aldehyde dehydrogenase homolog At2g37770 -Arabidopsis thaliana
  misc_feature (57)..(253): NCBI GI NO: 13160399 NR Description: aldose reductase [Digitalis purpurea]
KPQTRTTAPAGSGHPSQPVGTKPRLAPSPRDHHCFQFWCSVEERPVGEIQREAAMARHFVLNTGAKVPYVGLGTWQSDPGVVGNAVYAAVKAGYRHIDCARVYGNEKEIGLALKKLFEEGVVKREDMFITSKLWNDHHAPEDVPEALNHSLNDLQLEYLDLYLIHWPFRVKKGANTSPENFVTPDIPATWGAMEKLYDAGKARAIGVSNFSSKKLGDLLAVARVPPAVDQVECHPGWQQTKLHSFCQSTGVQLLTHH

SEQ ID NO: 34632 - protein, 203 aa, Zea mays subsp. mays
  peptide (1)..(203): Ceres Seq. ID no. 12347787
  misc_feature (1)..(199): NCBI GI NO: 34908280 NR Description: putative aldose reductase
  misc_feature (1)..(199): NCBI GI NO: 34908276 NR Description: putative aldose reductase
  misc_feature (3)..(199): NCBI GI NO: 30687261 NR Description: aldo/keto reductase family [Arabidopsis thaliana]
  misc_feature (3)..(199): NCBI GI NO: 25283479 NR Description: probable alcohol dehydrogenase
  misc_feature (5)..(199): NCBI GI NO: 30687247 NR Description: aldo/keto reductase family [Arabidopsis thaliana]
  misc_feature (9)..(199): NCBI GI NO: 28393400 NR Description: putative aldo/keto reductase
  misc_feature (3)..(199): NCBI GI NO: 13160397 NR Description: aldose reductase [Digitalis purpurea]
  misc_feature (1)..(199): NCBI GI NO: 7431112 NR Description: abscisic acid activated protein - alfalfa
  misc_feature (5)..(199): NCBI GI NO: 7431114 NR Description: aldehyde dehydrogenase homolog At2g37770 -Arabidopsis thaliana
  misc_feature (3)..(199): NCBI GI NO: 13160399 NR Description: aldose reductase [Digitalis purpurea]
MARHFVLNTGAKVPYVGLGTWQSDPGVVGNAVYAAVKAGYRHIDCARVYGNEKEIGLALKKLFEEGVVKREDMFITSKLWNDHHAPEDVPEALNHSLNDLQLEYLDLYLIHWPFRVKKGANTSPENFVTPDIPATWGAMEKLYDAGKARAIGVSNFSSKKLGDLLAVARVPPAVDQVECHPGWQQTKLHSFCQSTGVQLLTHH

SEQ ID NO: 34633 - protein, 131 aa, Zea mays subsp. mays
  peptide (1)..(131): Ceres Seq. ID no. 12347788
  misc_feature (1)..(127): NCBI GI NO: 34908280 NR Description: putative aldose reductase
  misc_feature (1)..(127): NCBI GI NO: 34908276 NR Description: putative aldose reductase
  misc_feature (1)..(127): NCBI GI NO: 30687261 NR Description: aldo/keto reductase family [Arabidopsis thaliana]
  misc_feature (1)..(127): NCBI GI NO: 25283479 NR Description: probable alcohol dehydrogenase
  misc_feature (1)..(127): NCBI GI NO: 30687247 NR Description: aldo/keto reductase family [Arabidopsis thaliana]
  misc_feature (1)..(127): NCBI GI NO: 28393400 NR Description: putative aldo/keto reductase
  misc_feature (1)..(127): NCBI GI NO: 13160397 NR Description: aldose reductase [Digitalis purpurea]
  misc_feature (1)..(127): NCBI GI NO: 7431112 NR Description: abscisic acid activated protein - alfalfa
  misc_feature (1)..(127): NCBI GI NO: 7431114 NR Description: aldehyde dehydrogenase homolog At2g37770 -Arabidopsis thaliana
  misc_feature (1)..(127): NCBI GI NO: 13160399 NR Description: aldose reductase [Digitalis purpurea]
MFITSKLWNDHHAPEDVPEALNHSLNDLQLEYLDLYLIHWPFRVKKGANTSPENFVTPDIPATWGAMEKLYDAGKARAIGVSNFSSKKLGDLLAVARVPPAVDQVECHPGWQQTKLHSFCQSTGVQLLTHH

SEQ ID NO: 34634 - DNA, 2180 bp, Zea mays subsp. mays
  misc_feature (1)..(2180): Ceres Seq. ID no. 12342411
agtcagttcctcctactcccgatccattcgcagagggcagcagccacctcctctccccgcggccgagctcgcgcctcgcccgccgcctgaactcgtcttgcctgcggccgatctcccccctccgttcttcgccgcaacccggagaggagaccgcgctcggtcgagcaccccctggggcagcgtcctcgcgaccagctccggcgcggcgtccgccctcagcagcccgggtgtccccgggaacgtctccggctcggccggcacacagctcgacaggcttttcagttcagtgcagtgtaccaagattctctgttaatttgtgtatgagatcagttaactgataaagacatgtgaagaaccagtgatcagtaatctgtacgcttcagattgtagtatccttgagatggatggaagagaatcaggcttatggtaaatcctggtgaatattcatgggaggtcagcaagttctggcctgactaagactagtaaaaatacggtgcttcatctcagatcatcaatggtgagaatgaggttcccgaaacgttatataatagtattgttgacattcatctgcacaaatgtttgctacattgagcgtgtgggtttctcaattacctatactgttgcagctgatgccatcggtgtgaatcaagccaacaagggcatgatactctctatgttctattatggttatgttttatcacagattcctggtggatgggcagcacagagaataggaggtagacgtgtcctgctactgtcatttgtattgtggtcaatgatatgtggtttaattccacttgatcccaacagagtaaccattctggtcctttctcgcctattcgttggtgtagcacaaggtttcatatttcctgccattcacactgtcctggcacaatgggtgccgccgcaggagcgctctcgctcagtatctcttactacctcagggatgtatcttggtgcagcctgtggcatgcttttcttccctagtctggtgaagcacatgggaccccagtcagttttttttgttgaagcagtgttgggagcagcatggtctgtaatatggctgaaattttccagtgacccaccccgtactgatcttccaaaggtatcaatgccaaaagtgccatctcgagacatgattaaggcacaagcaggaggggttgtggcacctcgcacggtaaagatcccgtggcgaaggataatattcagcctacctgtttgggcaatagttgtgaacaacttcacgttccactatgccctgtatgttcttatgaactggctccctacctattttgagctaggccttaagcttagcctccaggatatgggttcctcaaagatgcttccctatttcaacatgttcattttctccaatatcggcggtgtggttgctgatcacttgattacaaggaggattctatctgttaccaagacaaggaagcttctgaacaccatcgggttcatcgtctcagcgtttgcactcatggcccttcctttgttcagcacaccgtcaggcactgtaatgtgttcagcgatatccctcggttttcttgctctaggaagagcagggtttgccgtgaaccatatggatgttgctccgaagtttgcagggatagtgatgggagtctcaaacacggcggggacactggccggaatcgtcggtgtcggcctcacgggcaatattctggaggcggcaaaggcttctaacaaggatctaacggactcggaaacctggaaaacagtcttcttcgttccagcatatctttgtattttcagttccgtcatttttttgatcttttcgacaggcgaaaagatctttgaataaagggtggttattactttttttgccaattcttttcttacgatgaggcaggattgtgaaatggaaatcttacatgtatctgtagcatttgttacaaaattttcagatttcagactgcatcacatacacacgatcagaggctatgtcaggagatcttgcattttcgttatgatgaagactcggttcattggcagtcacactcacactccaatgcagctaacagaatttgcttgtctcccaggttaactccttggttttggtacatagtctcaccacaaagtttgtcaagttcccttacctttgccctgcaatgtaaacatatatggtgccaatgagaataaacggcattgtcatttgc

SEQ ID NO: 34635 - protein, 436 aa, Zea mays subsp. mays
  peptide (1)..(436): Ceres Seq. ID no. 12342412
  misc_feature (22)..(435): Pfam Name: and other Pfam Description: Sugar
  misc_feature (7)..(436): NCBI GI NO: 15241475 NR Description: Na+-dependent inorganic phosphate cotransporter-like
  misc_feature (6)..(436): NCBI GI NO: 15227589 NR Description: putative Na+-dependent inorganic phosphatecotransporter
  misc_feature (6)..(436): NCBI GI NO: 17064976 NR Description: putative Na+-dependent inorganic phosphatecotransporter
  misc_feature (5)..(436): NCBI GI NO: 34903342 NR Description: unnamed protein product
  misc_feature (5)..(392): NCBI GI NO: 30678625 NR Description: expressed protein [Arabidopsis thaliana]
  misc_feature (8)..(432): NCBI GI NO: 31248034 NR Description: ENSANGP00000010934 [Anopheles gambiae]
  misc_feature (49)..(433): NCBI GI NO: 9966811 NR Description: differentiation-associated Na-dependent inorganicphosphate cotr
  misc_feature (7)..(433): NCBI GI NO: 21322234 NR Description: vesicular glutamate transporter 3 [Homo sapiens]
  misc_feature (49)..(433): NCBI GI NO: 16758166 NR Description: differentation-associated Na-dependent inorganicphosphate cotra
  misc_feature (48)..(432): NCBI GI NO: 27370146 NR Description: hypothetical protein 4732491M05 [Mus musculus]
MVRMRFPKRYIIVLLTFICTNVCYIERVGFSITYTVAADAIGVNQANKGMILSMFYYGYVLSQIPGGWAAQRIGGRRVLLLSFVLWSMICGLIPLDPNRVTILVLSRLFVGVAQGFIFPAIHTVLAQWVPPQERSRSVSLTTSGMYLGAACGMLFFPSLVKHMGPQSVFFVEAVLGAAWSVIWLKFSSDPPRTDLPKVSMPKVPSRDMIKAQAGGVVAPRTVKIPWRRIIFSLPVWAIVVNNFTFHYALYVLMNWLPTYFELGLKLSLQDMGSSKMLPYFNMFIFSNIGGVVADHLITRRILSVTKTRKLLNTIGFIVSAFALMALPLFSTPSGTVMCSAISLGFLALGRAGFAVNHMDVAPKFAGIVMGVSNTAGTLAGIVGVGLTGNILEAAKASNKDLTDSETWKTVFFVPAYLCIFSSVIFLIFSTGEKIFE

SEQ ID NO: 34636 - protein, 433 aa, Zea mays subsp. mays
  peptide (1)..(433): Ceres Seq. ID no. 12342413
  misc_feature (19)..(432): Pfam Name: and other Pfam Description: Sugar
  misc_feature (4)..(433): NCBI GI NO: 15241475 NR Description: Na+-dependent inorganic phosphate cotransporter-like
  misc_feature (3)..(433): NCBI GI NO: 15227589 NR Description: putative Na+-dependent inorganic phosphatecotransporter
  misc_feature (3)..(433): NCBI GI NO: 17064976 NR Description: putative Na+-dependent inorganic phosphatecotransporter
  misc_feature (2)..(433): NCBI GI NO: 34903342 NR Description: unnamed protein product
  misc_feature (2)..(389): NCBI GI NO: 30678625 NR Description: expressed protein [Arabidopsis thaliana]
  misc_feature (5)..(429): NCBI GI NO: 31248034 NR Description: ENSANGP00000010934 [Anopheles gambiae]
  misc_feature (46)..(430): NCBI GI NO: 9966811 NR Description: differentiation-associated Na-dependent inorganicphosphate cotr
  misc_feature (4)..(430): NCBI GI NO: 21322234 NR Description: vesicular glutamate transporter 3 [Homo sapiens]
  misc_feature (46)..(430): NCBI GI NO: 16758166 NR Description: differentation-associated Na-dependent inorganicphosphate cotra
  misc_feature (45)..(429): NCBI GI NO: 27370146 NR Description: hypothetical protein 4732491M05 [Mus musculus]
MRFPKRYIIVLLTFICTNVCYIERVGFSITYTVAADAIGVNQANKGMILSMFYYGYVLSQIPGGWAAQRIGGRRVLLLSFVLWSMICGLIPLDPNRVTILVLSRLFVGVAQGFIFPAIHTVLAQWVPPQERSRSVSLTTSGMYLGAACGMLFFPSLVKHMGPQSVFFVEAVLGAAWSVIWLKFSSDPPRTDLPKVSMPKVPSRDMIKAQAGGVVAPRTVKIPWRRIIFSLPVWAIVVNNFTFHYALYVLMNWLPTYFELGLKLSLQDMGSSKMLPYFNMFIFSNIGGVVADHLITRRILSVTKTRKLLNTIGFIVSAFALMALPLFSTPSGTVMCSAISLGFLALGRAGFAVNHMDVAPKFAGIVMGVSNTAGTLAGIVGVGLTGNILEAAKASNKDLTDSETWKTVFFVPAYLCIFSSVIFLIFSTGEKIFE

SEQ ID NO: 34637 - protein, 387 aa, Zea mays subsp. mays
  peptide (1)..(387): Ceres Seq. ID no. 12342414
  misc_feature (1)..(386): Pfam Name: and other Pfam Description: Sugar
  misc_feature (1)..(387): NCBI GI NO: 15241475 NR Description: Na+-dependent inorganic phosphate cotransporter-like
  misc_feature (1)..(387): NCBI GI NO: 15227589 NR Description: putative Na+-dependent inorganic phosphatecotransporter
  misc_feature (1)..(387): NCBI GI NO: 17064976 NR Description: putative Na+-dependent inorganic phosphatecotransporter
  misc_feature (1)..(387): NCBI GI NO: 34903342 NR Description: unnamed protein product
  misc_feature (1)..(343): NCBI GI NO: 30678625 NR Description: expressed protein [Arabidopsis thaliana]
  misc_feature (1)..(383): NCBI GI NO: 31248034 NR Description: ENSANGP00000010934 [Anopheles gambiae]
  misc_feature (1)..(384): NCBI GI NO: 9966811 NR Description: differentiation-associated Na-dependent inorganicphosphate cotr
  misc_feature (1)..(384): NCBI GI NO: 21322234 NR Description: vesicular glutamate transporter 3 [Homo sapiens]
  misc_feature (1)..(384): NCBI GI NO: 16758166 NR Description: differentation-associated Na-dependent inorganicphosphate cotra
  misc_feature (1)..(383): NCBI GI NO: 27370146 NR Description: hypothetical protein 4732491M05 [Mus musculus]
MILSMFYYGYVLSQIPGGWAAQRIGGRRVLLLSFVLWSMICGLIPLDPNRVTILVLSRLFVGVAQGFIFPAIHTVLAQWVPPQERSRSVSLTTSGMYLGAACGMLFFPSLVKHMGPQSVFFVEAVLGAAWSVIWLKFSSDPPRTDLPKVSMPKVPSRDMIKAQAGGVVAPRTVKIPWRRIIFSLPVWAIVVNNFTFHYALYVLMNWLPTYFELGLKLSLQDMGSSKMLPYFNMFIFSNIGGVVADHLITRRILSVTKTRKLLNTIGFIVSAFALMALPLFSTPSGTVMCSAISLGFLALGRAGFAVNHMDVAPKFAGIVMGVSNTAGTLAGIVGVGLTGNILEAAKASNKDLTDSETWKTVFFVPAYLCIFSSVIFLIFSTGEKIFE

SEQ ID NO: 34638 - DNA, 1298 bp, Zea mays subsp. mays
  misc_feature (1)..(1298): Ceres Seq. ID no. 12347470
aattaaccatattggccagtgtacgtgggaacgatggccctcatgcaggagagtagtagccaggatttgctccaagctcacgacgagctcttgcaccattccctgtgcttcgccaaatcgctcgcgctcgccgtggcgctagacctccgcatccccgacgcgatccaccaccacggggccggcggcgccacccttctccagatcctcgccgagactgcgctccacccaagcaagcttcgcgcccttcgccgcctcatgcgcgtgctcaccgtcacgggcatcttcagcgtcgtcgagcaaccaccagcaggtggtggtgatgattcaaccgtccacacgtcggacgacgaagctgtcgtcgtctacaggttgacggcagcctcccgcttcctcgtcagcgacgacgtgagcacggcgaccttggctccctttgtgagtctggcgctccagcctatcgctgcctgtccgcacgccctgggtatctccgcgtggttccggcaggagcagcacgagccgtccccgtatggcctggcgttccgccagaccccaacgatctgggaacatgctgacgacgtaaacgccttgctgaacaaaggcatggccgcggacagccgcttcctcatgccaattgtgctgagggagtgcggcgagacgtttcgtgggatcgactcgttggttgacgtcggtggtggccatggtggcgccgccgccaccatcgccgccgccttcccccacctcaagtgcagcgtgcttgacctcccgcacgttgtcgccggtgctccgtctgatggcaacgtgcagttcgtcgcaggcaatatgtttgagagtattccacctgcaaccgctgttttcctcaagaaaactctacatgactggggtgacgatgagtctgtcaagatattgaagaattgcaagcaagccatatctccacgggatgcaggtgggaaggtaataatcttggatgtggtagttggatataaacagtcaaacataaagcatcaagagacacaagttatgtttgatttgtatatgatggcggttaacggagttgagcgtgacgagcaagagtggaagaagatcttcactgaagctggattcaaagactacaaaattctacccgtcattggtgatgtatcggtcatcatcgaggtctatccttgaatgctttgtgaacaaaggcctccataataaactgaagaccaagaaggtgttgatagtatattatgaattgttatttgtcctgtacacttgattctttgcgtatttgtaatgacaagttgagtaattgtgtttttgtc

SEQ ID NO: 34639 - protein, 375 aa, Zea mays subsp. mays
  peptide (1)..(375): Ceres Seq. ID no. 12347471
  misc_feature (104)..(351): Pfam Name: Pfam Description:  O-methyltransferase
  misc_feature (7)..(375): NCBI GI NO: 1353193 NR Description: O-METHYLTRANSFERASE ZRP4 (OMT)
  misc_feature (5)..(375): NCBI GI NO: 37530606 NR Description: putative o-methyltransferase ZRP4
  misc_feature (5)..(375): NCBI GI NO: 37530600 NR Description: putative o-methyltransferase ZRP4
  misc_feature (8)..(375): NCBI GI NO: 4098238 NR Description: o-methyltransferase [Triticum aestivum]
  misc_feature (1)..(375): NCBI GI NO: 2130032 NR Description: catechol O-methyltransferase (EC 2.1.1.6) - barley
  misc_feature (1)..(375): NCBI GI NO: 453244 NR Description: flavonoid 7-O-methyltransferase
  misc_feature (103)..(375): NCBI GI NO: 20514369 NR Description: orcinol O-methyltransferase [Rosa hybrid cultivar]
  misc_feature (9)..(123): NCBI GI NO: 20514369 NR Description: orcinol O-methyltransferase [Rosa hybrid cultivar]
  misc_feature (10)..(375): NCBI GI NO: 22093735 NR Description: putative o-methyltransferase
  misc_feature (111)..(375): NCBI GI NO: 2282586 NR Description: methyltransferase [Prunus armeniaca]
MALMQESSSQDLLQAHDELLHHSLCFAKSLALAVALDLRIPDAIHHHGAGGATLLQILAETALHPSKLRALRRLMRVLTVTGIFSVVEQPPAGGGDDSTVHTSDDEAVVVYRLTAASRFLVSDDVSTATLAPFVSLALQPIAACPHALGISAWFRQEQHEPSPYGLAFRQTPTIWEHADDVNALLNKGMAADSRFLMPIVLRECGETFRGIDSLVDVGGGHGGAAATIAAAFPHLKCSVLDLPHVVAGAPSDGNVQFVAGNMFESIPPATAVFLKKTLHDWGDDESVKILKNCKQAISPRDAGGKVIILDVVVGYKQSNIKHQETQVMFDLYMMAVNGVERDEQEWKKIFTEAGFKDYKILPVIGDVSVIIEVYP

SEQ ID NO: 34640 - protein, 372 aa, Zea mays subsp. mays
  peptide (1)..(372): Ceres Seq. ID no. 12347472
  misc_feature (101)..(348): Pfam Name: Pfam Description:  O-methyltransferase
  misc_feature (4)..(372): NCBI GI NO: 1353193 NR Description: O-METHYLTRANSFERASE ZRP4 (OMT)
  misc_feature (2)..(372): NCBI GI NO: 37530606 NR Description: putative o-methyltransferase ZRP4
  misc_feature (2)..(372): NCBI GI NO: 37530600 NR Description: putative o-methyltransferase ZRP4
  misc_feature (5)..(372): NCBI GI NO: 4098238 NR Description: o-methyltransferase [Triticum aestivum]
  misc_feature (1)..(372): NCBI GI NO: 2130032 NR Description: catechol O-methyltransferase (EC 2.1.1.6) - barley
  misc_feature (1)..(372): NCBI GI NO: 453244 NR Description: flavonoid 7-O-methyltransferase
  misc_feature (100)..(372): NCBI GI NO: 20514369 NR Description: orcinol O-methyltransferase [Rosa hybrid cultivar]
  misc_feature (6)..(120): NCBI GI NO: 20514369 NR Description: orcinol O-methyltransferase [Rosa hybrid cultivar]
  misc_feature (7)..(372): NCBI GI NO: 22093735 NR Description: putative o-methyltransferase
  misc_feature (108)..(372): NCBI GI NO: 2282586 NR Description: methyltransferase [Prunus armeniaca]
MQESSSQDLLQAHDELLHHSLCFAKSLALAVALDLRIPDAIHHHGAGGATLLQILAETALHPSKLRALRRLMRVLTVTGIFSVVEQPPAGGGDDSTVHTSDDEAVVVYRLTAASRFLVSDDVSTATLAPFVSLALQPIAACPHALGISAWFRQEQHEPSPYGLAFRQTPTIWEHADDVNALLNKGMAADSRFLMPIVLRECGETFRGIDSLVDVGGGHGGAAATIAAAFPHLKCSVLDLPHVVAGAPSDGNVQFVAGNMFESIPPATAVFLKKTLHDWGDDESVKILKNCKQAISPRDAGGKVIILDVVVGYKQSNIKHQETQVMFDLYMMAVNGVERDEQEWKKIFTEAGFKDYKILPVIGDVSVIIEVYP

SEQ ID NO: 34641 - protein, 301 aa, Zea mays subsp. mays
  peptide (1)..(301): Ceres Seq. ID no. 12347473
  misc_feature (30)..(277): Pfam Name: Pfam Description:  O-methyltransferase
  misc_feature (1)..(301): NCBI GI NO: 1353193 NR Description: O-METHYLTRANSFERASE ZRP4 (OMT)
  misc_feature (1)..(301): NCBI GI NO: 37530606 NR Description: putative o-methyltransferase ZRP4
  misc_feature (1)..(301): NCBI GI NO: 37530600 NR Description: putative o-methyltransferase ZRP4
  misc_feature (1)..(301): NCBI GI NO: 4098238 NR Description: o-methyltransferase [Triticum aestivum]
  misc_feature (1)..(301): NCBI GI NO: 2130032 NR Description: catechol O-methyltransferase (EC 2.1.1.6) - barley
  misc_feature (1)..(301): NCBI GI NO: 453244 NR Description: flavonoid 7-O-methyltransferase
  misc_feature (29)..(301): NCBI GI NO: 20514369 NR Description: orcinol O-methyltransferase [Rosa hybrid cultivar]
  misc_feature (1)..(49): NCBI GI NO: 20514369 NR Description: orcinol O-methyltransferase [Rosa hybrid cultivar]
  misc_feature (1)..(301): NCBI GI NO: 22093735 NR Description: putative o-methyltransferase
  misc_feature (37)..(301): NCBI GI NO: 2282586 NR Description: methyltransferase [Prunus armeniaca]
MRVLTVTGIFSVVEQPPAGGGDDSTVHTSDDEAVVVYRLTAASRFLVSDDVSTATLAPFVSLALQPIAACPHALGISAWFRQEQHEPSPYGLAFRQTPTIWEHADDVNALLNKGMAADSRFLMPIVLRECGETFRGIDSLVDVGGGHGGAAATIAAAFPHLKCSVLDLPHVVAGAPSDGNVQFVAGNMFESIPPATAVFLKKTLHDWGDDESVKILKNCKQAISPRDAGGKVIILDVVVGYKQSNIKHQETQVMFDLYMMAVNGVERDEQEWKKIFTEAGFKDYKILPVIGDVSVIIEVYP

SEQ ID NO: 34642 - DNA, 1307 bp, Zea mays subsp. mays
  misc_feature (1)..(1307): Ceres Seq. ID no. 12414595
atagagtagattagtgggggaactggacgtaaccgtaatattcactctgcgccccaccctcttgttctccggttccccgcgacatactctttcctgctctctctctcggttctgccgtgtccctcgcgtgcgctctgtctccggtggcgccgcctccgccgcctccgtcgccctgcgccagatcagattcgtggatatggctgataatgagaaagaagcgggggagggaaccaccccccgaggggcggactgggaagttgtgactctcacagcatctgcctatgaagcggcgccaggacctgtcggaacagaagtaaagcctgttaatgaaaatcaagagcatagttcatccaatgcactgctcatgtctgaccactttgtgtttccgccgagtgagcacgagaacctgccaatacaaaccagtttcgatgagatacagcctgagaaggatgtgcagaaacctagtaccactgtggaggattatagtaataagaatgttgttgggtctgagagagttcagtttgatgatgaagggaaagacctcttagatgatgatgtggagatgagagatgacacacctgggtacggttcatcccacgctgaagatgatgcacatggttttgttgttcacgatgatggtgttgagtccggtgaagattttgatgaaaaatcaggccacccttcagatcctgcagacagcaggagctgtgatactggcgcctcatgcaaatgttggttgaagaagcatatgacatgcttgtataaccaagcaaaggaaacaaatgctatctggtctgtggtggttgcagctgcactagttggtattgtgattttgggacgttggcacaaagataaattgcaccttaaccagcttaagtggcgctctggctcagcagtgagaggatgatcaacaagtcgtttgtgctgctctgatgaatcaattcaattcaagccataaccaagacggtttccgcaatgttattgtgatgatgacgaaaaggggtatgttcaatgcaataatatgatgttcgactggaatttcacttaccgccctacaatgagtgcctcgtgggcttctaagatgtcaaatccacttctgccatacacattatcttacagctttacttgcgacctggcacatgatttttggttcctgctacttttgctgtggtatatcatatatgttgactaaatggctgtagaacgtagcattgtatactgcgaagtctgctaaaaatcttggtggttctgcgagagcaactcacatgcaattgtgaaaatggagaacaaggaaaatttgtttggct

SEQ ID NO: 34643 - protein, 236 aa, Zea mays subsp. mays
  peptide (1)..(236): Ceres Seq. ID no. 12414596
  misc_feature (1)..(236): NCBI GI NO: 1808686 NR Description: hypothetical protein [Sporobolus stapfianus]
  misc_feature (37)..(236): NCBI GI NO: 38346457 NR Description: OSJNBa0019G23.5
  misc_feature (1)..(47): NCBI GI NO: 38346457 NR Description: OSJNBa0019G23.5
  misc_feature (37)..(138): NCBI GI NO: 10241633 NR Description: hypothetical protein
  misc_feature (1)..(47): NCBI GI NO: 10241633 NR Description: hypothetical protein
  misc_feature (1)..(230): NCBI GI NO: 7486469 NR Description: hypothetical protein At2g45980
  misc_feature (1)..(230): NCBI GI NO: 18406940 NR Description: expressed protein; protein id: At2g45980
  misc_feature (1)..(230): NCBI GI NO: 21553358 NR Description: unknown [Arabidopsis thaliana]
  misc_feature (1)..(230): NCBI GI NO: 18411306 NR Description: Expressed protein; protein id: At4g00355
  misc_feature (1)..(230): NCBI GI NO: 30678620 NR Description: expressed protein [Arabidopsis thaliana]
MADNEKEAGEGTTPRGADWEVVTLTASAYEAAPGPVGTEVKPVNENQEHSSSNALLMSDHFVFPPSEHENLPIQTSFDEIQPEKDVQKPSTTVEDYSNKNVVGSERVQFDDEGKDLLDDDVEMRDDTPGYGSSHAEDDAHGFVVHDDGVESGEDFDEKSGHPSDPADSRSCDTGASCKCWLKKHMTCLYNQAKETNAIWSVVVAAALVGIVILGRWHKDKLHLNQLKWRSGSAVRG

SEQ ID NO: 34644 - protein, 180 aa, Zea mays subsp. mays
  peptide (1)..(180): Ceres Seq. ID no. 12414597
  misc_feature (1)..(180): NCBI GI NO: 1808686 NR Description: hypothetical protein [Sporobolus stapfianus]
  misc_feature (1)..(180): NCBI GI NO: 38346457 NR Description: OSJNBa0019G23.5
  misc_feature (1)..(82): NCBI GI NO: 10241633 NR Description: hypothetical protein
  misc_feature (1)..(174): NCBI GI NO: 7486469 NR Description: hypothetical protein At2g45980
  misc_feature (1)..(174): NCBI GI NO: 18406940 NR Description: expressed protein; protein id: At2g45980
  misc_feature (1)..(174): NCBI GI NO: 21553358 NR Description: unknown [Arabidopsis thaliana]
  misc_feature (1)..(174): NCBI GI NO: 18411306 NR Description: Expressed protein; protein id: At4g00355
  misc_feature (1)..(174): NCBI GI NO: 30678620 NR Description: expressed protein [Arabidopsis thaliana]
  misc_feature (1)..(49): NCBI GI NO: 22324443 NR Description: contains ESTsAU101162
  misc_feature (115)..(176): NCBI GI NO: 22324443 NR Description: contains ESTsAU101162
MSDHFVFPPSEHENLPIQTSFDEIQPEKDVQKPSTTVEDYSNKNVVGSERVQFDDEGKDLLDDDVEMRDDTPGYGSSHAEDDAHGFVVHDDGVESGEDFDEKSGHPSDPADSRSCDTGASCKCWLKKHMTCLYNQAKETNAIWSVVVAAALVGIVILGRWHKDKLHLNQLKWRSGSAVRG

SEQ ID NO: 34645 - DNA, 937 bp, Zea mays subsp. mays
  misc_feature (1)..(937): Ceres Seq. ID no. 12369109
acaagtttgggtatacaccagataatctcatatacaagagtcttgactttggtgttgatcttgactctagaatcgcattggttggtcccaacggggcagggaagagcactcttctgaagcttatgactggtgaccttgttccattagatggcatggttcggcgccacaatcacctgcgcattgcgcagtaccatcagcatctggcggagaagctggatctggacatgtcagccctggcttacatgatgaaggaataccctgggactgaagaagaaaagatgcgagccgctgttggcaggttcggcctgtcaggaaaggcgcaggtgatgccgatgaagaatctttctgatgggcaaaggagccgcgtcatctttgcatggctggcatataggcagccgcaactgctactgcttgatgagccgacaaaccatctggatatcgagaccattgactcactggcagaggcgctgaatgagtgggatggtggtttggtcttggtgagccacgatttcaggctgatcaaccaggtcgctcaggagatctgggtgtgtgagaatcaagaggtgacaaggtgggaaggcgatatcatggatttcaaggcacacttgaagagcaaggctggtttatctgattagaatgcttgtctagtaaccatgaactttttaactctgtatgatgaagtccctgttttccagtagcgaactatcaaatatactgttagggatagtttgggaaacacaaatccggagtggattggaggggctagaatcccctttttattcaattttgaatcagaagggtattctatcccttccggttttctccggttttctggctcccaaactagcccttaatgtgtccgactccttaagacttccctcgcaaccatactaccttatactacctggaatttttatttatatatatttgaaatgtt

SEQ ID NO: 34646 - protein, 210 aa, Zea mays subsp. mays
  peptide (1)..(210): Ceres Seq. ID no. 12369110
  misc_feature (21)..(186): Pfam Name: Pfam Description:  ABC transporter
  misc_feature (2)..(210): NCBI GI NO: 28071305 NR Description: putative ABC transporter
  misc_feature (2)..(210): NCBI GI NO: 15239436 NR Description: ABC transporter family protein
  misc_feature (2)..(161): NCBI GI NO: 7573600 NR Description: ABC transporter homolog [Populus nigra]
  misc_feature (2)..(205): NCBI GI NO: 3005931 NR Description: ABC transporter [Homo sapiens]
  misc_feature (2)..(205): NCBI GI NO: 10179834 NR Description: iron inhibited ABC transporter 2 [Homo sapiens]
  misc_feature (2)..(205): NCBI GI NO: 10947137 NR Description: ATP-binding cassette
  misc_feature (2)..(205): NCBI GI NO: 27707592 NR Description: similar to ATP-binding cassette
  misc_feature (2)..(205): NCBI GI NO: 27881506 NR Description: ATP-binding cassette
  misc_feature (2)..(205): NCBI GI NO: 23956078 NR Description: ATP-binding cassette, sub-family F
  misc_feature (2)..(207): NCBI GI NO: 28436765 NR Description: Similar to ATP-binding cassette, sub-family F
KFGYTPDNLIYKSLDFGVDLDSRIALVGPNGAGKSTLLKLMTGDLVPLDGMVRRHNHLRIAQYHQHLAEKLDLDMSALAYMMKEYPGTEEEKMRAAVGRFGLSGKAQVMPMKNLSDGQRSRVIFAWLAYRQPQLLLLDEPTNHLDIETIDSLAEALNEWDGGLVLVSHDFRLINQVAQEIWVCENQEVTRWEGDIMDFKAHLKSKAGLSD

SEQ ID NO: 34647 - protein, 170 aa, Zea mays subsp. mays
  peptide (1)..(170): Ceres Seq. ID no. 12369111
  misc_feature (1)..(146): Pfam Name: Pfam Description:  ABC transporter
  misc_feature (1)..(170): NCBI GI NO: 28071305 NR Description: putative ABC transporter
  misc_feature (1)..(170): NCBI GI NO: 15239436 NR Description: ABC transporter family protein
  misc_feature (1)..(121): NCBI GI NO: 7573600 NR Description: ABC transporter homolog [Populus nigra]
  misc_feature (1)..(165): NCBI GI NO: 3005931 NR Description: ABC transporter [Homo sapiens]
  misc_feature (1)..(165): NCBI GI NO: 10179834 NR Description: iron inhibited ABC transporter 2 [Homo sapiens]
  misc_feature (1)..(165): NCBI GI NO: 10947137 NR Description: ATP-binding cassette
  misc_feature (1)..(165): NCBI GI NO: 27881506 NR Description: ATP-binding cassette
  misc_feature (1)..(165): NCBI GI NO: 27707592 NR Description: similar to ATP-binding cassette
  misc_feature (1)..(165): NCBI GI NO: 23956078 NR Description: ATP-binding cassette, sub-family F
  misc_feature (1)..(167): NCBI GI NO: 28436765 NR Description: Similar to ATP-binding cassette, sub-family F
MTGDLVPLDGMVRRHNHLRIAQYHQHLAEKLDLDMSALAYMMKEYPGTEEEKMRAAVGRFGLSGKAQVMPMKNLSDGQRSRVIFAWLAYRQPQLLLLDEPTNHLDIETIDSLAEALNEWDGGLVLVSHDFRLINQVAQEIWVCENQEVTRWEGDIMDFKAHLKSKAGLSD

SEQ ID NO: 34648 - protein, 160 aa, Zea mays subsp. mays
  peptide (1)..(160): Ceres Seq. ID no. 12369112
  misc_feature (1)..(136): Pfam Name: Pfam Description:  ABC transporter
  misc_feature (1)..(160): NCBI GI NO: 28071305 NR Description: putative ABC transporter
  misc_feature (1)..(160): NCBI GI NO: 15239436 NR Description: ABC transporter family protein
  misc_feature (1)..(111): NCBI GI NO: 7573600 NR Description: ABC transporter homolog [Populus nigra]
  misc_feature (1)..(155): NCBI GI NO: 3005931 NR Description: ABC transporter [Homo sapiens]
  misc_feature (1)..(155): NCBI GI NO: 10179834 NR Description: iron inhibited ABC transporter 2 [Homo sapiens]
  misc_feature (1)..(155): NCBI GI NO: 10947137 NR Description: ATP-binding cassette
  misc_feature (1)..(155): NCBI GI NO: 27881506 NR Description: ATP-binding cassette
  misc_feature (1)..(155): NCBI GI NO: 27707592 NR Description: similar to ATP-binding cassette
  misc_feature (1)..(155): NCBI GI NO: 23956078 NR Description: ATP-binding cassette, sub-family F
  misc_feature (1)..(157): NCBI GI NO: 28436765 NR Description: Similar to ATP-binding cassette, sub-family F
MVRRHNHLRIAQYHQHLAEKLDLDMSALAYMMKEYPGTEEEKMRAAVGRFGLSGKAQVMPMKNLSDGQRSRVIFAWLAYRQPQLLLLDEPTNHLDIETIDSLAEALNEWDGGLVLVSHDFRLINQVAQEIWVCENQEVTRWEGDIMDFKAHLKSKAGLSD

SEQ ID NO: 34649 - DNA, 1747 bp, Zea mays subsp. mays
  misc_feature (1)..(1747): Ceres Seq. ID no. 13637284
ggattgggctttcccctccgcctccctcccctcacaaaaaggcggcagcacagcgccacccctcctgtcccgccgagttcggagcgcagcgcaaggcggggggaggagcaagaagccgccggcctccctcctccggctcaccaccaggcttactccgcaccgcgctgccacgggtaggagcggcgtcaaattcgggattcccaagcggcttcagcccggaggttgagccaaagctattttctaagaaaaatggcggcaatgatggtggcgatgactgcgaggagcaagaacagcatattaaccgtggagaagaagcagggctggtctattcagctaccagagctccggttcccttgggattcacatgaagacaagggtttctctctaagtctgcaaggctctggaccttctcatggcggcctgtttgctagtgtgggtcttaaagtgtcgacaggtgcgccagcagtggcgcccggaccggggtgacaaggatattaagattccattcactgatcattgtatgaagtacgtgtccgaggcagttgggtaccaggttattagcactgaagctgagccagtggaggaggtggtggatgctaaggcaaagaaggcagccaagaaacgtgggctgcagctgaaaattaagattgggaacccacatttgaggaggctggttagtggagctattgcaggtgctgtttccaggacttgtgtggcaccactggagacgatcaggactcacttgatggttgggagcaacggtgactccatgacagaggtgttccagtcaatcatgaacactgaggggtggactgggcttttccgtgggaattttgtcaatgttatccgagttgcgccaagcaaagcaattgagctttttgcttttgatactgccaagaaattcttgactccaaaggctgatgagtctccaaagaccttcctacctccatcacttattgctggagcacttgcaggagtcagctcaaccctgtgcacatatcctttggagttgattaagaccagattgacgatagagaaagatgtctataacaacttcctccatgctttcgtcaagattttacgagaagaaggtccatcagagctctaccgtggtctgacaccaagtctgataggagtggtgccatatgccgcgactaattactacgcctatgacaccctaaagaagctctataggaagacgttcaagcaggaggagatcagcaacatcgcaactctcctaattggttcagccgctggcgccatctccagcactgccacattccctctcgaggtggcccgcaagcaaatgcaggtaggagcagtaggagggaggcaggtctacaagaatgtgttccatgcgctctactgcataatggagaaggaaggggttggcggcctgtacaaggggctcggaccgagctgcatcaagttgatgcctgcagcaggcatctcgttcatgtgctacgaggcctgtaagaagatcctggtcgaagacaatgaggatagtgagtgaagctgaagcatgtatgcccctgaggaggggtatgactgatgtgccaggctagaagaggtttgggttgggttgggttggggagtataccctagtattatcaactgatgaaaatgtagatccaagatatttgaacgccctttagatcataatttggttcagttttgtgctgaaatccataaacaatacactcacttgatggtgcatgttgcaaaggggcaattttgtcatgtggcc

SEQ ID NO: 34650 - protein, 366 aa, Zea mays subsp. mays
  peptide (1)..(366): Ceres Seq. ID no. 13637285
  misc_feature (29)..(364): NCBI GI NO: 4138581 NR Description: mitochondrial energy transfer protein
  misc_feature (82)..(366): NCBI GI NO: 231654 NR Description: Brittle-1 protein, chloroplast precursor
  misc_feature (54)..(365): NCBI GI NO: 15236783 NR Description: mitochondrial carrier protein family
  misc_feature (139)..(362): NCBI GI NO: 15231083 NR Description: mitochondrial carrier protein family
  misc_feature (139)..(362): NCBI GI NO: 21537282 NR Description: mitochondrial carrier protein, putative
  misc_feature (85)..(166): NCBI GI NO: 15231083 NR Description: mitochondrial carrier protein family
  misc_feature (85)..(166): NCBI GI NO: 21537282 NR Description: mitochondrial carrier protein, putative
  misc_feature (84)..(358): NCBI GI NO: 20864410 NR Description: RIKEN cDNA 2900084M01 [Mus musculus]
  misc_feature (84)..(358): NCBI GI NO: 34877651 NR Description: similar to CG4241-PA [Rattus norvegicus]
  misc_feature (84)..(358): NCBI GI NO: 29742699 NR Description: similar to CG4241-PA [Homo sapiens]
MAACLLVWVLKCRQVRQQWRPDRGDKDIKIPFTDHCMKYVSEAVGYQVISTEAEPVEEVVDAKAKKAAKKRGLQLKIKIGNPHLRRLVSGAIAGAVSRTCVAPLETIRTHLMVGSNGDSMTEVFQSIMNTEGWTGLFRGNFVNVIRVAPSKAIELFAFDTAKKFLTPKADESPKTFLPPSLIAGALAGVSSTLCTYPLELIKTRLTIEKDVYNNFLHAFVKILREEGPSELYRGLTPSLIGVVPYAATNYYAYDTLKKLYRKTFKQEEISNIATLLIGSAAGAISSTATFPLEVARKQMQVGAVGGRQVYKNVFHALYCIMEKEGVGGLYKGLGPSCIKLMPAAGISFMCYEACKKILVEDNEDSE

SEQ ID NO: 34651 - protein, 330 aa, Zea mays subsp. mays
  peptide (1)..(330): Ceres Seq. ID no. 13637286
  misc_feature (1)..(328): NCBI GI NO: 4138581 NR Description: mitochondrial energy transfer protein
  misc_feature (46)..(330): NCBI GI NO: 231654 NR Description: Brittle-1 protein, chloroplast precursor
  misc_feature (18)..(329): NCBI GI NO: 15236783 NR Description: mitochondrial carrier protein family
  misc_feature (103)..(326): NCBI GI NO: 15231083 NR Description: mitochondrial carrier protein family
  misc_feature (103)..(326): NCBI GI NO: 21537282 NR Description: mitochondrial carrier protein, putative
  misc_feature (49)..(130): NCBI GI NO: 15231083 NR Description: mitochondrial carrier protein family
  misc_feature (49)..(130): NCBI GI NO: 21537282 NR Description: mitochondrial carrier protein, putative
  misc_feature (48)..(322): NCBI GI NO: 20864410 NR Description: RIKEN cDNA 2900084M01 [Mus musculus]
  misc_feature (48)..(322): NCBI GI NO: 34877651 NR Description: similar to CG4241-PA [Rattus norvegicus]
  misc_feature (48)..(322): NCBI GI NO: 29742699 NR Description: similar to CG4241-PA [Homo sapiens]
MKYVSEAVGYQVISTEAEPVEEVVDAKAKKAAKKRGLQLKIKIGNPHLRRLVSGAIAGAVSRTCVAPLETIRTHLMVGSNGDSMTEVFQSIMNTEGWTGLFRGNFVNVIRVAPSKAIELFAFDTAKKFLTPKADESPKTFLPPSLIAGALAGVSSTLCTYPLELIKTRLTIEKDVYNNFLHAFVKILREEGPSELYRGLTPSLIGVVPYAATNYYAYDTLKKLYRKTFKQEEISNIATLLIGSAAGAISSTATFPLEVARKQMQVGAVGGRQVYKNVFHALYCIMEKEGVGGLYKGLGPSCIKLMPAAGISFMCYEACKKILVEDNEDSE

SEQ ID NO: 34652 - protein, 255 aa, Zea mays subsp. mays
  peptide (1)..(255): Ceres Seq. ID no. 13637287
  misc_feature (1)..(253): NCBI GI NO: 4138581 NR Description: mitochondrial energy transfer protein
  misc_feature (1)..(255): NCBI GI NO: 231654 NR Description: Brittle-1 protein, chloroplast precursor
  misc_feature (1)..(254): NCBI GI NO: 15236783 NR Description: mitochondrial carrier protein family
  misc_feature (28)..(251): NCBI GI NO: 15231083 NR Description: mitochondrial carrier protein family
  misc_feature (28)..(251): NCBI GI NO: 21537282 NR Description: mitochondrial carrier protein, putative
  misc_feature (1)..(55): NCBI GI NO: 15231083 NR Description: mitochondrial carrier protein family
  misc_feature (1)..(55): NCBI GI NO: 21537282 NR Description: mitochondrial carrier protein, putative
  misc_feature (1)..(247): NCBI GI NO: 20864410 NR Description: RIKEN cDNA 2900084M01 [Mus musculus]
  misc_feature (1)..(247): NCBI GI NO: 34877651 NR Description: similar to CG4241-PA [Rattus norvegicus]
  misc_feature (1)..(247): NCBI GI NO: 29742699 NR Description: similar to CG4241-PA [Homo sapiens]
MVGSNGDSMTEVFQSIMNTEGWTGLFRGNFVNVIRVAPSKAIELFAFDTAKKFLTPKADESPKTFLPPSLIAGALAGVSSTLCTYPLELIKTRLTIEKDVYNNFLHAFVKILREEGPSELYRGLTPSLIGVVPYAATNYYAYDTLKKLYRKTFKQEEISNIATLLIGSAAGAISSTATFPLEVARKQMQVGAVGGRQVYKNVFHALYCIMEKEGVGGLYKGLGPSCIKLMPAAGISFMCYEACKKILVEDNEDSE

SEQ ID NO: 34653 - DNA, 2245 bp, Zea mays subsp. mays
  misc_feature (1)..(2245): Ceres Seq. ID no. 12358579
atccaattcctatgccctgcacccgcagacggggagctcgcgtcttccttcggatggtggatgcatgcatgcatggtagacacgccggcccaaccagaattgacaagtggaagcgtatgggtattaccagcaacgacgcggcccctcgtgccgtcctcctccgcttcttgtttctgctctgcataggctgcaaatgcctggcatcagaggtagaggccacccagacggcgaccctcgcggtggacgcctcgccgcagcttgctcggaagatccctgatacactgttcgggatcttctttgaggagatcaaccatgcaggggctggtggcatatgggctgaacttgttagtaacagagggtttgaagctggaggcctccatactccatcaaacattgacccatggtccatcattggagacgactcctctgtatttgtggagaccgatcgcacatcatgtttcagtcgaaacatcgttgctctcaggatggaggtcctttgcgataactgtcctactggtggtgttggtgtttacaacccagggttctggggcatgaacatagaagaaggaaaggtctacaatcttgttatgtttgttaagtcaccagaaacaactgacttgacagtttcactaacaagctctaacgggttgcaaaatctggcttcagctacagtaacagtttccggcgaatcaaactggataaaagtggagcaaaagttggttgctaaaggaaccaatagaacctcaaggcttcaaataacaactaacaagaaaggagttgtctggtttgatcaagtatcactcatgcctgaagacacatacaagggacatggctttcgcacagaacttatatccatgattttggatttaaaaccacgattcttgagatttcctggaggctgctttgtagaaggtggctggttaagaaatgcctttaggtggagagaatctattggtccatgggaagagagacctggacacttcggggatgtttggcattactggactgatgatggccttggatactatgaatttcttcagcttgcggaggacctgggtactgaaccaatctgggtattcaacaatggagtcagccacaatgatgaagttgatactgttgctattgctccttttgtaaaggatgtattggacagtatagaatttgcaagggggagtgcaaattcaacatggggctctgttagggctgcaatgggccaccctgaaccattcccagtgaaatatgttgcaataggaaatgaagattgtgggaaaaaattttaccgcggtaactacctcaagttctacaatgctataagacaggcctatccagacattcaaatgatttcaaactgcgatggttcatctacaccacttgatcatcctgctgatttatacgacttccatgtctataatgattctaagactttgttcaacatgaagagcacatttgacagaacatctcgtagtggacccaaggcttttgtaagtgagtacgctgtttggagaggtgatgcaggtagaggaagtcttcttgcttcattggcagaagctgttttccttactggactggagaagaatagtgacattgtttccatggcaagttacgcgccactattcgtaaacgacaatgaccagacgtggaacccagacgcaatcgtcttcaactcctggcagcattacggcactcccagttactggatgcagacgcttttccgcgagtctagtggtgctatgttccatccaacgacaatcagctccagctactcaggttcacttgcagcgtctgcgattacctggcaggactccgagaacagcttcctaagagtaaaggtcataaacttcgggtcagatgctgtgaccctgacaatctccacaagtgggctccaggccagtatcaacgctctgggatcaaccgccactgttctcacatcagcagatgtgatggatgaaaactccttcagcaacccaaccaaggttgtgccggtaaagagcgatctgagcaatgctgcagagcagatgcaggtcacgctggctcctcgctccttcagctcgttcgatctcgccctggctcagtccaagcttgtagcggagatgtgagctaggctggtacactagtatacaatacaacgtgtgaagtgtggtacacaaataccagcaaccacaggggttgccaagctgttgttagcatcttgaacacatggctttgtattgtgtataatgacatgatgctgatactaatctctatt

SEQ ID NO: 34654 - protein, 697 aa, Zea mays subsp. mays
  peptide (1)..(697): Ceres Seq. ID no. 12358580
  misc_feature (112)..(269): Pfam Name: Pfam Description:  Carbohydrate binding domain
  misc_feature (56)..(697): NCBI GI NO: 13398414 NR Description: arabinoxylan arabinofuranohydrolase isoenzyme AXAH-II
  misc_feature (39)..(697): NCBI GI NO: 13398412 NR Description: arabinoxylan arabinofuranohydrolase isoenzyme AXAH-I
  misc_feature (49)..(695): NCBI GI NO: 38347003 NR Description: OSJNBb0058J09.4
  misc_feature (47)..(694): NCBI GI NO: 33151175 NR Description: alpha-L-arabinofuranosidase [Malus x domestica]
  misc_feature (51)..(691): NCBI GI NO: 16417958 NR Description: arabinosidase ARA-1 [Lycopersicon esculentum]
  misc_feature (49)..(693): NCBI GI NO: 15228368 NR Description: glycosyl hydrolase family 51; protein id:At3g10740
  misc_feature (49)..(693): NCBI GI NO: 13937191 NR Description: AT3g10740/T7M13_18 [Arabidopsis thaliana]
  misc_feature (49)..(693): NCBI GI NO: 29825623 NR Description: alpha-L-arabinofuranosidase [Arabidopsis thaliana]
  misc_feature (39)..(692): NCBI GI NO: 22324432 NR Description: putative arabinoxylan narabinofuranohydrolaseisoenzyme AXAH-I
  misc_feature (65)..(697): NCBI GI NO: 22327075 NR Description: glycosyl hydrolase family 51; protein id:At5g26120
PIPMPCTRRRGARVFLRMVDACMHGRHAGPTRIDKWKRMGITSNDAAPRAVLLRFLFLLCIGCKCLASEVEATQTATLAVDASPQLARKIPDTLFGIFFEEINHAGAGGIWAELVSNRGFEAGGLHTPSNIDPWSIIGDDSSVFVETDRTSCFSRNIVALRMEVLCDNCPTGGVGVYNPGFWGMNIEEGKVYNLVMFVKSPETTDLTVSLTSSNGLQNLASATVTVSGESNWIKVEQKLVAKGTNRTSRLQITTNKKGVVWFDQVSLMPEDTYKGHGFRTELISMILDLKPRFLRFPGGCFVEGGWLRNAFRWRESIGPWEERPGHFGDVWHYWTDDGLGYYEFLQLAEDLGTEPIWVFNNGVSHNDEVDTVAIAPFVKDVLDSIEFARGSANSTWGSVRAAMGHPEPFPVKYVAIGNEDCGKKFYRGNYLKFYNAIRQAYPDIQMISNCDGSSTPLDHPADLYDFHVYNDSKTLFNMKSTFDRTSRSGPKAFVSEYAVWRGDAGRGSLLASLAEAVFLTGLEKNSDIVSMASYAPLFVNDNDQTWNPDAIVFNSWQHYGTPSYWMQTLFRESSGAMFHPTTISSSYSGSLAASAITWQDSENSFLRVKVINFGSDAVTLTISTSGLQASINALGSTATVLTSADVMDENSFSNPTKVVPVKSDLSNAAEQMQVTLAPRSFSSFDLALAQSKLVAEM

SEQ ID NO: 34655 - protein, 694 aa, Zea mays subsp. mays
  peptide (1)..(694): Ceres Seq. ID no. 12358581
  misc_feature (109)..(266): Pfam Name: Pfam Description:  Carbohydrate binding domain
  misc_feature (53)..(694): NCBI GI NO: 13398414 NR Description: arabinoxylan arabinofuranohydrolase isoenzyme AXAH-II
  misc_feature (36)..(694): NCBI GI NO: 13398412 NR Description: arabinoxylan arabinofuranohydrolase isoenzyme AXAH-I
  misc_feature (46)..(692): NCBI GI NO: 38347003 NR Description: OSJNBb0058J09.4
  misc_feature (44)..(691): NCBI GI NO: 33151175 NR Description: alpha-L-arabinofuranosidase [Malus x domestica]
  misc_feature (48)..(688): NCBI GI NO: 16417958 NR Description: arabinosidase ARA-1 [Lycopersicon esculentum]
  misc_feature (46)..(690): NCBI GI NO: 15228368 NR Description: glycosyl hydrolase family 51; protein id:At3g10740
  misc_feature (46)..(690): NCBI GI NO: 13937191 NR Description: AT3g10740/T7M13_18 [Arabidopsis thaliana]
  misc_feature (46)..(690): NCBI GI NO: 29825623 NR Description: alpha-L-arabinofuranosidase [Arabidopsis thaliana]
  misc_feature (36)..(689): NCBI GI NO: 22324432 NR Description: putative arabinoxylan narabinofuranohydrolaseisoenzyme AXAH-I
  misc_feature (62)..(694): NCBI GI NO: 22327075 NR Description: glycosyl hydrolase family 51; protein id:At5g26120
MPCTRRRGARVFLRMVDACMHGRHAGPTRIDKWKRMGITSNDAAPRAVLLRFLFLLCIGCKCLASEVEATQTATLAVDASPQLARKIPDTLFGIFFEEINHAGAGGIWAELVSNRGFEAGGLHTPSNIDPWSIIGDDSSVFVETDRTSCFSRNIVALRMEVLCDNCPTGGVGVYNPGFWGMNIEEGKVYNLVMFVKSPETTDLTVSLTSSNGLQNLASATVTVSGESNWIKVEQKLVAKGTNRTSRLQITTNKKGVVWFDQVSLMPEDTYKGHGFRTELISMILDLKPRFLRFPGGCFVEGGWLRNAFRWRESIGPWEERPGHFGDVWHYWTDDGLGYYEFLQLAEDLGTEPIWVFNNGVSHNDEVDTVAIAPFVKDVLDSIEFARGSANSTWGSVRAAMGHPEPFPVKYVAIGNEDCGKKFYRGNYLKFYNAIRQAYPDIQMISNCDGSSTPLDHPADLYDFHVYNDSKTLFNMKSTFDRTSRSGPKAFVSEYAVWRGDAGRGSLLASLAEAVFLTGLEKNSDIVSMASYAPLFVNDNDQTWNPDAIVFNSWQHYGTPSYWMQTLFRESSGAMFHPTTISSSYSGSLAASAITWQDSENSFLRVKVINFGSDAVTLTISTSGLQASINALGSTATVLTSADVMDENSFSNPTKVVPVKSDLSNAAEQMQVTLAPRSFSSFDLALAQSKLVAEM

SEQ ID NO: 34656 - protein, 680 aa, Zea mays subsp. mays
  peptide (1)..(680): Ceres Seq. ID no. 12358582
  misc_feature (95)..(252): Pfam Name: Pfam Description:  Carbohydrate binding domain
  misc_feature (39)..(680): NCBI GI NO: 13398414 NR Description: arabinoxylan arabinofuranohydrolase isoenzyme AXAH-II
  misc_feature (22)..(680): NCBI GI NO: 13398412 NR Description: arabinoxylan arabinofuranohydrolase isoenzyme AXAH-I
  misc_feature (32)..(678): NCBI GI NO: 38347003 NR Description: OSJNBb0058J09.4
  misc_feature (30)..(677): NCBI GI NO: 33151175 NR Description: alpha-L-arabinofuranosidase [Malus x domestica]
  misc_feature (34)..(674): NCBI GI NO: 16417958 NR Description: arabinosidase ARA-1 [Lycopersicon esculentum]
  misc_feature (32)..(676): NCBI GI NO: 15228368 NR Description: glycosyl hydrolase family 51; protein id:At3g10740
  misc_feature (32)..(676): NCBI GI NO: 13937191 NR Description: AT3g10740/T7M13_18 [Arabidopsis thaliana]
  misc_feature (32)..(676): NCBI GI NO: 29825623 NR Description: alpha-L-arabinofuranosidase [Arabidopsis thaliana]
  misc_feature (22)..(675): NCBI GI NO: 22324432 NR Description: putative arabinoxylan narabinofuranohydrolaseisoenzyme AXAH-I
  misc_feature (48)..(680): NCBI GI NO: 22327075 NR Description: glycosyl hydrolase family 51; protein id:At5g26120
MVDACMHGRHAGPTRIDKWKRMGITSNDAAPRAVLLRFLFLLCIGCKCLASEVEATQTATLAVDASPQLARKIPDTLFGIFFEEINHAGAGGIWAELVSNRGFEAGGLHTPSNIDPWSIIGDDSSVFVETDRTSCFSRNIVALRMEVLCDNCPTGGVGVYNPGFWGMNIEEGKVYNLVMFVKSPETTDLTVSLTSSNGLQNLASATVTVSGESNWIKVEQKLVAKGTNRTSRLQITTNKKGVVWFDQVSLMPEDTYKGHGFRTELISMILDLKPRFLRFPGGCFVEGGWLRNAFRWRESIGPWEERPGHFGDVWHYWTDDGLGYYEFLQLAEDLGTEPIWVFNNGVSHNDEVDTVAIAPFVKDVLDSIEFARGSANSTWGSVRAAMGHPEPFPVKYVAIGNEDCGKKFYRGNYLKFYNAIRQAYPDIQMISNCDGSSTPLDHPADLYDFHVYNDSKTLFNMKSTFDRTSRSGPKAFVSEYAVWRGDAGRGSLLASLAEAVFLTGLEKNSDIVSMASYAPLFVNDNDQTWNPDAIVFNSWQHYGTPSYWMQTLFRESSGAMFHPTTISSSYSGSLAASAITWQDSENSFLRVKVINFGSDAVTLTISTSGLQASINALGSTATVLTSADVMDENSFSNPTKVVPVKSDLSNAAEQMQVTLAPRSFSSFDLALAQSKLVAEM

SEQ ID NO: 34657 - DNA, 1415 bp, Zea mays subsp. mays
  misc_feature (1)..(1415): Ceres Seq. ID no. 12411473
tctctctgtctcctcacccgacgcccaaagaagcagagcaggcaacggcacagttagagagagagagagagaggcgcagagccaaggaagcggagcagagcaacagcagcaggtcgaggaagaggagaagagaaggtccaggagacagcacagcagccaggaagagcaagagcaagatgctgcgcgggggcacgggcatgctgggggtggtgaacttcataaccttcctgatctcgatcccgatccttggcggcggcatctggctggcgtcgcgggccaactccaccgactgcatccgcttcctgcagtggcccatcatcgtggtggggctcgtcctcatggtcgtctccctcatgggcttcgccggcgcctgctaccgccagacttggctgctccgcctctacctcttcgccatgttcttcgtcgtcctcgcgctcctcttcttcgtcgtcttcgccttcgccgtcaccgaccgcggcgccggccaggtcgtcatgagccgccgcttccccgagtaccagctctccgactacggcggatggctccgcgaccgcgtcgccgacccgcagtactgggccaccatcagcgcctgcctccgcgacggccacgcctgcgccggcatgaggcgcctcgcgcgggaccccaacacgggcatgctcgtgccggagacgcccgccatgttctacggccgcaacctctccccgattcagtctggatgctgcaagccaccgacgtcatgcgcattcacctacatgaacgagacgtactgggaacaaaaccccggtgtcccgaccgtgcccaatgaccctgactgcagcaggtggagcaacgaccagcagatgctgtgcttccagtgcgactcgtgcaaggccggcgtcctcgcgggcatcaagaagagctggcgcaaggtggccgtcctgaacatcgtggtgttgatcatccttgtgattgtctatgtcgcgggctgcgccgcgttccgcaacgccaagaggatcgacaacgacgagccggtgggcatggcgcggatgaccaagtcccatccaagcaggttccagttctaggcaggcagctgctgccgtcgcgggttcggaagcttctgccttgtacagatgatgaccagaccagtgggtggtgctaaggcctgggctttgctatatcttactgagatgtggattgtactgcatttgggggtgaaaaggggaagttcagtgtggtttgagttcgtgtttgatttagtgtttagggtaggtatgttatgtggtagggggtacaatatgggatctgcaagaaacaagagaagatcaatcatctaggaactgttctgtattggagatttttttttaaaaaaaaatctgggggatatttgtatgatggtgcttggtgccagccatgatggaatattttctgaatttctc

SEQ ID NO: 34658 - protein, 352 aa, Zea mays subsp. mays
  peptide (1)..(352): Ceres Seq. ID no. 12411474
  misc_feature (64)..(314): Pfam Name: Pfam Description:  Tetraspanin family
  misc_feature (60)..(350): NCBI GI NO: 15231187 NR Description: putative protein; protein id: At3g45600
  misc_feature (60)..(343): NCBI GI NO: 15238641 NR Description: senescence-associated protein - like
  misc_feature (59)..(333): NCBI GI NO: 3551954 NR Description: senescence-associated protein 5
  misc_feature (61)..(333): NCBI GI NO: 29367553 NR Description: senescence-associated protein-like protein
  misc_feature (59)..(333): NCBI GI NO: 20197174 NR Description: hypothetical protein [Arabidopsis thaliana]
  misc_feature (59)..(330): NCBI GI NO: 15234374 NR Description: senescence-associated protein -like
  misc_feature (59)..(248): NCBI GI NO: 9294106 NR Description: senescence-associated protein-like
  misc_feature (227)..(347): NCBI GI NO: 9294106 NR Description: senescence-associated protein-like
  misc_feature (59)..(248): NCBI GI NO: 30682045 NR Description: senescence-associated protein family
  misc_feature (227)..(347): NCBI GI NO: 30682045 NR Description: senescence-associated protein family
SLSPHPTPKEAEQATAQLERERERRRAKEAEQSNSSRSRKRRREGPGDSTAARKSKSKMLRGGTGMLGVVNFITFLISIPILGGGIWLASRANSTDCIRFLQWPIIVVGLVLMVVSLMGFAGACYRQTWLLRLYLFAMFFVVLALLFFVVFAFAVTDRGAGQVVMSRRFPEYQLSDYGGWLRDRVADPQYWATISACLRDGHACAGMRRLARDPNTGMLVPETPAMFYGRNLSPIQSGCCKPPTSCAFTYMNETYWEQNPGVPTVPNDPDCSRWSNDQQMLCFQCDSCKAGVLAGIKKSWRKVAVLNIVVLIILVIVYVAGCAAFRNAKRIDNDEPVGMARMTKSHPSRFQF

SEQ ID NO: 34659 - protein, 294 aa, Zea mays subsp. mays
  peptide (1)..(294): Ceres Seq. ID no. 12411475
  misc_feature (6)..(256): Pfam Name: Pfam Description:  Tetraspanin family
  misc_feature (2)..(292): NCBI GI NO: 15231187 NR Description: putative protein; protein id: At3g45600
  misc_feature (2)..(285): NCBI GI NO: 15238641 NR Description: senescence-associated protein - like
  misc_feature (1)..(275): NCBI GI NO: 3551954 NR Description: senescence-associated protein 5
  misc_feature (3)..(275): NCBI GI NO: 29367553 NR Description: senescence-associated protein-like protein
  misc_feature (1)..(275): NCBI GI NO: 20197174 NR Description: hypothetical protein [Arabidopsis thaliana]
  misc_feature (1)..(272): NCBI GI NO: 15234374 NR Description: senescence-associated protein -like
  misc_feature (1)..(190): NCBI GI NO: 9294106 NR Description: senescence-associated protein-like
  misc_feature (169)..(289): NCBI GI NO: 9294106 NR Description: senescence-associated protein-like
  misc_feature (1)..(190): NCBI GI NO: 30682045 NR Description: senescence-associated protein family
  misc_feature (169)..(289): NCBI GI NO: 30682045 NR Description: senescence-associated protein family
MLRGGTGMLGVVNFITFLISIPILGGGIWLASRANSTDCIRFLQWPIIVVGLVLMVVSLMGFAGACYRQTWLLRLYLFAMFFVVLALLFFVVFAFAVTDRGAGQVVMSRRFPEYQLSDYGGWLRDRVADPQYWATISACLRDGHACAGMRRLARDPNTGMLVPETPAMFYGRNLSPIQSGCCKPPTSCAFTYMNETYWEQNPGVPTVPNDPDCSRWSNDQQMLCFQCDSCKAGVLAGIKKSWRKVAVLNIVVLIILVIVYVAGCAAFRNAKRIDNDEPVGMARMTKSHPSRFQF

SEQ ID NO: 34660 - protein, 287 aa, Zea mays subsp. mays
  peptide (1)..(287): Ceres Seq. ID no. 12411476
  misc_feature (1)..(249): Pfam Name: Pfam Description:  Tetraspanin family
  misc_feature (1)..(285): NCBI GI NO: 15231187 NR Description: putative protein; protein id: At3g45600
  misc_feature (1)..(278): NCBI GI NO: 15238641 NR Description: senescence-associated protein - like
  misc_feature (1)..(268): NCBI GI NO: 3551954 NR Description: senescence-associated protein 5
  misc_feature (1)..(268): NCBI GI NO: 29367553 NR Description: senescence-associated protein-like protein
  misc_feature (1)..(268): NCBI GI NO: 20197174 NR Description: hypothetical protein [Arabidopsis thaliana]
  misc_feature (1)..(265): NCBI GI NO: 15234374 NR Description: senescence-associated protein -like
  misc_feature (1)..(183): NCBI GI NO: 9294106 NR Description: senescence-associated protein-like
  misc_feature (162)..(282): NCBI GI NO: 9294106 NR Description: senescence-associated protein-like
  misc_feature (1)..(183): NCBI GI NO: 30682045 NR Description: senescence-associated protein family
  misc_feature (162)..(282): NCBI GI NO: 30682045 NR Description: senescence-associated protein family
MLGVVNFITFLISIPILGGGIWLASRANSTDCIRFLQWPIIVVGLVLMVVSLMGFAGACYRQTWLLRLYLFAMFFVVLALLFFVVFAFAVTDRGAGQVVMSRRFPEYQLSDYGGWLRDRVADPQYWATISACLRDGHACAGMRRLARDPNTGMLVPETPAMFYGRNLSPIQSGCCKPPTSCAFTYMNETYWEQNPGVPTVPNDPDCSRWSNDQQMLCFQCDSCKAGVLAGIKKSWRKVAVLNIVVLIILVIVYVAGCAAFRNAKRIDNDEPVGMARMTKSHPSRFQF

SEQ ID NO: 34661 - DNA, 470 bp, Zea mays subsp. mays
  misc_feature (1)..(470): Ceres Seq. ID no. 1341899
atcggttgtcattctcgtgattgtttcagtggaaacacgcgtgcaaattgagtgactgtctgggtgaataatctgaattggggtttttattctgtgtgttcttggtcgcaggtttattgatatggcagagtccttgtgtcagaaacgtgctttgraggctttccgtttagacccggcgaaatggggagtgaatgtgcaacctctatccggttcgcccgccaacttccatgtatacactgcactcttgaagccacatgaaaggatcatggctttggatcttcctcacggtggacatctttctcatggttaccagactgacactaagaagatatctgcaacttcaatattttttgagacaatgccttacagattggatgaaagcactggattgattgattacgatcagttggagaaaagcgctgttctttttaggccaaagttgatcattgctggtgcagtgcatatgctcg

SEQ ID NO: 34662 - protein, 116 aa, Zea mays subsp. mays
  peptide (1)..(116): Ceres Seq. ID no. 1341900
  misc_feature (1)..(112): Pfam Name: Pfam Description:  Serine hydroxymethyltransferase
  misc_feature (1)..(112): NCBI GI NO: 17017273 NR Description: serine hydroxymethyltransferase [Zea mays]
  misc_feature (1)..(112): NCBI GI NO: 31126793 NR Description: putative glycine hydroxymethyltransferase
  misc_feature (1)..(112): NCBI GI NO: 38000003 NR Description: putative glycine hydroxymethyltransferase
  misc_feature (1)..(112): NCBI GI NO: 7433553 NR Description: glycine hydroxymethyltransferase (EC 2
  misc_feature (1)..(112): NCBI GI NO: 15235745 NR Description: glycine hydroxymethyltransferase like protein
  misc_feature (1)..(112): NCBI GI NO: 1707998 NR Description: SERINE HYDROXYMETHYLTRANSFERASE
  misc_feature (1)..(112): NCBI GI NO: 15809972 NR Description: AT4g37930/F20D10_50 [Arabidopsis thaliana]
  misc_feature (1)..(112): NCBI GI NO: 462187 NR Description: SERINE HYDROXYMETHYLTRANSFERASE
  misc_feature (1)..(112): NCBI GI NO: 1346155 NR Description: Serine hydroxymethyltransferase 1
  misc_feature (1)..(112): NCBI GI NO: 14334888 NR Description: putative glycine hydroxymethyltransferase
  misc_feature (12)..(12): Xaa is any aa, unknown or other
MAESLCQKRALXAFRLDPAKWGVNVQPLSGSPANFHVYTALLKPHERIMALDLPHGGHLSHGYQTDTKKISATSIFFETMPYRLDESTGLIDYDQLEKSAVLFRPKLIIAGAVHML

SEQ ID NO: 34663 - protein, 68 aa, Zea mays subsp. mays
  peptide (1)..(68): Ceres Seq. ID no. 1341901
  misc_feature (1)..(64): Pfam Name: Pfam Description:  Serine hydroxymethyltransferase
  misc_feature (1)..(64): NCBI GI NO: 17017273 NR Description: serine hydroxymethyltransferase [Zea mays]
  misc_feature (1)..(64): NCBI GI NO: 31126793 NR Description: putative glycine hydroxymethyltransferase
  misc_feature (1)..(64): NCBI GI NO: 38000003 NR Description: putative glycine hydroxymethyltransferase
  misc_feature (1)..(64): NCBI GI NO: 7433553 NR Description: glycine hydroxymethyltransferase (EC 2
  misc_feature (1)..(64): NCBI GI NO: 15235745 NR Description: glycine hydroxymethyltransferase like protein
  misc_feature (1)..(64): NCBI GI NO: 1707998 NR Description: SERINE HYDROXYMETHYLTRANSFERASE
  misc_feature (1)..(64): NCBI GI NO: 15809972 NR Description: AT4g37930/F20D10_50 [Arabidopsis thaliana]
  misc_feature (1)..(64): NCBI GI NO: 462187 NR Description: SERINE HYDROXYMETHYLTRANSFERASE
  misc_feature (1)..(64): NCBI GI NO: 1346155 NR Description: Serine hydroxymethyltransferase 1
  misc_feature (1)..(64): NCBI GI NO: 14334888 NR Description: putative glycine hydroxymethyltransferase
MALDLPHGGHLSHGYQTDTKKISATSIFFETMPYRLDESTGLIDYDQLEKSAVLFRPKLIIAGAVHML

SEQ ID NO: 34664 - DNA, 1815 bp, Zea mays subsp. mays
  misc_feature (1)..(1815): Ceres Seq. ID no. 12355748
aaagtcaattcataaactcacaatggcggcaacggcataccccactgtggtgctcatcccactatgcgtcccaggccacctcgcgtccatgatcgaagccggcaagcggctgctcggcagaagccgctgccccatgtccctcaccgtgctcatcacgcagatgaccatgtccgccaacctgatgtccgacgtcgacgacatcatgcggcgggaagccgactccggcctggacatccgcttcgtccacctccccgccgtggagctccccaccgtccaccacggcctcgaggacttcatgatgcgcttcatacagctccacgcgacgcacgtcaaggaggccgtctccggcatgtcgtccccggtcgccgcggtcgtggtggactacttctgcaccaccctgttcgacgtcgcgcgcgagctcgcgctgccggcgtacgcctacatgccgtccggcgcgtcgatggtcgcgctcatgctgcggttaccggcgctggacggggaggtgtccggggacttcgaggcgatggaaggaacggtcgacctgcccgggatgccgccggtgccggctcgtctcatgccgtctccgctgatgaggaaggacccgaacttcgcgtggctggtgtaccatggcaaccgcttcatggaggccgacggcgtcatcgtcaacacggtagccgagctggagccgtccatcctcgcggccatcgccgacggcctctgcgtgtcaagacgccgcgctccggccgtctacccgatcggcccggtcctgcctctcaagccgccgtccgcgcccggcgacggcgagcaggtagtagcacagcggcacgagtgcgtgaggtggctcgacgcgcagcccccagcgtccgtcgtgctgctctgctttgggagcatgggcggcagcttcccgtcgccccaggtccgcgagatcgccgacggcctcgagcgcagcgggcaccgcttcctgtgggtgctccgtggcccgccaccgccggacggttccaagtacccgacggacgccaacgtccacgagctgctcccggaagggttcctggagaggacgaagggccgaggcctcgtgtggcccacgtgggcgccgcagaaggacatcctcgccaaccccgccgtcggcggcttcgtcacccactgcggctggaactccatcctcgagagcctgtggcacggcgtgccgatggtgcccttgccgcagttcgcggagcagcacctgaacgcgttcgagctcgtgtccgtcatgggcgtcgccgttgccatgcaggtggacaggaagcgcggcaacttcgtcgaggcggcggagctggagcgcgcggtccggtgcctgatgggcgggtcggaggaggaggggaggaaggcgcgggagaaggcgacggaggcgaaggccctgagccagaacggcgtggccagcggcgggtcgtcggacgcgtcggtgcagaaactggcgcgagagattttgcacaagcacgacgacaaggggtgtgccaccgcaagcggggagagcatgggcagcgtcgtcgttcccgcatctccggccagaataatatgatcccccgaacacggagaaatcgccgtcgtccacgaataaatcggaggccgccatgcgatccgtctggcactgctcacgttgtttgacattgttcagaatcgccgtgtgcactgtagtttcttatccgcagtagcttttaccattcgaaataatgtagcatagcaagcgctgcttcttcctaagtccgtgcagcgtagcccgcgtgttcgagctagtttgtgttaagttgaatgagttaatggatgctagttgtagtc

SEQ ID NO: 34665 - protein, 526 aa, Zea mays subsp. mays
  peptide (1)..(526): Ceres Seq. ID no. 12355749
  misc_feature (1)..(430): NCBI GI NO: 29247944 NR Description: GLP_26_54603_52153 [Giardia lamblia ATCC 50803]
  misc_feature (215)..(523): NCBI GI NO: 29247944 NR Description: GLP_26_54603_52153 [Giardia lamblia ATCC 50803]
MRPRPPRVHDRSRQAAARQKPLPHVPHRAHHADDHVRQPDVRRRRHHAAGSRLRPGHPLRPPPRRGAPHRPPRPRGLHDALHTAPRDARQGGRLRHVVPGRRGRGGLLLHHPVRRRARARAAGVRLHAVRRVDGRAHAAVTGAGRGGVRGLRGDGRNGRPARDAAGAGSSHAVSADEEGPELRVAGVPWQPLHGGRRRHRQHGSRAGAVHPRGHRRRPLRVKTPRSGRLPDRPGPASQAAVRARRRRAGSSTAARVREVARRAAPSVRRAALLWEHGRQLPVAPGPRDRRRPRAQRAPLPVGAPWPATAGRFQVPDGRQRPRAAPGRVPGEDEGPRPRVAHVGAAEGHPRQPRRRRLRHPLRLELHPREPVARRADGALAAVRGAAPERVRARVRHGRRRCHAGGQEARQLRRGGGAGARGPVPDGRVGGGGEEGAGEGDGGEGPEPERRGQRRVVGRVGAETGARDFAQARRQGVCHRKRGEHGQRRRSRISGQNNMIPRTRRNRRRPRINRRPPCDPSGTAHVV

SEQ ID NO: 34666 - protein, 518 aa, Zea mays subsp. mays
  peptide (1)..(518): Ceres Seq. ID no. 12355750
  misc_feature (15)..(489): Pfam Name: Pfam Description:  UDP-glucoronosyl and UDP-glucosyl transferase
  misc_feature (8)..(490): NCBI GI NO: 34394688 NR Description: putative glucosyltransferase
  misc_feature (12)..(488): NCBI GI NO: 34394683 NR Description: putative flavonol 3-O-glucosyltransferase
  misc_feature (10)..(491): NCBI GI NO: 34394680 NR Description: putative glucosyltransferase
  misc_feature (12)..(491): NCBI GI NO: 34394651 NR Description: putative glucosyltransferase
  misc_feature (10)..(484): NCBI GI NO: 34394676 NR Description: putative glucosyltransferase
  misc_feature (12)..(488): NCBI GI NO: 34394653 NR Description: putative glucosyltransferase-3
  misc_feature (12)..(489): NCBI GI NO: 34898742 NR Description: putative betanidin 6-O-glucosyltransferase
  misc_feature (9)..(484): NCBI GI NO: 22535568 NR Description: putative glucosyltransferase
  misc_feature (16)..(477): NCBI GI NO: 14349251 NR Description: glucosyltransferase [Nicotiana tabacum]
  misc_feature (16)..(489): NCBI GI NO: 18033791 NR Description: betanidin 6-O-glucosyltransferase
KSIHKLTMAATAYPTVVLIPLCVPGHLASMIEAGKRLLGRSRCPMSLTVLITQMTMSANLMSDVDDIMRREADSGLDIRFVHLPAVELPTVHHGLEDFMMRFIQLHATHVKEAVSGMSSPVAAVVVDYFCTTLFDVARELALPAYAYMPSGASMVALMLRLPALDGEVSGDFEAMEGTVDLPGMPPVPARLMPSPLMRKDPNFAWLVYHGNRFMEADGVIVNTVAELEPSILAAIADGLCVSRRRAPAVYPIGPVLPLKPPSAPGDGEQVVAQRHECVRWLDAQPPASVVLLCFGSMGGSFPSPQVREIADGLERSGHRFLWVLRGPPPPDGSKYPTDANVHELLPEGFLERTKGRGLVWPTWAPQKDILANPAVGGFVTHCGWNSILESLWHGVPMVPLPQFAEQHLNAFELVSVMGVAVAMQVDRKRGNFVEAAELERAVRCLMGGSEEEGRKAREKATEAKALSQNGVASGGSSDASVQKLAREILHKHDDKGCATASGESMGSVVVPASPARII

SEQ ID NO: 34667 - protein, 511 aa, Zea mays subsp. mays
  peptide (1)..(511): Ceres Seq. ID no. 12355751
  misc_feature (8)..(482): Pfam Name: Pfam Description:  UDP-glucoronosyl and UDP-glucosyl transferase
  misc_feature (1)..(483): NCBI GI NO: 34394688 NR Description: putative glucosyltransferase
  misc_feature (5)..(481): NCBI GI NO: 34394683 NR Description: putative flavonol 3-O-glucosyltransferase
  misc_feature (3)..(484): NCBI GI NO: 34394680 NR Description: putative glucosyltransferase
  misc_feature (5)..(484): NCBI GI NO: 34394651 NR Description: putative glucosyltransferase
  misc_feature (3)..(477): NCBI GI NO: 34394676 NR Description: putative glucosyltransferase
  misc_feature (5)..(481): NCBI GI NO: 34394653 NR Description: putative glucosyltransferase-3
  misc_feature (5)..(482): NCBI GI NO: 34898742 NR Description: putative betanidin 6-O-glucosyltransferase
  misc_feature (2)..(477): NCBI GI NO: 22535568 NR Description: putative glucosyltransferase
  misc_feature (9)..(470): NCBI GI NO: 14349251 NR Description: glucosyltransferase [Nicotiana tabacum]
  misc_feature (9)..(482): NCBI GI NO: 18033791 NR Description: betanidin 6-O-glucosyltransferase
MAATAYPTVVLIPLCVPGHLASMIEAGKRLLGRSRCPMSLTVLITQMTMSANLMSDVDDIMRREADSGLDIRFVHLPAVELPTVHHGLEDFMMRFIQLHATHVKEAVSGMSSPVAAVVVDYFCTTLFDVARELALPAYAYMPSGASMVALMLRLPALDGEVSGDFEAMEGTVDLPGMPPVPARLMPSPLMRKDPNFAWLVYHGNRFMEADGVIVNTVAELEPSILAAIADGLCVSRRRAPAVYPIGPVLPLKPPSAPGDGEQVVAQRHECVRWLDAQPPASVVLLCFGSMGGSFPSPQVREIADGLERSGHRFLWVLRGPPPPDGSKYPTDANVHELLPEGFLERTKGRGLVWPTWAPQKDILANPAVGGFVTHCGWNSILESLWHGVPMVPLPQFAEQHLNAFELVSVMGVAVAMQVDRKRGNFVEAAELERAVRCLMGGSEEEGRKAREKATEAKALSQNGVASGGSSDASVQKLAREILHKHDDKGCATASGESMGSVVVPASPARII

SEQ ID NO: 34668 - DNA, 1060 bp, Zea mays subsp. mays
  misc_feature (1)..(1060): Ceres Seq. ID no. 12340681
agagaagatgttcgacgagatgcacgctctgttccacgagctgaagagcgggcatgcgcctgtccagcgtgctcttcccctacgcccccacgccgacgaaccgccggcgcgacagggcgcgcgccaagctgttaaagatattcagcgaggtcgtgcggtcccggaggaggcggggcgaggaggagaaggagaaggaggaggacgtgctgcagagcctgatcgattccaggtacaaggacgggcgggccacgaccgaggaggaggtcaccggcatgatcatcctcctggtcttcggcgggatggacacgagcacgctcgccagcacctggaccggcgcgcgcctgctcagcaccccggcggccatggcagccgcggtcgaggagcagaggcggatcctcaccgaccacgggcacggggcaccgcgtcggctacagtgaattcatgcagatgaccaccctccactggagcatcaaggaggcgctgaggatgcaccctccgtcggcggtgttcttccgcaaggcgcggaggagcttcggcgtgcggacgagagacggccgcgagtacgaggtcccgggtgggcatacggtggcgagccccgtgctgttcaacagccacctgcctagcgtgtacaaggaccccgacgtgtacgacccgacccggtttgggcctgggagggaggaggacagggccggcggtaagttcacctacgaggcgtttagctgcgggcggcacagctgcgtcggcgaggcgtacgcgtatctgcagatcaaggtgatgctcagccatttgctgaggaacttccagctcgagctcgtgtcccctttccctcagacagattgggggaagctggtgcctgagcctaaagggaaagtgatggtcaggtacaagaggcagcgcctgctctcagtgcctagctagtagaagatggctagtacaagaagaaactagtgtggacaaagctggggatgtgtgtgtttatcggcctgtactgtagcatgtgtaattatgtttgcctgtttaatctctatggcgatcggcttagaaaacctgttgacacttg

SEQ ID NO: 34669 - protein, 158 aa, Zea mays subsp. mays
  peptide (1)..(158): Ceres Seq. ID no. 12340682
  misc_feature (1)..(153): NCBI GI NO: 34901524 NR Description: putative cytochrome P450
  misc_feature (1)..(153): NCBI GI NO: 18000074 NR Description: obtusifoliol-14-demethylase [Nicotiana tabacum]
  misc_feature (1)..(153): NCBI GI NO: 15221075 NR Description: putative obtusifoliol 14-alpha demethylase
  misc_feature (1)..(153): NCBI GI NO: 27461067 NR Description: obtusifoliol-14-demethylase [Nicotiana tabacum]
  misc_feature (1)..(154): NCBI GI NO: 27542762 NR Description: cytochrome P450-like protein [Sorghum bicolor]
  misc_feature (1)..(154): NCBI GI NO: 5921924 NR Description: Cytochrome P450 51
  misc_feature (1)..(154): NCBI GI NO: 7489685 NR Description: probable obtusifoliol 14-alpha-demethylase CYP51 -wheat
  misc_feature (1)..(154): NCBI GI NO: 6166036 NR Description: Cytochrome P450 51
  misc_feature (1)..(155): NCBI GI NO: 34899804 NR Description: putative cytochrome P450
  misc_feature (1)..(154): NCBI GI NO: 4586676 NR Description: sterol 14-demethylase
MQMTTLHWSIKEALRMHPPSAVFFRKARRSFGVRTRDGREYEVPGGHTVASPVLFNSHLPSVYKDPDVYDPTRFGPGREEDRAGGKFTYEAFSCGRHSCVGEAYAYLQIKVMLSHLLRNFQLELVSPFPQTDWGKLVPEPKGKVMVRYKRQRLLSVPS

SEQ ID NO: 34670 - protein, 156 aa, Zea mays subsp. mays
  peptide (1)..(156): Ceres Seq. ID no. 12340683
  misc_feature (1)..(151): NCBI GI NO: 34901524 NR Description: putative cytochrome P450
  misc_feature (1)..(151): NCBI GI NO: 18000074 NR Description: obtusifoliol-14-demethylase [Nicotiana tabacum]
  misc_feature (1)..(151): NCBI GI NO: 15221075 NR Description: putative obtusifoliol 14-alpha demethylase
  misc_feature (1)..(151): NCBI GI NO: 27461067 NR Description: obtusifoliol-14-demethylase [Nicotiana tabacum]
  misc_feature (1)..(152): NCBI GI NO: 27542762 NR Description: cytochrome P450-like protein [Sorghum bicolor]
  misc_feature (1)..(152): NCBI GI NO: 5921924 NR Description: Cytochrome P450 51
  misc_feature (1)..(152): NCBI GI NO: 7489685 NR Description: probable obtusifoliol 14-alpha-demethylase CYP51 -wheat
  misc_feature (1)..(152): NCBI GI NO: 6166036 NR Description: Cytochrome P450 51
  misc_feature (1)..(153): NCBI GI NO: 34899804 NR Description: putative cytochrome P450
  misc_feature (1)..(152): NCBI GI NO: 4586676 NR Description: sterol 14-demethylase
MTTLHWSIKEALRMHPPSAVFFRKARRSFGVRTRDGREYEVPGGHTVASPVLFNSHLPSVYKDPDVYDPTRFGPGREEDRAGGKFTYEAFSCGRHSCVGEAYAYLQIKVMLSHLLRNFQLELVSPFPQTDWGKLVPEPKGKVMVRYKRQRLLSVPS

SEQ ID NO: 34671 - protein, 149 aa, Zea mays subsp. mays
  peptide (1)..(149): Ceres Seq. ID no. 12340684
  misc_feature (1)..(29): NCBI GI NO: 27542762 NR Description: cytochrome P450-like protein [Sorghum bicolor]
  misc_feature (1)..(29): NCBI GI NO: 6166036 NR Description: Cytochrome P450 51
  misc_feature (1)..(29): NCBI GI NO: 7489685 NR Description: probable obtusifoliol 14-alpha-demethylase CYP51 -wheat
EKMFDEMHALFHELKSGHAPVQRALPLRPHADEPPARQGARQAVKDIQRGRAVPEEAGRGGEGEGGGRAAEPDRFQVQGRAGHDRGGGHRHDHPPGLRRDGHEHARQHLDRRAPAQHPGGHGSRGRGAEADPHRPRARGTASATVNSCR

SEQ ID NO: 34672 - DNA, 1845 bp, Zea mays subsp. mays
  misc_feature (1)..(1845): Ceres Seq. ID no. 12423896
gagtgtctcgtgctgctgcttccgctgcagtaaaatacggggaagaggaggggagggagacgcggccgctgcctgccgcacatgctttaagtcccactccccacctccccagatctccgccctcctccccaccgcccccattcctcccctcggccgcaaccgtagccgccgcactacggagcaagatcgtcgggtagacggacgggcgggcgggcgggcgcggctctgtatctatctgtcggtgggagaccgcgtgtgtcggttaggcggcgggtggcaaggaagaatggcggcgagcggcagatccgtcgcgtgctgtgccgccgcgctgctcgcggccgcgttgctcctctccgcaccgactgcaacagaggcttatgattcgctggatccaaatggcaacatcaccataaaatgggatatcatgcagtggactcctgatggatatgtcgctgttgtcacaatgtttaattatcaacaatttcggcatatcggcgcacctggttggcagcttgggtggacatgggcaaagaaggaggttatatggtcaatggttggggctcagaccactgaacagggcgactgctcaaagttcaagagcagcccaccccattgctgcaagaaagatccaacaattgtcgatttacttccaggcactccatacaacatgcaaattgccaattgctgcaaggcaggagttgtaaatacctttaaccaggacccagcaaatgctgcttcctccttccagatcagtgttggtcttgctggaactaccaataaaactgttaaggtgcccaggaacttcactcttaagactccaggccctgggtacacatgtgggcgtgccattgttggcaggcctacgaagtttttcaccgcggacgggcgcagggcaacccaagctctaatgacatggaatgtgacctgcacatattcccaatttcttgctcagaagactccatcctgctgtgtatctctatcatcgttttataatgacacaattgtgaactgcccaacatgctcatgtggctgccagaacccaagtgggtcaaactgtgtgaatgaggattcacctaatctacaagctgcaattgatggccctggcaaatgcactggtcagccccttgtacaatgcacttcccacatgtgcccgataagaatccactggcatgtgaagctcaactacaaggattactggagagtgaaaatcactatcacaaacttcaacttccgcatgaattacacgcagtggaacttagtagcccagcatccaaactttgataatatcactcagttgttcagcttcaactacaaaccacttactccatatggtggtggcataaatgatacggcaatgttctggggtgtaaaattctacaatgatctgctgatgcaagccggcaaacttgggaatgtgcaatcagagctgcttctccgcaaggactcccggactttcactttcgaaaagggatgggccttcccacgccgagtttacttcaatggtgataattgtgtcatgccatctcctgaaaattatccatggctgccgaatgcaagccctctaacaaaaccattggcactcccattcttggtattctgggttgccttggctgctctgttggcttatgcatgattagtgggatcaagaggtttagcaagtttcaagttgatgtcagattccatgaggtgcactgcaacaagtcatttgttcattcaattccatggttgcacagaaaagatgaggcgatgccaagaaaaagtcgatatgtctatgtgtttaagttaaagggccaaaatgtatttcttgtttggtatataacagccctacaacactttggtgaactg

SEQ ID NO: 34673 - protein, 543 aa, Zea mays subsp. mays
  peptide (1)..(543): Ceres Seq. ID no. 12423897
  misc_feature (96)..(543): NCBI GI NO: 30090026 NR Description: phytochelatin synthetase-like protein 2
  misc_feature (94)..(542): NCBI GI NO: 30090032 NR Description: phytochelatin synthetase [Triticum monococcum]
  misc_feature (96)..(516): NCBI GI NO: 30090025 NR Description: phytochelatin synthetase-like protein 1
  misc_feature (184)..(543): NCBI GI NO: 6690554 NR Description: phytochelatin synthetase-like protein [Zea mays]
  misc_feature (109)..(533): NCBI GI NO: 21553837 NR Description: phytochelatin synthetase-like protein
  misc_feature (109)..(533): NCBI GI NO: 18424412 NR Description: phytochelatin synthetase - like protein
  misc_feature (123)..(532): NCBI GI NO: 13477083 NR Description: phytochelatin synthetase-like protein
  misc_feature (118)..(517): NCBI GI NO: 15232863 NR Description: unknown protein; protein id: At3g02210.1
  misc_feature (121)..(532): NCBI GI NO: 21618129 NR Description: phytochelatin synthetase-like protein
  misc_feature (121)..(532): NCBI GI NO: 18406342 NR Description: phytochelatin synthetase-like protein
SVSCCCFRCSKIRGRGGEGDAAAACRTCFKSHSPPPQISALLPTAPIPPLGRNRSRRTTEQDRRVDGRAGGRARLCIYLSVGDRVCRLGGGWQGRMAASGRSVACCAAALLAAALLLSAPTATEAYDSLDPNGNITIKWDIMQWTPDGYVAVVTMFNYQQFRHIGAPGWQLGWTWAKKEVIWSMVGAQTTEQGDCSKFKSSPPHCCKKDPTIVDLLPGTPYNMQIANCCKAGVVNTFNQDPANAASSFQISVGLAGTTNKTVKVPRNFTLKTPGPGYTCGRAIVGRPTKFFTADGRRATQALMTWNVTCTYSQFLAQKTPSCCVSLSSFYNDTIVNCPTCSCGCQNPSGSNCVNEDSPNLQAAIDGPGKCTGQPLVQCTSHMCPIRIHWHVKLNYKDYWRVKITITNFNFRMNYTQWNLVAQHPNFDNITQLFSFNYKPLTPYGGGINDTAMFWGVKFYNDLLMQAGKLGNVQSELLLRKDSRTFTFEKGWAFPRRVYFNGDNCVMPSPENYPWLPNASPLTKPLALPFLVFWVALAALLAYA

SEQ ID NO: 34674 - protein, 448 aa, Zea mays subsp. mays
  peptide (1)..(448): Ceres Seq. ID no. 12423898
  misc_feature (1)..(448): NCBI GI NO: 30090026 NR Description: phytochelatin synthetase-like protein 2
  misc_feature (1)..(447): NCBI GI NO: 30090032 NR Description: phytochelatin synthetase [Triticum monococcum]
  misc_feature (1)..(421): NCBI GI NO: 30090025 NR Description: phytochelatin synthetase-like protein 1
  misc_feature (89)..(448): NCBI GI NO: 6690554 NR Description: phytochelatin synthetase-like protein [Zea mays]
  misc_feature (14)..(438): NCBI GI NO: 21553837 NR Description: phytochelatin synthetase-like protein
  misc_feature (14)..(438): NCBI GI NO: 18424412 NR Description: phytochelatin synthetase - like protein
  misc_feature (28)..(437): NCBI GI NO: 13477083 NR Description: phytochelatin synthetase-like protein
  misc_feature (23)..(422): NCBI GI NO: 15232863 NR Description: unknown protein; protein id: At3g02210.1
  misc_feature (26)..(437): NCBI GI NO: 21618129 NR Description: phytochelatin synthetase-like protein
  misc_feature (26)..(437): NCBI GI NO: 18406342 NR Description: phytochelatin synthetase-like protein
MAASGRSVACCAAALLAAALLLSAPTATEAYDSLDPNGNITIKWDIMQWTPDGYVAVVTMFNYQQFRHIGAPGWQLGWTWAKKEVIWSMVGAQTTEQGDCSKFKSSPPHCCKKDPTIVDLLPGTPYNMQIANCCKAGVVNTFNQDPANAASSFQISVGLAGTTNKTVKVPRNFTLKTPGPGYTCGRAIVGRPTKFFTADGRRATQALMTWNVTCTYSQFLAQKTPSCCVSLSSFYNDTIVNCPTCSCGCQNPSGSNCVNEDSPNLQAAIDGPGKCTGQPLVQCTSHMCPIRIHWHVKLNYKDYWRVKITITNFNFRMNYTQWNLVAQHPNFDNITQLFSFNYKPLTPYGGGINDTAMFWGVKFYNDLLMQAGKLGNVQSELLLRKDSRTFTFEKGWAFPRRVYFNGDNCVMPSPENYPWLPNASPLTKPLALPFLVFWVALAALLAYA

SEQ ID NO: 34675 - protein, 402 aa, Zea mays subsp. mays
  peptide (1)..(402): Ceres Seq. ID no. 12423899
  misc_feature (1)..(402): NCBI GI NO: 30090026 NR Description: phytochelatin synthetase-like protein 2
  misc_feature (1)..(401): NCBI GI NO: 30090032 NR Description: phytochelatin synthetase [Triticum monococcum]
  misc_feature (1)..(375): NCBI GI NO: 30090025 NR Description: phytochelatin synthetase-like protein 1
  misc_feature (43)..(402): NCBI GI NO: 6690554 NR Description: phytochelatin synthetase-like protein [Zea mays]
  misc_feature (1)..(392): NCBI GI NO: 21553837 NR Description: phytochelatin synthetase-like protein
  misc_feature (1)..(392): NCBI GI NO: 18424412 NR Description: phytochelatin synthetase - like protein
  misc_feature (1)..(391): NCBI GI NO: 13477083 NR Description: phytochelatin synthetase-like protein
  misc_feature (1)..(376): NCBI GI NO: 15232863 NR Description: unknown protein; protein id: At3g02210.1
  misc_feature (1)..(391): NCBI GI NO: 21618129 NR Description: phytochelatin synthetase-like protein
  misc_feature (1)..(391): NCBI GI NO: 18406342 NR Description: phytochelatin synthetase-like protein
MQWTPDGYVAVVTMFNYQQFRHIGAPGWQLGWTWAKKEVIWSMVGAQTTEQGDCSKFKSSPPHCCKKDPTIVDLLPGTPYNMQIANCCKAGVVNTFNQDPANAASSFQISVGLAGTTNKTVKVPRNFTLKTPGPGYTCGRAIVGRPTKFFTADGRRATQALMTWNVTCTYSQFLAQKTPSCCVSLSSFYNDTIVNCPTCSCGCQNPSGSNCVNEDSPNLQAAIDGPGKCTGQPLVQCTSHMCPIRIHWHVKLNYKDYWRVKITITNFNFRMNYTQWNLVAQHPNFDNITQLFSFNYKPLTPYGGGINDTAMFWGVKFYNDLLMQAGKLGNVQSELLLRKDSRTFTFEKGWAFPRRVYFNGDNCVMPSPENYPWLPNASPLTKPLALPFLVFWVALAALLAYA

SEQ ID NO: 34676 - DNA, 610 bp, Zea mays subsp. mays
  misc_feature (1)..(610): Ceres Seq. ID no. 12341320
aatcttgccgctccaaccaattcgtcttggttgccgacacggcacctcgtcggaatcaggtggcgcgacctcctcgccggccggcgcgacaccaccatgggcccggaagcagtgcggaaaagcctggagcccaccgcaaccgccgaggaaatcactggctccacccctgcgcggctccacttctacgaccccttcgtcctcagcggcgtccgtatcgaagccgccgagcacggccgcctcctctgctctttcgtcgtcacccctcgcctcgcgagtcccgtgggatacctccgcagcggtgtcacagcgacgctcgccgaccagctgggatcggctgtgttcttctgcagtgggatccccagcagcggggtctccatcgagatcagcgtctcctttgtcgactcggctgccgtcggggaggaaatagaggttgagggaaagttattgcgtgctggaaaatcagtcggtgtcgtctccgtagatttcaggaagaaaaagacagggaatgaataaggattgggtggattttttaagttgggttatagaggtctatactttgttcgttgtgcaggcatggtgacagaataaaagcatgaaggcattgcactgc

SEQ ID NO: 34677 - protein, 170 aa, Zea mays subsp. mays
  peptide (1)..(170): Ceres Seq. ID no. 12341321
  misc_feature (33)..(168): NCBI GI NO: 21740488 NR Description: OSJNBa0006B20.3
  misc_feature (33)..(168): NCBI GI NO: 13605902 NR Description: At1g04290/F19P19_27 [Arabidopsis thaliana]
  misc_feature (33)..(168): NCBI GI NO: 18379308 NR Description: expressed protein; protein id: At1g04290
  misc_feature (61)..(168): NCBI GI NO: 18402093 NR Description: expressed protein; protein id: At2g29590
  misc_feature (61)..(168): NCBI GI NO: 25408036 NR Description: hypothetical protein At2g29590
  misc_feature (97)..(168): NCBI GI NO: 20161439 NR Description: B1065E10.13
  misc_feature (49)..(168): NCBI GI NO: 8923812 NR Description: uncharacterized hypothalamus protein HT012
  misc_feature (66)..(168): NCBI GI NO: 13385260 NR Description: RIKEN cDNA 0610006O17 [Mus musculus]
  misc_feature (66)..(168): NCBI GI NO: 27685797 NR Description: similar to RIKEN cDNA 0610006O17
  misc_feature (62)..(170): NCBI GI NO: 34904288 NR Description: unnamed protein product
NLAAPTNSSWLPTRHLVGIRWRDLLAGRRDTTMGPEAVRKSLEPTATAEEITGSTPARLHFYDPFVLSGVRIEAAEHGRLLCSFVVTPRLASPVGYLRSGVTATLADQLGSAVFFCSGIPSSGVSIEISVSFVDSAAVGEEIEVEGKLLRAGKSVGVVSVDFRKKKTGNE

SEQ ID NO: 34678 - protein, 143 aa, Zea mays subsp. mays
  peptide (1)..(143): Ceres Seq. ID no. 12341322
SCRSNQFVLVADTAPRRNQVARPPRRPARHHHGPGSSAEKPGAHRNRRGNHWLHPCAAPLLRPLRPQRRPYRSRRARPPPLLFRRHPSPRESRGIPPQRCHSDARRPAGIGCVLLQWDPQQRGLHRDQRLLCRLGCRRGGNRG

SEQ ID NO: 34679 - protein, 141 aa, Zea mays subsp. mays
  peptide (1)..(141): Ceres Seq. ID no. 12341323
ILPLQPIRLGCRHGTSSESGGATSSPAGATPPWARKQCGKAWSPPQPPRKSLAPPLRGSTSTTPSSSAASVSKPPSTAASSALSSSPLASRVPWDTSAAVSQRRSPTSWDRLCSSAVGSPAAGSPSRSASPLSTRLPSGRK

SEQ ID NO: 34680 - protein, 138 aa, Zea mays subsp. mays
  peptide (1)..(138): Ceres Seq. ID no. 12341324
  misc_feature (1)..(136): NCBI GI NO: 21740488 NR Description: OSJNBa0006B20.3
  misc_feature (1)..(136): NCBI GI NO: 13605902 NR Description: At1g04290/F19P19_27 [Arabidopsis thaliana]
  misc_feature (1)..(136): NCBI GI NO: 18379308 NR Description: expressed protein; protein id: At1g04290
  misc_feature (29)..(136): NCBI GI NO: 18402093 NR Description: expressed protein; protein id: At2g29590
  misc_feature (29)..(136): NCBI GI NO: 25408036 NR Description: hypothetical protein At2g29590
  misc_feature (65)..(136): NCBI GI NO: 20161439 NR Description: B1065E10.13
  misc_feature (17)..(136): NCBI GI NO: 8923812 NR Description: uncharacterized hypothalamus protein HT012
  misc_feature (34)..(136): NCBI GI NO: 13385260 NR Description: RIKEN cDNA 0610006O17 [Mus musculus]
  misc_feature (34)..(136): NCBI GI NO: 27685797 NR Description: similar to RIKEN cDNA 0610006O17
  misc_feature (30)..(138): NCBI GI NO: 34904288 NR Description: unnamed protein product
MGPEAVRKSLEPTATAEEITGSTPARLHFYDPFVLSGVRIEAAEHGRLLCSFVVTPRLASPVGYLRSGVTATLADQLGSAVFFCSGIPSSGVSIEISVSFVDSAAVGEEIEVEGKLLRAGKSVGVVSVDFRKKKTGNE

SEQ ID NO: 34681 - DNA, 1918 bp, Zea mays subsp. mays
  misc_feature (1)..(1918): Ceres Seq. ID no. 12345175
gttctatctccttctccactgggccaactccgctctactctccaatcccaggcgaatccctcgtcttcttcgaccgcgtgtcggagcttcatcttctctggcccccctgccctgatttgccgctccgctctcccccccttccgccggaaaggggggaaattgatggcgaggctagtggctctggcatcggcggtggcggttctggtactcggcctcgcctgtgcagaggcggagccacagtgcacgcggcgccgcccgcccgcgccgccgcggccgcacagcgtgacgatcaccgagttcggggccgttggtgacggcgtcaccctcaacaccgtgtccttccagaacgccgtcttctacctgcgctccttcgccgacaagggcggcgcgcagctgtacattcccaggggccggtggctcaccggcagtttcaatctcaccagccaccttaccctcttcctggagagtggcgctgtcatcgttggcacgcaggacgtttcacagtggcctgttgttgaacctttgccatcatatggacgaggaatggaccttccaggttcgaggcatcgaagcttaataaacgggcagaatctaattgatgttgtaattacgggaaacaatggaacaatcgatggccagggttctacatggtggaactggtttcgttcgaataagttgaactatagccgccctcatcttgtggagtttgtggactctgagcaaatcgtcatttcgaacataacatttttaaattcccctgcttggagtatacatccagtgtattgcagcaatgtagtggtccatagtgtcacaattcagacttcattggatgctccacttaatcatggaatcgttccagattcttgctcaaatatgtgcatcgaggacagcagtatcagtgttagccacgacgccatatcactaaaaagcgggtgggacaagcaaggcattgctttcgggaggccaacctcagacatccacataagcagactggatctgcagtcctcactgggcgccgctctcacgttcgggagcgagatgtcgggcgggatctcagacgtccatgcggaccgcctcctcatccactcttcgttcagaggcgtcttcttcaagaccgcgccgggacgcggaggctatatcagagacaccgtgatctcagacgtccagatggaagacgtcgacgtcgccatcgcattcactggtgactggccaagccacccagatgaccagttcgacccgaccgcgctcccggtggtcagccacatcaccctgaagaacatgactggaacaagaatctcggtcgctggcgttttgtcaggaatcgccggcgacccgttcaccgacatctgcctctccaacatcaacttctcactggccgattcggccagtcccacctcccactggtcttgctccaacgtctccggatactccgagctggtcttccctgagccttgcctggatctgcagacccaatcctcagatgcctccatctgctccaccctccctagcttccacgccgccgccattgcagcagcgtaaatgcacagagtacaaagtgtccatcctttttcctgttcccggtcccctgcacacttcagaggatctctcaagccgccttttcctcccccgacaattctttgaagctataggcgcgctcccgtcgttgaagaaaagaatcgttcaccgtttttctccggccgtcggcttcgagggctcagctgcatcgcctttcttgcgggaggcaagcctggcggcggacggtcgacatcgagctgttaatttgcttgtacagttatgatttcttcattcaatctgtaagaaggaatttttgtggtagtagagggttgagtcgagtccagagagttgcttcatacgattgtcgatttggtgaataaaacacatgatggattcatgatcc

SEQ ID NO: 34682 - protein, 512 aa, Zea mays subsp. mays
  peptide (1)..(512): Ceres Seq. ID no. 12345176
  misc_feature (127)..(485): Pfam Name: Pfam Description:  Glycosyl hydrolases family 28
  misc_feature (59)..(493): NCBI GI NO: 7939578 NR Description: polygalacturonase-like protein
  misc_feature (59)..(493): NCBI GI NO: 15228881 NR Description: polygalacturonase, putative; protein id:At3g16850
  misc_feature (59)..(493): NCBI GI NO: 21553827 NR Description: polygalacturonase, putative [Arabidopsis thaliana]
  misc_feature (91)..(512): NCBI GI NO: 40714685 NR Description: putative polygalacturonase
  misc_feature (58)..(493): NCBI GI NO: 22327662 NR Description: Expressed protein; protein id: At5g49215
  misc_feature (91)..(495): NCBI GI NO: 30679999 NR Description: polygalacturonase, putative [Arabidopsis thaliana]
  misc_feature (71)..(492): NCBI GI NO: 18412253 NR Description: polygalacturonase, putative; protein id:At3g62110
  misc_feature (71)..(492): NCBI GI NO: 11263971 NR Description: hypothetical protein T17J13
  misc_feature (123)..(495): NCBI GI NO: 18397713 NR Description: polygalacturonase, putative; protein id:At3g06770
  misc_feature (123)..(495): NCBI GI NO: 21593399 NR Description: polygalacturonase-like protein
VLSPSPLGQLRSTLQSQANPSSSSTACRSFIFSGPPALICRSALPPFRRKGGKLMARLVALASAVAVLVLGLACAEAEPQCTRRRPPAPPRPHSVTITEFGAVGDGVTLNTVSFQNAVFYLRSFADKGGAQLYIPRGRWLTGSFNLTSHLTLFLESGAVIVGTQDVSQWPVVEPLPSYGRGMDLPGSRHRSLINGQNLIDVVITGNNGTIDGQGSTWWNWFRSNKLNYSRPHLVEFVDSEQIVISNITFLNSPAWSIHPVYCSNVVVHSVTIQTSLDAPLNHGIVPDSCSNMCIEDSSISVSHDAISLKSGWDKQGIAFGRPTSDIHISRLDLQSSLGAALTFGSEMSGGISDVHADRLLIHSSFRGVFFKTAPGRGGYIRDTVISDVQMEDVDVAIAFTGDWPSHPDDQFDPTALPVVSHITLKNMTGTRISVAGVLSGIAGDPFTDICLSNINFSLADSASPTSHWSCSNVSGYSELVFPEPCLDLQTQSSDASICSTLPSFHAAAIAAA

SEQ ID NO: 34683 - protein, 458 aa, Zea mays subsp. mays
  peptide (1)..(458): Ceres Seq. ID no. 12345177
  misc_feature (73)..(431): Pfam Name: Pfam Description:  Glycosyl hydrolases family 28
  misc_feature (5)..(439): NCBI GI NO: 7939578 NR Description: polygalacturonase-like protein
  misc_feature (5)..(439): NCBI GI NO: 15228881 NR Description: polygalacturonase, putative; protein id:At3g16850
  misc_feature (5)..(439): NCBI GI NO: 21553827 NR Description: polygalacturonase, putative [Arabidopsis thaliana]
  misc_feature (37)..(458): NCBI GI NO: 40714685 NR Description: putative polygalacturonase
  misc_feature (4)..(439): NCBI GI NO: 22327662 NR Description: Expressed protein; protein id: At5g49215
  misc_feature (37)..(441): NCBI GI NO: 30679999 NR Description: polygalacturonase, putative [Arabidopsis thaliana]
  misc_feature (17)..(438): NCBI GI NO: 18412253 NR Description: polygalacturonase, putative; protein id:At3g62110
  misc_feature (17)..(438): NCBI GI NO: 11263971 NR Description: hypothetical protein T17J13
  misc_feature (69)..(441): NCBI GI NO: 18397713 NR Description: polygalacturonase, putative; protein id:At3g06770
  misc_feature (69)..(441): NCBI GI NO: 21593399 NR Description: polygalacturonase-like protein
MARLVALASAVAVLVLGLACAEAEPQCTRRRPPAPPRPHSVTITEFGAVGDGVTLNTVSFQNAVFYLRSFADKGGAQLYIPRGRWLTGSFNLTSHLTLFLESGAVIVGTQDVSQWPVVEPLPSYGRGMDLPGSRHRSLINGQNLIDVVITGNNGTIDGQGSTWWNWFRSNKLNYSRPHLVEFVDSEQIVISNITFLNSPAWSIHPVYCSNVVVHSVTIQTSLDAPLNHGIVPDSCSNMCIEDSSISVSHDAISLKSGWDKQGIAFGRPTSDIHISRLDLQSSLGAALTFGSEMSGGISDVHADRLLIHSSFRGVFFKTAPGRGGYIRDTVISDVQMEDVDVAIAFTGDWPSHPDDQFDPTALPVVSHITLKNMTGTRISVAGVLSGIAGDPFTDICLSNINFSLADSASPTSHWSCSNVSGYSELVFPEPCLDLQTQSSDASICSTLPSFHAAAIAAA

SEQ ID NO: 34684 - protein, 331 aa, Zea mays subsp. mays
  peptide (1)..(331): Ceres Seq. ID no. 12345178
  misc_feature (1)..(304): Pfam Name: Pfam Description:  Glycosyl hydrolases family 28
  misc_feature (1)..(312): NCBI GI NO: 7939578 NR Description: polygalacturonase-like protein
  misc_feature (1)..(312): NCBI GI NO: 21553827 NR Description: polygalacturonase, putative [Arabidopsis thaliana]
  misc_feature (1)..(312): NCBI GI NO: 15228881 NR Description: polygalacturonase, putative; protein id:At3g16850
  misc_feature (1)..(331): NCBI GI NO: 40714685 NR Description: putative polygalacturonase
  misc_feature (1)..(312): NCBI GI NO: 22327662 NR Description: Expressed protein; protein id: At5g49215
  misc_feature (1)..(314): NCBI GI NO: 30679999 NR Description: polygalacturonase, putative [Arabidopsis thaliana]
  misc_feature (1)..(311): NCBI GI NO: 18412253 NR Description: polygalacturonase, putative; protein id:At3g62110
  misc_feature (1)..(311): NCBI GI NO: 11263971 NR Description: hypothetical protein T17J13
  misc_feature (1)..(314): NCBI GI NO: 18397713 NR Description: polygalacturonase, putative; protein id:At3g06770
  misc_feature (1)..(314): NCBI GI NO: 21593399 NR Description: polygalacturonase-like protein
MDLPGSRHRSLINGQNLIDVVITGNNGTIDGQGSTWWNWFRSNKLNYSRPHLVEFVDSEQIVISNITFLNSPAWSIHPVYCSNVVVHSVTIQTSLDAPLNHGIVPDSCSNMCIEDSSISVSHDAISLKSGWDKQGIAFGRPTSDIHISRLDLQSSLGAALTFGSEMSGGISDVHADRLLIHSSFRGVFFKTAPGRGGYIRDTVISDVQMEDVDVAIAFTGDWPSHPDDQFDPTALPVVSHITLKNMTGTRISVAGVLSGIAGDPFTDICLSNINFSLADSASPTSHWSCSNVSGYSELVFPEPCLDLQTQSSDASICSTLPSFHAAAIAAA

SEQ ID NO: 34685 - DNA, 1534 bp, Zea mays subsp. mays
  misc_feature (1)..(1534): Ceres Seq. ID no. 12411463
agacagaatgttcccttccaagaaggccactagtagcgcagccgcagccgttgccgccgtgagctcaaatgatagcaggcagcaggcgatgtgcgtgcaggccgactcggggtcgggcctcgtcctcaccaccaccccaagccccgcctccgctggaccgtcgagctccacgagcgcttcgtcgacgccgtcacgcagctcggtggccccgacaaggcgactcccaagaccatcatgagggtcatgggagtcaaggggcttaccctctaccacctcaagagccatcttcagaaattcaggttagggaagcagccgcacaaggagttcaacgagcactcggttaaggacgcggccgcagcaatggagatgcaacggaacgccgcctcttcttcaggcatgatgggaagaagcatgaacgaccgcagcgtgcacatgaacgaggctatcaggatgcaaatggaagtccagagaaggctacatgaacagctagaggtgcaaaggcatctccagatgaggatcgaagcccagggcaagtacatgcagtccatcctggagaaagcctaccagaccatcgccaccggcgacctggctgcgtgcagcccggtggctgcagggtacaaatccctgctaggtaacccgcaggcgatgctggacgtctgctcgctcaaggacatggccccgtccatgggcttcccttcgctgcaagacctgcacatgtacggcggcggcggcggccactgcctggacctgcagcagcagatggagcggccgatggaggccttcttcgccagctgcgacatcgggtcgctggccaagaagaggcccgtcagcccttacgccgacgacgacggcggcaagagcccgatgctgtggggcgaggacgacgagggcaagggcatcgtcgaccatttccagatggcgccgccgatgatggacgccgccggcatcgacgtcatggactccatcgccgacgtgtacggcgacgccaagcacatgaccatgtccagcgactccacggggagcaagggcggcggcttcgacgtcaggctcgagcggccatcgctgcggcggccgcacatgggcggcagcccgtcggtgctcggcggaggccagacgaggaacctgtcctacgggtaactagctcgtcgctctgatgatgattaaccatccgatccggcgtgcttaattaattaactcgcagtgaaactaaaattaattaaagcaggcgattattattaaccggtgcaaaacggctacaaataaataagtaaagctagcgctgtagcaggcatgcataatataatggcggagatacatatatatatttatagcataagtgtcattaattcatgatcacgagattgatgatcttaccgtggcgcatcacttgctggatgatgctccaagataatctattttgagcgagaggagatgtatgttccatgtaattgtagtgctgttgatgggtgtaaatgcatgtgcaacttattaattggtaattttgcatgctgaggaaacaatctttctttggtct

SEQ ID NO: 34686 - protein, 300 aa, Zea mays subsp. mays
  peptide (1)..(300): Ceres Seq. ID no. 12411464
  misc_feature (1)..(300): NCBI GI NO: 25406584 NR Description: hypothetical protein T8K14.15
  misc_feature (1)..(300): NCBI GI NO: 30699418 NR Description: transfactor -related [Arabidopsis thaliana]
  misc_feature (1)..(300): NCBI GI NO: 18412370 NR Description: transfactor, putative; protein id: At1g79430
  misc_feature (1)..(109): NCBI GI NO: 18404044 NR Description: transfactor, putative; protein id: At3g24120
  misc_feature (1)..(159): NCBI GI NO: 18414049 NR Description: putative protein; protein id: At4g13640
  misc_feature (1)..(139): NCBI GI NO: 34394528 NR Description: transfactor-like protein
  misc_feature (1)..(112): NCBI GI NO: 22331031 NR Description: regulatory protein of P-starvation acclimationresponse Psr1
  misc_feature (1)..(112): NCBI GI NO: 11994415 NR Description: contains similarity to transfactor~gene_id:MBK21
  misc_feature (1)..(109): NCBI GI NO: 11994231 NR Description: contains similarity to transfactor~gene_id:MUJ8.2
  misc_feature (1)..(124): NCBI GI NO: 32470629 NR Description: putative phosphate starvation response regulator
MRVMGVKGLTLYHLKSHLQKFRLGKQPHKEFNEHSVKDAAAAMEMQRNAASSSGMMGRSMNDRSVHMNEAIRMQMEVQRRLHEQLEVQRHLQMRIEAQGKYMQSILEKAYQTIATGDLAACSPVAAGYKSLLGNPQAMLDVCSLKDMAPSMGFPSLQDLHMYGGGGGHCLDLQQQMERPMEAFFASCDIGSLAKKRPVSPYADDDGGKSPMLWGEDDEGKGIVDHFQMAPPMMDAAGIDVMDSIADVYGDAKHMTMSSDSTGSKGGGFDVRLERPSLRRPHMGGSPSVLGGGQTRNLSYG

SEQ ID NO: 34687 - protein, 297 aa, Zea mays subsp. mays
  peptide (1)..(297): Ceres Seq. ID no. 12411465
  misc_feature (1)..(297): NCBI GI NO: 25406584 NR Description: hypothetical protein T8K14.15
  misc_feature (1)..(297): NCBI GI NO: 30699418 NR Description: transfactor -related [Arabidopsis thaliana]
  misc_feature (1)..(297): NCBI GI NO: 18412370 NR Description: transfactor, putative; protein id: At1g79430
  misc_feature (1)..(106): NCBI GI NO: 18404044 NR Description: transfactor, putative; protein id: At3g24120
  misc_feature (1)..(156): NCBI GI NO: 18414049 NR Description: putative protein; protein id: At4g13640
  misc_feature (1)..(136): NCBI GI NO: 34394528 NR Description: transfactor-like protein
  misc_feature (1)..(109): NCBI GI NO: 22331031 NR Description: regulatory protein of P-starvation acclimationresponse Psr1
  misc_feature (1)..(109): NCBI GI NO: 11994415 NR Description: contains similarity to transfactor~gene_id:MBK21
  misc_feature (1)..(106): NCBI GI NO: 11994231 NR Description: contains similarity to transfactor~gene_id:MUJ8.2
  misc_feature (1)..(121): NCBI GI NO: 32470629 NR Description: putative phosphate starvation response regulator
MGVKGLTLYHLKSHLQKFRLGKQPHKEFNEHSVKDAAAAMEMQRNAASSSGMMGRSMNDRSVHMNEAIRMQMEVQRRLHEQLEVQRHLQMRIEAQGKYMQSILEKAYQTIATGDLAACSPVAAGYKSLLGNPQAMLDVCSLKDMAPSMGFPSLQDLHMYGGGGGHCLDLQQQMERPMEAFFASCDIGSLAKKRPVSPYADDDGGKSPMLWGEDDEGKGIVDHFQMAPPMMDAAGIDVMDSIADVYGDAKHMTMSSDSTGSKGGGFDVRLERPSLRRPHMGGSPSVLGGGQTRNLSYG

SEQ ID NO: 34688 - protein, 258 aa, Zea mays subsp. mays
  peptide (1)..(258): Ceres Seq. ID no. 12411466
  misc_feature (1)..(258): NCBI GI NO: 25406584 NR Description: hypothetical protein T8K14.15
  misc_feature (1)..(258): NCBI GI NO: 30699418 NR Description: transfactor -related [Arabidopsis thaliana]
  misc_feature (1)..(258): NCBI GI NO: 18412370 NR Description: transfactor, putative; protein id: At1g79430
  misc_feature (1)..(67): NCBI GI NO: 18404044 NR Description: transfactor, putative; protein id: At3g24120
  misc_feature (1)..(117): NCBI GI NO: 18414049 NR Description: putative protein; protein id: At4g13640
  misc_feature (1)..(97): NCBI GI NO: 34394528 NR Description: transfactor-like protein
  misc_feature (1)..(70): NCBI GI NO: 22331031 NR Description: regulatory protein of P-starvation acclimationresponse Psr1
  misc_feature (1)..(70): NCBI GI NO: 11994415 NR Description: contains similarity to transfactor~gene_id:MBK21
  misc_feature (1)..(67): NCBI GI NO: 11994231 NR Description: contains similarity to transfactor~gene_id:MUJ8.2
  misc_feature (1)..(82): NCBI GI NO: 32470629 NR Description: putative phosphate starvation response regulator
MEMQRNAASSSGMMGRSMNDRSVHMNEAIRMQMEVQRRLHEQLEVQRHLQMRIEAQGKYMQSILEKAYQTIATGDLAACSPVAAGYKSLLGNPQAMLDVCSLKDMAPSMGFPSLQDLHMYGGGGGHCLDLQQQMERPMEAFFASCDIGSLAKKRPVSPYADDDGGKSPMLWGEDDEGKGIVDHFQMAPPMMDAAGIDVMDSIADVYGDAKHMTMSSDSTGSKGGGFDVRLERPSLRRPHMGGSPSVLGGGQTRNLSYG

SEQ ID NO: 34689 - DNA, 1292 bp, Zea mays subsp. mays
  misc_feature (1)..(1292): Ceres Seq. ID no. 12411459
aatctacgcaacacaaggtaggatcaatcaatcaagtccatcatgctgccaagttctctcctccagaggctggcaagttggtgcccgtggttgctgagagatgagccgaagcagcctgttaaggttctcgtcaccggcgctgcggggcagattgggtacgccatagtcgccatgatcgcgaggggtctgatgcttgggccagaccagccggtggttctccacatgctggacctccctaagtcaacggacgccctgagcggcgtcaggatggagctgatcgatgccgcgttgcctcttctcagaggtgtcgtggctacgagtgacgaggccgaagcgttccgaggcgtcagcttcgccgtcctgatcggcggatggccgagaaaagaggggatgcagaggaaagacctcatcgccaagaacgtccccatataccagtcccaggcctctgcgctgcagcagcacgctgccccaaactgcaaggttcttgtcgtggcaaaccctgcgaacacgaacgcgctcgtgctgaaggagttggcgcccgcggtgcccgccaagaacatcacctgcctcacgcgtctcgaccacaaccgcgccctgggccagatctccgagaagctgggcgtgcacatcggcgacgtcaggaacgccatagtgtgggggaaccactcctccacgcagttccccgacgccagccacgccatcgccaggacgcagcacggggagaagcccgtcagggagctcatcgccgacgagaaatggtttaaggaggagttcgtcagcgtcgtgcagcagcgcggcgaggcggtgatcaaggcgcgcaagcagtccagctcgctgtccgccgccagtgcggcctgtgatcacatgagagactggatccttggcaccccgaagggcacgtgggtgtctatgggtgtgtgctctgacgggagctatggcgttcccaagggcatcttctactcatttccggtgacatgcgagaagggagagtggtctatcgtgcagggtgagttcttatcattataccagattagtagcaacagcagcaccaccgttcttgacatgatttgtttattgttcgaggtcttgaggttgatgacttcgcacgatccaagatggagctttcggcgaatgaactcgatgaagagaggtccatggcgtatgagttcgtcgccagctctgaaagccatcagtagatcacttgtgtatacatgagtcatatgtaaacgaaaaaaatgggtgaacaacagacagttgcttcacaacaaccaataaagcagaaatattgcttg

SEQ ID NO: 34690 - protein, 390 aa, Zea mays subsp. mays
  peptide (1)..(390): Ceres Seq. ID no. 12411460
  misc_feature (177)..(322): Pfam Name: Pfam Description:  lactate/malate dehydrogenase
  misc_feature (1)..(322): NCBI GI NO: 38345463 NR Description: OSJNBa0010H02.1
  misc_feature (1)..(284): NCBI GI NO: 38605860 NR Description: OSJNBb0034G17.18
  misc_feature (284)..(322): NCBI GI NO: 38605860 NR Description: OSJNBb0034G17.18
  misc_feature (23)..(322): NCBI GI NO: 37535388 NR Description: cytoplasmic malate dehydrogenase
  misc_feature (23)..(322): NCBI GI NO: 10798652 NR Description: malate dehydrogenase [Nicotiana tabacum]
  misc_feature (23)..(322): NCBI GI NO: 18202485 NR Description: Malate dehydrogenase, cytoplasmic
  misc_feature (23)..(331): NCBI GI NO: 10334493 NR Description: cytosolic malate dehydrogenase [Cicer arietinum]
  misc_feature (23)..(322): NCBI GI NO: 21593565 NR Description: cytosolic malate dehydrogenase
  misc_feature (23)..(322): NCBI GI NO: 15239843 NR Description: cytosolic malate dehydrogenase
  misc_feature (24)..(322): NCBI GI NO: 12229778 NR Description: Malate dehydrogenase, cytoplasmic
MLPSSLLQRLASWCPWLLRDEPKQPVKVLVTGAAGQIGYAIVAMIARGLMLGPDQPVVLHMLDLPKSTDALSGVRMELIDAALPLLRGVVATSDEAEAFRGVSFAVLIGGWPRKEGMQRKDLIAKNVPIYQSQASALQQHAAPNCKVLVVANPANTNALVLKELAPAVPAKNITCLTRLDHNRALGQISEKLGVHIGDVRNAIVWGNHSSTQFPDASHAIARTQHGEKPVRELIADEKWFKEEFVSVVQQRGEAVIKARKQSSSLSAASAACDHMRDWILGTPKGTWVSMGVCSDGSYGVPKGIFYSFPVTCEKGEWSIVQGEFLSLYQISSNSSTTVLDMICLLFEVLRLMTSHDPRWSFRRMNSMKRGPWRMSSSPALKAISRSLVYT

SEQ ID NO: 34691 - protein, 347 aa, Zea mays subsp. mays
  peptide (1)..(347): Ceres Seq. ID no. 12411461
  misc_feature (134)..(279): Pfam Name: Pfam Description:  lactate/malate dehydrogenase
  misc_feature (1)..(279): NCBI GI NO: 38345463 NR Description: OSJNBa0010H02.1
  misc_feature (1)..(241): NCBI GI NO: 38605860 NR Description: OSJNBb0034G17.18
  misc_feature (241)..(279): NCBI GI NO: 38605860 NR Description: OSJNBb0034G17.18
  misc_feature (1)..(279): NCBI GI NO: 37535388 NR Description: cytoplasmic malate dehydrogenase
  misc_feature (1)..(279): NCBI GI NO: 10798652 NR Description: malate dehydrogenase [Nicotiana tabacum]
  misc_feature (1)..(279): NCBI GI NO: 18202485 NR Description: Malate dehydrogenase, cytoplasmic
  misc_feature (1)..(288): NCBI GI NO: 10334493 NR Description: cytosolic malate dehydrogenase [Cicer arietinum]
  misc_feature (1)..(279): NCBI GI NO: 21593565 NR Description: cytosolic malate dehydrogenase
  misc_feature (1)..(279): NCBI GI NO: 15239843 NR Description: cytosolic malate dehydrogenase
  misc_feature (1)..(279): NCBI GI NO: 12229778 NR Description: Malate dehydrogenase, cytoplasmic
MIARGLMLGPDQPVVLHMLDLPKSTDALSGVRMELIDAALPLLRGVVATSDEAEAFRGVSFAVLIGGWPRKEGMQRKDLIAKNVPIYQSQASALQQHAAPNCKVLVVANPANTNALVLKELAPAVPAKNITCLTRLDHNRALGQISEKLGVHIGDVRNAIVWGNHSSTQFPDASHAIARTQHGEKPVRELIADEKWFKEEFVSVVQQRGEAVIKARKQSSSLSAASAACDHMRDWILGTPKGTWVSMGVCSDGSYGVPKGIFYSFPVTCEKGEWSIVQGEFLSLYQISSNSSTTVLDMICLLFEVLRLMTSHDPRWSFRRMNSMKRGPWRMSSSPALKAISRSLVYT

SEQ ID NO: 34692 - protein, 341 aa, Zea mays subsp. mays
  peptide (1)..(341): Ceres Seq. ID no. 12411462
  misc_feature (128)..(273): Pfam Name: Pfam Description:  lactate/malate dehydrogenase
  misc_feature (1)..(273): NCBI GI NO: 38345463 NR Description: OSJNBa0010H02.1
  misc_feature (1)..(235): NCBI GI NO: 38605860 NR Description: OSJNBb0034G17.18
  misc_feature (235)..(273): NCBI GI NO: 38605860 NR Description: OSJNBb0034G17.18
  misc_feature (1)..(273): NCBI GI NO: 37535388 NR Description: cytoplasmic malate dehydrogenase
  misc_feature (1)..(273): NCBI GI NO: 10798652 NR Description: malate dehydrogenase [Nicotiana tabacum]
  misc_feature (1)..(273): NCBI GI NO: 18202485 NR Description: Malate dehydrogenase, cytoplasmic
  misc_feature (1)..(282): NCBI GI NO: 10334493 NR Description: cytosolic malate dehydrogenase [Cicer arietinum]
  misc_feature (1)..(273): NCBI GI NO: 21593565 NR Description: cytosolic malate dehydrogenase
  misc_feature (1)..(273): NCBI GI NO: 15239843 NR Description: cytosolic malate dehydrogenase
  misc_feature (1)..(273): NCBI GI NO: 12229778 NR Description: Malate dehydrogenase, cytoplasmic
MLGPDQPVVLHMLDLPKSTDALSGVRMELIDAALPLLRGVVATSDEAEAFRGVSFAVLIGGWPRKEGMQRKDLIAKNVPIYQSQASALQQHAAPNCKVLVVANPANTNALVLKELAPAVPAKNITCLTRLDHNRALGQISEKLGVHIGDVRNAIVWGNHSSTQFPDASHAIARTQHGEKPVRELIADEKWFKEEFVSVVQQRGEAVIKARKQSSSLSAASAACDHMRDWILGTPKGTWVSMGVCSDGSYGVPKGIFYSFPVTCEKGEWSIVQGEFLSLYQISSNSSTTVLDMICLLFEVLRLMTSHDPRWSFRRMNSMKRGPWRMSSSPALKAISRSLVYT

SEQ ID NO: 34693 - DNA, 1981 bp, Zea mays subsp. mays
  misc_feature (1)..(1981): Ceres Seq. ID no. 12372957
aaccaactcatgctcgacggaccacctcgtcggagcttcgcatttatcgtgccgtccatgtccatgcaacagccgacgaacgccgcaagccaacttcacgccgcgatggaagcgccattgtcgctctcgtcactgcagctcgccttcacggcggtcgcggcgatcgcggcgctggccgtcgcggtggccgtcacgaggtacaaccggagatacatgggcctgaggctgcctccgggcccgcccgggtggcccgtcgtcggcaacctcttccaggtggcgttctccggcaagctcttcatccactacatccgcgagctccgcaaggagtacggccccatcctgacgctgcgcatgggggagcgcacgctcgtgatcatcagcagcgccgagctcgcgcacgaggcgctggtggagaaagggcgggagttcgcgagccggccccgggagaacaccacgcgcaacatcttctcgtccaacaagctcaccgtgaactccgcggtgtacgggcccgagtggcggtcgctcgccggaacatggtgtccgggatgctgagcacgtcgcggctcagggagttccggcacgcccggaggcgcgccatggaccggttcgtgtcgcggatgcgcgccgaggccgcggcgtcgcccgacggcgcgtccgtctgggtgctccgcaacgcgcggttcgccgtgttctgcatcctgctcgacatgaccttcggcctgctggacctccgcgaggagcacatcgtgcgcatcgacgccgtcatgaagcgcgtgctgctcgccgtcggcgtgcgcatggacgactacctcccgttcctccgcccgttcttctggcggcaccagcgccgtgccctcgccgtccgccgcgagcagatcgacaccctgctcccgctcatcaacaggcggcgcgcaatgcttcgcgacatgcagcagaggcagagctcatcgccgctgcccgaccccagcgtcgcagcgcccttctcgtacctcgactccgtgctcgacctccgcatcgagggccgcgacgacggcgcgctcaccgacgacgagctggtgacgctctgcgcggagctgttgaatggcggcaccgacaccacggccaccgcgatcgagtggggcatggcgcgcatcgtggacagcccgtccatccaggcacggctccacgaggaggtcatgcagcaggtcggcgacgcgcggccggtcgacgacaaggacaccgacgccatgccgtacctccaggccttcgtgaaggagctgctccggaagcacccgcccacgtacttctcgctcacccacgccgctgtgcagccgggatgcaagctcgccggctacgacgtgcccgtggacgcgaacctggacatcttcctcccgaccatctccgaggacccaaagctgtgggaccggccgacggagttcgacccggacaggttcgtgtccggcggcgagacggcggacatgacggggtcagcggggatccggatgatcccgttcggcgcggggcggaggatctgccctgggcttgccatggggacgacgcacatcgccctgatggtggcgcggatggtgcaggcgttcgagtggcgcgcgcacccgtcgcagccgcagctggacttcaaggacaaggtggagttcacggtggtgatggatcggccgctgctggccgcagtgaagccgcgaaacctcgcgttctgatcggacgggcggacggacgcgcgcatgcatggctacagtgtgcgcgtgtcagctagcgtggcagtacgacatcgctcgtaccgtcgtacgtgtgctctgcacgcccagctgcaccacgcatcgccgtttggctatgcatgcatgcatgctagccgcccatgagttgtggacgccactactgtcgtgtactcgtgtctgtatgatgtaacatacacggaaatgctagacgtttgcatatgtgtgtggatgtgtacgtactacgtatataagaatgaactcttttgtgc

SEQ ID NO: 34694 - protein, 563 aa, Zea mays subsp. mays
  peptide (1)..(563): Ceres Seq. ID no. 12372958
  misc_feature (175)..(558): Pfam Name: Pfam Description:  Cytochrome P450
  misc_feature (175)..(563): NCBI GI NO: 38347596 NR Description: OSJNBa0042I15.9
  misc_feature (175)..(559): NCBI GI NO: 15238249 NR Description: cytochrome p450, putative; protein id: At5g04660
  misc_feature (175)..(559): NCBI GI NO: 21595357 NR Description: cytochrom P450-like protein [Arabidopsis thaliana]
  misc_feature (175)..(559): NCBI GI NO: 584867 NR Description: Cytochrome P450 77A2 (CYPLXXVIIA2) (P-450EG5)
  misc_feature (175)..(559): NCBI GI NO: 5915821 NR Description: Cytochrome P450 77A3
  misc_feature (175)..(559): NCBI GI NO: 15228331 NR Description: cytochrome p450, putative; protein id: At3g10570.1
  misc_feature (175)..(559): NCBI GI NO: 28393336 NR Description: putative cytochrome p450 [Arabidopsis thaliana]
  misc_feature (175)..(559): NCBI GI NO: 584866 NR Description: Cytochrome P450 77A1 (CYPLXXVIIA1) (P-450EG6)
  misc_feature (175)..(559): NCBI GI NO: 542070 NR Description: cytochrome P450 77A1 - eggplant (fragment)
  misc_feature (175)..(559): NCBI GI NO: 15238242 NR Description: cytochrome p450 monooxygenase, putative
PTHARRTTSSELRIYRAVHVHATADERRKPTSRRDGSAIVALVTAARLHGGRGDRGAGRRGGRHEVQPEIHGPEAASGPARVARRRQPLPGGVLRQALHPLHPRAPQGVRPHPDAAHGGAHARDHQQRRARARGAGGERAGVREPAPGEHHAQHLLVQQAHRELRGVRARVAVARRNMVSGMLSTSRLREFRHARRRAMDRFVSRMRAEAAASPDGASVWVLRNARFAVFCILLDMTFGLLDLREEHIVRIDAVMKRVLLAVGVRMDDYLPFLRPFFWRHQRRALAVRREQIDTLLPLINRRRAMLRDMQQRQSSSPLPDPSVAAPFSYLDSVLDLRIEGRDDGALTDDELVTLCAELLNGGTDTTATAIEWGMARIVDSPSIQARLHEEVMQQVGDARPVDDKDTDAMPYLQAFVKELLRKHPPTYFSLTHAAVQPGCKLAGYDVPVDANLDIFLPTISEDPKLWDRPTEFDPDRFVSGGETADMTGSAGIRMIPFGAGRRICPGLAMGTTHIALMVARMVQAFEWRAHPSQPQLDFKDKVEFTVVMDRPLLAAVKPRNLAF

SEQ ID NO: 34695 - protein, 386 aa, Zea mays subsp. mays
  peptide (1)..(386): Ceres Seq. ID no. 12372959
  misc_feature (1)..(381): Pfam Name: Pfam Description:  Cytochrome P450
  misc_feature (1)..(386): NCBI GI NO: 38347596 NR Description: OSJNBa0042I15.9
  misc_feature (1)..(382): NCBI GI NO: 15238249 NR Description: cytochrome p450, putative; protein id: At5g04660
  misc_feature (1)..(382): NCBI GI NO: 21595357 NR Description: cytochrom P450-like protein [Arabidopsis thaliana]
  misc_feature (1)..(382): NCBI GI NO: 584867 NR Description: Cytochrome P450 77A2 (CYPLXXVIIA2) (P-450EG5)
  misc_feature (1)..(382): NCBI GI NO: 5915821 NR Description: Cytochrome P450 77A3
  misc_feature (1)..(382): NCBI GI NO: 15228331 NR Description: cytochrome p450, putative; protein id: At3g10570.1
  misc_feature (1)..(382): NCBI GI NO: 28393336 NR Description: putative cytochrome p450 [Arabidopsis thaliana]
  misc_feature (1)..(382): NCBI GI NO: 584866 NR Description: Cytochrome P450 77A1 (CYPLXXVIIA1) (P-450EG6)
  misc_feature (1)..(382): NCBI GI NO: 542070 NR Description: cytochrome P450 77A1 - eggplant (fragment)
  misc_feature (1)..(382): NCBI GI NO: 15238242 NR Description: cytochrome p450 monooxygenase, putative
MVSGMLSTSRLREFRHARRRAMDRFVSRMRAEAAASPDGASVWVLRNARFAVFCILLDMTFGLLDLREEHIVRIDAVMKRVLLAVGVRMDDYLPFLRPFFWRHQRRALAVRREQIDTLLPLINRRRAMLRDMQQRQSSSPLPDPSVAAPFSYLDSVLDLRIEGRDDGALTDDELVTLCAELLNGGTDTTATAIEWGMARIVDSPSIQARLHEEVMQQVGDARPVDDKDTDAMPYLQAFVKELLRKHPPTYFSLTHAAVQPGCKLAGYDVPVDANLDIFLPTISEDPKLWDRPTEFDPDRFVSGGETADMTGSAGIRMIPFGAGRRICPGLAMGTTHIALMVARMVQAFEWRAHPSQPQLDFKDKVEFTVVMDRPLLAAVKPRNLAF

SEQ ID NO: 34696 - protein, 382 aa, Zea mays subsp. mays
  peptide (1)..(382): Ceres Seq. ID no. 12372960
  misc_feature (1)..(377): Pfam Name: Pfam Description:  Cytochrome P450
  misc_feature (1)..(382): NCBI GI NO: 38347596 NR Description: OSJNBa0042I15.9
  misc_feature (1)..(378): NCBI GI NO: 15238249 NR Description: cytochrome p450, putative; protein id: At5g04660
  misc_feature (1)..(378): NCBI GI NO: 21595357 NR Description: cytochrom P450-like protein [Arabidopsis thaliana]
  misc_feature (1)..(378): NCBI GI NO: 584867 NR Description: Cytochrome P450 77A2 (CYPLXXVIIA2) (P-450EG5)
  misc_feature (1)..(378): NCBI GI NO: 5915821 NR Description: Cytochrome P450 77A3
  misc_feature (1)..(378): NCBI GI NO: 15228331 NR Description: cytochrome p450, putative; protein id: At3g10570.1
  misc_feature (1)..(378): NCBI GI NO: 28393336 NR Description: putative cytochrome p450 [Arabidopsis thaliana]
  misc_feature (1)..(378): NCBI GI NO: 584866 NR Description: Cytochrome P450 77A1 (CYPLXXVIIA1) (P-450EG6)
  misc_feature (1)..(378): NCBI GI NO: 542070 NR Description: cytochrome P450 77A1 - eggplant (fragment)
  misc_feature (1)..(378): NCBI GI NO: 15238242 NR Description: cytochrome p450 monooxygenase, putative
MLSTSRLREFRHARRRAMDRFVSRMRAEAAASPDGASVWVLRNARFAVFCILLDMTFGLLDLREEHIVRIDAVMKRVLLAVGVRMDDYLPFLRPFFWRHQRRALAVRREQIDTLLPLINRRRAMLRDMQQRQSSSPLPDPSVAAPFSYLDSVLDLRIEGRDDGALTDDELVTLCAELLNGGTDTTATAIEWGMARIVDSPSIQARLHEEVMQQVGDARPVDDKDTDAMPYLQAFVKELLRKHPPTYFSLTHAAVQPGCKLAGYDVPVDANLDIFLPTISEDPKLWDRPTEFDPDRFVSGGETADMTGSAGIRMIPFGAGRRICPGLAMGTTHIALMVARMVQAFEWRAHPSQPQLDFKDKVEFTVVMDRPLLAAVKPRNLAF

SEQ ID NO: 34697 - DNA, 1221 bp, Zea mays subsp. mays
  misc_feature (1)..(1221): Ceres Seq. ID no. 12411455
ttcttcggctatccgctggcagccgagcaggcccaagtggtgcgtcctgttcacccacggcgcctgcgtcggccctgcccgaactggcgtgcagagcagtgctccacgacgccgccaccacctgccccagcagcggcacgctccgacaacggcgaccatggcggtgcgggcgcgggggctggggagtgttccctgctagatccagtagatggccgactcatcgaggccctccgtgaatatcatctgcgccggtcgtctgctcggctgcagtggattaggtgagcgggattccggtagaggattgtttagtttgggattctaggttcctcgctcccgtgccagagacggcgctggacgttgaggtcagggccccggcggcgcggcgcgtcgcggagaggaaggcgcggaagcggtccgagcggcgcacctacctggtggccgccatgatgtccaacctcggggtcacgtccatggccgtcgccgccgtgtactatcgcttcagctggcaaatggagggcggcgcggtcccggtgagcgagatgttcggcacgtttgcgctctccgtcggcgaggcggtcgggatggagttctgggcgcggtgggcgcaccgggcgctatggcacgcctccctgtggcacatgcacgagtcgcaccaccggccgcgcgagggcccattcgagctcaacgacgtgttcgccatcgtcaacgccgtgtcggccatctccctcctcggtgacgtcgtgagcagatacaccacatggacaagtttgagggcgtcccgtatgggctcttcctgggaccaaaggagctggaggaggtcgatggcctggacgagctggaaaaggagctcgcgtgaatcggccggaccatctgatggattcatccggattccggcgcggcgatctccgctccgctccgtgattccggcgcagcctcatggttggggagccgacgaccagaacctccagaagggatttggtttggatgcgcgagcatagatcttgacctgcatttcggatggtctgtggaggcacagctcgtacctggagatgtctggtgccatggaattacttttcttttcttcttttcctgacattttcacgccgacgtctttatttgtggagacgtcgcacgttctggcccatgtattactgttcttatggctaggattctgtatataacttgtagagacatgttatgaaccaccagctcaatgaagct

SEQ ID NO: 34698 - protein, 184 aa, Zea mays subsp. mays
  peptide (1)..(184): Ceres Seq. ID no. 12411456
  misc_feature (34)..(96): Pfam Name: Pfam Description:  Carotene hydroxylase
  misc_feature (1)..(96): NCBI GI NO: 32488500 NR Description: OSJNBa0011J08.7
  misc_feature (1)..(96): NCBI GI NO: 11245486 NR Description: beta-carotene hydroxylase [Citrus unshiu]
  misc_feature (1)..(96): NCBI GI NO: 9988836 NR Description: beta-carotene hydroxylase [Citrus unshiu]
  misc_feature (1)..(96): NCBI GI NO: 21734857 NR Description: beta-carotene hydroxylase [Vitis vinifera]
  misc_feature (1)..(96): NCBI GI NO: 33145986 NR Description: beta-carotene hydroxylase [Crocus sativus]
  misc_feature (1)..(96): NCBI GI NO: 2956717 NR Description: beta-carotene hydroxylase 2 [Capsicum annuum]
  misc_feature (1)..(96): NCBI GI NO: 37536402 NR Description: putative beta-carotene hydroxylase
  misc_feature (1)..(96): NCBI GI NO: 5870600 NR Description: beta-carotene hydroxylase
  misc_feature (1)..(96): NCBI GI NO: 5870598 NR Description: beta-carotene hydroxylase
  misc_feature (1)..(96): NCBI GI NO: 9968545 NR Description: beta-carotene hydroxylase
MMSNLGVTSMAVAAVYYRFSWQMEGGAVPVSEMFGTFALSVGEAVGMEFWARWAHRALWHASLWHMHESHHRPREGPFELNDVFAIVNAVSAISLLGDVVSRYTTWTSLRASRMGSSWDQRSWRRSMAWTSWKRSSRESAGPSDGFIRIPARRSPLRSVIPAQPHGWGADDQNLQKGFGLDARA

SEQ ID NO: 34699 - protein, 183 aa, Zea mays subsp. mays
  peptide (1)..(183): Ceres Seq. ID no. 12411457
  misc_feature (33)..(95): Pfam Name: Pfam Description:  Carotene hydroxylase
  misc_feature (1)..(95): NCBI GI NO: 32488500 NR Description: OSJNBa0011J08.7
  misc_feature (1)..(95): NCBI GI NO: 11245486 NR Description: beta-carotene hydroxylase [Citrus unshiu]
  misc_feature (1)..(95): NCBI GI NO: 9988836 NR Description: beta-carotene hydroxylase [Citrus unshiu]
  misc_feature (1)..(95): NCBI GI NO: 21734857 NR Description: beta-carotene hydroxylase [Vitis vinifera]
  misc_feature (1)..(95): NCBI GI NO: 33145986 NR Description: beta-carotene hydroxylase [Crocus sativus]
  misc_feature (1)..(95): NCBI GI NO: 2956717 NR Description: beta-carotene hydroxylase 2 [Capsicum annuum]
  misc_feature (1)..(95): NCBI GI NO: 37536402 NR Description: putative beta-carotene hydroxylase
  misc_feature (1)..(95): NCBI GI NO: 5870600 NR Description: beta-carotene hydroxylase
  misc_feature (1)..(95): NCBI GI NO: 5870598 NR Description: beta-carotene hydroxylase
  misc_feature (1)..(95): NCBI GI NO: 9968545 NR Description: beta-carotene hydroxylase
MSNLGVTSMAVAAVYYRFSWQMEGGAVPVSEMFGTFALSVGEAVGMEFWARWAHRALWHASLWHMHESHHRPREGPFELNDVFAIVNAVSAISLLGDVVSRYTTWTSLRASRMGSSWDQRSWRRSMAWTSWKRSSRESAGPSDGFIRIPARRSPLRSVIPAQPHGWGADDQNLQKGFGLDARA

SEQ ID NO: 34700 - protein, 175 aa, Zea mays subsp. mays
  peptide (1)..(175): Ceres Seq. ID no. 12411458
  misc_feature (25)..(87): Pfam Name: Pfam Description:  Carotene hydroxylase
  misc_feature (1)..(87): NCBI GI NO: 32488500 NR Description: OSJNBa0011J08.7
  misc_feature (1)..(87): NCBI GI NO: 11245486 NR Description: beta-carotene hydroxylase [Citrus unshiu]
  misc_feature (1)..(87): NCBI GI NO: 9988836 NR Description: beta-carotene hydroxylase [Citrus unshiu]
  misc_feature (1)..(87): NCBI GI NO: 21734857 NR Description: beta-carotene hydroxylase [Vitis vinifera]
  misc_feature (1)..(87): NCBI GI NO: 33145986 NR Description: beta-carotene hydroxylase [Crocus sativus]
  misc_feature (1)..(87): NCBI GI NO: 2956717 NR Description: beta-carotene hydroxylase 2 [Capsicum annuum]
  misc_feature (1)..(87): NCBI GI NO: 37536402 NR Description: putative beta-carotene hydroxylase
  misc_feature (1)..(87): NCBI GI NO: 5870600 NR Description: beta-carotene hydroxylase
  misc_feature (1)..(87): NCBI GI NO: 5870598 NR Description: beta-carotene hydroxylase
  misc_feature (1)..(87): NCBI GI NO: 9968545 NR Description: beta-carotene hydroxylase
MAVAAVYYRFSWQMEGGAVPVSEMFGTFALSVGEAVGMEFWARWAHRALWHASLWHMHESHHRPREGPFELNDVFAIVNAVSAISLLGDVVSRYTTWTSLRASRMGSSWDQRSWRRSMAWTSWKRSSRESAGPSDGFIRIPARRSPLRSVIPAQPHGWGADDQNLQKGFGLDARA

SEQ ID NO: 34701 - DNA, 1323 bp, Zea mays subsp. mays
  misc_feature (1)..(1323): Ceres Seq. ID no. 12376296
attgcttcgaacccacttgatcgctgcgtcgtctcccgggccggccctcagcgagctctcccgtacgtgcgcagttctcggcacgctaccccttatataccccccggccgctctcgctctagatgcacaggcagtgacacgcgcgcataccgacggactaggtagctgctcatcagctatccagatcgttgctcctcccctcgccatcggccgcgcccgtgtcgggcggcgggaatgggacgccacgcgggctccggcggcggcgtgcagcagaagctgcgcaagggcctctggtcgcccgaggaagacgagaagctctacaaccacatcatccactacggcgtcgggtgctggagctccgtgcccaagctctcagggctgcagaggtgcggcaagagctgccgccttcggtggatcaactacctgcgccccgacctgaagcggggcagcttctcgcagcaggaggaggacgccatcgtcggcctccatgagatcctgggcaacagatggtcgcagatcgcgtcgcacttgccgggccgaacggacaacgagatcaagaacttctggaacagctgcctcaagaagaagctgcgccagcgcggcatcgaccccagcacccacaagcccatctccgccgacgcggcggcattggagcagccggcgtcgcgagaccgcaagccgtcgttggccacagccgccgctggtggcggcctcgatgtgaagcagcatcagcagcagcagcaggtgttcgacccgttcccgctgaccgacagcttcggcggcggcttcgacgacgcggccggcgccgcattgtacggccacatgggcggcggcggcaagcagcaggacgcggccgcgttcgtggactacagcagcgtgctggacgtgtcggagaacctgggctacggcgagagctccagcaacagcagcaacaactggaactgcgcgccggaggtgaacaacaacaacaatgcgctggacggcggcgacgcgccgctgcactgggcctccgagagcaaggccgcgcccttcgccggctacggcgccgaggagcagtcgctgctggagcacaagctccttccgcatttcgacttcgacatcggccgggccgccgtggtcggcgacttcagcctcgacttcttctgaagggttcttcagccctgcgggtataatcatcgatcgccgtgcccgtgtatgtactgtatcaaagccaattcatacggaacagtcgggagcttagagaccgcgctttgttaattctcctctagtcgtccttactcagcagctctcctcctttaacaatgttttgggcttcttcgtttc

SEQ ID NO: 34702 - protein, 303 aa, Zea mays subsp. mays
  peptide (1)..(303): Ceres Seq. ID no. 12376297
  misc_feature (17)..(64): Pfam Name: Pfam Description:  Myb-like DNA-binding domain
  misc_feature (1)..(303): NCBI GI NO: 34911526 NR Description: putative myb-related protein
  misc_feature (1)..(283): NCBI GI NO: 547958 NR Description: Myb-related protein Hv33
  misc_feature (1)..(283): NCBI GI NO: 19059 NR Description: MybHv33 [Hordeum vulgare subsp. vulgare]
  misc_feature (1)..(303): NCBI GI NO: 25458597 NR Description: probable myb-related protein [imported] - rice
  misc_feature (36)..(262): NCBI GI NO: 227031 NR Description: myb-related gene Hv33
  misc_feature (1)..(241): NCBI GI NO: 34913750 NR Description: OSJNBa0051H17.23
  misc_feature (1)..(147): NCBI GI NO: 34902542 NR Description: putative transcription factor (myb)
  misc_feature (12)..(192): NCBI GI NO: 28927688 NR Description: putative Myb-like DNA-binding protein
  misc_feature (5)..(133): NCBI GI NO: 34913340 NR Description: contains ESTsAU101387
  misc_feature (12)..(157): NCBI GI NO: 28628949 NR Description: MYB2 [Dendrobium sp. XMW-2002-2]
MGRHAGSGGGVQQKLRKGLWSPEEDEKLYNHIIHYGVGCWSSVPKLSGLQRCGKSCRLRWINYLRPDLKRGSFSQQEEDAIVGLHEILGNRWSQIASHLPGRTDNEIKNFWNSCLKKKLRQRGIDPSTHKPISADAAALEQPASRDRKPSLATAAAGGGLDVKQHQQQQQVFDPFPLTDSFGGGFDDAAGAALYGHMGGGGKQQDAAAFVDYSSVLDVSENLGYGESSSNSSNNWNCAPEVNNNNNALDGGDAPLHWASESKAAPFAGYGAEEQSLLEHKLLPHFDFDIGRAAVVGDFSLDFF

SEQ ID NO: 34703 - protein, 221 aa, Zea mays subsp. mays
  peptide (1)..(221): Ceres Seq. ID no. 12376298
MVADRVALAGPNGQRDQELLEQLPQEEAAPARHRPQHPQAHLRRRGGIGAAGVARPQAVVGHSRRWWRPRCEAASAAAAGVRPVPADRQLRRRLRRRGRRRIVRPHGRRRQAAGRGRVRGLQQRAGRVGEPGLRRELQQQQQQLELRAGGEQQQQCAGRRRRAAALGLREQGRALRRLRRRGAVAAGAQAPSAFRLRHRPGRRGRRLQPRLLLKGSSALRV

SEQ ID NO: 34704 - DNA, 1824 bp, Zea mays subsp. mays
  misc_feature (1)..(1824): Ceres Seq. ID no. 12593647
gcacgagaccattacctagaacatcctaatcgaaaaatttcattctttgtttgtttcagcctttcacggaagaggggcggagtacgtaaggtgaacccggtcgtctgaagagaagcgaggacgacgtaggagaggggaggacagcgagatggccggcgggtttggcagcggcggggcagccgccgggagggccgagctctacgagggcaagatcaccggctacttcatcctcgcttgcatcgtcggctccttcggcggatccctcttcggctatgacctcggagtctccagcggcgtgacttccatggacgacttcctggtgaagttcttcccggacgtgtaccggcggaagcaggcgcacctccacgagacggactactgcaagtacgacaaccaggtgctgacgctcttcacctcgtcgctctacttcgcgggcctcgtctccaccttcggcgcctcctacgtgaccaagcgccacggccggcgcgccagcatcatggtgggcgccgccagcttcttcctcggcggcgccatcaacgcggccgccatgaacatcgccatgctcatcgtcggccgcgtgctcctcggcgtcggcatcggcttcggcaaccaggccgtgccgctctacctctcggagatcgcgccctaccgcatccgcggcgccgtgaaccagctcttccagctcaccacctgcctcggcatcctcgtcgccgacgtcatcaactacttcaccgaccgcctgcacccctgggggtggcgcctctcgctgggcctcgccatgggcccggccaccgccatcttcgtcggcgcgctcttccttcccgagacgcccaacagcctcgtcgagcgcgggcacctggaggaggcccgccgcgtgctggagaaggtgcgcggcacgcacaaggtggacgccgagttcgaggacctcaaggaggccagccaggccgcgcgcgccgtcacgggcacgttccggaacctgctcgccgtgcgcaaccgcccgcagctcatcatcggcgcgctcggcatcccggcgttccagcagctgtcgggcatgaactccatcctcttctactcgcccgtcatcttccagagccttggattcggctcctccgcggcgctctactcctccatcatcaccggctccatgctcgtcgtcggcgcgctcatctccatggttaccgtcgaccgccttggccgccgcttcctcttcatcgaggcgggcattcagatggtctcatccatggtcgtggtggctgtgatccttgccctcaagttcggaaaaggcgaggagctgagcaagggcgtgagcacggtgctggtggtggccatctgcctcttcgtggtggcctacggatggtcctgggggcccctcggatggctggtgccgagcgagctgttcccgctggagatgcggtcggcggggcagagcgtggtggtgtgcgtcaacctcttctggacggcttccgtagcgcagtgcttcctcgccgcgctgtgccacctccggtggggcgtcttcgtgctcttcgccgcgctcatcgtcgtcatgtccatcttcgtcatcctcctgctgccggagaccaagcaggtgcccatcgaggagatatggatgctctttgacaggcactggtactggaagcgcatcgtccgcagggacccaaaataccagggcaacctccaccagcagcaggagatgtccagaatatgaacatggttaattagcgatgtggtttaataagttttctatccctaaacatataggatatgatgattactactagattattaagacgaatgtggtgtgatccttgatgcaatccaaagagg

SEQ ID NO: 34705 - protein, 518 aa, Zea mays subsp. mays
  peptide (1)..(518): Ceres Seq. ID no. 12593648
  misc_feature (29)..(489): Pfam Name: and other Pfam Description: Sugar
  misc_feature (1)..(499): NCBI GI NO: 15223861 NR Description: sugar carrier protein, putative
  misc_feature (1)..(499): NCBI GI NO: 26453114 NR Description: unknown protein [Arabidopsis thaliana]
  misc_feature (1)..(499): NCBI GI NO: 7446723 NR Description: probable monosaccharide transport protein Mst-1 -Norway spruce
  misc_feature (1)..(499): NCBI GI NO: 15235215 NR Description: putative hexose transporter; protein id:At4g02050
  misc_feature (3)..(502): NCBI GI NO: 347855 NR Description: glucose transporter
  misc_feature (1)..(515): NCBI GI NO: 1723182 NR Description: Sugar carrier protein A
  misc_feature (6)..(499): NCBI GI NO: 15240313 NR Description: hexose transporter - like protein
  misc_feature (3)..(499): NCBI GI NO: 5734440 NR Description: hexose transporter [Lycopersicon esculentum]
  misc_feature (3)..(502): NCBI GI NO: 7446737 NR Description: hexose transport protein - tomato
  misc_feature (1)..(517): NCBI GI NO: 100347 NR Description: monosaccharide transport protein MST1
MAGGFGSGGAAAGRAELYEGKITGYFILACIVGSFGGSLFGYDLGVSSGVTSMDDFLVKFFPDVYRRKQAHLHETDYCKYDNQVLTLFTSSLYFAGLVSTFGASYVTKRHGRRASIMVGAASFFLGGAINAAAMNIAMLIVGRVLLGVGIGFGNQAVPLYLSEIAPYRIRGAVNQLFQLTTCLGILVADVINYFTDRLHPWGWRLSLGLAMGPATAIFVGALFLPETPNSLVERGHLEEARRVLEKVRGTHKVDAEFEDLKEASQAARAVTGTFRNLLAVRNRPQLIIGALGIPAFQQLSGMNSILFYSPVIFQSLGFGSSAALYSSIITGSMLVVGALISMVTVDRLGRRFLFIEAGIQMVSSMVVVAVILALKFGKGEELSKGVSTVLVVAICLFVVAYGWSWGPLGWLVPSELFPLEMRSAGQSVVVCVNLFWTASVAQCFLAALCHLRWGVFVLFAALIVVMSIFVILLLPETKQVPIEEIWMLFDRHWYWKRIVRRDPKYQGNLHQQQEMSRI

SEQ ID NO: 34706 - protein, 466 aa, Zea mays subsp. mays
  peptide (1)..(466): Ceres Seq. ID no. 12593649
  misc_feature (1)..(437): Pfam Name: and other Pfam Description: Sugar
  misc_feature (1)..(447): NCBI GI NO: 15223861 NR Description: sugar carrier protein, putative
  misc_feature (1)..(447): NCBI GI NO: 26453114 NR Description: unknown protein [Arabidopsis thaliana]
  misc_feature (1)..(447): NCBI GI NO: 7446723 NR Description: probable monosaccharide transport protein Mst-1 -Norway spruce
  misc_feature (1)..(447): NCBI GI NO: 15235215 NR Description: putative hexose transporter; protein id:At4g02050
  misc_feature (1)..(450): NCBI GI NO: 347855 NR Description: glucose transporter
  misc_feature (1)..(463): NCBI GI NO: 1723182 NR Description: Sugar carrier protein A
  misc_feature (1)..(447): NCBI GI NO: 15240313 NR Description: hexose transporter - like protein
  misc_feature (1)..(447): NCBI GI NO: 5734440 NR Description: hexose transporter [Lycopersicon esculentum]
  misc_feature (1)..(450): NCBI GI NO: 7446737 NR Description: hexose transport protein - tomato
  misc_feature (1)..(465): NCBI GI NO: 100347 NR Description: monosaccharide transport protein MST1
MDDFLVKFFPDVYRRKQAHLHETDYCKYDNQVLTLFTSSLYFAGLVSTFGASYVTKRHGRRASIMVGAASFFLGGAINAAAMNIAMLIVGRVLLGVGIGFGNQAVPLYLSEIAPYRIRGAVNQLFQLTTCLGILVADVINYFTDRLHPWGWRLSLGLAMGPATAIFVGALFLPETPNSLVERGHLEEARRVLEKVRGTHKVDAEFEDLKEASQAARAVTGTFRNLLAVRNRPQLIIGALGIPAFQQLSGMNSILFYSPVIFQSLGFGSSAALYSSIITGSMLVVGALISMVTVDRLGRRFLFIEAGIQMVSSMVVVAVILALKFGKGEELSKGVSTVLVVAICLFVVAYGWSWGPLGWLVPSELFPLEMRSAGQSVVVCVNLFWTASVAQCFLAALCHLRWGVFVLFAALIVVMSIFVILLLPETKQVPIEEIWMLFDRHWYWKRIVRRDPKYQGNLHQQQEMSRI

SEQ ID NO: 34707 - protein, 402 aa, Zea mays subsp. mays
  peptide (1)..(402): Ceres Seq. ID no. 12593650
  misc_feature (1)..(373): Pfam Name: and other Pfam Description: Sugar
  misc_feature (1)..(383): NCBI GI NO: 15223861 NR Description: sugar carrier protein, putative
  misc_feature (1)..(383): NCBI GI NO: 26453114 NR Description: unknown protein [Arabidopsis thaliana]
  misc_feature (1)..(383): NCBI GI NO: 7446723 NR Description: probable monosaccharide transport protein Mst-1 -Norway spruce
  misc_feature (1)..(383): NCBI GI NO: 15235215 NR Description: putative hexose transporter; protein id:At4g02050
  misc_feature (1)..(386): NCBI GI NO: 347855 NR Description: glucose transporter
  misc_feature (1)..(399): NCBI GI NO: 1723182 NR Description: Sugar carrier protein A
  misc_feature (1)..(383): NCBI GI NO: 15240313 NR Description: hexose transporter - like protein
  misc_feature (1)..(383): NCBI GI NO: 5734440 NR Description: hexose transporter [Lycopersicon esculentum]
  misc_feature (1)..(386): NCBI GI NO: 7446737 NR Description: hexose transport protein - tomato
  misc_feature (1)..(401): NCBI GI NO: 100347 NR Description: monosaccharide transport protein MST1
MVGAASFFLGGAINAAAMNIAMLIVGRVLLGVGIGFGNQAVPLYLSEIAPYRIRGAVNQLFQLTTCLGILVADVINYFTDRLHPWGWRLSLGLAMGPATAIFVGALFLPETPNSLVERGHLEEARRVLEKVRGTHKVDAEFEDLKEASQAARAVTGTFRNLLAVRNRPQLIIGALGIPAFQQLSGMNSILFYSPVIFQSLGFGSSAALYSSIITGSMLVVGALISMVTVDRLGRRFLFIEAGIQMVSSMVVVAVILALKFGKGEELSKGVSTVLVVAICLFVVAYGWSWGPLGWLVPSELFPLEMRSAGQSVVVCVNLFWTASVAQCFLAALCHLRWGVFVLFAALIVVMSIFVILLLPETKQVPIEEIWMLFDRHWYWKRIVRRDPKYQGNLHQQQEMSRI

SEQ ID NO: 34708 - DNA, 1457 bp, Zea mays subsp. mays
  misc_feature (1)..(1457): Ceres Seq. ID no. 12353525
gccgtggagtagaggagcacaagtgagctagctagctctagctaggccacgcactgctgcctccttcatcatcaggtcgtgctagctagctagctatagctgggccgggggacgtacgacatcagcgcgcggccatgggcgtggggaagctgatgaacgacgtgaagccatacctggcgatggtgctgctgcaggtggggttctccgggatgtacatcgtctccgtcgcctccctcaagcgcggcatgaaccacttcgtcctcgtcgtctaccgcaacctcgtcgccaccgtcgtcatggcccccttcgccctcctcttcgagaggcgagtgaggcccaagatgacgccgctcatcttcctcaagatcatggggctcgccgtgctcgagcctgtgctcgaccagaacatgtactacctcggcgcgaagctgacgtccgcgaccttcgcctcagcgctggtcaacatcctccccgccatcacgttcctgctggccctcgccctgaggatggagaggctgaggctccggagcctccgcagccaggccaaggtggtcggcacggtctgcaccgtcgccggcgccgtgctgatgatcctctaccacggcccggtggtgccgttcccgtggtccgcgggtcgtcttcaccaccacgtccccgcggcggcggtggagagccagagcagcgcctcctggctcaacggcatctgcatgatcatcggcagctgcctgtgctggtccggcttcttcatcctccagtcgaacacgctgcagagctaccctgcggagctgacgctgacgactctgatctgcttcctgggctcggtgctgaccggcggcgtggcgctcgtggcggagcgccgcgacatgagcgcctgggtcattggcttcgacacccgcctcttcaccgccgtctactccgggatcgtgtgctccggcgtggccttctacgtgcaggggatcgtgacgcaggcgcgcgggccggtgttcgtgacggcgttccagcccctgtgcatgatcatcaccacggttcttggctccaccatactgaaagaggagaccaccctgggaagcgtgattggcgcggcgatcatagtggtggggctctactgcctcatctggggcaagagcaaggaccacctcggcagcaacggcggcaagcccggcgccgcggccgtcgccgagctgcccctgacctcgtcggctcctgcttggtccaacggcaagcaagctctggccgtcgtcgagacgacaccgccttcgtctttgcccaacaagtgcgttcactgacgcgcggatcggagctccatgcatgatgcggaccgtacaccaccgcacactactagtagtgcattgccagtgactgtaagccgccggccgtgtatgatcatgcatgcataccgtcataccgatatgatgtcccatactcccatcgttgcgtttaacactctcgagtttttg

SEQ ID NO: 34709 - protein, 383 aa, Zea mays subsp. mays
  peptide (1)..(383): Ceres Seq. ID no. 12353526
  misc_feature (199)..(328): Pfam Name: Pfam Description:  Integral membrane protein DUF6
  misc_feature (86)..(334): NCBI GI NO: 37532392 NR Description: putative nodulin-like protein
  misc_feature (14)..(66): NCBI GI NO: 37532392 NR Description: putative nodulin-like protein
  misc_feature (1)..(333): NCBI GI NO: 15219123 NR Description: nodulin-like protein; protein id: At1g21890
  misc_feature (1)..(333): NCBI GI NO: 17529004 NR Description: putative nodulin protein [Arabidopsis thaliana]
  misc_feature (1)..(333): NCBI GI NO: 6552743 NR Description: T26F17.11 [Arabidopsis thaliana]
  misc_feature (7)..(354): NCBI GI NO: 21553533 NR Description: nodulin protein, putative [Arabidopsis thaliana]
  misc_feature (4)..(354): NCBI GI NO: 15219448 NR Description: nodulin protein, putative; protein id: At1g44800
  misc_feature (2)..(356): NCBI GI NO: 15236455 NR Description: nodulin-like protein; protein id: At4g08290
  misc_feature (7)..(356): NCBI GI NO: 21593603 NR Description: nodulin-like protein [Arabidopsis thaliana]
  misc_feature (4)..(362): NCBI GI NO: 30680708 NR Description: nodulin MtN21 family protein
MGVGKLMNDVKPYLAMVLLQVGFSGMYIVSVASLKRGMNHFVLVVYRNLVATVVMAPFALLFERRVRPKMTPLIFLKIMGLAVLEPVLDQNMYYLGAKLTSATFASALVNILPAITFLLALALRMERLRLRSLRSQAKVVGTVCTVAGAVLMILYHGPVVPFPWSAGRLHHHVPAAAVESQSSASWLNGICMIIGSCLCWSGFFILQSNTLQSYPAELTLTTLICFLGSVLTGGVALVAERRDMSAWVIGFDTRLFTAVYSGIVCSGVAFYVQGIVTQARGPVFVTAFQPLCMIITTVLGSTILKEETTLGSVIGAAIIVVGLYCLIWGKSKDHLGSNGGKPGAAAVAELPLTSSAPAWSNGKQALAVVETTPPSSLPNKCVH

SEQ ID NO: 34710 - protein, 377 aa, Zea mays subsp. mays
  peptide (1)..(377): Ceres Seq. ID no. 12353527
  misc_feature (193)..(322): Pfam Name: Pfam Description:  Integral membrane protein DUF6
  misc_feature (80)..(328): NCBI GI NO: 37532392 NR Description: putative nodulin-like protein
  misc_feature (8)..(60): NCBI GI NO: 37532392 NR Description: putative nodulin-like protein
  misc_feature (1)..(327): NCBI GI NO: 15219123 NR Description: nodulin-like protein; protein id: At1g21890
  misc_feature (1)..(327): NCBI GI NO: 17529004 NR Description: putative nodulin protein [Arabidopsis thaliana]
  misc_feature (1)..(327): NCBI GI NO: 6552743 NR Description: T26F17.11 [Arabidopsis thaliana]
  misc_feature (1)..(348): NCBI GI NO: 21553533 NR Description: nodulin protein, putative [Arabidopsis thaliana]
  misc_feature (1)..(348): NCBI GI NO: 15219448 NR Description: nodulin protein, putative; protein id: At1g44800
  misc_feature (1)..(350): NCBI GI NO: 15236455 NR Description: nodulin-like protein; protein id: At4g08290
  misc_feature (1)..(350): NCBI GI NO: 21593603 NR Description: nodulin-like protein [Arabidopsis thaliana]
  misc_feature (1)..(356): NCBI GI NO: 30680708 NR Description: nodulin MtN21 family protein
MNDVKPYLAMVLLQVGFSGMYIVSVASLKRGMNHFVLVVYRNLVATVVMAPFALLFERRVRPKMTPLIFLKIMGLAVLEPVLDQNMYYLGAKLTSATFASALVNILPAITFLLALALRMERLRLRSLRSQAKVVGTVCTVAGAVLMILYHGPVVPFPWSAGRLHHHVPAAAVESQSSASWLNGICMIIGSCLCWSGFFILQSNTLQSYPAELTLTTLICFLGSVLTGGVALVAERRDMSAWVIGFDTRLFTAVYSGIVCSGVAFYVQGIVTQARGPVFVTAFQPLCMIITTVLGSTILKEETTLGSVIGAAIIVVGLYCLIWGKSKDHLGSNGGKPGAAAVAELPLTSSAPAWSNGKQALAVVETTPPSSLPNKCVH

SEQ ID NO: 34711 - protein, 368 aa, Zea mays subsp. mays
  peptide (1)..(368): Ceres Seq. ID no. 12353528
  misc_feature (184)..(313): Pfam Name: Pfam Description:  Integral membrane protein DUF6
  misc_feature (71)..(319): NCBI GI NO: 37532392 NR Description: putative nodulin-like protein
  misc_feature (1)..(51): NCBI GI NO: 37532392 NR Description: putative nodulin-like protein
  misc_feature (1)..(318): NCBI GI NO: 15219123 NR Description: nodulin-like protein; protein id: At1g21890
  misc_feature (1)..(318): NCBI GI NO: 17529004 NR Description: putative nodulin protein [Arabidopsis thaliana]
  misc_feature (1)..(318): NCBI GI NO: 6552743 NR Description: T26F17.11 [Arabidopsis thaliana]
  misc_feature (1)..(339): NCBI GI NO: 21553533 NR Description: nodulin protein, putative [Arabidopsis thaliana]
  misc_feature (1)..(339): NCBI GI NO: 15219448 NR Description: nodulin protein, putative; protein id: At1g44800
  misc_feature (1)..(341): NCBI GI NO: 15236455 NR Description: nodulin-like protein; protein id: At4g08290
  misc_feature (1)..(341): NCBI GI NO: 21593603 NR Description: nodulin-like protein [Arabidopsis thaliana]
  misc_feature (1)..(347): NCBI GI NO: 30680708 NR Description: nodulin MtN21 family protein
MVLLQVGFSGMYIVSVASLKRGMNHFVLVVYRNLVATVVMAPFALLFERRVRPKMTPLIFLKIMGLAVLEPVLDQNMYYLGAKLTSATFASALVNILPAITFLLALALRMERLRLRSLRSQAKVVGTVCTVAGAVLMILYHGPVVPFPWSAGRLHHHVPAAAVESQSSASWLNGICMIIGSCLCWSGFFILQSNTLQSYPAELTLTTLICFLGSVLTGGVALVAERRDMSAWVIGFDTRLFTAVYSGIVCSGVAFYVQGIVTQARGPVFVTAFQPLCMIITTVLGSTILKEETTLGSVIGAAIIVVGLYCLIWGKSKDHLGSNGGKPGAAAVAELPLTSSAPAWSNGKQALAVVETTPPSSLPNKCVH

SEQ ID NO: 34712 - DNA, 1641 bp, Zea mays subsp. mays
  misc_feature (1)..(1641): Ceres Seq. ID no. 12365124
  misc_feature (1139)..(1139): n is a, c, t, g, unknown, or other
  misc_feature (1137)..(1137): n is a, c, t, g, unknown, or other
aacacggccacaccccgacaccggcatggccacatccctttcccttaaatagacgccatcgccgccgagccgcgcattgggatcgtgcggcaatggcggcggcggcggcggcgcacgtgctggtgttcccggcccctgcgcagggccacctcaacagtttcctccacttctccacggggctcctccgcgcgggcctccacgtcaccttcctgcacaccgaccacaacctccgccgcctcggtactgctgccgccgaggctacggtcgcctcgccgcgtctccgcttcctatccgtgcccgacggcctccccgacgacgacccgcgcaccgtcgacggcctcccggagctcatggagtccctgcgcaccaaggccagcgcctcgtaccgcgcactgctcgcctcgctgcgcgcgggaggcggaggcttcccgccggtgacgtgcgtcgttgccgacggcataatgccgttcgtggtcgacgtcgcagaggagcttggagtcccggcgatctccttccgtacggtgagcgcgtgcgcggtcctggcgtacctgtccgtgcccaagctcatcgccctcggcgagctccccttccccaaaggtggcgacctcgacgcgcccatccgcggcgtcccggggatggagagcttcctgcgtcgacgagacctcccgatccagttccgccagctcaccagcacgtacgaggagcccttggtagcgggcggtggtcgcggccaccgtgcacagctgctgcaaggccagagctctcatcgtcaacacgaccacgtccctggagaggtcatccctcgggcacctcacgcaggagatgcgcgacgtattcgccgtcgggcctctgcacgccatgtcccccgcgccggcggtggcctcgagcctgtggcgccccgacgacgggtgcatggcgtggctcgacaaccagcaggcggagcgggccgtggtgtacatcagcctgggtagcctcgccgtcatctcccacgagcagttcaccgagttcctgcacgggctcgtcgccaccggctacccgttcctctgggtgctccggccggatatgctcgtggccagccaggacgccgcgctccgggaagccatcggcgcggtcgggaaagacagggcgtgcgtcgtncngtgggtgccgcagcgagacgtgctgcggcaccgcgccgtggggtgctttctgacgcacagcgggtggaactcgacgatggagggcatcgtcgagggcgtgcccatggtgtgctggcccttcttcgccgaccagcagatcaacagccgcttcgtaggcgccgtgtggaggaacgggctggacatgaaggacgtgtgcgacagagttgtggtggagagcacggtgagggaagcaatggagtccgaagagatcaggaggtcggttcatgctctggcggagcaggtgaagcgtgacgtcgccgacgacggggcatcggcgttggaattcaagcgcctcatcagcttcatcacggagctcagcacgtcagcagcacagggaaccccatcttcaaaatcgtgaagtgaatgaatgaatcgaaagtaaacttgatagatacgcaccggattcaacaaccggctgaggggtgttttggaatgttatttttgaaggaatttctattttctc

SEQ ID NO: 34713 - protein, 322 aa, Zea mays subsp. mays
  peptide (1)..(322): Ceres Seq. ID no. 12365125
  misc_feature (37)..(258): Pfam Name: Pfam Description:  UDP-glucoronosyl and UDP-glucosyl transferase
  misc_feature (35)..(237): NCBI GI NO: 34394122 NR Description: putative UDP-glucose glucosyltransferase
  misc_feature (33)..(242): NCBI GI NO: 33146987 NR Description: putative glucosyltransferase-2
  misc_feature (34)..(227): NCBI GI NO: 33146994 NR Description: putative glucosyltransferase-2
  misc_feature (113)..(222): NCBI GI NO: 33146981 NR Description: putative glucosyltransferase-12
  misc_feature (7)..(258): NCBI GI NO: 34900792 NR Description: glucosyltransferase-2-like protein
  misc_feature (32)..(133): NCBI GI NO: 33146981 NR Description: putative glucosyltransferase-12
  misc_feature (34)..(236): NCBI GI NO: 19911187 NR Description: glucosyltransferase-2 [Vigna angularis]
  misc_feature (38)..(222): NCBI GI NO: 38344776 NR Description: OSJNBb0026L04.7
  misc_feature (38)..(222): NCBI GI NO: 38569139 NR Description: OSJNBb0033P05.7
  misc_feature (30)..(268): NCBI GI NO: 25286821 NR Description: T16E15.2 protein - Arabidopsis thaliana
HGHTPTPAWPHPFPLNRRHRRRAAHWDRAAMAAAAAAHVLVFPAPAQGHLNSFLHFSTGLLRAGLHVTFLHTDHNLRRLGTAAAEATVASPRLRFLSVPDGLPDDDPRTVDGLPELMESLRTKASASYRALLASLRAGGGGFPPVTCVVADGIMPFVVDVAEELGVPAISFRTVSACAVLAYLSVPKLIALGELPFPKGGDLDAPIRGVPGMESFLRRRDLPIQFRQLTSTYEEPLVAGGGRGHRAQLLQGQSSHRQHDHVPGEVIPRAPHAGDARRIRRRASARHVPRAGGGLEPVAPRRRVHGVARQPAGGAGRGVHQPG

SEQ ID NO: 34714 - protein, 292 aa, Zea mays subsp. mays
  peptide (1)..(292): Ceres Seq. ID no. 12365126
  misc_feature (7)..(228): Pfam Name: Pfam Description:  UDP-glucoronosyl and UDP-glucosyl transferase
  misc_feature (5)..(207): NCBI GI NO: 34394122 NR Description: putative UDP-glucose glucosyltransferase
  misc_feature (3)..(212): NCBI GI NO: 33146987 NR Description: putative glucosyltransferase-2
  misc_feature (4)..(197): NCBI GI NO: 33146994 NR Description: putative glucosyltransferase-2
  misc_feature (83)..(192): NCBI GI NO: 33146981 NR Description: putative glucosyltransferase-12
  misc_feature (1)..(228): NCBI GI NO: 34900792 NR Description: glucosyltransferase-2-like protein
  misc_feature (2)..(103): NCBI GI NO: 33146981 NR Description: putative glucosyltransferase-12
  misc_feature (4)..(206): NCBI GI NO: 19911187 NR Description: glucosyltransferase-2 [Vigna angularis]
  misc_feature (8)..(192): NCBI GI NO: 38344776 NR Description: OSJNBb0026L04.7
  misc_feature (8)..(192): NCBI GI NO: 38569139 NR Description: OSJNBb0033P05.7
  misc_feature (1)..(238): NCBI GI NO: 25286821 NR Description: T16E15.2 protein - Arabidopsis thaliana
MAAAAAAHVLVFPAPAQGHLNSFLHFSTGLLRAGLHVTFLHTDHNLRRLGTAAAEATVASPRLRFLSVPDGLPDDDPRTVDGLPELMESLRTKASASYRALLASLRAGGGGFPPVTCVVADGIMPFVVDVAEELGVPAISFRTVSACAVLAYLSVPKLIALGELPFPKGGDLDAPIRGVPGMESFLRRRDLPIQFRQLTSTYEEPLVAGGGRGHRAQLLQGQSSHRQHDHVPGEVIPRAPHAGDARRIRRRASARHVPRAGGGLEPVAPRRRVHGVARQPAGGAGRGVHQPG

SEQ ID NO: 34715 - protein, 237 aa, Zea mays subsp. mays
  peptide (1)..(237): Ceres Seq. ID no. 12365127
  misc_feature (1)..(225): Pfam Name: Pfam Description:  UDP-glucoronosyl and UDP-glucosyl transferase
  misc_feature (1)..(231): NCBI GI NO: 34394122 NR Description: putative UDP-glucose glucosyltransferase
  misc_feature (1)..(226): NCBI GI NO: 33146987 NR Description: putative glucosyltransferase-2
  misc_feature (1)..(226): NCBI GI NO: 33146994 NR Description: putative glucosyltransferase-2
  misc_feature (1)..(229): NCBI GI NO: 33146981 NR Description: putative glucosyltransferase-12
  misc_feature (1)..(225): NCBI GI NO: 34900792 NR Description: glucosyltransferase-2-like protein
  misc_feature (1)..(228): NCBI GI NO: 28564775 NR Description: putative glucosyltransferase-2
  misc_feature (1)..(225): NCBI GI NO: 28564779 NR Description: putative glucosyltransferase-2
  misc_feature (1)..(225): NCBI GI NO: 19911187 NR Description: glucosyltransferase-2 [Vigna angularis]
  misc_feature (1)..(218): NCBI GI NO: 38344776 NR Description: OSJNBb0026L04.7
  misc_feature (1)..(218): NCBI GI NO: 38569139 NR Description: OSJNBb0033P05.7
  misc_feature (105)..(105): Xaa is any aa, unknown or other
  misc_feature (106)..(106): Xaa is any aa, unknown or other
MRDVFAVGPLHAMSPAPAVASSLWRPDDGCMAWLDNQQAERAVVYISLGSLAVISHEQFTEFLHGLVATGYPFLWVLRPDMLVASQDAALREAIGAVGKDRACVXXWVPQRDVLRHRAVGCFLTHSGWNSTMEGIVEGVPMVCWPFFADQQINSRFVGAVWRNGLDMKDVCDRVVVESTVREAMESEEIRRSVHALAEQVKRDVADDGASALEFKRLISFITELSTSAAQGTPSSKS

SEQ ID NO: 34716 - DNA, 1448 bp, Zea mays subsp. mays; identical to SEQ ID NO: 25252
  misc_feature (1)..(1448): Ceres Seq. ID no. 12343332

SEQ ID NO: 34717 - protein, 388 aa, Zea mays subsp. mays; identical to SEQ ID NO: 25253
  peptide (1)..(388): Ceres Seq. ID no. 12343333
  misc_feature (253)..(357): Pfam Name: Pfam Description:  PCI domain
  misc_feature (1)..(388): NCBI GI NO: 20978545 NR Description: 26S proteasome non-ATPase regulatory subunit 6
  misc_feature (1)..(388): NCBI GI NO: 18416433 NR Description: 26S proteasome regulatory subunit
  misc_feature (1)..(274): NCBI GI NO: 7484780 NR Description: 26S proteasome regulatory particle chain RPN7 homolog F6I7
  misc_feature (157)..(388): NCBI GI NO: 2982297 NR Description: KIAA0107-like protein [Picea mariana]
  misc_feature (6)..(388): NCBI GI NO: 21313464 NR Description: RIKEN cDNA 2400006A19 [Mus musculus]
  misc_feature (6)..(388): NCBI GI NO: 20978552 NR Description: 26S proteasome non-ATPase regulatory subunit 6
  misc_feature (6)..(388): NCBI GI NO: 29436940 NR Description: Unknown (protein for MGC:56471) [Danio rerio]
  misc_feature (6)..(388): NCBI GI NO: 7661914 NR Description: KIAA0107 gene product [Homo sapiens]
  misc_feature (6)..(388): NCBI GI NO: 38454206 NR Description: Unknown (protein for MGC:72968)
  misc_feature (6)..(388): NCBI GI NO: 39795842 NR Description: Unknown (protein for MGC:76241)

SEQ ID NO: 34718 - protein, 340 aa, Zea mays subsp. mays; identical to SEQ ID NO: 25254
  peptide (1)..(340): Ceres Seq. ID no. 12343334
  misc_feature (205)..(309): Pfam Name: Pfam Description:  PCI domain
  misc_feature (1)..(340): NCBI GI NO: 20978545 NR Description: 26S proteasome non-ATPase regulatory subunit 6
  misc_feature (1)..(340): NCBI GI NO: 18416433 NR Description: 26S proteasome regulatory subunit
  misc_feature (1)..(226): NCBI GI NO: 7484780 NR Description: 26S proteasome regulatory particle chain RPN7 homolog F6I7
  misc_feature (109)..(340): NCBI GI NO: 2982297 NR Description: KIAA0107-like protein [Picea mariana]
  misc_feature (1)..(340): NCBI GI NO: 21313464 NR Description: RIKEN cDNA 2400006A19 [Mus musculus]
  misc_feature (1)..(340): NCBI GI NO: 20978552 NR Description: 26S proteasome non-ATPase regulatory subunit 6
  misc_feature (1)..(340): NCBI GI NO: 29436940 NR Description: Unknown (protein for MGC:56471) [Danio rerio]
  misc_feature (1)..(340): NCBI GI NO: 7661914 NR Description: KIAA0107 gene product [Homo sapiens]
  misc_feature (1)..(340): NCBI GI NO: 38454206 NR Description: Unknown (protein for MGC:72968)
  misc_feature (1)..(340): NCBI GI NO: 39795842 NR Description: Unknown (protein for MGC:76241)

SEQ ID NO: 34719 - protein, 317 aa, Zea mays subsp. mays; identical to SEQ ID NO: 25255
  peptide (1)..(317): Ceres Seq. ID no. 12343335
  misc_feature (182)..(286): Pfam Name: Pfam Description:  PCI domain
  misc_feature (1)..(317): NCBI GI NO: 20978545 NR Description: 26S proteasome non-ATPase regulatory subunit 6
  misc_feature (1)..(317): NCBI GI NO: 18416433 NR Description: 26S proteasome regulatory subunit
  misc_feature (1)..(203): NCBI GI NO: 7484780 NR Description: 26S proteasome regulatory particle chain RPN7 homolog F6I7
  misc_feature (86)..(317): NCBI GI NO: 2982297 NR Description: KIAA0107-like protein [Picea mariana]
  misc_feature (1)..(317): NCBI GI NO: 21313464 NR Description: RIKEN cDNA 2400006A19 [Mus musculus]
  misc_feature (1)..(317): NCBI GI NO: 20978552 NR Description: 26S proteasome non-ATPase regulatory subunit 6
  misc_feature (1)..(317): NCBI GI NO: 29436940 NR Description: Unknown (protein for MGC:56471) [Danio rerio]
  misc_feature (1)..(317): NCBI GI NO: 7661914 NR Description: KIAA0107 gene product [Homo sapiens]
  misc_feature (1)..(317): NCBI GI NO: 38454206 NR Description: Unknown (protein for MGC:72968)
  misc_feature (1)..(317): NCBI GI NO: 39795842 NR Description: Unknown (protein for MGC:76241)

SEQ ID NO: 34720 - DNA, 1559 bp, Zea mays subsp. mays
  misc_feature (1)..(1559): Ceres Seq. ID no. 12411451
ctttcccctttccttcagaaacaaacaacagctgcgccggctccaccgcaccagcccacacccgccgcggccgttacatccccgcttccccggccaccttccttccatttatacccctccgtttcccacccttccctccccactccggcagtccccgtcccaccactacagccactgctgcccggccggccgcgtccctcttcctccgccaggcgccagccgcccgttctccagcaatggcgtctgcctcgcacgccccgacgccgctgctcaaggacgagctggacatcgtcatcccgacgatccgcaacctcgacttcctggagatgtggaggcccttcttccagccctaccacctcatcatcgtgcaggacggcgaccccagcaagaccatccgcgtccccgagggcttcgactacgagctctacaaccgcaacgacatcaaccgcatgctggggcccaaggcctcctgcatctccttcaaggactccgcctgccgctgcttcggctacatggtctccaagaagaagtacatctacaccatcgacgatgactgcttcgttgccaaggatccatcagggaaggacatcaatgcacttgagcagcacatcaagaacctcctgagcccttccactccatttttcttcaatactctgtatgacccttaccgtgttggcgccgattttgttcgtgggtaccccttcagccttcgtgagggtgtcccaactgctgtttctcacgggctttggctcaacattccagactacgatgcccctacccagcttgttaagccccttgagagaaacaccaggtatgtggatgctattcttacgatcccaaagggcaccctcttccctatgtgtggaatgaaccttgcatttgaccgtgagctcattggtcctgcaatgtactttggtcttatgggtgatggccagcctattggtcgctacgatgatatgtgggcaggatggtgcacaaaggtgattacggatcatctgggcctgggtgtgaagactggcctgccctacatctggcacagcaaagcaagcaacccatttgtgaacctgaagaaggaatacaacggcatcttctggcaagaagagctgatcccgttcttccagtcggtctcccttccaaaggaggccaccaccgtccaaaagtgctacctcgagctggccaagcaggtgagggccaagctcggtaaggtggacggctacttcaacaagcttgccgactccatggtcacgtggattgaggcctgggacgagctgaaccccccaaaaggcggagtccccacagcaaatggccctccaaagaagtaaaacactatgtagtgtaaacttcactcgttcatgtggaccatcgtactgaaaggaaatactgttttggggttagtgctgatggactgagatcactccgctgtaactcgagattttcacgtcccggaaaccgccctgccggttttagggcgtttacatgtttttttttcatttttcgtgtgatacaacaggtgtaatgtcggattggattagaataaagtttatgatcttcatcttttc

SEQ ID NO: 34721 - protein, 439 aa, Zea mays subsp. mays
  peptide (1)..(439): Ceres Seq. ID no. 12411452
  misc_feature (85)..(424): Pfam Name: Pfam Description:  Reversibly glycosylated polypeptide
  misc_feature (82)..(438): NCBI GI NO: 18077708 NR Description: reversibly glycosylated polypeptide
  misc_feature (74)..(438): NCBI GI NO: 34915190 NR Description: reversibly glycosylated polypeptide
  misc_feature (74)..(438): NCBI GI NO: 4158221 NR Description: reversibly glycosylated polypeptide
  misc_feature (83)..(435): NCBI GI NO: 4158232 NR Description: reversibly glycosylated polypeptide
  misc_feature (88)..(426): NCBI GI NO: 2317729 NR Description: reversibly glycosylated polypeptide-1
  misc_feature (88)..(426): NCBI GI NO: 15232865 NR Description: reversibly glycosylated polypeptide-1
  misc_feature (171)..(439): NCBI GI NO: 7488888 NR Description: type IIIa membrane protein cp-wap11 - cowpea
  misc_feature (84)..(420): NCBI GI NO: 19387283 NR Description: putative amylogenin
FPFPSETNNSCAGSTAPAHTRRGRYIPASPATFLPFIPLRFPPFPPHSGSPRPTTTATAARPAASLFLRQAPAARSPAMASASHAPTPLLKDELDIVIPTIRNLDFLEMWRPFFQPYHLIIVQDGDPSKTIRVPEGFDYELYNRNDINRMLGPKASCISFKDSACRCFGYMVSKKKYIYTIDDDCFVAKDPSGKDINALEQHIKNLLSPSTPFFFNTLYDPYRVGADFVRGYPFSLREGVPTAVSHGLWLNIPDYDAPTQLVKPLERNTRYVDAILTIPKGTLFPMCGMNLAFDRELIGPAMYFGLMGDGQPIGRYDDMWAGWCTKVITDHLGLGVKTGLPYIWHSKASNPFVNLKKEYNGIFWQEELIPFFQSVSLPKEATTVQKCYLELAKQVRAKLGKVDGYFNKLADSMVTWIEAWDELNPPKGGVPTANGPPKK

SEQ ID NO: 34722 - protein, 361 aa, Zea mays subsp. mays
  peptide (1)..(361): Ceres Seq. ID no. 12411453
  misc_feature (7)..(346): Pfam Name: Pfam Description:  Reversibly glycosylated polypeptide
  misc_feature (4)..(360): NCBI GI NO: 18077708 NR Description: reversibly glycosylated polypeptide
  misc_feature (1)..(360): NCBI GI NO: 34915190 NR Description: reversibly glycosylated polypeptide
  misc_feature (1)..(360): NCBI GI NO: 4158221 NR Description: reversibly glycosylated polypeptide
  misc_feature (5)..(357): NCBI GI NO: 4158232 NR Description: reversibly glycosylated polypeptide
  misc_feature (10)..(348): NCBI GI NO: 2317729 NR Description: reversibly glycosylated polypeptide-1
  misc_feature (10)..(348): NCBI GI NO: 15232865 NR Description: reversibly glycosylated polypeptide-1
  misc_feature (93)..(361): NCBI GI NO: 7488888 NR Description: type IIIa membrane protein cp-wap11 - cowpea
  misc_feature (6)..(342): NCBI GI NO: 19387283 NR Description: putative amylogenin
MASASHAPTPLLKDELDIVIPTIRNLDFLEMWRPFFQPYHLIIVQDGDPSKTIRVPEGFDYELYNRNDINRMLGPKASCISFKDSACRCFGYMVSKKKYIYTIDDDCFVAKDPSGKDINALEQHIKNLLSPSTPFFFNTLYDPYRVGADFVRGYPFSLREGVPTAVSHGLWLNIPDYDAPTQLVKPLERNTRYVDAILTIPKGTLFPMCGMNLAFDRELIGPAMYFGLMGDGQPIGRYDDMWAGWCTKVITDHLGLGVKTGLPYIWHSKASNPFVNLKKEYNGIFWQEELIPFFQSVSLPKEATTVQKCYLELAKQVRAKLGKVDGYFNKLADSMVTWIEAWDELNPPKGGVPTANGPPKK

SEQ ID NO: 34723 - protein, 331 aa, Zea mays subsp. mays
  peptide (1)..(331): Ceres Seq. ID no. 12411454
  misc_feature (1)..(316): Pfam Name: Pfam Description:  Reversibly glycosylated polypeptide
  misc_feature (1)..(330): NCBI GI NO: 18077708 NR Description: reversibly glycosylated polypeptide
  misc_feature (1)..(330): NCBI GI NO: 34915190 NR Description: reversibly glycosylated polypeptide
  misc_feature (1)..(330): NCBI GI NO: 4158221 NR Description: reversibly glycosylated polypeptide
  misc_feature (1)..(327): NCBI GI NO: 4158232 NR Description: reversibly glycosylated polypeptide
  misc_feature (1)..(318): NCBI GI NO: 2317729 NR Description: reversibly glycosylated polypeptide-1
  misc_feature (1)..(318): NCBI GI NO: 15232865 NR Description: reversibly glycosylated polypeptide-1
  misc_feature (63)..(331): NCBI GI NO: 7488888 NR Description: type IIIa membrane protein cp-wap11 - cowpea
  misc_feature (1)..(312): NCBI GI NO: 19387283 NR Description: putative amylogenin
MWRPFFQPYHLIIVQDGDPSKTIRVPEGFDYELYNRNDINRMLGPKASCISFKDSACRCFGYMVSKKKYIYTIDDDCFVAKDPSGKDINALEQHIKNLLSPSTPFFFNTLYDPYRVGADFVRGYPFSLREGVPTAVSHGLWLNIPDYDAPTQLVKPLERNTRYVDAILTIPKGTLFPMCGMNLAFDRELIGPAMYFGLMGDGQPIGRYDDMWAGWCTKVITDHLGLGVKTGLPYIWHSKASNPFVNLKKEYNGIFWQEELIPFFQSVSLPKEATTVQKCYLELAKQVRAKLGKVDGYFNKLADSMVTWIEAWDELNPPKGGVPTANGPPKK

SEQ ID NO: 34724 - DNA, 1968 bp, Zea mays subsp. mays
  misc_feature (1)..(1968): Ceres Seq. ID no. 12355752
aaatagcagacggcagacaacagtcgaggggacacaggaaggcgcgaagaagaccgagatcctcgcccaacgccatcacgccactcccccaatactcaggtgtcaggacagcgagcaggcacaagcagatctcactccacgttgctccttccgcccttcctctccgccgctccccggaaggatcatggagcgcgggattcttggctccaggggcgccgtccaaatcttggggtcgaagaccggggccgcgatgtcatgtggcaaaacaacctctacaagttttacttgttctaccaaacacgagctgaacttgcatgtgaatgttaagccgttgcaattggtaacagatggatcctctcgtttggcatacaaaactccagtgcttaaaaatcagtggaatctttctgctagttcttcctctgcaaatgtggttaccacttttgatgatgacaaaggtgtaccttccagttttgctgaagaaaagatcggagtactgttattaaatcttggtggtccagaaaccctagacgatgttcaaccattcttgttcaacctatttgctgatccagatatcattcgactgcctaggctcttcaggttccttcaaagaccactggccaaacttatttctacttttagagctcctaagagtaaagaagggtatgcttcaatcggtggtgggtcaccattgaggaaaattactgatgagcaggcaaatgctttgaagattgctctggaaaagaaaaaattgaacgcaaatatatatgttgggatgcggtattggtatcctttcacagaagaagccattgatcagattaagaaggataatatttccaagctcgttgttcttccactctaccctcagtactccatatcaacaagtgggtcaagcattcgtgttctccaaaatgttgtcaaggaagattcatatttttctggcttgccaatctccattatcgaatcatggtaccaacgtgatggctatgtgaaatcaatggctgacctaattgaaaaagagctatctgccttttccaatcctgaagaggtaatgatattcttcagtgcacatggtgtgccacttacctatgttcaggatgctggagatccttacagagatcagatggaggattgtatttctttgatcatgggggagctgagatccagaggaatcttaaatggtcacactttggcgtatcagagtcgggtgggaccagttcaatggctgaagccatatactgatgaagttttagtagaacttggtcagaacggtgtgaagagcctcctggctgttccagtaagcttcgtgagcgagcacattgagacactggaagaaatagacatggagtacaaggagttggctctggaatcaggcattgagaactggggccgggtccctgctcttggatgcacttcgacgttcatctccgaccttgcagatgcggttgtcgaagccctgccctctgcctcggcgctgggaaccagaaagcctgaagacaccggttccagcatggacctgatgcattacctgaccaagatgttcttcggctcaatcttggcatttatcctgctgttgtcaccaagactggtttctgctttccggaacaccacgctttaggtggttaggtaggtaagcaaaaagggaatggtgtgataggtaattcttaaaaatttgagattaataatggaaaaactggagagagcttggtgatagtaactagagatactttaggctttgtttgagtactctagtattgaccccaatccgtgtgttgagatagattgaggtgtaaattagtttaagttacacctcaattcagctcaatacatatggattgagctcaatactaaaatactcaaactaggccttagggcacgaggtagcagcttgcaatttgctgtttttgatattgttcacaggaaacattggtctcataaatgaatctgtgaaagcacataacgttacaaatc

SEQ ID NO: 34725 - protein, 537 aa, Zea mays subsp. mays
  peptide (1)..(537): Ceres Seq. ID no. 12355753
  misc_feature (161)..(485): Pfam Name: Pfam Description:  Ferrochelatase
  misc_feature (67)..(535): NCBI GI NO: 7437214 NR Description: probable ferrochelatase (EC 4.99.1.1) - barley
  misc_feature (67)..(535): NCBI GI NO: 1170242 NR Description: Ferrochelatase II, chloroplast precursor
  misc_feature (71)..(537): NCBI GI NO: 1170239 NR Description: Ferrochelatase II, chloroplast precursor
  misc_feature (95)..(534): NCBI GI NO: 30690097 NR Description: ferrochelatase-I [Arabidopsis thaliana]
  misc_feature (80)..(497): NCBI GI NO: 12082085 NR Description: ferrochelatase [Cucumis sativus]
  misc_feature (126)..(497): NCBI GI NO: 3913808 NR Description: Ferrochelatase II, chloroplast precursor
  misc_feature (131)..(505): NCBI GI NO: 7437212 NR Description: probable ferrochelatase (EC 4.99.1.1) - potato
  misc_feature (161)..(505): NCBI GI NO: 15147828 NR Description: ferrochelatase [Nicotiana tabacum]
  misc_feature (127)..(505): NCBI GI NO: 15227742 NR Description: putative ferrochelatase precusor
  misc_feature (127)..(505): NCBI GI NO: 2623990 NR Description: ferrochelatase [Arabidopsis thaliana]
NSRRQTTVEGTQEGAKKTEILAQRHHATPPILRCQDSEQAQADLTPRCSFRPSSPPLPGRIMERGILGSRGAVQILGSKTGAAMSCGKTTSTSFTCSTKHELNLHVNVKPLQLVTDGSSRLAYKTPVLKNQWNLSASSSSANVVTTFDDDKGVPSSFAEEKIGVLLLNLGGPETLDDVQPFLFNLFADPDIIRLPRLFRFLQRPLAKLISTFRAPKSKEGYASIGGGSPLRKITDEQANALKIALEKKKLNANIYVGMRYWYPFTEEAIDQIKKDNISKLVVLPLYPQYSISTSGSSIRVLQNVVKEDSYFSGLPISIIESWYQRDGYVKSMADLIEKELSAFSNPEEVMIFFSAHGVPLTYVQDAGDPYRDQMEDCISLIMGELRSRGILNGHTLAYQSRVGPVQWLKPYTDEVLVELGQNGVKSLLAVPVSFVSEHIETLEEIDMEYKELALESGIENWGRVPALGCTSTFISDLADAVVEALPSASALGTRKPEDTGSSMDLMHYLTKMFFGSILAFILLLSPRLVSAFRNTTL

SEQ ID NO: 34726 - protein, 476 aa, Zea mays subsp. mays
  peptide (1)..(476): Ceres Seq. ID no. 12355754
  misc_feature (100)..(424): Pfam Name: Pfam Description:  Ferrochelatase
  misc_feature (6)..(474): NCBI GI NO: 7437214 NR Description: probable ferrochelatase (EC 4.99.1.1) - barley
  misc_feature (6)..(474): NCBI GI NO: 1170242 NR Description: Ferrochelatase II, chloroplast precursor
  misc_feature (10)..(476): NCBI GI NO: 1170239 NR Description: Ferrochelatase II, chloroplast precursor
  misc_feature (34)..(473): NCBI GI NO: 30690097 NR Description: ferrochelatase-I [Arabidopsis thaliana]
  misc_feature (19)..(436): NCBI GI NO: 12082085 NR Description: ferrochelatase [Cucumis sativus]
  misc_feature (65)..(436): NCBI GI NO: 3913808 NR Description: Ferrochelatase II, chloroplast precursor
  misc_feature (70)..(444): NCBI GI NO: 7437212 NR Description: probable ferrochelatase (EC 4.99.1.1) - potato
  misc_feature (100)..(444): NCBI GI NO: 15147828 NR Description: ferrochelatase [Nicotiana tabacum]
  misc_feature (66)..(444): NCBI GI NO: 15227742 NR Description: putative ferrochelatase precusor
  misc_feature (66)..(444): NCBI GI NO: 2623990 NR Description: ferrochelatase [Arabidopsis thaliana]
MERGILGSRGAVQILGSKTGAAMSCGKTTSTSFTCSTKHELNLHVNVKPLQLVTDGSSRLAYKTPVLKNQWNLSASSSSANVVTTFDDDKGVPSSFAEEKIGVLLLNLGGPETLDDVQPFLFNLFADPDIIRLPRLFRFLQRPLAKLISTFRAPKSKEGYASIGGGSPLRKITDEQANALKIALEKKKLNANIYVGMRYWYPFTEEAIDQIKKDNISKLVVLPLYPQYSISTSGSSIRVLQNVVKEDSYFSGLPISIIESWYQRDGYVKSMADLIEKELSAFSNPEEVMIFFSAHGVPLTYVQDAGDPYRDQMEDCISLIMGELRSRGILNGHTLAYQSRVGPVQWLKPYTDEVLVELGQNGVKSLLAVPVSFVSEHIETLEEIDMEYKELALESGIENWGRVPALGCTSTFISDLADAVVEALPSASALGTRKPEDTGSSMDLMHYLTKMFFGSILAFILLLSPRLVSAFRNTTL

SEQ ID NO: 34727 - protein, 454 aa, Zea mays subsp. mays
  peptide (1)..(454): Ceres Seq. ID no. 12355755
  misc_feature (78)..(402): Pfam Name: Pfam Description:  Ferrochelatase
  misc_feature (1)..(452): NCBI GI NO: 7437214 NR Description: probable ferrochelatase (EC 4.99.1.1) - barley
  misc_feature (1)..(452): NCBI GI NO: 1170242 NR Description: Ferrochelatase II, chloroplast precursor
  misc_feature (1)..(454): NCBI GI NO: 1170239 NR Description: Ferrochelatase II, chloroplast precursor
  misc_feature (12)..(451): NCBI GI NO: 30690097 NR Description: ferrochelatase-I [Arabidopsis thaliana]
  misc_feature (1)..(414): NCBI GI NO: 12082085 NR Description: ferrochelatase [Cucumis sativus]
  misc_feature (43)..(414): NCBI GI NO: 3913808 NR Description: Ferrochelatase II, chloroplast precursor
  misc_feature (48)..(422): NCBI GI NO: 7437212 NR Description: probable ferrochelatase (EC 4.99.1.1) - potato
  misc_feature (78)..(422): NCBI GI NO: 15147828 NR Description: ferrochelatase [Nicotiana tabacum]
  misc_feature (44)..(422): NCBI GI NO: 15227742 NR Description: putative ferrochelatase precusor
  misc_feature (44)..(422): NCBI GI NO: 2623990 NR Description: ferrochelatase [Arabidopsis thaliana]
MSCGKTTSTSFTCSTKHELNLHVNVKPLQLVTDGSSRLAYKTPVLKNQWNLSASSSSANVVTTFDDDKGVPSSFAEEKIGVLLLNLGGPETLDDVQPFLFNLFADPDIIRLPRLFRFLQRPLAKLISTFRAPKSKEGYASIGGGSPLRKITDEQANALKIALEKKKLNANIYVGMRYWYPFTEEAIDQIKKDNISKLVVLPLYPQYSISTSGSSIRVLQNVVKEDSYFSGLPISIIESWYQRDGYVKSMADLIEKELSAFSNPEEVMIFFSAHGVPLTYVQDAGDPYRDQMEDCISLIMGELRSRGILNGHTLAYQSRVGPVQWLKPYTDEVLVELGQNGVKSLLAVPVSFVSEHIETLEEIDMEYKELALESGIENWGRVPALGCTSTFISDLADAVVEALPSASALGTRKPEDTGSSMDLMHYLTKMFFGSILAFILLLSPRLVSAFRNTTL

SEQ ID NO: 34728 - DNA, 954 bp, Zea mays subsp. mays
  misc_feature (1)..(954): Ceres Seq. ID no. 12413099
caaactgtgatggttcatctagaccacttgaccatcctgcggatttgtatgatttccatgtctatactgattctaagactttgtttaacatgaggagcacatttgacagaacatcacgtagtggacctaaggcctttgtgagcgagtacgctgtctggagaagtgacgcgggtagaggcagtcttgcttgcttcgttggctgaagctgctttcctcactggtctggagaagaacagtgatatcgttcagatggcaagttacgctccactcttcgtgaacgacaatgaccaaacgtggaacccggacgctattgtcttcaactcctggcaacactatggaactcctagctactggatgcagacgattttccgcgagtcaagcggcgccatgattcatccggttaatatcagttcccggtactcgagttcgctggccgcgtctgcgatcacgtggcaggatgcagagaatagcttcctgagagtgaaggtcgtgaacttcgggtcggacaccgttaacctcacggtctccacgagcggactcggggccagcgtcaacgcgctgggatcaaccgccaccgtcctcacgtctggcaacgtcatggacgagaactccttcagtaacccgaacaaggttgcgccggtgaaaagccagctgagcaacgccgcggagcagatgcaggtcacgctggctcctcactccttcaccgccttcgatctggcgctggctgagcccaagcttgtggcggagatatgatgtgtgtgctgcacattacagtacacaaacagcgcgcggatggcagcaaccagagggtgtggagtgtggtgtgctgttagcgatcttgatcgataaaaaaggctttgtactggtgtaccacgatacaggataacgtactacgtactgttgcttcatgaaataaaaaccacatcaggtttttgcttggtgttggttggtttc

SEQ ID NO: 34729 - protein, 167 aa, Zea mays subsp. mays
  peptide (1)..(167): Ceres Seq. ID no. 12413100
  misc_feature (1)..(167): NCBI GI NO: 13398414 NR Description: arabinoxylan arabinofuranohydrolase isoenzyme AXAH-II
  misc_feature (1)..(167): NCBI GI NO: 13398412 NR Description: arabinoxylan arabinofuranohydrolase isoenzyme AXAH-I
  misc_feature (1)..(165): NCBI GI NO: 38347003 NR Description: OSJNBb0058J09.4
  misc_feature (1)..(164): NCBI GI NO: 33151175 NR Description: alpha-L-arabinofuranosidase [Malus x domestica]
  misc_feature (1)..(163): NCBI GI NO: 13937191 NR Description: AT3g10740/T7M13_18 [Arabidopsis thaliana]
  misc_feature (1)..(163): NCBI GI NO: 15228368 NR Description: glycosyl hydrolase family 51; protein id:At3g10740
  misc_feature (1)..(163): NCBI GI NO: 29825623 NR Description: alpha-L-arabinofuranosidase [Arabidopsis thaliana]
  misc_feature (1)..(158): NCBI GI NO: 16417958 NR Description: arabinosidase ARA-1 [Lycopersicon esculentum]
  misc_feature (1)..(162): NCBI GI NO: 22324432 NR Description: putative arabinoxylan narabinofuranohydrolaseisoenzyme AXAH-I
  misc_feature (1)..(167): NCBI GI NO: 22327075 NR Description: glycosyl hydrolase family 51; protein id:At5g26120
MASYAPLFVNDNDQTWNPDAIVFNSWQHYGTPSYWMQTIFRESSGAMIHPVNISSRYSSSLAASAITWQDAENSFLRVKVVNFGSDTVNLTVSTSGLGASVNALGSTATVLTSGNVMDENSFSNPNKVAPVKSQLSNAAEQMQVTLAPHSFTAFDLALAEPKLVAEI

SEQ ID NO: 34730 - protein, 132 aa, Zea mays subsp. mays
  peptide (1)..(132): Ceres Seq. ID no. 12413101
  misc_feature (1)..(132): NCBI GI NO: 13398414 NR Description: arabinoxylan arabinofuranohydrolase isoenzyme AXAH-II
  misc_feature (1)..(132): NCBI GI NO: 13398412 NR Description: arabinoxylan arabinofuranohydrolase isoenzyme AXAH-I
  misc_feature (1)..(130): NCBI GI NO: 38347003 NR Description: OSJNBb0058J09.4
  misc_feature (1)..(129): NCBI GI NO: 33151175 NR Description: alpha-L-arabinofuranosidase [Malus x domestica]
  misc_feature (1)..(128): NCBI GI NO: 13937191 NR Description: AT3g10740/T7M13_18 [Arabidopsis thaliana]
  misc_feature (1)..(128): NCBI GI NO: 15228368 NR Description: glycosyl hydrolase family 51; protein id:At3g10740
  misc_feature (1)..(128): NCBI GI NO: 29825623 NR Description: alpha-L-arabinofuranosidase [Arabidopsis thaliana]
  misc_feature (1)..(123): NCBI GI NO: 16417958 NR Description: arabinosidase ARA-1 [Lycopersicon esculentum]
  misc_feature (1)..(127): NCBI GI NO: 22324432 NR Description: putative arabinoxylan narabinofuranohydrolaseisoenzyme AXAH-I
  misc_feature (1)..(132): NCBI GI NO: 22327075 NR Description: glycosyl hydrolase family 51; protein id:At5g26120
MQTIFRESSGAMIHPVNISSRYSSSLAASAITWQDAENSFLRVKVVNFGSDTVNLTVSTSGLGASVNALGSTATVLTSGNVMDENSFSNPNKVAPVKSQLSNAAEQMQVTLAPHSFTAFDLALAEPKLVAEI

SEQ ID NO: 34731 - protein, 121 aa, Zea mays subsp. mays
  peptide (1)..(121): Ceres Seq. ID no. 12413102
  misc_feature (1)..(121): NCBI GI NO: 13398414 NR Description: arabinoxylan arabinofuranohydrolase isoenzyme AXAH-II
  misc_feature (1)..(121): NCBI GI NO: 13398412 NR Description: arabinoxylan arabinofuranohydrolase isoenzyme AXAH-I
  misc_feature (1)..(119): NCBI GI NO: 38347003 NR Description: OSJNBb0058J09.4
  misc_feature (1)..(118): NCBI GI NO: 33151175 NR Description: alpha-L-arabinofuranosidase [Malus x domestica]
  misc_feature (1)..(117): NCBI GI NO: 13937191 NR Description: AT3g10740/T7M13_18 [Arabidopsis thaliana]
  misc_feature (1)..(117): NCBI GI NO: 15228368 NR Description: glycosyl hydrolase family 51; protein id:At3g10740
  misc_feature (1)..(117): NCBI GI NO: 29825623 NR Description: alpha-L-arabinofuranosidase [Arabidopsis thaliana]
  misc_feature (1)..(112): NCBI GI NO: 16417958 NR Description: arabinosidase ARA-1 [Lycopersicon esculentum]
  misc_feature (1)..(116): NCBI GI NO: 22324432 NR Description: putative arabinoxylan narabinofuranohydrolaseisoenzyme AXAH-I
  misc_feature (1)..(121): NCBI GI NO: 22327075 NR Description: glycosyl hydrolase family 51; protein id:At5g26120
MIHPVNISSRYSSSLAASAITWQDAENSFLRVKVVNFGSDTVNLTVSTSGLGASVNALGSTATVLTSGNVMDENSFSNPNKVAPVKSQLSNAAEQMQVTLAPHSFTAFDLALAEPKLVAEI

SEQ ID NO: 34732 - DNA, 1156 bp, Zea mays subsp. mays
  misc_feature (1)..(1156): Ceres Seq. ID no. 12364587
gcattcagcgtgcgaccgaagctagctagcagttattcttgctttgcattaattattgcgagatcgatgacgatgtccattgttgctgccgtgctgctgttgctgctcgtcgtacatccacgggcggcagcgtcgcagccttctccgggctacttcccgagctccacggtgaggcccatggccttctcggatggatacgacaacctgtgggggccgcagcaccagacgctgtcgcaggacaggatggcgctcacgctcttgatggaccgcacctcaggcagcgggttcaagtccaagcgctcgtaccggaacggctacttcggcgtctccatcaaggtgcagccgggctacaccgccggcgtcaacaccgccttctacctgtccaacaacgagctgtacccggggaggcacgacgagatcgacatggagctgctgggcaccgtgccgggggagccctacacgctgcagaccaacgtgtacgtgcggggcaccggcgacggcgcgcgcctcgtgggccgggagatgcgcttccacctctggttcgacccggccgccgacttccaccactacgccatcctctggaaccccgaccagatcgtcttcctcgtcgacgacgtccccatcaggcgctacgccgccgccagtgcgccgttcttccccgaccgccagatgtgggcgtacggctccatctgggacgcctccgactgggccaccgacggcggccgctacagggccgactaccgctaccagcccttcctggcgggattccgggggttcaggaccgccggatgcgaggacgcccagtgccgtcccgtgccggcgtcccccgccggcgccggactcagcgtgcagcagcgggacgccatgcgctgggcgcagcagacctccatggtctactactactgccaggattacaccaaggatcgctccttgtacccagagtgctcgctcgctagctagcctagctaccactaccagagcaagagcatgcatggaggaggcgtgcgagtgaagaagcgccgccctacgtacgtaccgttctaaaattgtatgtacaattaagtctccatccacatccatatatacatatgtaatgtataattaagtccattattaatttaatcatcaaaaaatggaacatgcctatatatttcct

SEQ ID NO: 34733 - protein, 319 aa, Zea mays subsp. mays
  peptide (1)..(319): Ceres Seq. ID no. 12364588
  misc_feature (62)..(249): Pfam Name: Pfam Description:  Glycosyl hydrolases family 16
  misc_feature (31)..(315): NCBI GI NO: 37536586 NR Description: putative cellulase
  misc_feature (60)..(315): NCBI GI NO: 34902398 NR Description: Putative cellulase
  misc_feature (20)..(315): NCBI GI NO: 34901732 NR Description: putative xyloglucan endo-transglycosylase
  misc_feature (25)..(315): NCBI GI NO: 15228047 NR Description: xyloglucan endotransglycosylase, putative
  misc_feature (27)..(315): NCBI GI NO: 14029149 NR Description: xyloglucan endo-transglycosylase [Carica papaya]
  misc_feature (32)..(315): NCBI GI NO: 17402583 NR Description: Xyloglucan endo-transglycosylase
  misc_feature (28)..(315): NCBI GI NO: 15230574 NR Description: xyloglucan endotransglycosylase, putative
  misc_feature (28)..(315): NCBI GI NO: 1769907 NR Description: xyloglucan endo-transglycosylase
  misc_feature (25)..(315): NCBI GI NO: 1362078 NR Description: xyloglucan endo-1,4-beta-D-glucanase (EC 3
  misc_feature (127)..(315): NCBI GI NO: 1084391 NR Description: xyloglucan endo-1,4-beta-D-glucanase (EC 3
AFSVRPKLASSYSCFALIIARSMTMSIVAAVLLLLLVVHPRAAASQPSPGYFPSSTVRPMAFSDGYDNLWGPQHQTLSQDRMALTLLMDRTSGSGFKSKRSYRNGYFGVSIKVQPGYTAGVNTAFYLSNNELYPGRHDEIDMELLGTVPGEPYTLQTNVYVRGTGDGARLVGREMRFHLWFDPAADFHHYAILWNPDQIVFLVDDVPIRRYAAASAPFFPDRQMWAYGSIWDASDWATDGGRYRADYRYQPFLAGFRGFRTAGCEDAQCRPVPASPAGAGLSVQQRDAMRWAQQTSMVYYYCQDYTKDRSLYPECSLAS

SEQ ID NO: 34734 - protein, 297 aa, Zea mays subsp. mays
  peptide (1)..(297): Ceres Seq. ID no. 12364589
  misc_feature (40)..(227): Pfam Name: Pfam Description:  Glycosyl hydrolases family 16
  misc_feature (9)..(293): NCBI GI NO: 37536586 NR Description: putative cellulase
  misc_feature (38)..(293): NCBI GI NO: 34902398 NR Description: Putative cellulase
  misc_feature (1)..(293): NCBI GI NO: 34901732 NR Description: putative xyloglucan endo-transglycosylase
  misc_feature (3)..(293): NCBI GI NO: 15228047 NR Description: xyloglucan endotransglycosylase, putative
  misc_feature (5)..(293): NCBI GI NO: 14029149 NR Description: xyloglucan endo-transglycosylase [Carica papaya]
  misc_feature (10)..(293): NCBI GI NO: 17402583 NR Description: Xyloglucan endo-transglycosylase
  misc_feature (6)..(293): NCBI GI NO: 15230574 NR Description: xyloglucan endotransglycosylase, putative
  misc_feature (6)..(293): NCBI GI NO: 1769907 NR Description: xyloglucan endo-transglycosylase
  misc_feature (3)..(293): NCBI GI NO: 1362078 NR Description: xyloglucan endo-1,4-beta-D-glucanase (EC 3
  misc_feature (105)..(293): NCBI GI NO: 1084391 NR Description: xyloglucan endo-1,4-beta-D-glucanase (EC 3
MTMSIVAAVLLLLLVVHPRAAASQPSPGYFPSSTVRPMAFSDGYDNLWGPQHQTLSQDRMALTLLMDRTSGSGFKSKRSYRNGYFGVSIKVQPGYTAGVNTAFYLSNNELYPGRHDEIDMELLGTVPGEPYTLQTNVYVRGTGDGARLVGREMRFHLWFDPAADFHHYAILWNPDQIVFLVDDVPIRRYAAASAPFFPDRQMWAYGSIWDASDWATDGGRYRADYRYQPFLAGFRGFRTAGCEDAQCRPVPASPAGAGLSVQQRDAMRWAQQTSMVYYYCQDYTKDRSLYPECSLAS

SEQ ID NO: 34735 - protein, 295 aa, Zea mays subsp. mays
  peptide (1)..(295): Ceres Seq. ID no. 12364590
  misc_feature (38)..(225): Pfam Name: Pfam Description:  Glycosyl hydrolases family 16
  misc_feature (7)..(291): NCBI GI NO: 37536586 NR Description: putative cellulase
  misc_feature (36)..(291): NCBI GI NO: 34902398 NR Description: Putative cellulase
  misc_feature (1)..(291): NCBI GI NO: 34901732 NR Description: putative xyloglucan endo-transglycosylase
  misc_feature (1)..(291): NCBI GI NO: 15228047 NR Description: xyloglucan endotransglycosylase, putative
  misc_feature (3)..(291): NCBI GI NO: 14029149 NR Description: xyloglucan endo-transglycosylase [Carica papaya]
  misc_feature (8)..(291): NCBI GI NO: 17402583 NR Description: Xyloglucan endo-transglycosylase
  misc_feature (4)..(291): NCBI GI NO: 15230574 NR Description: xyloglucan endotransglycosylase, putative
  misc_feature (4)..(291): NCBI GI NO: 1769907 NR Description: xyloglucan endo-transglycosylase
  misc_feature (1)..(291): NCBI GI NO: 1362078 NR Description: xyloglucan endo-1,4-beta-D-glucanase (EC 3
  misc_feature (103)..(291): NCBI GI NO: 1084391 NR Description: xyloglucan endo-1,4-beta-D-glucanase (EC 3
MSIVAAVLLLLLVVHPRAAASQPSPGYFPSSTVRPMAFSDGYDNLWGPQHQTLSQDRMALTLLMDRTSGSGFKSKRSYRNGYFGVSIKVQPGYTAGVNTAFYLSNNELYPGRHDEIDMELLGTVPGEPYTLQTNVYVRGTGDGARLVGREMRFHLWFDPAADFHHYAILWNPDQIVFLVDDVPIRRYAAASAPFFPDRQMWAYGSIWDASDWATDGGRYRADYRYQPFLAGFRGFRTAGCEDAQCRPVPASPAGAGLSVQQRDAMRWAQQTSMVYYYCQDYTKDRSLYPECSLAS

SEQ ID NO: 34736 - DNA, 1054 bp, Zea mays subsp. mays
  misc_feature (1)..(1054): Ceres Seq. ID no. 12340668
ggaagaaacactcgcttctgagtttggtcgcggttttgcccctcccttcttgaactcctccgctcgatcgaactcagttccgattcggcaggttcattgtgaagttgaggtgggtggtataagcatcgaagagagcatgagcactgccagtggtacaaggcgtgcaccaagaagacagtcgcaagatgggtctgctgataaagtagtggtgatcatcgaagcaacctccccggtggtggggagccgtcgtggaccaccgacccctgttcctggcgcccaaaactcacccattgatgtggaggccatcgaagatgaagttcaggcagtatctccctcgcgagtgcccccaccgaggagggacaggagaaccaggagggaacctataacagtggttgacttggaggttgacgctagccaggaagggaacaaacgccagagggttgtggcagtagatcacctctctcccgattggggagcagggtccagcttgcagccaaatggcgtacaaaccggcaaagagcctgctaaggaggttcccaaggaaccatcttttacctgcccaatatgttggaataagatggaggagccttccacaacgacttgtggccatatcttctgcgacacgtgcatcaaacaggccatcaaggttcagaagaaatgccctacttgcaggaaggggctgaaaatgaatagtgttcatcgtattttccttccgaacgcttctagttaaggtcgattggctttgtcaaaggaacttctggtaacacaaggctgtgcaatgtacagtgaggatcagaagttcttgggtgaacagcagatagatgtttcatcctagtctgtatcatttaacagcatcactaggagctcatcatgaaaacttcctgactagggaagtggatatcagcctcagttttactggcctcttattgcatccgtggttcataatgttatttcgctgttgtatgtattaggttattactgtggtggattagtgtaactgggatttgcttcattgtaaaatgataatgacgagttgaaacgtttagcatttttg

SEQ ID NO: 34737 - protein, 242 aa, Zea mays subsp. mays
  peptide (1)..(242): Ceres Seq. ID no. 12340669
  misc_feature (191)..(223): Pfam Name: RING finger Pfam Description: Zinc finger, C3HC4 type
  misc_feature (54)..(238): NCBI GI NO: 21537318 NR Description: unknown [Arabidopsis thaliana]
  misc_feature (54)..(238): NCBI GI NO: 18422940 NR Description: Expressed protein; protein id: At5g48655
  misc_feature (57)..(238): NCBI GI NO: 21954077 NR Description: unknown protein [Arabidopsis thaliana]
  misc_feature (86)..(238): NCBI GI NO: 15231414 NR Description: putative RING zinc finger protein
  misc_feature (86)..(238): NCBI GI NO: 26451887 NR Description: putative RING finger protein
  misc_feature (191)..(242): NCBI GI NO: 19386727 NR Description: P0678F11.16
  misc_feature (184)..(237): NCBI GI NO: 20129579 NR Description: CG15150-PA [Drosophila melanogaster]
  misc_feature (113)..(237): NCBI GI NO: 24644441 NR Description: CG10981-PB [Drosophila melanogaster]
  misc_feature (113)..(237): NCBI GI NO: 21357313 NR Description: CG10981-PA [Drosophila melanogaster]
  misc_feature (81)..(237): NCBI GI NO: 33859620 NR Description: ring finger protein 4 [Mus musculus]
EETLASEFGRGFAPPFLNSSARSNSVPIRQVHCEVEVGGISIEESMSTASGTRRAPRRQSQDGSADKVVVIIEATSPVVGSRRGPPTPVPGAQNSPIDVEAIEDEVQAVSPSRVPPPRRDRRTRREPITVVDLEVDASQEGNKRQRVVAVDHLSPDWGAGSSLQPNGVQTGKEPAKEVPKEPSFTCPICWNKMEEPSTTTCGHIFCDTCIKQAIKVQKKCPTCRKGLKMNSVHRIFLPNASS

SEQ ID NO: 34738 - protein, 197 aa, Zea mays subsp. mays
  peptide (1)..(197): Ceres Seq. ID no. 12340670
  misc_feature (146)..(178): Pfam Name: RING finger Pfam Description: Zinc finger, C3HC4 type
  misc_feature (9)..(193): NCBI GI NO: 21537318 NR Description: unknown [Arabidopsis thaliana]
  misc_feature (9)..(193): NCBI GI NO: 18422940 NR Description: Expressed protein; protein id: At5g48655
  misc_feature (12)..(193): NCBI GI NO: 21954077 NR Description: unknown protein [Arabidopsis thaliana]
  misc_feature (41)..(193): NCBI GI NO: 15231414 NR Description: putative RING zinc finger protein
  misc_feature (41)..(193): NCBI GI NO: 26451887 NR Description: putative RING finger protein
  misc_feature (146)..(197): NCBI GI NO: 19386727 NR Description: P0678F11.16
  misc_feature (139)..(192): NCBI GI NO: 20129579 NR Description: CG15150-PA [Drosophila melanogaster]
  misc_feature (68)..(192): NCBI GI NO: 24644441 NR Description: CG10981-PB [Drosophila melanogaster]
  misc_feature (68)..(192): NCBI GI NO: 21357313 NR Description: CG10981-PA [Drosophila melanogaster]
  misc_feature (36)..(192): NCBI GI NO: 33859620 NR Description: ring finger protein 4 [Mus musculus]
MSTASGTRRAPRRQSQDGSADKVVVIIEATSPVVGSRRGPPTPVPGAQNSPIDVEAIEDEVQAVSPSRVPPPRRDRRTRREPITVVDLEVDASQEGNKRQRVVAVDHLSPDWGAGSSLQPNGVQTGKEPAKEVPKEPSFTCPICWNKMEEPSTTTCGHIFCDTCIKQAIKVQKKCPTCRKGLKMNSVHRIFLPNASS

SEQ ID NO: 34739 - DNA, 1264 bp, Zea mays subsp. mays
  misc_feature (1)..(1264): Ceres Seq. ID no. 12411439
atgccagagcaaacccataggtccagtccaaatccaatccctgttgccatgagaatttcaggggcagccatggccgaaaaggagagcaacggagtgcgggtgtgcgtcaccggaggagccgggttcatcggctcctggctcgtcaggaagctcctcgagaaaggctacaccgtccacgccaccctgcggaacaccggggacgaggcgaaggcggggctgctgcgtcggctggtccccggcgcagcggagcggctgcggttgttccaggccgacctcttcgacgccgccaccttcgcgccggcgatcgctgggtgccagttcgtcttcctcgtcgccacgccattcgggctcgatagcgccggctcccagtataagagcacggcggaagctgtggtggacgcggtgcacgcgatcctccggcaatgcgaggagtccaggacggtgaagcgagtgatccacacggcctccgtagcggccgcctcgccgctgctggaggaggaggtccccgcctccggcgtcgggtacagagacttcatcgacgaatcttgttggacttcgctcaacgttgactatcctctacgaagcgcacacttcgacaagtacatactgtcgaagctgcagtcggagcaagagctcctgagctacaacaacggcgagagtccggcgttcgaggtggtgaccctgccgctggggctcgtggcgggcgacacggtcctcggccgcgccccggagacggtggagagcgccgtggcgcccgtgtcccgcagcgagccctacttcggcctcctgcgcatactgcagcagctcctggggtcgctgccgctggtgcacgtggacgacgtctgcgacgcgctcgtcttctgcatggagcggcgcccctccgtcgccggccgcttcctctgcgccgccgcgtacccgacgatccacgacgtggtcgcccactacgccagcaagttccctcacctcgacatcttgaaagagacgacggaggcggtggcgacggtgcggcctgcccgggacaggttgggcgagctgggcttcaagtacaagtacggcatggaagagattctggatagcagcgttgcctgtgcggcgagattgggttcccttgacggatccaagctcggcctacagaaaggataaaagctcgaagcttactcataagcaccatggggaacttggattgttcgctgtccactatacgcgttcgaaatttggaaactagacatactccaataaaacaagaggtaaagaaacggaattc

SEQ ID NO: 34740 - protein, 380 aa, Zea mays subsp. mays
  peptide (1)..(380): Ceres Seq. ID no. 12411440
  misc_feature (34)..(171): Pfam Name: Pfam Description:  NAD dependent epimerase/dehydratase family
  misc_feature (24)..(380): NCBI GI NO: 7431417 NR Description: NADPH HC toxin reductase hm1 - maize
  misc_feature (24)..(379): NCBI GI NO: 2911362 NR Description: NADPH HC toxin reductase [Zea mays]
  misc_feature (24)..(379): NCBI GI NO: 7431414 NR Description: NADPH HC toxin reductase - maize
  misc_feature (24)..(380): NCBI GI NO: 7431416 NR Description: NADPH HC toxin reductase - maize
  misc_feature (24)..(380): NCBI GI NO: 7431413 NR Description: NADPH HC-toxin reductase - maize
  misc_feature (17)..(380): NCBI GI NO: 7431412 NR Description: HC-toxin reductase (EC 1.-.-.-) - barley
  misc_feature (67)..(304): NCBI GI NO: 21927696 NR Description: NADPH HC toxin reductase [Zea mays subsp. mays]
  misc_feature (67)..(304): NCBI GI NO: 21927715 NR Description: NADPH HC toxin reductase
  misc_feature (67)..(304): NCBI GI NO: 21927713 NR Description: NADPH HC toxin reductase
  misc_feature (67)..(304): NCBI GI NO: 21927723 NR Description: NADPH HC toxin reductase
MPEQTHRSSPNPIPVAMRISGAAMAEKESNGVRVCVTGGAGFIGSWLVRKLLEKGYTVHATLRNTGDEAKAGLLRRLVPGAAERLRLFQADLFDAATFAPAIAGCQFVFLVATPFGLDSAGSQYKSTAEAVVDAVHAILRQCEESRTVKRVIHTASVAAASPLLEEEVPASGVGYRDFIDESCWTSLNVDYPLRSAHFDKYILSKLQSEQELLSYNNGESPAFEVVTLPLGLVAGDTVLGRAPETVESAVAPVSRSEPYFGLLRILQQLLGSLPLVHVDDVCDALVFCMERRPSVAGRFLCAAAYPTIHDVVAHYASKFPHLDILKETTEAVATVRPARDRLGELGFKYKYGMEEILDSSVACAARLGSLDGSKLGLQKG

SEQ ID NO: 34741 - protein, 364 aa, Zea mays subsp. mays
  peptide (1)..(364): Ceres Seq. ID no. 12411441
  misc_feature (18)..(155): Pfam Name: Pfam Description:  NAD dependent epimerase/dehydratase family
  misc_feature (8)..(364): NCBI GI NO: 7431417 NR Description: NADPH HC toxin reductase hm1 - maize
  misc_feature (8)..(363): NCBI GI NO: 2911362 NR Description: NADPH HC toxin reductase [Zea mays]
  misc_feature (8)..(363): NCBI GI NO: 7431414 NR Description: NADPH HC toxin reductase - maize
  misc_feature (8)..(364): NCBI GI NO: 7431416 NR Description: NADPH HC toxin reductase - maize
  misc_feature (8)..(364): NCBI GI NO: 7431413 NR Description: NADPH HC-toxin reductase - maize
  misc_feature (1)..(364): NCBI GI NO: 7431412 NR Description: HC-toxin reductase (EC 1.-.-.-) - barley
  misc_feature (51)..(288): NCBI GI NO: 21927696 NR Description: NADPH HC toxin reductase [Zea mays subsp. mays]
  misc_feature (51)..(288): NCBI GI NO: 21927715 NR Description: NADPH HC toxin reductase
  misc_feature (51)..(288): NCBI GI NO: 21927713 NR Description: NADPH HC toxin reductase
  misc_feature (51)..(288): NCBI GI NO: 21927723 NR Description: NADPH HC toxin reductase
MRISGAAMAEKESNGVRVCVTGGAGFIGSWLVRKLLEKGYTVHATLRNTGDEAKAGLLRRLVPGAAERLRLFQADLFDAATFAPAIAGCQFVFLVATPFGLDSAGSQYKSTAEAVVDAVHAILRQCEESRTVKRVIHTASVAAASPLLEEEVPASGVGYRDFIDESCWTSLNVDYPLRSAHFDKYILSKLQSEQELLSYNNGESPAFEVVTLPLGLVAGDTVLGRAPETVESAVAPVSRSEPYFGLLRILQQLLGSLPLVHVDDVCDALVFCMERRPSVAGRFLCAAAYPTIHDVVAHYASKFPHLDILKETTEAVATVRPARDRLGELGFKYKYGMEEILDSSVACAARLGSLDGSKLGLQKG

SEQ ID NO: 34742 - protein, 357 aa, Zea mays subsp. mays
  peptide (1)..(357): Ceres Seq. ID no. 12411442
  misc_feature (11)..(148): Pfam Name: Pfam Description:  NAD dependent epimerase/dehydratase family
  misc_feature (1)..(357): NCBI GI NO: 7431417 NR Description: NADPH HC toxin reductase hm1 - maize
  misc_feature (1)..(356): NCBI GI NO: 2911362 NR Description: NADPH HC toxin reductase [Zea mays]
  misc_feature (1)..(356): NCBI GI NO: 7431414 NR Description: NADPH HC toxin reductase - maize
  misc_feature (1)..(357): NCBI GI NO: 7431416 NR Description: NADPH HC toxin reductase - maize
  misc_feature (1)..(357): NCBI GI NO: 7431413 NR Description: NADPH HC-toxin reductase - maize
  misc_feature (1)..(357): NCBI GI NO: 7431412 NR Description: HC-toxin reductase (EC 1.-.-.-) - barley
  misc_feature (44)..(281): NCBI GI NO: 21927696 NR Description: NADPH HC toxin reductase [Zea mays subsp. mays]
  misc_feature (44)..(281): NCBI GI NO: 21927715 NR Description: NADPH HC toxin reductase
  misc_feature (44)..(281): NCBI GI NO: 21927713 NR Description: NADPH HC toxin reductase
  misc_feature (44)..(281): NCBI GI NO: 21927723 NR Description: NADPH HC toxin reductase
MAEKESNGVRVCVTGGAGFIGSWLVRKLLEKGYTVHATLRNTGDEAKAGLLRRLVPGAAERLRLFQADLFDAATFAPAIAGCQFVFLVATPFGLDSAGSQYKSTAEAVVDAVHAILRQCEESRTVKRVIHTASVAAASPLLEEEVPASGVGYRDFIDESCWTSLNVDYPLRSAHFDKYILSKLQSEQELLSYNNGESPAFEVVTLPLGLVAGDTVLGRAPETVESAVAPVSRSEPYFGLLRILQQLLGSLPLVHVDDVCDALVFCMERRPSVAGRFLCAAAYPTIHDVVAHYASKFPHLDILKETTEAVATVRPARDRLGELGFKYKYGMEEILDSSVACAARLGSLDGSKLGLQKG

SEQ ID NO: 34743 - DNA, 1177 bp, Zea mays subsp. mays
  misc_feature (1)..(1177): Ceres Seq. ID no. 12341403
acatatgctgtccgtcaccgcgcgcgcctccttgcccttcttcaccctttcctcccggacccggcgtctccgtgcccgtgcgtgccttctccggcctgcggtctcctccaccggccaccgctgcctcgcaattgggcaaggcaatcagaccgctcccatcaaccgccctgaccgcgcgaggaagatcaaacgcggaggccgtccgtccctcccgcgttatcgtgatgccaggcctcgccgcagccgagcaggacgccgtctcgctggtgcggcgcgtcgcccgcgctctcaaccgccgcttcaccgacatcgtcgcactgctcttcagccacaagggcgctggatcgctcggcgccgtcgcggggttcgccatcgccgtcgtgttcgcgtggaagttcctgcgcccccgcagacgtgctcccaagcggcccccacctacccctgcagcggctcccgctgcgactgtgcctgatgcggccgagcctatcggtgactcaggcaaggtagtaacacgggaaattgtggtgaagcgactgaaaggctgcagaaaggttacatgccaacttctcggtgttgtttttgaggaaaaaattcctgaggagcttcagaaacatgccacagttagaccctccgtggtagagctgctactggaaatatccagatattgtgatctctacctaatggagactgtaattgacgataagagcgaggaaaatgctctcatggccctggagatctctggacttttcagaactggtggcctgatgaaagagaaggtgctcttttgcagctctgaagttggtcgaacttcatttgttcgacagttggagtcagattttcacatagacacgagccttgacatagtttctcaactatctcggttcattcgatgccaactatttatttccacggtggaaggagaacagcttgcaggcaacgtattcaattctccaagtcttgagcagttcttctcttgatggcgggacgcaaagaaaggccttctgcactccaaacaaatgtgctgatttcacaattgtgacttgtgagttgtaggcttgtagcgcccccaaccaaggcctggacgcaacaaacaccctactcctgttggagttaagttgtgatcatgcaagatgtatattaaacagacaataataagttggtaaaaatattcatattt

SEQ ID NO: 34744 - protein, 324 aa, Zea mays subsp. mays
  peptide (1)..(324): Ceres Seq. ID no. 12341404
  misc_feature (75)..(324): NCBI GI NO: 38345629 NR Description: OSJNBb0004A17.10
  misc_feature (155)..(323): NCBI GI NO: 17381010 NR Description: unknown protein [Arabidopsis thaliana]
  misc_feature (83)..(162): NCBI GI NO: 17381010 NR Description: unknown protein [Arabidopsis thaliana]
  misc_feature (176)..(323): NCBI GI NO: 21618311 NR Description: unknown [Arabidopsis thaliana]
  misc_feature (182)..(292): NCBI GI NO: 39546241 NR Description: OSJNBa0089N06.11
  misc_feature (227)..(323): NCBI GI NO: 18403177 NR Description: unknown protein; protein id: At3g21865
ICCPSPRAPPCPSSPFPPGPGVSVPVRAFSGLRSPPPATAASQLGKAIRPLPSTALTARGRSNAEAVRPSRVIVMPGLAAAEQDAVSLVRRVARALNRRFTDIVALLFSHKGAGSLGAVAGFAIAVVFAWKFLRPRRRAPKRPPPTPAAAPAATVPDAAEPIGDSGKVVTREIVVKRLKGCRKVTCQLLGVVFEEKIPEELQKHATVRPSVVELLLEISRYCDLYLMETVIDDKSEENALMALEISGLFRTGGLMKEKVLFCSSEVGRTSFVRQLESDFHIDTSLDIVSQLSRFIRCQLFISTVEGEQLAGNVFNSPSLEQFFS

SEQ ID NO: 34745 - protein, 250 aa, Zea mays subsp. mays
  peptide (1)..(250): Ceres Seq. ID no. 12341405
  misc_feature (1)..(250): NCBI GI NO: 38345629 NR Description: OSJNBb0004A17.10
  misc_feature (81)..(249): NCBI GI NO: 17381010 NR Description: unknown protein [Arabidopsis thaliana]
  misc_feature (9)..(88): NCBI GI NO: 17381010 NR Description: unknown protein [Arabidopsis thaliana]
  misc_feature (102)..(249): NCBI GI NO: 21618311 NR Description: unknown [Arabidopsis thaliana]
  misc_feature (108)..(218): NCBI GI NO: 39546241 NR Description: OSJNBa0089N06.11
  misc_feature (153)..(249): NCBI GI NO: 18403177 NR Description: unknown protein; protein id: At3g21865
MPGLAAAEQDAVSLVRRVARALNRRFTDIVALLFSHKGAGSLGAVAGFAIAVVFAWKFLRPRRRAPKRPPPTPAAAPAATVPDAAEPIGDSGKVVTREIVVKRLKGCRKVTCQLLGVVFEEKIPEELQKHATVRPSVVELLLEISRYCDLYLMETVIDDKSEENALMALEISGLFRTGGLMKEKVLFCSSEVGRTSFVRQLESDFHIDTSLDIVSQLSRFIRCQLFISTVEGEQLAGNVFNSPSLEQFFS

SEQ ID NO: 34746 - DNA, 1385 bp, Zea mays subsp. mays
  misc_feature (1)..(1385): Ceres Seq. ID no. 12411435
agccgaagaaccctcgctcgagaccgaagaagacaaaatcgcatctcctcgcctcctcccctcctcccgagatccgggcaaagcgcgccgcgcgagaaccaggatatcgatttaggtatatggacaaggtgtctgaaggtactaagtgagatggataagaagaaagggaccgatggcaccgaaccaggaccagctccatctcgtgccgtcgacagatttggttttataaagccagaacaaggcaattcacctgatggaattccaaaaggcaagtctatacatgagcgtgaaagggaggaaagaaggataagaaaatggaggaagatgataggtgttggtggtaatgactggaagcattatgttagaaggaaccctcatgtggttaaaaggcgaataaggaaaggaattcctgattgtctcagaggacttgtttggcagttgatttcaggcagtcgggacctcttactaatgaacccaggggtttacgagacactggtgatatatgagacatcggcctctgaattggaaattattcgtgacatatcacgcacatttccatctcatatattctttcaacaaaggcatggtccaggccaaagatcattgtataacattttgaaagcatattctgtctatgacagggatgttggatatgtgcagggaatgggatttttagctgggctgctgcttctttatatgagtgaggaggatgcattctggttattagtcgcgttgctaaagggagctgtccatgcaccaatggaaggcttgtatcaggctggtttgccgcttgtgcagcaatatttgtctcagtttgagaaattagttattgagctcatgccaaaattgggacaacactttgttgaagaaatgataaacccaagcatgtatgcaagtcaatggtttatcacagttttctcatattccttcccatttcatctaactcttagagtttgggatgtgtttctttatgagggtattaaggttgtattccaagttggattggctctattgagactctgtcacgatgatttagtcaaattaccttttgagaaactgctctatgccttgagaaatttccctcaggaagcgacagatccagatgtattattgccgcttgccttttcatttaaggtatcgagtcgtctcgaggagcttcagaaggagtatcagaagcgacaggagggcaccagtgaaacttcaagcggcgagcggctacagcccctcgtatcgaagacgatgagcagggtcggtagccgtgttgtgtcgaacttaacgaccgctgacagaaaatgacagacacgttctcttgtttgtttgtaactcgcatgtacactgtacagaaagaacggccttataatccatccatctaacagtatttgttc

SEQ ID NO: 34747 - protein, 431 aa, Zea mays subsp. mays
  peptide (1)..(431): Ceres Seq. ID no. 12411436
  misc_feature (132)..(348): Pfam Name: Pfam Description:  TBC domain
  misc_feature (51)..(405): NCBI GI NO: 15237222 NR Description: plant adhesion molecule 1
  misc_feature (51)..(392): NCBI GI NO: 18396196 NR Description: putative plant adhesion molecule
  misc_feature (51)..(344): NCBI GI NO: 30678579 NR Description: plant adhesion molecule -related
  misc_feature (346)..(392): NCBI GI NO: 30678579 NR Description: plant adhesion molecule -related
  misc_feature (109)..(405): NCBI GI NO: 22531279 NR Description: plant adhesion molecule PAM1
  misc_feature (51)..(346): NCBI GI NO: 6957709 NR Description: putative plant adhesion molecule
  misc_feature (115)..(390): NCBI GI NO: 27777640 NR Description: hypothetical protein MGC29047 [Mus musculus]
  misc_feature (115)..(390): NCBI GI NO: 27692588 NR Description: hypothetical protein MGC29047 [Mus musculus]
  misc_feature (115)..(390): NCBI GI NO: 21687020 NR Description: similar to ecotropic viral integration site 5
  misc_feature (170)..(394): NCBI GI NO: 23487611 NR Description: plant adhesion molecule 1-related
SRRTLARDRRRQNRISSPPPLLPRSGQSAPRENQDIDLGIWTRCLKVLSEMDKKKGTDGTEPGPAPSRAVDRFGFIKPEQGNSPDGIPKGKSIHEREREERRIRKWRKMIGVGGNDWKHYVRRNPHVVKRRIRKGIPDCLRGLVWQLISGSRDLLLMNPGVYETLVIYETSASELEIIRDISRTFPSHIFFQQRHGPGQRSLYNILKAYSVYDRDVGYVQGMGFLAGLLLLYMSEEDAFWLLVALLKGAVHAPMEGLYQAGLPLVQQYLSQFEKLVIELMPKLGQHFVEEMINPSMYASQWFITVFSYSFPFHLTLRVWDVFLYEGIKVVFQVGLALLRLCHDDLVKLPFEKLLYALRNFPQEATDPDVLLPLAFSFKVSSRLEELQKEYQKRQEGTSETSSGERLQPLVSKTMSRVGSRVVSNLTTADRK

SEQ ID NO: 34748 - protein, 381 aa, Zea mays subsp. mays
  peptide (1)..(381): Ceres Seq. ID no. 12411437
  misc_feature (82)..(298): Pfam Name: Pfam Description:  TBC domain
  misc_feature (1)..(355): NCBI GI NO: 15237222 NR Description: plant adhesion molecule 1
  misc_feature (1)..(342): NCBI GI NO: 18396196 NR Description: putative plant adhesion molecule
  misc_feature (1)..(294): NCBI GI NO: 30678579 NR Description: plant adhesion molecule -related
  misc_feature (296)..(342): NCBI GI NO: 30678579 NR Description: plant adhesion molecule -related
  misc_feature (59)..(355): NCBI GI NO: 22531279 NR Description: plant adhesion molecule PAM1
  misc_feature (1)..(296): NCBI GI NO: 6957709 NR Description: putative plant adhesion molecule
  misc_feature (65)..(340): NCBI GI NO: 27777640 NR Description: hypothetical protein MGC29047 [Mus musculus]
  misc_feature (65)..(340): NCBI GI NO: 27692588 NR Description: hypothetical protein MGC29047 [Mus musculus]
  misc_feature (65)..(340): NCBI GI NO: 21687020 NR Description: similar to ecotropic viral integration site 5
  misc_feature (120)..(344): NCBI GI NO: 23487611 NR Description: plant adhesion molecule 1-related
MDKKKGTDGTEPGPAPSRAVDRFGFIKPEQGNSPDGIPKGKSIHEREREERRIRKWRKMIGVGGNDWKHYVRRNPHVVKRRIRKGIPDCLRGLVWQLISGSRDLLLMNPGVYETLVIYETSASELEIIRDISRTFPSHIFFQQRHGPGQRSLYNILKAYSVYDRDVGYVQGMGFLAGLLLLYMSEEDAFWLLVALLKGAVHAPMEGLYQAGLPLVQQYLSQFEKLVIELMPKLGQHFVEEMINPSMYASQWFITVFSYSFPFHLTLRVWDVFLYEGIKVVFQVGLALLRLCHDDLVKLPFEKLLYALRNFPQEATDPDVLLPLAFSFKVSSRLEELQKEYQKRQEGTSETSSGERLQPLVSKTMSRVGSRVVSNLTTADRK

SEQ ID NO: 34749 - protein, 323 aa, Zea mays subsp. mays
  peptide (1)..(323): Ceres Seq. ID no. 12411438
  misc_feature (24)..(240): Pfam Name: Pfam Description:  TBC domain
  misc_feature (1)..(297): NCBI GI NO: 15237222 NR Description: plant adhesion molecule 1
  misc_feature (1)..(284): NCBI GI NO: 18396196 NR Description: putative plant adhesion molecule
  misc_feature (1)..(236): NCBI GI NO: 30678579 NR Description: plant adhesion molecule -related
  misc_feature (238)..(284): NCBI GI NO: 30678579 NR Description: plant adhesion molecule -related
  misc_feature (1)..(297): NCBI GI NO: 22531279 NR Description: plant adhesion molecule PAM1
  misc_feature (1)..(238): NCBI GI NO: 6957709 NR Description: putative plant adhesion molecule
  misc_feature (7)..(282): NCBI GI NO: 27777640 NR Description: hypothetical protein MGC29047 [Mus musculus]
  misc_feature (7)..(282): NCBI GI NO: 27692588 NR Description: hypothetical protein MGC29047 [Mus musculus]
  misc_feature (7)..(282): NCBI GI NO: 21687020 NR Description: similar to ecotropic viral integration site 5
  misc_feature (62)..(286): NCBI GI NO: 23487611 NR Description: plant adhesion molecule 1-related
MIGVGGNDWKHYVRRNPHVVKRRIRKGIPDCLRGLVWQLISGSRDLLLMNPGVYETLVIYETSASELEIIRDISRTFPSHIFFQQRHGPGQRSLYNILKAYSVYDRDVGYVQGMGFLAGLLLLYMSEEDAFWLLVALLKGAVHAPMEGLYQAGLPLVQQYLSQFEKLVIELMPKLGQHFVEEMINPSMYASQWFITVFSYSFPFHLTLRVWDVFLYEGIKVVFQVGLALLRLCHDDLVKLPFEKLLYALRNFPQEATDPDVLLPLAFSFKVSSRLEELQKEYQKRQEGTSETSSGERLQPLVSKTMSRVGSRVVSNLTTADRK

SEQ ID NO: 34750 - DNA, 903 bp, Zea mays subsp. mays
  misc_feature (1)..(903): Ceres Seq. ID no. 12355756
agggatagcataacaccgccgaggaagcagcaagcagcaaggtcgacatgtcgtctccgccgccggtgaagctgatcggcttcttcggcagcccgtacgcgttccgcgcggaggcggcgctgtgcctgaaaggcgtgccgtacgagctgatcctggaggacctgttcggcagcaagagcgagctcctgctccaccacaaccccgtgcacaagaaggtgcccgtgctcctccacggcgacggccgggccatctccgagtccctcgtcatcgccgagtacgtcgacgaggccttcgacgggccgccgctgctccccgccgacccctacgcgcgcgccgccgcccgcttctgggccgacttcatcgagaccaggctcaccaagcccttcttcatggcgatctgggtggaggagcgcgacgcgcggctgcggttcgaggaggaggccaaggagctcgtggcgctgctggaggcgcagctcgagggaaagaggttcttcgccggcgacaggccggggtacctcgacgtggccgcgtccgcgctcgggccctggcgcagcgtcatcgaggagctcaacggtgtggcgctgctcagcgaggatgaccaccccaacctgtgccggtggaccagggactactgcgccttcgaggctctcaagccgtgcatgccggatcgggagaagctcctcgcctacttcactaagaacttcgacaggtacaaggcggccgtcaatgcgacgctatcgcagtcgcagcagtaataactgcccaactgggtacgcctctgcccggccgtatggcgggcgtttctttttttctttcttcagaataacgtagctgtgcccagtactcatgttttcaattctgcaaagtgcaaaccaacaagtcgctgtgtggtttactcttttt

SEQ ID NO: 34751 - protein, 235 aa, Zea mays subsp. mays
  peptide (1)..(235): Ceres Seq. ID no. 12355757
  misc_feature (1)..(235): NCBI GI NO: 11385493 NR Description: glutathione S-transferase GST 21 [Zea mays]
  misc_feature (5)..(232): NCBI GI NO: 4468798 NR Description: GST7 protein [Zea mays]
  misc_feature (1)..(228): NCBI GI NO: 11385509 NR Description: glutathione S-transferase GST 29 [Zea mays]
  misc_feature (3)..(228): NCBI GI NO: 19386822 NR Description: putative glutathione S-transferase GST 24
  misc_feature (1)..(232): NCBI GI NO: 13699857 NR Description: glutathione S-transferase GST 24 [Zea mays]
  misc_feature (7)..(232): NCBI GI NO: 19386820 NR Description: putative glutathione S-transferase GST 24
  misc_feature (6)..(232): NCBI GI NO: 19386819 NR Description: putative glutathione S-transferase GST 24
  misc_feature (7)..(229): NCBI GI NO: 11385507 NR Description: glutathione S-transferase GST 28 [Zea mays]
  misc_feature (7)..(232): NCBI GI NO: 34896730 NR Description: putative glutathione transferase
  misc_feature (1)..(230): NCBI GI NO: 19386816 NR Description: putative glutathione S-transferase GST 24
MSSPPPVKLIGFFGSPYAFRAEAALCLKGVPYELILEDLFGSKSELLLHHNPVHKKVPVLLHGDGRAISESLVIAEYVDEAFDGPPLLPADPYARAAARFWADFIETRLTKPFFMAIWVEERDARLRFEEEAKELVALLEAQLEGKRFFAGDRPGYLDVAASALGPWRSVIEELNGVALLSEDDHPNLCRWTRDYCAFEALKPCMPDREKLLAYFTKNFDRYKAAVNATLSQSQQ

SEQ ID NO: 34752 - protein, 121 aa, Zea mays subsp. mays
  peptide (1)..(121): Ceres Seq. ID no. 12355758
  misc_feature (1)..(121): NCBI GI NO: 11385493 NR Description: glutathione S-transferase GST 21 [Zea mays]
  misc_feature (1)..(118): NCBI GI NO: 4468798 NR Description: GST7 protein [Zea mays]
  misc_feature (1)..(114): NCBI GI NO: 11385509 NR Description: glutathione S-transferase GST 29 [Zea mays]
  misc_feature (1)..(114): NCBI GI NO: 19386822 NR Description: putative glutathione S-transferase GST 24
  misc_feature (1)..(118): NCBI GI NO: 13699857 NR Description: glutathione S-transferase GST 24 [Zea mays]
  misc_feature (1)..(118): NCBI GI NO: 19386820 NR Description: putative glutathione S-transferase GST 24
  misc_feature (1)..(118): NCBI GI NO: 19386819 NR Description: putative glutathione S-transferase GST 24
  misc_feature (1)..(115): NCBI GI NO: 11385507 NR Description: glutathione S-transferase GST 28 [Zea mays]
  misc_feature (1)..(118): NCBI GI NO: 34896730 NR Description: putative glutathione transferase
  misc_feature (1)..(116): NCBI GI NO: 19386816 NR Description: putative glutathione S-transferase GST 24
MAIWVEERDARLRFEEEAKELVALLEAQLEGKRFFAGDRPGYLDVAASALGPWRSVIEELNGVALLSEDDHPNLCRWTRDYCAFEALKPCMPDREKLLAYFTKNFDRYKAAVNATLSQSQQ

SEQ ID NO: 34753 - DNA, 1565 bp, Zea mays subsp. mays
  misc_feature (1)..(1565): Ceres Seq. ID no. 12411428
aaccatcctccctccacagatctctccggggaggcagcaacagttatgtcatatcattgtcgcgtcctcgtccccgttccatttcattatccccccggagctggtgcgcgagtcggagctggtgcagggtcacccttcccctcggcctcaagagctctgcggttgccgcggccaagggcgtccgtggagaagcgggagcaggtggcggcgatggaagagcaaggcggccaggcggcgctcgggtgggcggccagggacgactccggcgtcctctccccctacagcttctccagaagggttcctaaagacgacgatgtcacgatcaaggtgctctactgcgggatctgccacaccgacctgcacgtcatcaagaacgactggcgaaacgccatgtacccagtcgtcccggggtaaccgatccaatttcgctagcctagacgccccggatgctgttgcaaaactaacagcctctgtctgtctgaccccgtcggctggcgtggcgtggcgagcaggcacgagatcgtgggcgtggtgaccggcgtcggcggcggcgtcacgcggttcaaggccggcgacacggtcggcgtgggctacttcgtggggtcctgccgctcctgcgacagctgcggcaagggggacgacaactactgcgcggggatcgtgctcacctccaacggcgtcgaccacgcgcacggcggcgcgcccaccagggggggattctccgacgtcctggtcgcgagcgagcactacgtggtccgcgtccccgacggcctggcgctggaccgcaccgcgccgctgctctcgccggcgtcaccgtgtacagccccatgatgcgccacggcctcaacgagcccggcaagcacctcggcgtcgtcggcctcggcggcctcggccacgtcgccgtcaagttcggcaaggccttcgggatgaaggtcaccgtcatcagcacgtccgccagcaagcgccaggaggccatcgagaacctcggcgcggacgagttcctcatcagccgggacaaggaccagatgaaggcggcgacggggaccatggacggcatcatcgacacggtgtcggcgtggcacccgatcacgccgctgctggcgctgctgaagccgctggggcagatggtggtcgtgggcgcgccgagcaagccgctcgagctgccggcctacgccatcgtgccgggcgggaagggcgtggctgggaacaatgtcggcagcgtcagggactgccaggccatgctcgagttcgcggggaagcacggcatcggggccgaggtcgaggtcatcaagatggactacgtcaacacggccatggagcggctcgagaagaacgacgtccgctaccgcttcgtcatcgacgtcgccggcagcctcggctctgccgcctaggcatggctgcaaaggtttcaatcagagcccagccgcaataatttgttagctaccgaatgaatgatggtctacgcttgttgatgagttggtgctttgtcgtggttttgtggatgtaataattcgatgtacaaataaaaaaaggggagacaaggtgcttgttcccttggtttggtg

SEQ ID NO: 34754 - protein, 187 aa, Zea mays subsp. mays
  peptide (1)..(187): Ceres Seq. ID no. 12411429
  misc_feature (1)..(158): NCBI GI NO: 19849246 NR Description: cinnamyl alcohol dehydrogenase [Lolium perenne]
  misc_feature (1)..(185): NCBI GI NO: 14279694 NR Description: sinapyl alcohol dehydrogenase
  misc_feature (1)..(183): NCBI GI NO: 10720090 NR Description: Probable mannitol dehydrogenase
  misc_feature (1)..(187): NCBI GI NO: 19849248 NR Description: cinnamyl alcohol dehydrogenase [Lolium perenne]
  misc_feature (1)..(183): NCBI GI NO: 10720093 NR Description: Probable mannitol dehydrogenase
  misc_feature (1)..(186): NCBI GI NO: 34013695 NR Description: 10-hydroxygeraniol oxidoreductase
  misc_feature (1)..(183): NCBI GI NO: 16267 NR Description: Eli3-1 [Arabidopsis thaliana]
  misc_feature (1)..(183): NCBI GI NO: 15233642 NR Description: cinnamyl-alcohol dehydrogenase ELI3-1
  misc_feature (1)..(187): NCBI GI NO: 13507210 NR Description: cinnamyl alcohol dehydrogenase
  misc_feature (1)..(183): NCBI GI NO: 7430935 NR Description: probable cinnamyl-alcohol dehydrogenase (EC1
MMRHGLNEPGKHLGVVGLGGLGHVAVKFGKAFGMKVTVISTSASKRQEAIENLGADEFLISRDKDQMKAATGTMDGIIDTVSAWHPITPLLALLKPLGQMVVVGAPSKPLELPAYAIVPGGKGVAGNNVGSVRDCQAMLEFAGKHGIGAEVEVIKMDYVNTAMERLEKNDVRYRFVIDVAGSLGSAA

SEQ ID NO: 34755 - protein, 186 aa, Zea mays subsp. mays
  peptide (1)..(186): Ceres Seq. ID no. 12411430
  misc_feature (1)..(157): NCBI GI NO: 19849246 NR Description: cinnamyl alcohol dehydrogenase [Lolium perenne]
  misc_feature (1)..(184): NCBI GI NO: 14279694 NR Description: sinapyl alcohol dehydrogenase
  misc_feature (1)..(182): NCBI GI NO: 10720090 NR Description: Probable mannitol dehydrogenase
  misc_feature (1)..(186): NCBI GI NO: 19849248 NR Description: cinnamyl alcohol dehydrogenase [Lolium perenne]
  misc_feature (1)..(182): NCBI GI NO: 10720093 NR Description: Probable mannitol dehydrogenase
  misc_feature (1)..(185): NCBI GI NO: 34013695 NR Description: 10-hydroxygeraniol oxidoreductase
  misc_feature (1)..(182): NCBI GI NO: 16267 NR Description: Eli3-1 [Arabidopsis thaliana]
  misc_feature (1)..(182): NCBI GI NO: 15233642 NR Description: cinnamyl-alcohol dehydrogenase ELI3-1
  misc_feature (1)..(186): NCBI GI NO: 13507210 NR Description: cinnamyl alcohol dehydrogenase
  misc_feature (1)..(182): NCBI GI NO: 7430935 NR Description: probable cinnamyl-alcohol dehydrogenase (EC1
MRHGLNEPGKHLGVVGLGGLGHVAVKFGKAFGMKVTVISTSASKRQEAIENLGADEFLISRDKDQMKAATGTMDGIIDTVSAWHPITPLLALLKPLGQMVVVGAPSKPLELPAYAIVPGGKGVAGNNVGSVRDCQAMLEFAGKHGIGAEVEVIKMDYVNTAMERLEKNDVRYRFVIDVAGSLGSAA

SEQ ID NO: 34756 - protein, 177 aa, Zea mays subsp. mays
  peptide (1)..(177): Ceres Seq. ID no. 12411431
  misc_feature (85)..(177): Pfam Name: Pfam Description:  Equine herpesvirus glycoprotein gp2
  misc_feature (64)..(177): NCBI GI NO: 11360494 NR Description: antifreeze glycopeptide AFGP polyprotein precursor
  misc_feature (75)..(177): NCBI GI NO: 11360494 NR Description: antifreeze glycopeptide AFGP polyprotein precursor
  misc_feature (87)..(177): NCBI GI NO: 11360494 NR Description: antifreeze glycopeptide AFGP polyprotein precursor
  misc_feature (76)..(177): NCBI GI NO: 11360494 NR Description: antifreeze glycopeptide AFGP polyprotein precursor
  misc_feature (73)..(177): NCBI GI NO: 13592175 NR Description: ppg3 [Leishmania major]
  misc_feature (83)..(177): NCBI GI NO: 13592175 NR Description: ppg3 [Leishmania major]
  misc_feature (73)..(177): NCBI GI NO: 13592175 NR Description: ppg3 [Leishmania major]
  misc_feature (72)..(177): NCBI GI NO: 13592175 NR Description: ppg3 [Leishmania major]
  misc_feature (73)..(177): NCBI GI NO: 13592175 NR Description: ppg3 [Leishmania major]
  misc_feature (73)..(177): NCBI GI NO: 13592175 NR Description: ppg3 [Leishmania major]
TILPPQISPGRQQQLCHIIVASSSPFHFIIPPELVRESELVQGHPSPRPQELCGCRGQGRPWRSGSRWRRWKSKAARRRSGGRPGTTPASSPPTASPEGFLKTTMSRSRCSTAGSATPTCTSSRTTGETPCTQSSRGNRSNFASLDAPDAVAKLTASVCLTPSAGVAWRAGTRSWAW

SEQ ID NO: 34757 - DNA, 1269 bp, Zea mays subsp. mays
  misc_feature (1)..(1269): Ceres Seq. ID no. 12411424
aaaatccggcctccacggctccacccacgagccagtggaatcttaccgattcggcaaccgtgctaatcgatatccgtgcaattccacctcccgaaccgaatccctccaccgacccaaaccctagcgcgcacccttctccgtcgtcctttcctggcgcgcgggccggtgtcggagatgcgggcgctgctcgcggacggcgggatggcactggcggtgtcgccggaggccaacgagtcgtcgggtggcgctgcggtgtcgctagggccgttatcgtgggcgtcggagtgccacggggtactgtacaacctggccttgatgctgccatcgctgggcctttgtggggttcctggcgtggcaggcgcggcggagcttccgtaggctcagctacggccgctctcacgtcgttgtcgtcgcgtactacgcgctcctctgggccgtcgccgtactcaacctcctctggtgcttcctgcaggcatggcaatgtatgcctgacagggcattctcttggaatatactgtcactgtttacaaaatcaggaatgttattcttggaagtgagtctcatagcctttctacttcaaggaaatgatgccagcggttttgaatctttggcacgaacctttgttatatctggagctgtagttgctgctgatgtattgctcaagactatatatgtttttggcttcggtgttcctttgttcattgatactgatcaaggaactagtgggaaatggggcctgtggattctccacaaacttgtgcttactggagtctatgggctgattgttttcatgcatcattcaagatggagagacaggctgcctgcaaaaccagcatactacaactatgtatgtgtgatgttgctactgaatggcatatcactgtttggatgtttccttattgcaagtggagctggatttggtttatggttatataatctcacaaccgtatgctatcattctctttaccttcccctcctatatgtgactttcttagcagacttcttccaggaggaagacatgctcctagagaacgtctactattctgaaatgaaggatgctgggttcttcgatgctgactgggattaatccgtggctactgtgctgtatgacccatcccatatgaagtacgctgtatttgtttttattttatctgtgtactctcaacgtagaacaggaaatgtatgtagctagtcgtggtagtgaatggaaatatgtaatcttactgctgcatacttcagaaaatcagaattcaagtgatttcacggctg

SEQ ID NO: 34758 - protein, 200 aa, Zea mays subsp. mays
  peptide (1)..(200): Ceres Seq. ID no. 12411425
  misc_feature (60)..(200): NCBI GI NO: 21326119 NR Description: putative expressed protein [Sorghum bicolor]
  misc_feature (1)..(36): NCBI GI NO: 21326119 NR Description: putative expressed protein [Sorghum bicolor]
  misc_feature (1)..(200): NCBI GI NO: 18397089 NR Description: expressed protein; protein id: At3g05010
  misc_feature (1)..(200): NCBI GI NO: 12322847 NR Description: unknown protein; 15342-13483
  misc_feature (1)..(200): NCBI GI NO: 15240462 NR Description: putative protein; protein id: At5g27210
  misc_feature (1)..(200): NCBI GI NO: 21618098 NR Description: unknown [Arabidopsis thaliana]
  misc_feature (1)..(200): NCBI GI NO: 14532472 NR Description: AT5g27210/T21B4_120 [Arabidopsis thaliana]
  misc_feature (34)..(166): NCBI GI NO: 7485300 NR Description: hypothetical protein A_TM021B04
  misc_feature (1)..(181): NCBI GI NO: 6755859 NR Description: transmembrane domain protein regulated inadipocytes
  misc_feature (1)..(192): NCBI GI NO: 26354422 NR Description: unnamed protein product [Mus musculus]
MPDRAFSWNILSLFTKSGMLFLEVSLIAFLLQGNDASGFESLARTFVISGAVVAADVLLKTIYVFGFGVPLFIDTDQGTSGKWGLWILHKLVLTGVYGLIVFMHHSRWRDRLPAKPAYYNYVCVMLLLNGISLFGCFLIASGAGFGLWLYNLTTVCYHSLYLPLLYVTFLADFFQEEDMLLENVYYSEMKDAGFFDADWD

SEQ ID NO: 34759 - protein, 184 aa, Zea mays subsp. mays
  peptide (1)..(184): Ceres Seq. ID no. 12411426
NPASTAPPTSQWNLTDSATVLIDIRAIPPPEPNPSTDPNPSAHPSPSSFPGARAGVGDAGAARGRRDGTGGVAGGQRVVGWRCGVARAVIVGVGVPRGTVQPGLDAAIAGPLWGSWRGRRGGASVGSATAALTSLSSRTTRSSGPSPYSTSSGASCRHGNVCLTGHSLGIYCHCLQNQECYSWK

SEQ ID NO: 34760 - protein, 182 aa, Zea mays subsp. mays; identical to SEQ ID NO: 34457
  peptide (1)..(182): Ceres Seq. ID no. 12411427
  misc_feature (42)..(182): NCBI GI NO: 21326119 NR Description: putative expressed protein [Sorghum bicolor]
  misc_feature (1)..(18): NCBI GI NO: 21326119 NR Description: putative expressed protein [Sorghum bicolor]
  misc_feature (1)..(182): NCBI GI NO: 18397089 NR Description: expressed protein; protein id: At3g05010
  misc_feature (1)..(182): NCBI GI NO: 12322847 NR Description: unknown protein; 15342-13483
  misc_feature (1)..(182): NCBI GI NO: 15240462 NR Description: putative protein; protein id: At5g27210
  misc_feature (1)..(182): NCBI GI NO: 21618098 NR Description: unknown [Arabidopsis thaliana]
  misc_feature (1)..(182): NCBI GI NO: 14532472 NR Description: AT5g27210/T21B4_120 [Arabidopsis thaliana]
  misc_feature (16)..(148): NCBI GI NO: 7485300 NR Description: hypothetical protein A_TM021B04
  misc_feature (1)..(163): NCBI GI NO: 6755859 NR Description: transmembrane domain protein regulated inadipocytes
  misc_feature (1)..(174): NCBI GI NO: 26354422 NR Description: unnamed protein product [Mus musculus]

SEQ ID NO: 34761 - DNA, 1852 bp, Zea mays subsp. mays
  misc_feature (1)..(1852): Ceres Seq. ID no. 12342422
actcaaaaaaggaaaaggaaacggaaaaactcccagttcgtgacggagacaccgaggccagcgccatccacccgctcccctccgctcggccttcatctccccacagccgcaagcgacgggcgtcatatcccatcctgatctctcctcccttcttcagtgcagcagcaggccagcggcacgccacccgcctcactcccgcctccgatccgctgcttactcgccacccggagatggccaccgccgccgccttctccgtctcctcgccggcggcctccgccgtcgccgcgcgatccaaggtgtttggaggagttaaccaggcgagaactagaactggctgccgcgtcggcatcacgcggaagaactttggccgtgtcatgatggcccttgcagtggatgtttctcgttttgaaggagtgccaatggctcctccagacccaattcttggggtttctgaggcctttaaagcagataaaagcgagctgaagctcaatcttggtgttggtgcctataggacagaagagctgcagccctacgtgctcaatgtagtcaagaaggctgaaaatcttatgttggagaaaggagaaaacaaagagtatcttcccattgaaggtttagccgcgtttaacaaagcaacagcagagctattgcttggagctgataaccctgttattaatcaaggactggttgctacacttcagtctctctcgggcactggatcactgcgtctcgctgcagcattcatacaaagatactttcctgaagctaaagtgctgatatcgtcgcctacctggggtaaccacaagaatatcttcaatgatgctagggtaccttggtcagagtaccggtattatgaccccaagactgttgggttggattttgagggaataatagctgacattgaggctgctcctgaaggttcttttgttctgctacatggttgtgctcacaacccaactggaatagacccaactcctgaacagtgggagaaaattgcagatgtcattcaagagaaaaagcatatgccattctttgatgttgcatatcagggttttgccagtggaagccttgatgaagatgcattttctgtcaggctttttgttaagcgtggcatggaagtgtttgttgcacaatcttacagcaagaaccttggtttatattctgaaagggttggtgcaataaatgtcgtgtgctcagcaccagaagttgcagatagggtaaatagccagctgaaacgattggcacgtcccatgtactcgaacccccctattcacggtgccaagatagttgccaacgttgttggtgatccaaccatgtttggtgaatggaaacaagagatggagctaatggctggacggatcaagaatgtaagacagaagctctacgacagtttgtctgccaaggacaagagcggcaaggactggtctttcattctgaggcagattggcatgttctcctacaccggcttgaacaaagcgcagagtgacaacatgacggataaatggcatatttacatgaccaaggatgggcggatctcgttagctgggctgtccctggctaagtgtgattatcttgccgacgccatcatcgattccttccataatgtgaactaggctgaggtacgatagttgagggtcaagctattgatgtttagttccgtggacgctaggctgggatttttgggtccttccagctatacagctcttccgttgtgctccatctggtgtaacttggataaataaaatttttgtcgctgaactaaaactcgtgtgcttttttacctgtaactgtaaggtcagcgcgtggctacagacttgtaaacacttgaatgaaaaaaaaacaatgacattaccgg

SEQ ID NO: 34762 - protein, 535 aa, Zea mays subsp. mays
  peptide (1)..(535): Ceres Seq. ID no. 12342423
  misc_feature (213)..(531): Pfam Name: Pfam Description:  Aminotransferase class I and II
  misc_feature (80)..(535): NCBI GI NO: 2130091 NR Description: aspartate transaminase (EC 2.6.1.1) - proso millet
  misc_feature (122)..(535): NCBI GI NO: 29468084 NR Description: aspartate aminotransferase [Oryza sativa]
  misc_feature (77)..(535): NCBI GI NO: 445118 NR Description: Asp aminotransferase
  misc_feature (79)..(535): NCBI GI NO: 485495 NR Description: aspartate transaminase (EC 2
  misc_feature (77)..(535): NCBI GI NO: 2605932 NR Description: aspartate aminotransferase [Lotus corniculatus]
  misc_feature (79)..(535): NCBI GI NO: 7548843 NR Description: aspartate aminotransferase isozyme 5 [Glycine max]
  misc_feature (119)..(535): NCBI GI NO: 1076500 NR Description: aspartate transaminase (EC 2.6.1.1) - alfalfa
  misc_feature (103)..(535): NCBI GI NO: 15236129 NR Description: aspartate aminotransferase; protein id:At4g31990
  misc_feature (119)..(535): NCBI GI NO: 531555 NR Description: aspartate aminotransferase [Arabidopsis thaliana]
  misc_feature (103)..(535): NCBI GI NO: 21618222 NR Description: aspartate aminotransferase [Arabidopsis thaliana]
SKKEKETEKLPVRDGDTEASAIHPLPSARPSSPHSRKRRASYPILISPPFFSAAAGQRHATRLTPASDPLLTRHPEMATAAAFSVSSPAASAVAARSKVFGGVNQARTRTGCRVGITRKNFGRVMMALAVDVSRFEGVPMAPPDPILGVSEAFKADKSELKLNLGVGAYRTEELQPYVLNVVKKAENLMLEKGENKEYLPIEGLAAFNKATAELLLGADNPVINQGLVATLQSLSGTGSLRLAAAFIQRYFPEAKVLISSPTWGNHKNIFNDARVPWSEYRYYDPKTVGLDFEGIIADIEAAPEGSFVLLHGCAHNPTGIDPTPEQWEKIADVIQEKKHMPFFDVAYQGFASGSLDEDAFSVRLFVKRGMEVFVAQSYSKNLGLYSERVGAINVVCSAPEVADRVNSQLKRLARPMYSNPPIHGAKIVANVVGDPTMFGEWKQEMELMAGRIKNVRQKLYDSLSAKDKSGKDWSFILRQIGMFSYTGLNKAQSDNMTDKWHIYMTKDGRISLAGLSLAKCDYLADAIIDSFHNVN

SEQ ID NO: 34763 - protein, 459 aa, Zea mays subsp. mays
  peptide (1)..(459): Ceres Seq. ID no. 12342424
  misc_feature (137)..(455): Pfam Name: Pfam Description:  Aminotransferase class I and II
  misc_feature (4)..(459): NCBI GI NO: 2130091 NR Description: aspartate transaminase (EC 2.6.1.1) - proso millet
  misc_feature (46)..(459): NCBI GI NO: 29468084 NR Description: aspartate aminotransferase [Oryza sativa]
  misc_feature (1)..(459): NCBI GI NO: 445118 NR Description: Asp aminotransferase
  misc_feature (3)..(459): NCBI GI NO: 485495 NR Description: aspartate transaminase (EC 2
  misc_feature (1)..(459): NCBI GI NO: 2605932 NR Description: aspartate aminotransferase [Lotus corniculatus]
  misc_feature (3)..(459): NCBI GI NO: 7548843 NR Description: aspartate aminotransferase isozyme 5 [Glycine max]
  misc_feature (43)..(459): NCBI GI NO: 1076500 NR Description: aspartate transaminase (EC 2.6.1.1) - alfalfa
  misc_feature (27)..(459): NCBI GI NO: 15236129 NR Description: aspartate aminotransferase; protein id:At4g31990
  misc_feature (43)..(459): NCBI GI NO: 531555 NR Description: aspartate aminotransferase [Arabidopsis thaliana]
  misc_feature (27)..(459): NCBI GI NO: 21618222 NR Description: aspartate aminotransferase [Arabidopsis thaliana]
MATAAAFSVSSPAASAVAARSKVFGGVNQARTRTGCRVGITRKNFGRVMMALAVDVSRFEGVPMAPPDPILGVSEAFKADKSELKLNLGVGAYRTEELQPYVLNVVKKAENLMLEKGENKEYLPIEGLAAFNKATAELLLGADNPVINQGLVATLQSLSGTGSLRLAAAFIQRYFPEAKVLISSPTWGNHKNIFNDARVPWSEYRYYDPKTVGLDFEGIIADIEAAPEGSFVLLHGCAHNPTGIDPTPEQWEKIADVIQEKKHMPFFDVAYQGFASGSLDEDAFSVRLFVKRGMEVFVAQSYSKNLGLYSERVGAINVVCSAPEVADRVNSQLKRLARPMYSNPPIHGAKIVANVVGDPTMFGEWKQEMELMAGRIKNVRQKLYDSLSAKDKSGKDWSFILRQIGMFSYTGLNKAQSDNMTDKWHIYMTKDGRISLAGLSLAKCDYLADAIIDSFHNVN

SEQ ID NO: 34764 - protein, 411 aa, Zea mays subsp. mays
  peptide (1)..(411): Ceres Seq. ID no. 12342425
  misc_feature (89)..(407): Pfam Name: Pfam Description:  Aminotransferase class I and II
  misc_feature (1)..(411): NCBI GI NO: 2130091 NR Description: aspartate transaminase (EC 2.6.1.1) - proso millet
  misc_feature (1)..(411): NCBI GI NO: 29468084 NR Description: aspartate aminotransferase [Oryza sativa]
  misc_feature (1)..(411): NCBI GI NO: 445118 NR Description: Asp aminotransferase
  misc_feature (1)..(411): NCBI GI NO: 485495 NR Description: aspartate transaminase (EC 2
  misc_feature (1)..(411): NCBI GI NO: 2605932 NR Description: aspartate aminotransferase [Lotus corniculatus]
  misc_feature (1)..(411): NCBI GI NO: 7548843 NR Description: aspartate aminotransferase isozyme 5 [Glycine max]
  misc_feature (1)..(411): NCBI GI NO: 1076500 NR Description: aspartate transaminase (EC 2.6.1.1) - alfalfa
  misc_feature (1)..(411): NCBI GI NO: 15236129 NR Description: aspartate aminotransferase; protein id:At4g31990
  misc_feature (1)..(411): NCBI GI NO: 531555 NR Description: aspartate aminotransferase [Arabidopsis thaliana]
  misc_feature (1)..(411): NCBI GI NO: 21618222 NR Description: aspartate aminotransferase [Arabidopsis thaliana]
MMALAVDVSRFEGVPMAPPDPILGVSEAFKADKSELKLNLGVGAYRTEELQPYVLNVVKKAENLMLEKGENKEYLPIEGLAAFNKATAELLLGADNPVINQGLVATLQSLSGTGSLRLAAAFIQRYFPEAKVLISSPTWGNHKNIFNDARVPWSEYRYYDPKTVGLDFEGIIADIEAAPEGSFVLLHGCAHNPTGIDPTPEQWEKIADVIQEKKHMPFFDVAYQGFASGSLDEDAFSVRLFVKRGMEVFVAQSYSKNLGLYSERVGAINVVCSAPEVADRVNSQLKRLARPMYSNPPIHGAKIVANVVGDPTMFGEWKQEMELMAGRIKNVRQKLYDSLSAKDKSGKDWSFILRQIGMFSYTGLNKAQSDNMTDKWHIYMTKDGRISLAGLSLAKCDYLADAIIDSFHNVN

SEQ ID NO: 34765 - DNA, 1340 bp, Zea mays subsp. mays
  misc_feature (1)..(1340): Ceres Seq. ID no. 12355829
gcagctcagttactcactccggcctccagcttttcctttgcgccccagggccggaagagcccacacaccaccaccaccactagatagccagcgacgatcgagccgcgcgccggtggacgcgcacatacacgcggtagcttccttctcaagcctagctagccccatcctgcgcgcaggcgggcggcagcgagaattgacgtgcgacgacgagcttgtgcttgctagctagagagcgaggatgtcgagccggaggccgtcgtcgcgtggcaacatctccgaggacgagatcaacgagctcatctccaagctgcaggccctgctccccagctcccgccgccgcggctccggccaggtgcgtcgttgcgaacacacatgaccgctcaactaattaactcccgttcgcctgctgcgccctttttttccgttttaaaacgtctaatgcgcgcggcgcggaatgtaatgcaggcgtcgacgacgaagctgctcaaggagacctgcagctacatcaagagcctgcaccgggaggtggacgacctgagcgaccggctgtccgacctcatggccaccatggaccacaacagccccggcgcggagatcatccgcagcatcctccgctcctgatcgcccacgcgcctcctactgcggcggcgccggccggcgcgcgagagagcgaggtcggcgacgacctcgatcgccgacaacgacgaccgcgcgcgcccgcgccccccggcccatctgttctctccaccggctggccgccgggagccgagctcaattagctagggtatatctcaacctctctctctctctctctctcgctcgctctacatgtgtgtgtacctttctcttcctttcacctgcctgtctcctccctagatctgagatcatgtggctagctctcccatatcaaaatgtactagctacacgcgcacgtatggtggtggtctctgctaagcctaagcttcactgggtagtagggtactagtagcactaggggcttaagcaagctaagcttatcctcctcatcagaatcacattagctcgcaccgcactctctggcttctcgtcgatcgtcttcgtcgtcctcgctcctccgacccacatgatggctagctctccatgtgccgcttctcctctcgcacgtgccgcttctcctcttgtgttcgatatgttgtattgtttccatgtaaatttagtcggtggcctggatcgagttggctagctctctctacaggcaagagacaaccgaccgaccactactatcctagagcaaattgattatcgtcatgatggtgtactgttcaagcttttattaacgacttttaatttacttgctacgt

SEQ ID NO: 34766 - protein, 82 aa, Zea mays subsp. mays
  peptide (1)..(82): Ceres Seq. ID no. 12355830
  misc_feature (31)..(80): NCBI GI NO: 30689711 NR Description: expressed protein [Arabidopsis thaliana]
  misc_feature (17)..(81): NCBI GI NO: 37534170 NR Description: hypothetical protein similar to putative DNAbinding proteins
  misc_feature (31)..(80): NCBI GI NO: 9294226 NR Description: DNA-binding protein-like [Arabidopsis thaliana]
  misc_feature (31)..(80): NCBI GI NO: 15242499 NR Description: bHLH protein; protein id: At5g39860.1
  misc_feature (31)..(80): NCBI GI NO: 21617952 NR Description: DNA-binding protein-like [Arabidopsis thaliana]
  misc_feature (23)..(80): NCBI GI NO: 15242227 NR Description: bHLH protein; protein id: At5g15160.1
  misc_feature (1)..(80): NCBI GI NO: 10241623 NR Description: putative DNA binding protein
  misc_feature (23)..(80): NCBI GI NO: 15221264 NR Description: bHLH protein; protein id: At1g74500
MTAQLINSRSPAAPFFSVLKRLMRAARNVMQASTTKLLKETCSYIKSLHREVDDLSDRLSDLMATMDHNSPGAEIIRSILRS

SEQ ID NO: 34767 - protein, 75 aa, Zea mays subsp. mays
  peptide (1)..(75): Ceres Seq. ID no. 12355831
QLSYSLRPPAFPLRPRAGRAHTPPPPLDSQRRSSRAPVDAHIHAVASFSSLASPILRAGGRQRELTCDDELVLAS

SEQ ID NO: 34768 - protein, 60 aa, Zea mays subsp. mays
  peptide (1)..(60): Ceres Seq. ID no. 12355832
  misc_feature (9)..(58): NCBI GI NO: 30689711 NR Description: expressed protein [Arabidopsis thaliana]
  misc_feature (1)..(59): NCBI GI NO: 37534170 NR Description: hypothetical protein similar to putative DNAbinding proteins
  misc_feature (9)..(58): NCBI GI NO: 9294226 NR Description: DNA-binding protein-like [Arabidopsis thaliana]
  misc_feature (9)..(58): NCBI GI NO: 15242499 NR Description: bHLH protein; protein id: At5g39860.1
  misc_feature (9)..(58): NCBI GI NO: 21617952 NR Description: DNA-binding protein-like [Arabidopsis thaliana]
  misc_feature (1)..(58): NCBI GI NO: 15242227 NR Description: bHLH protein; protein id: At5g15160.1
  misc_feature (1)..(58): NCBI GI NO: 10241623 NR Description: putative DNA binding protein
  misc_feature (1)..(58): NCBI GI NO: 15221264 NR Description: bHLH protein; protein id: At1g74500
MRAARNVMQASTTKLLKETCSYIKSLHREVDDLSDRLSDLMATMDHNSPGAEIIRSILRS

SEQ ID NO: 34769 - DNA, 1887 bp, Zea mays subsp. mays
  misc_feature (1)..(1887): Ceres Seq. ID no. 12348859
aaaccgtcggaaccctagatctctctcgcccgcgctccgaaaccccagatccgccatgcaccagcctagagctcgctacccacccggctatggctccggcggtggaggcggagccggacgtggcggtggaggcggaaatggaggaggtggcggaaaccacaactactacggccgaaacccgcagcaacaccactaccaccagcagcagcagtcgcagcactctcataggaactcttcgtaccagcaacagtggctgcggcgagaccaggcccccgccgttgcgggggcagcgtccggaaacgctgtggccaagacggcgtctcagcttgacgccgtaggctcgagctcccaagactggaaggctcaactaaatataccagctccagatacacgctacaggacagaggatgtcactgcaacaaaaggcaatgagtttgaagattatttcttgaaacgtgaactgcttatgggaatctacgaaaagggatttgaaagaccatctcctattcaagaagaaagcattcctattgcgctgactggaagtgatattcttgcaagggcaaaaaatggcactggaaagactgctgccttttgcattccggcacttgaaaaaattgatcctgaaaaaaatgctattcaagttgttatactagtaccaacaagggaactggctctgcaaacttcgcaagtctgtaaagagctcgggaagtaccttaacattcaagttatggttagcactggaggaactagcttgaaggatgacatcatgcgtttataccaacctgttcatttacttgttgggactcctggccgaatacttgatcttaccaggaagggcatttgtgtgttgaaagactgttcaatgcttgtcatggatgaggcagacaagctattagctccagagttccagccttctgtggaggcacttattcatttccttccacctagtcggcagctgttgatgttttcagcaacctttcctgtaactgtcaaggaattcaaagataaatatctgcctagaccttatgtgattaatctaatggatgaactgaccctgaaaggaatcacacaatattatgcttttgtcgaagaaaggcaaaaagttcattgcctgaatacacttttctcaaagcttcaaattaatcaatccattatattctgcaactctgttaatagagttgagctactggctaagaaaataactgaactcggttattcatgcttctacattcatgctaagatgttgcaagaccacagaaaccgagtgtttcatgattttcgtaatggtgcttgcagaaaccttgtgtgcacagatctgtttaccagaggaattgatatccaggctgttaatgtggtcattaattttgacttccctaagacatctgagacatacttacacagggttggccgttctgggagatatggacaccttggtttggcagtgaacttgatcacttatgaagaccgtttcaacttatataggattgagcaagaacttggaacggaaattaagacaatacccccacagattgacctgtccatatactgccaatgatatgtgacagtttcaatgagcatcggacacattttatttattttgagaacatctgtacatagcaacccatcaagtgagttctccaactaaggcgcaactatttcagaagctacctaaatggctacattcctttgtcgtcacacatcaatttctcccccattctcgtcgggttttgttttaatgccttgatgtcgtttgtaagcttacttggattagtagaggaagtgtttcctgtaggctctgatctggtactaacctgtttagctgaggacatgcacattgggtgggctgcttggggcccaaaactatgatgagatgagacattatcttac

SEQ ID NO: 34770 - protein, 517 aa, Zea mays subsp. mays
  peptide (1)..(517): Ceres Seq. ID no. 12348860
  misc_feature (156)..(358): Pfam Name: Pfam Description:  DEAD/DEAH box helicase
  misc_feature (12)..(517): NCBI GI NO: 37535822 NR Description: putative RNA helicase
  misc_feature (12)..(517): NCBI GI NO: 22758337 NR Description: putative RNA helicase
  misc_feature (22)..(517): NCBI GI NO: 32489827 NR Description: OSJNBb0039L24.10
  misc_feature (23)..(517): NCBI GI NO: 22328183 NR Description: DEAD/DEAH box RNA helicase, putative
  misc_feature (23)..(517): NCBI GI NO: 11267537 NR Description: RNA helicase RH8 [imported] - Arabidopsis thaliana
  misc_feature (19)..(517): NCBI GI NO: 15233064 NR Description: DEAD/DEAH box RNA helicase, putative
  misc_feature (23)..(517): NCBI GI NO: 7436453 NR Description: probable RNA helicase (EC 3
  misc_feature (19)..(517): NCBI GI NO: 11267538 NR Description: RNA helicase RH12
  misc_feature (60)..(517): NCBI GI NO: 15225898 NR Description: DEAD/DEAH box RNA helicase, putative
  misc_feature (60)..(517): NCBI GI NO: 14532476 NR Description: At2g45810/F4I18.21 [Arabidopsis thaliana]
NRRNPRSLSPALRNPRSAMHQPRARYPPGYGSGGGGGAGRGGGGGNGGGGGNHNYYGRNPQQHHYHQQQQSQHSHRNSSYQQQWLRRDQAPAVAGAASGNAVAKTASQLDAVGSSSQDWKAQLNIPAPDTRYRTEDVTATKGNEFEDYFLKRELLMGIYEKGFERPSPIQEESIPIALTGSDILARAKNGTGKTAAFCIPALEKIDPEKNAIQVVILVPTRELALQTSQVCKELGKYLNIQVMVSTGGTSLKDDIMRLYQPVHLLVGTPGRILDLTRKGICVLKDCSMLVMDEADKLLAPEFQPSVEALIHFLPPSRQLLMFSATFPVTVKEFKDKYLPRPYVINLMDELTLKGITQYYAFVEERQKVHCLNTLFSKLQINQSIIFCNSVNRVELLAKKITELGYSCFYIHAKMLQDHRNRVFHDFRNGACRNLVCTDLFTRGIDIQAVNVVINFDFPKTSETYLHRVGRSGRYGHLGLAVNLITYEDRFNLYRIEQELGTEIKTIPPQIDLSIYCQ

SEQ ID NO: 34771 - protein, 499 aa, Zea mays subsp. mays
  peptide (1)..(499): Ceres Seq. ID no. 12348861
  misc_feature (138)..(340): Pfam Name: Pfam Description:  DEAD/DEAH box helicase
  misc_feature (1)..(499): NCBI GI NO: 37535822 NR Description: putative RNA helicase
  misc_feature (1)..(499): NCBI GI NO: 22758337 NR Description: putative RNA helicase
  misc_feature (4)..(499): NCBI GI NO: 32489827 NR Description: OSJNBb0039L24.10
  misc_feature (5)..(499): NCBI GI NO: 22328183 NR Description: DEAD/DEAH box RNA helicase, putative
  misc_feature (5)..(499): NCBI GI NO: 11267537 NR Description: RNA helicase RH8 [imported] - Arabidopsis thaliana
  misc_feature (1)..(499): NCBI GI NO: 15233064 NR Description: DEAD/DEAH box RNA helicase, putative
  misc_feature (5)..(499): NCBI GI NO: 7436453 NR Description: probable RNA helicase (EC 3
  misc_feature (1)..(499): NCBI GI NO: 11267538 NR Description: RNA helicase RH12
  misc_feature (42)..(499): NCBI GI NO: 15225898 NR Description: DEAD/DEAH box RNA helicase, putative
  misc_feature (42)..(499): NCBI GI NO: 14532476 NR Description: At2g45810/F4I18.21 [Arabidopsis thaliana]
MHQPRARYPPGYGSGGGGGAGRGGGGGNGGGGGNHNYYGRNPQQHHYHQQQQSQHSHRNSSYQQQWLRRDQAPAVAGAASGNAVAKTASQLDAVGSSSQDWKAQLNIPAPDTRYRTEDVTATKGNEFEDYFLKRELLMGIYEKGFERPSPIQEESIPIALTGSDILARAKNGTGKTAAFCIPALEKIDPEKNAIQVVILVPTRELALQTSQVCKELGKYLNIQVMVSTGGTSLKDDIMRLYQPVHLLVGTPGRILDLTRKGICVLKDCSMLVMDEADKLLAPEFQPSVEALIHFLPPSRQLLMFSATFPVTVKEFKDKYLPRPYVINLMDELTLKGITQYYAFVEERQKVHCLNTLFSKLQINQSIIFCNSVNRVELLAKKITELGYSCFYIHAKMLQDHRNRVFHDFRNGACRNLVCTDLFTRGIDIQAVNVVINFDFPKTSETYLHRVGRSGRYGHLGLAVNLITYEDRFNLYRIEQELGTEIKTIPPQIDLSIYCQ

SEQ ID NO: 34772 - protein, 362 aa, Zea mays subsp. mays
  peptide (1)..(362): Ceres Seq. ID no. 12348862
  misc_feature (1)..(203): Pfam Name: Pfam Description:  DEAD/DEAH box helicase
  misc_feature (1)..(362): NCBI GI NO: 37535822 NR Description: putative RNA helicase
  misc_feature (1)..(362): NCBI GI NO: 22758337 NR Description: putative RNA helicase
  misc_feature (1)..(362): NCBI GI NO: 32489827 NR Description: OSJNBb0039L24.10
  misc_feature (1)..(362): NCBI GI NO: 22328183 NR Description: DEAD/DEAH box RNA helicase, putative
  misc_feature (1)..(362): NCBI GI NO: 11267537 NR Description: RNA helicase RH8 [imported] - Arabidopsis thaliana
  misc_feature (1)..(362): NCBI GI NO: 15233064 NR Description: DEAD/DEAH box RNA helicase, putative
  misc_feature (1)..(362): NCBI GI NO: 7436453 NR Description: probable RNA helicase (EC 3
  misc_feature (1)..(362): NCBI GI NO: 11267538 NR Description: RNA helicase RH12
  misc_feature (1)..(362): NCBI GI NO: 15225898 NR Description: DEAD/DEAH box RNA helicase, putative
  misc_feature (1)..(362): NCBI GI NO: 14532476 NR Description: At2g45810/F4I18.21 [Arabidopsis thaliana]
MGIYEKGFERPSPIQEESIPIALTGSDILARAKNGTGKTAAFCIPALEKIDPEKNAIQVVILVPTRELALQTSQVCKELGKYLNIQVMVSTGGTSLKDDIMRLYQPVHLLVGTPGRILDLTRKGICVLKDCSMLVMDEADKLLAPEFQPSVEALIHFLPPSRQLLMFSATFPVTVKEFKDKYLPRPYVINLMDELTLKGITQYYAFVEERQKVHCLNTLFSKLQINQSIIFCNSVNRVELLAKKITELGYSCFYIHAKMLQDHRNRVFHDFRNGACRNLVCTDLFTRGIDIQAVNVVINFDFPKTSETYLHRVGRSGRYGHLGLAVNLITYEDRFNLYRIEQELGTEIKTIPPQIDLSIYCQ

SEQ ID NO: 34773 - DNA, 670 bp, Zea mays subsp. mays
  misc_feature (1)..(670): Ceres Seq. ID no. 12345755
atattggctagcttttggctcggcagctaacgacctgcagccaaccatctaccagcgactcagcgagcgagagcagcacacactgcacgcagctagctaggagcagcagcagcggcggcgatggcggcctccatgatctcctcgtcagctctggcggtggcgcctcagggcctgccgcccctcggccgccgcgcctcctccttcgccgtcgtctgctccaagaagaagatcaagaccgacaagccctacgggattgggggtggcctgaccgtcgacgtcgacgccaacgggagaaagggcaagggcaagggcgtgtaccagttcgtcgacaagtacggcgcgaacgtcgacggatacagcccaatctacaacgaggatgactggtctcccaccggcgacgtctacgtcggtggaaccactgggcttctgatctgggccgtcaccctcgctgggatcctcggcggcggcgccctcctcgtctacaacaccagcgccctctccggctaaggatatccaatgcatgcgcttcttgcgattcgtcatgtaaaatcagggtgtctgtctataatctagcctccatggatgctcaaccttcgtcatgtaacaataatcagtgctactcttcattacataattttgatgctatatatatataccccatccctccctt

SEQ ID NO: 34774 - protein, 128 aa, Zea mays subsp. mays
  peptide (1)..(128): Ceres Seq. ID no. 12345756
  misc_feature (35)..(128): Pfam Name: Pfam Description:  Photosystem II 10 kDa polypeptide PsbR
  misc_feature (1)..(128): NCBI GI NO: 38636958 NR Description: putative photosystem II 10K protein
  misc_feature (5)..(128): NCBI GI NO: 7443194 NR Description: photosystem II 10K protein - rice
  misc_feature (1)..(127): NCBI GI NO: 3914472 NR Description: Photosystem II 10 kDa polypeptide
  misc_feature (1)..(127): NCBI GI NO: 131399 NR Description: Photosystem II 10 kDa polypeptide
  misc_feature (1)..(127): NCBI GI NO: 3914471 NR Description: Photosystem II 10 kDa polypeptide
  misc_feature (1)..(127): NCBI GI NO: 25989650 NR Description: photosystem II 10 kDa protein [Xerophyta humilis]
  misc_feature (1)..(127): NCBI GI NO: 131400 NR Description: Photosystem II 10 kDa polypeptide
  misc_feature (13)..(127): NCBI GI NO: 1418984 NR Description: photosystem II 10 kD polypeptide
  misc_feature (1)..(127): NCBI GI NO: 21491 NR Description: ST-LS1 protein (AA 1-138) [Solanum tuberosum]
  misc_feature (1)..(127): NCBI GI NO: 33694227 NR Description: 10 kDa photosystem II polypeptide
MAASMISSSALAVAPQGLPPLGRRASSFAVVCSKKKIKTDKPYGIGGGLTVDVDANGRKGKGKGVYQFVDKYGANVDGYSPIYNEDDWSPTGDVYVGGTTGLLIWAVTLAGILGGGALLVYNTSALSG

SEQ ID NO: 34775 - protein, 124 aa, Zea mays subsp. mays
  peptide (1)..(124): Ceres Seq. ID no. 12345757
  misc_feature (31)..(124): Pfam Name: Pfam Description:  Photosystem II 10 kDa polypeptide PsbR
  misc_feature (1)..(124): NCBI GI NO: 38636958 NR Description: putative photosystem II 10K protein
  misc_feature (1)..(124): NCBI GI NO: 7443194 NR Description: photosystem II 10K protein - rice
  misc_feature (1)..(123): NCBI GI NO: 3914472 NR Description: Photosystem II 10 kDa polypeptide
  misc_feature (1)..(123): NCBI GI NO: 131399 NR Description: Photosystem II 10 kDa polypeptide
  misc_feature (1)..(123): NCBI GI NO: 3914471 NR Description: Photosystem II 10 kDa polypeptide
  misc_feature (1)..(123): NCBI GI NO: 25989650 NR Description: photosystem II 10 kDa protein [Xerophyta humilis]
  misc_feature (1)..(123): NCBI GI NO: 131400 NR Description: Photosystem II 10 kDa polypeptide
  misc_feature (9)..(123): NCBI GI NO: 1418984 NR Description: photosystem II 10 kD polypeptide
  misc_feature (1)..(123): NCBI GI NO: 21491 NR Description: ST-LS1 protein (AA 1-138) [Solanum tuberosum]
  misc_feature (1)..(123): NCBI GI NO: 33694227 NR Description: 10 kDa photosystem II polypeptide
MISSSALAVAPQGLPPLGRRASSFAVVCSKKKIKTDKPYGIGGGLTVDVDANGRKGKGKGVYQFVDKYGANVDGYSPIYNEDDWSPTGDVYVGGTTGLLIWAVTLAGILGGGALLVYNTSALSG

SEQ ID NO: 34776 - DNA, 1482 bp, Zea mays subsp. mays
  misc_feature (1)..(1482): Ceres Seq. ID no. 13492673
atcgcctccaccgttctctcttcctctgctcttctctgcctgcctgagctcaccgcacctcgcctcctcaccgcgtttcctccgttaatccggtaaccgtctctcaccatctctgcggtcaccctagagtccctctctgcctgcccctgccagcgcgggggcgcggtgtggctctcccagatccgcctggcattgctcgctcggggtcgtgccaagccgatccgatctcgcgcttgcgcgctcctgccgcggatccggctggatctcgctggaattggggcgcgcgtttatttgaaatgcagcagatccgcgtgcttgcgcgcgtgatctggcgtcgtcgcgggcctttctttaacgaaatggcccgatctgtggtttggtggtcaatgccatgtttttttttattattactgtcttatgctgggagaaaaataggaacagagaatagcttcaattgatgccttttagaacggattctatagagcaactcatggatactttctgcttgttttaacaaaatgtggcatcgggcgagctctgctgtaggtagaaaatggccgatgccgaggatatccagcccctcgtctgcgacaacggaactggcatggtcaaggctgggttcgccggcgacgacgccccgagggccgtcttccccagcatcgtggggcgcccgcgccacactggtgtcatggtcgggatggggcagaaggacgcctacgtcggtgacgaggcgcagtccaagaggggtatcctgaccctcaagtaccccatcgagcacgggatcgtcagcaactgggacgacatggagaagatctggcatcacaccttctacaacgagctccgcgtggctcccgaggagcaccccgtcctcctcaccgaggcgcccctgaaccccaaggctaacagggagaagatgacccagatcatgttcgagaccttcaacacccccgctatgtacgtcgccatccaggccgtgctctctctgtatgccagtggccgtaccacaggtatcgtgctcgactcgggagatggtgtgagccacaccgtccccatctacgagggatacgccctcccccacgccatccttcgccttgatctggccggtcgcgacctcaccgactacctgatgaagatcctgactgagcgcggctactccttcaccaccaccgctgagcgggaaatcgtgagggacatgaaggagaagctcgcctacatcgccctggactacgaccaggagatggagaccgccaagaccagcagtttgagctgtatatgtaggtagtaggtaatagggtagttgccaaaaggacggctcccttttcctattgggaattgcgaatttttgtaggaactaataccttgcacagcaatgcctcgatgccaagatacagactttaaatttaatgttggattagatgctggaagagaaacatcctggtgtatattgcagtggaatgtactgctggaatacatgtttttccg

SEQ ID NO: 34777 - protein, 242 aa, Zea mays subsp. mays
  peptide (1)..(242): Ceres Seq. ID no. 13492674
  misc_feature (1)..(236): Pfam Name: Pfam Description:  Actin
  misc_feature (1)..(236): NCBI GI NO: 1703107 NR Description: ACTIN 1
  misc_feature (1)..(236): NCBI GI NO: 28301928 NR Description: actin [Oryza sativa (japonica cultivar-group)]
  misc_feature (1)..(236): NCBI GI NO: 71634 NR Description: actin 1 - rice
  misc_feature (1)..(236): NCBI GI NO: 113222 NR Description: ACTIN 1
  misc_feature (1)..(236): NCBI GI NO: 15229955 NR Description: actin 11 (ACT11) [Arabidopsis thaliana]
  misc_feature (1)..(236): NCBI GI NO: 20322 NR Description: Actin (AA 1-377) [Oryza sativa]
  misc_feature (1)..(236): NCBI GI NO: 11276978 NR Description: actin ACT2 [imported] - Striga asiatica
  misc_feature (1)..(236): NCBI GI NO: 11276977 NR Description: actin [imported] - Striga asiatica
  misc_feature (1)..(236): NCBI GI NO: 11276969 NR Description: actin 1 [imported] - small naked oat
  misc_feature (1)..(236): NCBI GI NO: 15231447 NR Description: actin 12 [Arabidopsis thaliana]
MADAEDIQPLVCDNGTGMVKAGFAGDDAPRAVFPSIVGRPRHTGVMVGMGQKDAYVGDEAQSKRGILTLKYPIEHGIVSNWDDMEKIWHHTFYNELRVAPEEHPVLLTEAPLNPKANREKMTQIMFETFNTPAMYVAIQAVLSLYASGRTTGIVLDSGDGVSHTVPIYEGYALPHAILRLDLAGRDLTDYLMKILTERGYSFTTTAEREIVRDMKEKLAYIALDYDQEMETAKTSSLSCICR

SEQ ID NO: 34778 - protein, 225 aa, Zea mays subsp. mays
  peptide (1)..(225): Ceres Seq. ID no. 13492675
  misc_feature (1)..(219): Pfam Name: Pfam Description:  Actin
  misc_feature (1)..(219): NCBI GI NO: 1703107 NR Description: ACTIN 1
  misc_feature (1)..(219): NCBI GI NO: 28301928 NR Description: actin [Oryza sativa (japonica cultivar-group)]
  misc_feature (1)..(219): NCBI GI NO: 71634 NR Description: actin 1 - rice
  misc_feature (1)..(219): NCBI GI NO: 113222 NR Description: ACTIN 1
  misc_feature (1)..(219): NCBI GI NO: 15229955 NR Description: actin 11 (ACT11) [Arabidopsis thaliana]
  misc_feature (1)..(219): NCBI GI NO: 20322 NR Description: Actin (AA 1-377) [Oryza sativa]
  misc_feature (1)..(219): NCBI GI NO: 11276978 NR Description: actin ACT2 [imported] - Striga asiatica
  misc_feature (1)..(219): NCBI GI NO: 11276977 NR Description: actin [imported] - Striga asiatica
  misc_feature (1)..(219): NCBI GI NO: 11276969 NR Description: actin 1 [imported] - small naked oat
  misc_feature (1)..(219): NCBI GI NO: 15231447 NR Description: actin 12 [Arabidopsis thaliana]
MVKAGFAGDDAPRAVFPSIVGRPRHTGVMVGMGQKDAYVGDEAQSKRGILTLKYPIEHGIVSNWDDMEKIWHHTFYNELRVAPEEHPVLLTEAPLNPKANREKMTQIMFETFNTPAMYVAIQAVLSLYASGRTTGIVLDSGDGVSHTVPIYEGYALPHAILRLDLAGRDLTDYLMKILTERGYSFTTTAEREIVRDMKEKLAYIALDYDQEMETAKTSSLSCICR

SEQ ID NO: 34779 - protein, 197 aa, Zea mays subsp. mays
  peptide (1)..(197): Ceres Seq. ID no. 13492676
  misc_feature (1)..(191): Pfam Name: Pfam Description:  Actin
  misc_feature (1)..(191): NCBI GI NO: 1703107 NR Description: ACTIN 1
  misc_feature (1)..(191): NCBI GI NO: 28301928 NR Description: actin [Oryza sativa (japonica cultivar-group)]
  misc_feature (1)..(191): NCBI GI NO: 71634 NR Description: actin 1 - rice
  misc_feature (1)..(191): NCBI GI NO: 113222 NR Description: ACTIN 1
  misc_feature (1)..(191): NCBI GI NO: 15229955 NR Description: actin 11 (ACT11) [Arabidopsis thaliana]
  misc_feature (1)..(191): NCBI GI NO: 20322 NR Description: Actin (AA 1-377) [Oryza sativa]
  misc_feature (1)..(191): NCBI GI NO: 11276978 NR Description: actin ACT2 [imported] - Striga asiatica
  misc_feature (1)..(191): NCBI GI NO: 11276977 NR Description: actin [imported] - Striga asiatica
  misc_feature (1)..(191): NCBI GI NO: 11276969 NR Description: actin 1 [imported] - small naked oat
  misc_feature (1)..(191): NCBI GI NO: 15231447 NR Description: actin 12 [Arabidopsis thaliana]
MVGMGQKDAYVGDEAQSKRGILTLKYPIEHGIVSNWDDMEKIWHHTFYNELRVAPEEHPVLLTEAPLNPKANREKMTQIMFETFNTPAMYVAIQAVLSLYASGRTTGIVLDSGDGVSHTVPIYEGYALPHAILRLDLAGRDLTDYLMKILTERGYSFTTTAEREIVRDMKEKLAYIALDYDQEMETAKTSSLSCICR

SEQ ID NO: 34780 - DNA, 1858 bp, Zea mays subsp. mays
  misc_feature (1)..(1858): Ceres Seq. ID no. 12355801
tttacaagcttaaaacgcaccggcatggccattgtacaggacaacggtgtcctgcacttgcacccttatgccgtcgccgcggcggcagcggcattgatctcggcgtacatggtgtggttctgggcgctgacgcgacggctgtccgggccgcggatgtggcccctcgtcggcagcctgcccagcgtcgtcctgaaccgggcgcgggttcacgactggatcgtcgacaacctgcgctccaagggggaagcggccacgtaccagacgtgcatcttgccgctgccgttcttggcgcggcgccaggggctggtgaccgtcacgtgcaacccgcggaacctggagcacatcctgcgcgcgcgtttcgacaactaccccaagggccccatgtggcaggcggcgttccacgatctcctaggccagggcatcttcaactccgacggcgagacgtggctgctccagcgcaagacggcggcgctcgagttcaccacgaggaccttgcgccaggcgatggcgcgctgggccaaccgcatcatcaagtaccgcctgtggagtatcctcgcagaacactgcgaggccgcggcgagcgtcgacctccaggacctgctcttgcgcctcaccttcgacaacatctgcggcctcaccttcggcaaggaccccgagacactgtcgccggggttgcaggagaaccccttcgccaacgccttcgactccgccaccgaggcgacgctgcagaggttcctgttccccagcttcctgtggcgcgtcaagaaggcgctcggcgtcggcagcgagcggagcctccgcgagagcctcgcgatcgtggaccagtacatgacggaggccatcgcggcgcgcaaggcgaatccgtcggacgacctgctctccaggttcatgaagaagcgcgacggcagcggcagggcgttccccgaggacgtgctccagtgggtcgcgctcaacttcgtgctcgcgggacgcgacacgtcgtccgtcgcgctcagctggttcttctggatgctcatgctgcggcgcgacgtcgagcgcaaggtggtcctggagatcgcctccgtcctcagggagacgcgtggcgacgacagcgggaggtggaccgaggagccgctggacttcgacgagctggaccgcctcgtgtacctgaaggcggcattggcggagacgctgcggctgtacccttcggtgccgcaggactccaagtacgtggtggaggacgacgtgttgcccgatggcaccgtggtgccggccggctcagcggtcacctactccatctactcggttggacgaatggagagcatctggggaaaagactgctctgagttccggcctgagcggtggctctcggctgacgggacccggttcgagccggccaaggacgcgtaccgcttcgtggcgttcaacggcgggccgcggacgtgcctgggcaaggacctggcgtacttgcagatgaagtccatcgcttccgctgtgctactgcgccactcggtggagctcgtccctggacacaaggtggagcagaagatgtcgctcactctgttcatgaagaacggcctccgagtgcacgtcaagccgcgggacctcgccggctacgtcgtggcaccggaggaagccccgcagctgggagcctttgtgatctcgaccacaactgcagcagctgcataagcctgcatgtgcccgcgcgtattggcactggtttcttcgtgctgaagttcttctgtatgcctctgctgtcaaagtcatatcgttttcgtttctccctcttcattagactgttaggtttgtgggtacctggcgtcatattggttgtacctgtgtagtttttgtgtggatgaatcggtttgtgtacttctgt

SEQ ID NO: 34781 - protein, 555 aa, Zea mays subsp. mays
  peptide (1)..(555): Ceres Seq. ID no. 12355802
  misc_feature (29)..(527): NCBI GI NO: 19698839 NR Description: cytochrome P450 [Arabidopsis thaliana]
  misc_feature (29)..(527): NCBI GI NO: 15237768 NR Description: cytochrome p450 family; protein id: At5g58860
  misc_feature (29)..(527): NCBI GI NO: 7430725 NR Description: cytochrome P450 CYP86A1 - Arabidopsis thaliana
  misc_feature (27)..(555): NCBI GI NO: 10442763 NR Description: cytochrome P450 [Triticum aestivum]
  misc_feature (31)..(529): NCBI GI NO: 15236789 NR Description: cytochrome p450, putative; protein id: At4g00360
  misc_feature (27)..(555): NCBI GI NO: 38345840 NR Description: OSJNBa0084K11.4
  misc_feature (31)..(529): NCBI GI NO: 18650607 NR Description: AT4g00360/A_IG005I10_21 [Arabidopsis thaliana]
  misc_feature (26)..(533): NCBI GI NO: 15223436 NR Description: cytochrome P450, putative; protein id: At1g01600.1
  misc_feature (26)..(533): NCBI GI NO: 26449891 NR Description: unknown protein [Arabidopsis thaliana]
  misc_feature (24)..(529): NCBI GI NO: 15225914 NR Description: cytochrome P450, putative; protein id: At2g45970
FTSLKRTGMAIVQDNGVLHLHPYAVAAAAAALISAYMVWFWALTRRLSGPRMWPLVGSLPSVVLNRARVHDWIVDNLRSKGEAATYQTCILPLPFLARRQGLVTVTCNPRNLEHILRARFDNYPKGPMWQAAFHDLLGQGIFNSDGETWLLQRKTAALEFTTRTLRQAMARWANRIIKYRLWSILAEHCEAAASVDLQDLLLRLTFDNICGLTFGKDPETLSPGLQENPFANAFDSATEATLQRFLFPSFLWRVKKALGVGSERSLRESLAIVDQYMTEAIAARKANPSDDLLSRFMKKRDGSGRAFPEDVLQWVALNFVLAGRDTSSVALSWFFWMLMLRRDVERKVVLEIASVLRETRGDDSGRWTEEPLDFDELDRLVYLKAALAETLRLYPSVPQDSKYVVEDDVLPDGTVVPAGSAVTYSIYSVGRMESIWGKDCSEFRPERWLSADGTRFEPAKDAYRFVAFNGGPRTCLGKDLAYLQMKSIASAVLLRHSVELVPGHKVEQKMSLTLFMKNGLRVHVKPRDLAGYVVAPEEAPQLGAFVISTTTAAAA

SEQ ID NO: 34782 - protein, 547 aa, Zea mays subsp. mays
  peptide (1)..(547): Ceres Seq. ID no. 12355803
  misc_feature (21)..(519): NCBI GI NO: 19698839 NR Description: cytochrome P450 [Arabidopsis thaliana]
  misc_feature (21)..(519): NCBI GI NO: 15237768 NR Description: cytochrome p450 family; protein id: At5g58860
  misc_feature (21)..(519): NCBI GI NO: 7430725 NR Description: cytochrome P450 CYP86A1 - Arabidopsis thaliana
  misc_feature (19)..(547): NCBI GI NO: 10442763 NR Description: cytochrome P450 [Triticum aestivum]
  misc_feature (23)..(521): NCBI GI NO: 15236789 NR Description: cytochrome p450, putative; protein id: At4g00360
  misc_feature (19)..(547): NCBI GI NO: 38345840 NR Description: OSJNBa0084K11.4
  misc_feature (23)..(521): NCBI GI NO: 18650607 NR Description: AT4g00360/A_IG005I10_21 [Arabidopsis thaliana]
  misc_feature (18)..(525): NCBI GI NO: 15223436 NR Description: cytochrome P450, putative; protein id: At1g01600.1
  misc_feature (18)..(525): NCBI GI NO: 26449891 NR Description: unknown protein [Arabidopsis thaliana]
  misc_feature (16)..(521): NCBI GI NO: 15225914 NR Description: cytochrome P450, putative; protein id: At2g45970
MAIVQDNGVLHLHPYAVAAAAAALISAYMVWFWALTRRLSGPRMWPLVGSLPSVVLNRARVHDWIVDNLRSKGEAATYQTCILPLPFLARRQGLVTVTCNPRNLEHILRARFDNYPKGPMWQAAFHDLLGQGIFNSDGETWLLQRKTAALEFTTRTLRQAMARWANRIIKYRLWSILAEHCEAAASVDLQDLLLRLTFDNICGLTFGKDPETLSPGLQENPFANAFDSATEATLQRFLFPSFLWRVKKALGVGSERSLRESLAIVDQYMTEAIAARKANPSDDLLSRFMKKRDGSGRAFPEDVLQWVALNFVLAGRDTSSVALSWFFWMLMLRRDVERKVVLEIASVLRETRGDDSGRWTEEPLDFDELDRLVYLKAALAETLRLYPSVPQDSKYVVEDDVLPDGTVVPAGSAVTYSIYSVGRMESIWGKDCSEFRPERWLSADGTRFEPAKDAYRFVAFNGGPRTCLGKDLAYLQMKSIASAVLLRHSVELVPGHKVEQKMSLTLFMKNGLRVHVKPRDLAGYVVAPEEAPQLGAFVISTTTAAAA

SEQ ID NO: 34783 - protein, 519 aa, Zea mays subsp. mays
  peptide (1)..(519): Ceres Seq. ID no. 12355804
  misc_feature (1)..(491): NCBI GI NO: 19698839 NR Description: cytochrome P450 [Arabidopsis thaliana]
  misc_feature (1)..(491): NCBI GI NO: 15237768 NR Description: cytochrome p450 family; protein id: At5g58860
  misc_feature (1)..(491): NCBI GI NO: 7430725 NR Description: cytochrome P450 CYP86A1 - Arabidopsis thaliana
  misc_feature (1)..(519): NCBI GI NO: 10442763 NR Description: cytochrome P450 [Triticum aestivum]
  misc_feature (1)..(493): NCBI GI NO: 15236789 NR Description: cytochrome p450, putative; protein id: At4g00360
  misc_feature (1)..(519): NCBI GI NO: 38345840 NR Description: OSJNBa0084K11.4
  misc_feature (1)..(493): NCBI GI NO: 18650607 NR Description: AT4g00360/A_IG005I10_21 [Arabidopsis thaliana]
  misc_feature (1)..(497): NCBI GI NO: 15223436 NR Description: cytochrome P450, putative; protein id: At1g01600.1
  misc_feature (1)..(497): NCBI GI NO: 26449891 NR Description: unknown protein [Arabidopsis thaliana]
  misc_feature (1)..(493): NCBI GI NO: 15225914 NR Description: cytochrome P450, putative; protein id: At2g45970
MVWFWALTRRLSGPRMWPLVGSLPSVVLNRARVHDWIVDNLRSKGEAATYQTCILPLPFLARRQGLVTVTCNPRNLEHILRARFDNYPKGPMWQAAFHDLLGQGIFNSDGETWLLQRKTAALEFTTRTLRQAMARWANRIIKYRLWSILAEHCEAAASVDLQDLLLRLTFDNICGLTFGKDPETLSPGLQENPFANAFDSATEATLQRFLFPSFLWRVKKALGVGSERSLRESLAIVDQYMTEAIAARKANPSDDLLSRFMKKRDGSGRAFPEDVLQWVALNFVLAGRDTSSVALSWFFWMLMLRRDVERKVVLEIASVLRETRGDDSGRWTEEPLDFDELDRLVYLKAALAETLRLYPSVPQDSKYVVEDDVLPDGTVVPAGSAVTYSIYSVGRMESIWGKDCSEFRPERWLSADGTRFEPAKDAYRFVAFNGGPRTCLGKDLAYLQMKSIASAVLLRHSVELVPGHKVEQKMSLTLFMKNGLRVHVKPRDLAGYVVAPEEAPQLGAFVISTTTAAAA

SEQ ID NO: 34784 - DNA, 1671 bp, Zea mays subsp. mays
  misc_feature (1)..(1671): Ceres Seq. ID no. 12405914
gtttccacattttgttgcgctcctttagcgccggcggcccgtagcctcatcatcatttccattccatccggtttcttccgacgacggtgtgtacagagagcaggatcggacaagtctctgctggtagaagcatggcgcagcgccggctgttgggcacggcgccggcgcccgcgggcgatgcggcgtcgcacggctcgggctccagccccgacgcgatgcggatcatggtgggcgtgctggtaacggtcatcgtctgcacgctgctctactgcgtctactgctggcggtggcggaagcgcaatggtgaaactgcgctctgctgccatccgagatccctgctggacagcctatggcggcggtcgagctcggacctgccgctcatggacctcgcctccatcctcgctgccaccgacaacttctccaaggccaacaagctcggcgagggcggcttcggccccgtctacagaggcgtgctgagcggcggctccgagatcgccgtgaagcgtctgtcggcgcggtcgcggcagggcgcggcggagttccggaacgaggtggagctcatcgccaagctgcagcaccgcaacctagtgcggctgctgggctggtgcgccgagcgcgaggagaagctgctggtgtacgagtacctccccaaccgcagcctcgacgccttcctcttcgatccgagcaagagtgcgcagcttgggtggagcacccggcacaacgtgatcctgggcatcgcccgcggcctgctgtacctccacgaggactcgctgctgaaggtggtccaccgggacctcaaggccagcaacgtgctgctcgaccacaagatgagcccaaagatctccgacttcggcatggccaagatcttcgaggacgactccgacgcgatcaacacgggccgcgtcgtcgggacctacgggtacatggcgcccgagttcgcgttggacggcgtcttctcggtgaagtcggacgtgttcagcttcggggtcctcctgctggagatcttgagcgggcaacggaacggcgctttgtacctcgaggaacaccagcagtccctcatccaagacgcatggaagctgtggagtgaagaccgcgcggccgagttcatggaccagtcgctggggcggtcctactccaaggacgaggcgtggcggtgctaccacgtcggcctgctctgcgtgcaggaggaccccgacgtccgccccaccatgtccaacgtcctgctcatgctcatcagcgaccacaccaagttacccgagccagccatgccgcccttgttcgcgcggctcaggaacatctccttgctggcgccgccactcactaccaaaaccgagtccaccacgtctccgctgtcgatcaacgacgtctccatcaccatgatcgaaccgcgatgagctcatgcgttttctacttctgacaactgagggagaggcttcgagtgtaaatttataagactgcaatcgttcagaatgactactcctatgtactagtaagtttttttttatgctgtgcacaagtgtgggatttaactactagactagaacatgcggcgcccgtaatcgggtcataacagatttttttttatgtttatgcattctcctatgtgatccaatggactaaaatgtgtcaccactgctagcaaagaccatataactattttaattagtttgt

SEQ ID NO: 34785 - protein, 420 aa, Zea mays subsp. mays
  peptide (1)..(420): Ceres Seq. ID no. 12405915
  misc_feature (22)..(420): NCBI GI NO: 24417476 NR Description: unknown [Arabidopsis thaliana]
  misc_feature (22)..(420): NCBI GI NO: 30686087 NR Description: serine/threonine kinase -related protein
  misc_feature (80)..(420): NCBI GI NO: 836954 NR Description: receptor protein kinase [Ipomoea trifida]
  misc_feature (31)..(420): NCBI GI NO: 13506745 NR Description: receptor-like protein kinase 4
  misc_feature (77)..(420): NCBI GI NO: 7488195 NR Description: probable serine/threonine-specific protein kinase
  misc_feature (30)..(420): NCBI GI NO: 38344785 NR Description: OSJNBa0043L09.5
  misc_feature (7)..(420): NCBI GI NO: 30686073 NR Description: serine/threonine kinase - like protein
  misc_feature (23)..(420): NCBI GI NO: 7488193 NR Description: probable serine/threonine-specific protein kinase
  misc_feature (23)..(420): NCBI GI NO: 18416076 NR Description: serine threonine kinase - like protein
  misc_feature (1)..(420): NCBI GI NO: 33146545 NR Description: putative receptor-like protein kinase 4
MAQRRLLGTAPAPAGDAASHGSGSSPDAMRIMVGVLVTVIVCTLLYCVYCWRWRKRNGETALCCHPRSLLDSLWRRSSSDLPLMDLASILAATDNFSKANKLGEGGFGPVYRGVLSGGSEIAVKRLSARSRQGAAEFRNEVELIAKLQHRNLVRLLGWCAEREEKLLVYEYLPNRSLDAFLFDPSKSAQLGWSTRHNVILGIARGLLYLHEDSLLKVVHRDLKASNVLLDHKMSPKISDFGMAKIFEDDSDAINTGRVVGTYGYMAPEFALDGVFSVKSDVFSFGVLLLEILSGQRNGALYLEEHQQSLIQDAWKLWSEDRAAEFMDQSLGRSYSKDEAWRCYHVGLLCVQEDPDVRPTMSNVLLMLISDHTKLPEPAMPPLFARLRNISLLAPPLTTKTESTTSPLSINDVSITMIEPR

SEQ ID NO: 34786 - protein, 392 aa, Zea mays subsp. mays
  peptide (1)..(392): Ceres Seq. ID no. 12405916
  misc_feature (1)..(392): NCBI GI NO: 24417476 NR Description: unknown [Arabidopsis thaliana]
  misc_feature (1)..(392): NCBI GI NO: 30686087 NR Description: serine/threonine kinase -related protein
  misc_feature (52)..(392): NCBI GI NO: 836954 NR Description: receptor protein kinase [Ipomoea trifida]
  misc_feature (3)..(392): NCBI GI NO: 13506745 NR Description: receptor-like protein kinase 4
  misc_feature (49)..(392): NCBI GI NO: 7488195 NR Description: probable serine/threonine-specific protein kinase
  misc_feature (2)..(392): NCBI GI NO: 38344785 NR Description: OSJNBa0043L09.5
  misc_feature (1)..(392): NCBI GI NO: 30686073 NR Description: serine/threonine kinase - like protein
  misc_feature (1)..(392): NCBI GI NO: 7488193 NR Description: probable serine/threonine-specific protein kinase
  misc_feature (1)..(392): NCBI GI NO: 18416076 NR Description: serine threonine kinase - like protein
  misc_feature (1)..(392): NCBI GI NO: 33146545 NR Description: putative receptor-like protein kinase 4
MRIMVGVLVTVIVCTLLYCVYCWRWRKRNGETALCCHPRSLLDSLWRRSSSDLPLMDLASILAATDNFSKANKLGEGGFGPVYRGVLSGGSEIAVKRLSARSRQGAAEFRNEVELIAKLQHRNLVRLLGWCAEREEKLLVYEYLPNRSLDAFLFDPSKSAQLGWSTRHNVILGIARGLLYLHEDSLLKVVHRDLKASNVLLDHKMSPKISDFGMAKIFEDDSDAINTGRVVGTYGYMAPEFALDGVFSVKSDVFSFGVLLLEILSGQRNGALYLEEHQQSLIQDAWKLWSEDRAAEFMDQSLGRSYSKDEAWRCYHVGLLCVQEDPDVRPTMSNVLLMLISDHTKLPEPAMPPLFARLRNISLLAPPLTTKTESTTSPLSINDVSITMIEPR

SEQ ID NO: 34787 - protein, 389 aa, Zea mays subsp. mays
  peptide (1)..(389): Ceres Seq. ID no. 12405917
  misc_feature (1)..(389): NCBI GI NO: 24417476 NR Description: unknown [Arabidopsis thaliana]
  misc_feature (1)..(389): NCBI GI NO: 30686087 NR Description: serine/threonine kinase -related protein
  misc_feature (49)..(389): NCBI GI NO: 836954 NR Description: receptor protein kinase [Ipomoea trifida]
  misc_feature (1)..(389): NCBI GI NO: 13506745 NR Description: receptor-like protein kinase 4
  misc_feature (46)..(389): NCBI GI NO: 7488195 NR Description: probable serine/threonine-specific protein kinase
  misc_feature (1)..(389): NCBI GI NO: 38344785 NR Description: OSJNBa0043L09.5
  misc_feature (1)..(389): NCBI GI NO: 30686073 NR Description: serine/threonine kinase - like protein
  misc_feature (1)..(389): NCBI GI NO: 7488193 NR Description: probable serine/threonine-specific protein kinase
  misc_feature (1)..(389): NCBI GI NO: 18416076 NR Description: serine threonine kinase - like protein
  misc_feature (1)..(389): NCBI GI NO: 33146545 NR Description: putative receptor-like protein kinase 4
MVGVLVTVIVCTLLYCVYCWRWRKRNGETALCCHPRSLLDSLWRRSSSDLPLMDLASILAATDNFSKANKLGEGGFGPVYRGVLSGGSEIAVKRLSARSRQGAAEFRNEVELIAKLQHRNLVRLLGWCAEREEKLLVYEYLPNRSLDAFLFDPSKSAQLGWSTRHNVILGIARGLLYLHEDSLLKVVHRDLKASNVLLDHKMSPKISDFGMAKIFEDDSDAINTGRVVGTYGYMAPEFALDGVFSVKSDVFSFGVLLLEILSGQRNGALYLEEHQQSLIQDAWKLWSEDRAAEFMDQSLGRSYSKDEAWRCYHVGLLCVQEDPDVRPTMSNVLLMLISDHTKLPEPAMPPLFARLRNISLLAPPLTTKTESTTSPLSINDVSITMIEPR

SEQ ID NO: 34788 - DNA, 1635 bp, Zea mays subsp. mays
  misc_feature (1)..(1635): Ceres Seq. ID no. 13493312
  misc_feature (438)..(438): n is a, c, t, g, unknown, or other
  misc_feature (439)..(439): n is a, c, t, g, unknown, or other
actgcagcaatcacagacagacacgagcaagtgtgagtgaggaggtttgcctgcccatctccatcggccatcgctgcctccccagtccccacatccgcacacatttttacccctcgcggcggccccaccgaccgccggggcgcagcggcgtcgccgcgggcaacgccgtcacgtcacgtgcatcacgacaatctcctcctccgcctcgtcttcctgccaggccgcgggagcaccagcccagcggcagatcagtcgaggcgggcgattccagggtttagagaggagcggagatggtgaaggtcatccaggggcgcccggccgagatggggttccggatgccggcggagtgggagccgcacgagcagtgctggatgggatggcctgagcgtccagataactggagggagaatgctggtccagctcaagaggtatttgctnnaactgcaattgccatttcaaagtttgaacccgtcacgttatgtgcaagtgccaagcagtaccccaaagtccacgagctgatggaacatgaaaccaacatcagggtcgttgagatgagcatgaacgattcctggttccgcgacatgggccccacttttgtcactcataaaggggattcaggaattgcagaacaaacaatagcaggaattgattggcaattcaatgcctggggaggaatctatgacgactggagtcttgacagcgatgttgccaagaaaatagtcgagatcgagaggatccctaggtttccccaaaaaaattatccttgagggtggaagcattcatgtagatggagaaggtacatgcattacaacggaagaatgcttgctgaatcctaataggaaccccaacatgaccaaactagagatagagaatgagctgaaggattttcttggagtctcgaaggtcatctggatacctcgtggactttatggtgacgaggatacaaacggccacgttgacaacctgtgctgcttcatcaaacccggtgtgatcctgctgtcgtggaccgacgacgagaaggaccatcagtacgaacggtcggtcgaggcgctgtctgttctctcccagtccgtcgacgcgaaagggcggcagctccaagtggtgaagatccacgtccccgggcctctgtacatgacagaggaataggcacagggcgttgtttcatcggggcattctgtaccgaggccagcgggcacgaggttggccgcctcgtacgtcaacttctacatcgccaatggggggatcatagcgccttccttcggtgacaggtgggacgaggaggcgtatgcggttctccagaaggcgtttcctgatcacgaggtggtgatggtcgaaggcggacgggagatcgcgctgggaggtgggaacattcactgcatcacgcagcagcagcccgtgcgcccgtcctaggtgaaaccggcgtcgacgcgaagcgatgaagagtatgctgctcctgtgtttaagcaggtgggttggtcccctgtcgttattacgctcaccaatacgcgcgcgaaataagccgtaggtacaagttccttgacaaatactgtatgagtactattaggccttgttggtgggtcggaacgattcctaaccgaattgtttatctaatttatataaattttgattagctgg

SEQ ID NO: 34789 - protein, 158 aa, Zea mays subsp. mays
  peptide (1)..(158): Ceres Seq. ID no. 13493313
  misc_feature (14)..(152): Pfam Name: Pfam Description:  Porphyromonas-type peptidyl-arginine deiminase
  misc_feature (5)..(153): NCBI GI NO: 38606518 NR Description: OSJNBa0016O02.3
  misc_feature (9)..(152): NCBI GI NO: 15241536 NR Description: expressed protein [Arabidopsis thaliana]
  misc_feature (9)..(152): NCBI GI NO: 26452202 NR Description: unknown protein [Arabidopsis thaliana]
  misc_feature (9)..(152): NCBI GI NO: 14289303 NR Description: hypothetical protein [Arabidopsis thaliana]
  misc_feature (9)..(152): NCBI GI NO: 15595489 NR Description: conserved hypothetical protein
  misc_feature (5)..(157): NCBI GI NO: 23472721 NR Description: hypothetical protein
  misc_feature (5)..(157): NCBI GI NO: 28872501 NR Description: conserved hypothetical protein
  misc_feature (1)..(157): NCBI GI NO: 23105724 NR Description: hypothetical protein [Azotobacter vinelandii]
  misc_feature (2)..(157): NCBI GI NO: 26987008 NR Description: conserved hypothetical protein
  misc_feature (5)..(157): NCBI GI NO: 23061592 NR Description: hypothetical protein
  misc_feature (50)..(50): Xaa is any aa, unknown or other
MVKVIQGRPAEMGFRMPAEWEPHEQCWMGWPERPDNWRENAGPAQEVFAXTAIAISKFEPVTLCASAKQYPKVHELMEHETNIRVVEMSMNDSWFRDMGPTFVTHKGDSGIAEQTIAGIDWQFNAWGGIYDDWSLDSDVAKKIVEIERIPRFPQKNYP

SEQ ID NO: 34790 - protein, 147 aa, Zea mays subsp. mays
  peptide (1)..(147): Ceres Seq. ID no. 13493314
  misc_feature (3)..(141): Pfam Name: Pfam Description:  Porphyromonas-type peptidyl-arginine deiminase
  misc_feature (1)..(142): NCBI GI NO: 38606518 NR Description: OSJNBa0016O02.3
  misc_feature (1)..(141): NCBI GI NO: 15241536 NR Description: expressed protein [Arabidopsis thaliana]
  misc_feature (1)..(141): NCBI GI NO: 26452202 NR Description: unknown protein [Arabidopsis thaliana]
  misc_feature (1)..(141): NCBI GI NO: 14289303 NR Description: hypothetical protein [Arabidopsis thaliana]
  misc_feature (1)..(141): NCBI GI NO: 15595489 NR Description: conserved hypothetical protein
  misc_feature (1)..(146): NCBI GI NO: 23472721 NR Description: hypothetical protein
  misc_feature (1)..(146): NCBI GI NO: 28872501 NR Description: conserved hypothetical protein
  misc_feature (1)..(146): NCBI GI NO: 23105724 NR Description: hypothetical protein [Azotobacter vinelandii]
  misc_feature (1)..(146): NCBI GI NO: 26987008 NR Description: conserved hypothetical protein
  misc_feature (1)..(146): NCBI GI NO: 23061592 NR Description: hypothetical protein
  misc_feature (39)..(39): Xaa is any aa, unknown or other
MGFRMPAEWEPHEQCWMGWPERPDNWRENAGPAQEVFAXTAIAISKFEPVTLCASAKQYPKVHELMEHETNIRVVEMSMNDSWFRDMGPTFVTHKGDSGIAEQTIAGIDWQFNAWGGIYDDWSLDSDVAKKIVEIERIPRFPQKNYP

SEQ ID NO: 34791 - protein, 143 aa, Zea mays subsp. mays
  peptide (1)..(143): Ceres Seq. ID no. 13493315
  misc_feature (1)..(137): Pfam Name: Pfam Description:  Porphyromonas-type peptidyl-arginine deiminase
  misc_feature (1)..(138): NCBI GI NO: 38606518 NR Description: OSJNBa0016O02.3
  misc_feature (1)..(137): NCBI GI NO: 15241536 NR Description: expressed protein [Arabidopsis thaliana]
  misc_feature (1)..(137): NCBI GI NO: 26452202 NR Description: unknown protein [Arabidopsis thaliana]
  misc_feature (1)..(137): NCBI GI NO: 14289303 NR Description: hypothetical protein [Arabidopsis thaliana]
  misc_feature (1)..(137): NCBI GI NO: 15595489 NR Description: conserved hypothetical protein
  misc_feature (1)..(142): NCBI GI NO: 23472721 NR Description: hypothetical protein
  misc_feature (1)..(142): NCBI GI NO: 28872501 NR Description: conserved hypothetical protein
  misc_feature (1)..(142): NCBI GI NO: 23105724 NR Description: hypothetical protein [Azotobacter vinelandii]
  misc_feature (1)..(142): NCBI GI NO: 26987008 NR Description: conserved hypothetical protein
  misc_feature (1)..(142): NCBI GI NO: 23061592 NR Description: hypothetical protein
  misc_feature (35)..(35): Xaa is any aa, unknown or other
MPAEWEPHEQCWMGWPERPDNWRENAGPAQEVFAXTAIAISKFEPVTLCASAKQYPKVHELMEHETNIRVVEMSMNDSWFRDMGPTFVTHKGDSGIAEQTIAGIDWQFNAWGGIYDDWSLDSDVAKKIVEIERIPRFPQKNYP

SEQ ID NO: 34792 - DNA, 1323 bp, Zea mays subsp. mays
  misc_feature (1)..(1323): Ceres Seq. ID no. 12344625
gcatcggtccaccgagccacaccacaccaccgtctcgcggagaaactcctccaaaacccccaaaccctttcaatcggcggcaatggcggcgccggtggccgacgatgcctcggcatccccaggctacgtcctccgctccacacttgaggggcaccgccgcgccgtatcaacagttaagttctccccggatggccgccttctcgcctccgcctccgccgacaagcttcttcgcgtgtggtcttcctccgatctcacccccgttgcggagctcgagggccatggagagggtgtctcagacctctctttctcccccgacggccgcctccttgcctccgcctccgatgatcgcaccgtccgcatctgggacctcgccgtcggcggaggggcccgcctcgtcaagacgctcacgggccacaccaactacgccttctgcgtctccttcagcccccatggcaacgtcctcgcctccgggtcctttgacgagacggtgcgcgtgtgggaggtcaggtccggtaagtgcctccgcgtgctgccggcccattctgaacccgtcaccgccgtggacttcgatcgcgagggcgacatgattgtgtcagggagctacgacgggctctgccgcgtctgggactcggccaccggtcactgcgtcaaaaccctcatcgacgacgagagcccaccagtgtcctttgccaagttctcccccaatggcaagtttatcctcgcggcaacgcttgacagcaccttgaggctttggaatttctcagctggaaagtttctgaagacatataccggacatgttaacacaaagtactgcatcccagcggcgttttctatcacgaatagcaagtatattgtcagtggctccgaggacaaatgtgtctacctatgggacctccagtcaagaagaatagtgcagaaactggaaggccatactgatactgtcattgcggtctcatgtcatcccaaggaaaacatgatcgcatccggggcgcttgacaatgacaagaccgtgaaagtttgggtccaaaaggaagaagattgatgagcggcctggttacgctcttatctacattggctgtcatgtggactgactaatggtaagcaaaatatgcagcttcccaagcaactaaagtttgctgcagtggagaatgtgatgctcctggcatgtgtaactgagtgagtgctatattgtctattcagcagctcggcgatgatattagtgaactcaagtgttctgtagagctattcctgggaggctgggatcatgtaagaaagactcaacacaacaatgcttgaacttcatttgttgtgtttctgattccc

SEQ ID NO: 34793 - protein, 346 aa, Zea mays subsp. mays
  peptide (1)..(346): Ceres Seq. ID no. 12344626
  misc_feature (28)..(345): NCBI GI NO: 15229187 NR Description: G-protein beta-subunit
  misc_feature (4)..(340): NCBI GI NO: 17864654 NR Description: will die slowly CG17437-PA
  misc_feature (20)..(340): NCBI GI NO: 31196347 NR Description: ENSANGP00000012135 [Anopheles gambiae]
  misc_feature (10)..(340): NCBI GI NO: 30353827 NR Description: Unknown (protein for MGC:56591) [Danio rerio]
  misc_feature (20)..(340): NCBI GI NO: 6714707 NR Description: hypothetical protein [Homo sapiens]
  misc_feature (20)..(340): NCBI GI NO: 16554627 NR Description: WD repeat domain 5 protein; WD-repeat protein 5
  misc_feature (20)..(340): NCBI GI NO: 34853150 NR Description: similar to hypothetical protein
  misc_feature (40)..(340): NCBI GI NO: 20302740 NR Description: unknown [Branchiostoma floridae]
  misc_feature (17)..(341): NCBI GI NO: 23199987 NR Description: WD repeat domain 5B [Homo sapiens]
  misc_feature (17)..(341): NCBI GI NO: 7023854 NR Description: unnamed protein product [Homo sapiens]
HRSTEPHHTTVSRRNSSKTPKPFQSAAMAAPVADDASASPGYVLRSTLEGHRRAVSTVKFSPDGRLLASASADKLLRVWSSSDLTPVAELEGHGEGVSDLSFSPDGRLLASASDDRTVRIWDLAVGGGARLVKTLTGHTNYAFCVSFSPHGNVLASGSFDETVRVWEVRSGKCLRVLPAHSEPVTAVDFDREGDMIVSGSYDGLCRVWDSATGHCVKTLIDDESPPVSFAKFSPNGKFILAATLDSTLRLWNFSAGKFLKTYTGHVNTKYCIPAAFSITNSKYIVSGSEDKCVYLWDLQSRRIVQKLEGHTDTVIAVSCHPKENMIASGALDNDKTVKVWVQKEED

SEQ ID NO: 34794 - protein, 319 aa, Zea mays subsp. mays
  peptide (1)..(319): Ceres Seq. ID no. 12344627
  misc_feature (1)..(318): NCBI GI NO: 15229187 NR Description: G-protein beta-subunit
  misc_feature (1)..(313): NCBI GI NO: 17864654 NR Description: will die slowly CG17437-PA
  misc_feature (1)..(313): NCBI GI NO: 31196347 NR Description: ENSANGP00000012135 [Anopheles gambiae]
  misc_feature (1)..(313): NCBI GI NO: 30353827 NR Description: Unknown (protein for MGC:56591) [Danio rerio]
  misc_feature (1)..(313): NCBI GI NO: 6714707 NR Description: hypothetical protein [Homo sapiens]
  misc_feature (1)..(313): NCBI GI NO: 16554627 NR Description: WD repeat domain 5 protein; WD-repeat protein 5
  misc_feature (1)..(313): NCBI GI NO: 34853150 NR Description: similar to hypothetical protein
  misc_feature (13)..(313): NCBI GI NO: 20302740 NR Description: unknown [Branchiostoma floridae]
  misc_feature (1)..(314): NCBI GI NO: 23199987 NR Description: WD repeat domain 5B [Homo sapiens]
  misc_feature (1)..(314): NCBI GI NO: 7023854 NR Description: unnamed protein product [Homo sapiens]
MAAPVADDASASPGYVLRSTLEGHRRAVSTVKFSPDGRLLASASADKLLRVWSSSDLTPVAELEGHGEGVSDLSFSPDGRLLASASDDRTVRIWDLAVGGGARLVKTLTGHTNYAFCVSFSPHGNVLASGSFDETVRVWEVRSGKCLRVLPAHSEPVTAVDFDREGDMIVSGSYDGLCRVWDSATGHCVKTLIDDESPPVSFAKFSPNGKFILAATLDSTLRLWNFSAGKFLKTYTGHVNTKYCIPAAFSITNSKYIVSGSEDKCVYLWDLQSRRIVQKLEGHTDTVIAVSCHPKENMIASGALDNDKTVKVWVQKEED

SEQ ID NO: 34795 - protein, 194 aa, Zea mays subsp. mays
  peptide (1)..(194): Ceres Seq. ID no. 12344628
  misc_feature (4)..(194): Pfam Name: Pfam Description:  Formin Homology 2 Domain
IGPPSHTTPPSRGETPPKPPNPFNRRQWRRRWPTMPRHPQATSSAPHLRGTAAPYQQLSSPRMAAFSPPPPPTSFFACGLPPISPPLRSSRAMERVSQTSLSPPTAASLPPPPMIAPSASGTSPSAEGPASSRRSRATPTTPSASPSAPMATSSPPGPLTRRCACGRSGPVSASACCRPILNPSPPWTSIARAT

SEQ ID NO: 34796 - DNA, 1485 bp, Zea mays subsp. mays
  misc_feature (1)..(1485): Ceres Seq. ID no. 12364144
gcacgagaccattacctagaacatcctaatcgaaaaatcgcaactcatactagaacatacagcatttcacaagacacaacataagcaatagccatgggagctgtgaagcatacattgaaaatgctttcatggctcctactcttcgcacaattggctgcggccaccacctccaagtgcacaaatgccacaaatgggactgagactgacagcctgggtgcaatgaaactgaagctgattgccattgcatccatcctcacagctggagcagctggtgtgctagtgccagtacttggccgctccatggccgcgctacatcctgatggtgacatttttttcgctgtcaaggcatttgcagccggtgtcatcctggccacgggcatggtccacattctgccagcagcatttgatgggctgacatccccatgcctctacaaaggtggcagtggtgggaacattttcccctttgcaggactcattgcaatgtctgctgcaatggccactatggtgatagactcactagctgctgggtactaccgccggtctcacttcaagaaggcacggccaatcgacatcctagagatccatgaacaaccaggagatgaggaaaggtctgggcatgcacaacatgtgcatgtgcacacccatgcaacacatgggcattcacacggagaggtggatgtcatcagttcaccagaggaggcttcaatagctgacacgatccggcacagggtggtatctcaggtccttgagctcggaattttggtgcattcagtgataattggggtgtccttaggtgcatctgtgaggtcatcgaccataaggcctcttgttggtgcccttagcttccatcaattctttgaaggcattggcctgggtggttgcattgtgcaggcaaatttcaagttgagggctaccgtcatgatggcaatttttttctccctgactgcacccattggcattgcattagggattggaatttcatcaagctacaatggccatagcactacagcgttcattgttgaaggagtgttcaactcagcctcagcaggaattttgatctacatgtcattagtcgatcttctggccacagatttcaataagcccaaactgcagacgaatacaaagcttcagctgatgacatatcttgcacttttcttaggtgcagggatgatgtccatgcttgctatatgggcatagattttcagaccatcaaaggatggctagagttgaagaaataagtttatttgtccaagagttctccattttctcaaacaagatgcccttggtgaagggttcatcatattaatccacgagttctccatcttccgtacgatatagcctcagatagtccttttgtacttcataatgtgagattacatgatttgtcatttgttggcatagtccattatcctaaagctatgatagtcattagctgtggttcatgtgctgaacattcagtcataaagacagagctaagccaattct

SEQ ID NO: 34797 - protein, 367 aa, Zea mays subsp. mays
  peptide (1)..(367): Ceres Seq. ID no. 12364145
  misc_feature (44)..(197): Pfam Name: Pfam Description:  ZIP Zinc transporter
  misc_feature (1)..(367): NCBI GI NO: 32492894 NR Description: zinc transporter ZIP3
  misc_feature (38)..(367): NCBI GI NO: 40888860 NR Description: TPA: putative ZIP-like protein
  misc_feature (169)..(367): NCBI GI NO: 15230588 NR Description: putative zinc transporter; protein id: At3g12750
  misc_feature (8)..(197): NCBI GI NO: 15230588 NR Description: putative zinc transporter; protein id: At3g12750
  misc_feature (164)..(367): NCBI GI NO: 32816615 NR Description: putative zinc transporter
  misc_feature (164)..(367): NCBI GI NO: 40888854 NR Description: TPA: putative ZIP-like protein
  misc_feature (38)..(192): NCBI GI NO: 32816615 NR Description: putative zinc transporter
  misc_feature (38)..(192): NCBI GI NO: 40888854 NR Description: TPA: putative ZIP-like protein
  misc_feature (12)..(367): NCBI GI NO: 15418778 NR Description: zinc transporter protein ZIP1 [Glycine max]
  misc_feature (38)..(367): NCBI GI NO: 32966053 NR Description: iron transporter Fe2
MGAVKHTLKMLSWLLLFAQLAAATTSKCTNATNGTETDSLGAMKLKLIAIASILTAGAAGVLVPVLGRSMAALHPDGDIFFAVKAFAAGVILATGMVHILPAAFDGLTSPCLYKGGSGGNIFPFAGLIAMSAAMATMVIDSLAAGYYRRSHFKKARPIDILEIHEQPGDEERSGHAQHVHVHTHATHGHSHGEVDVISSPEEASIADTIRHRVVSQVLELGILVHSVIIGVSLGASVRSSTIRPLVGALSFHQFFEGIGLGGCIVQANFKLRATVMMAIFFSLTAPIGIALGIGISSSYNGHSTTAFIVEGVFNSASAGILIYMSLVDLLATDFNKPKLQTNTKLQLMTYLALFLGAGMMSMLAIWA

SEQ ID NO: 34798 - protein, 358 aa, Zea mays subsp. mays
  peptide (1)..(358): Ceres Seq. ID no. 12364146
  misc_feature (35)..(188): Pfam Name: Pfam Description:  ZIP Zinc transporter
  misc_feature (1)..(358): NCBI GI NO: 32492894 NR Description: zinc transporter ZIP3
  misc_feature (29)..(358): NCBI GI NO: 40888860 NR Description: TPA: putative ZIP-like protein
  misc_feature (160)..(358): NCBI GI NO: 15230588 NR Description: putative zinc transporter; protein id: At3g12750
  misc_feature (1)..(188): NCBI GI NO: 15230588 NR Description: putative zinc transporter; protein id: At3g12750
  misc_feature (155)..(358): NCBI GI NO: 32816615 NR Description: putative zinc transporter
  misc_feature (155)..(358): NCBI GI NO: 40888854 NR Description: TPA: putative ZIP-like protein
  misc_feature (29)..(183): NCBI GI NO: 32816615 NR Description: putative zinc transporter
  misc_feature (29)..(183): NCBI GI NO: 40888854 NR Description: TPA: putative ZIP-like protein
  misc_feature (3)..(358): NCBI GI NO: 15418778 NR Description: zinc transporter protein ZIP1 [Glycine max]
  misc_feature (29)..(358): NCBI GI NO: 32966053 NR Description: iron transporter Fe2
MLSWLLLFAQLAAATTSKCTNATNGTETDSLGAMKLKLIAIASILTAGAAGVLVPVLGRSMAALHPDGDIFFAVKAFAAGVILATGMVHILPAAFDGLTSPCLYKGGSGGNIFPFAGLIAMSAAMATMVIDSLAAGYYRRSHFKKARPIDILEIHEQPGDEERSGHAQHVHVHTHATHGHSHGEVDVISSPEEASIADTIRHRVVSQVLELGILVHSVIIGVSLGASVRSSTIRPLVGALSFHQFFEGIGLGGCIVQANFKLRATVMMAIFFSLTAPIGIALGIGISSSYNGHSTTAFIVEGVFNSASAGILIYMSLVDLLATDFNKPKLQTNTKLQLMTYLALFLGAGMMSMLAIWA

SEQ ID NO: 34799 - protein, 325 aa, Zea mays subsp. mays
  peptide (1)..(325): Ceres Seq. ID no. 12364147
  misc_feature (2)..(155): Pfam Name: Pfam Description:  ZIP Zinc transporter
  misc_feature (1)..(325): NCBI GI NO: 32492894 NR Description: zinc transporter ZIP3
  misc_feature (1)..(325): NCBI GI NO: 40888860 NR Description: TPA: putative ZIP-like protein
  misc_feature (127)..(325): NCBI GI NO: 15230588 NR Description: putative zinc transporter; protein id: At3g12750
  misc_feature (1)..(155): NCBI GI NO: 15230588 NR Description: putative zinc transporter; protein id: At3g12750
  misc_feature (122)..(325): NCBI GI NO: 32816615 NR Description: putative zinc transporter
  misc_feature (122)..(325): NCBI GI NO: 40888854 NR Description: TPA: putative ZIP-like protein
  misc_feature (1)..(150): NCBI GI NO: 32816615 NR Description: putative zinc transporter
  misc_feature (1)..(150): NCBI GI NO: 40888854 NR Description: TPA: putative ZIP-like protein
  misc_feature (1)..(325): NCBI GI NO: 15418778 NR Description: zinc transporter protein ZIP1 [Glycine max]
  misc_feature (1)..(325): NCBI GI NO: 32966053 NR Description: iron transporter Fe2
MKLKLIAIASILTAGAAGVLVPVLGRSMAALHPDGDIFFAVKAFAAGVILATGMVHILPAAFDGLTSPCLYKGGSGGNIFPFAGLIAMSAAMATMVIDSLAAGYYRRSHFKKARPIDILEIHEQPGDEERSGHAQHVHVHTHATHGHSHGEVDVISSPEEASIADTIRHRVVSQVLELGILVHSVIIGVSLGASVRSSTIRPLVGALSFHQFFEGIGLGGCIVQANFKLRATVMMAIFFSLTAPIGIALGIGISSSYNGHSTTAFIVEGVFNSASAGILIYMSLVDLLATDFNKPKLQTNTKLQLMTYLALFLGAGMMSMLAIWA

SEQ ID NO: 34800 - DNA, 1594 bp, Zea mays subsp. mays; identical to SEQ ID NO: 24357
  misc_feature (1)..(1594): Ceres Seq. ID no. 12387222

SEQ ID NO: 34801 - protein, 454 aa, Zea mays subsp. mays; identical to SEQ ID NO: 24358
  peptide (1)..(454): Ceres Seq. ID no. 12387223
  misc_feature (146)..(417): Pfam Name: Pfam Description:  Polyprenyl synthetase
  misc_feature (105)..(454): NCBI GI NO: 1346033 NR Description: Farnesyl pyrophosphate synthetase
  misc_feature (104)..(454): NCBI GI NO: 34911542 NR Description: putative farnesyl-pyrophosphate synthetase
  misc_feature (158)..(454): NCBI GI NO: 25458583 NR Description: probable farnesyl pyrophosphate synthase
  misc_feature (21)..(151): NCBI GI NO: 25458583 NR Description: probable farnesyl pyrophosphate synthase
  misc_feature (106)..(454): NCBI GI NO: 18958450 NR Description: farnesyl pyrophosphare synthase [Musa acuminata]
  misc_feature (115)..(454): NCBI GI NO: 1346028 NR Description: Farnesyl pyrophosphate synthetase 1
  misc_feature (115)..(454): NCBI GI NO: 7433992 NR Description: farnesyl-pyrophosphate synthetase
  misc_feature (115)..(454): NCBI GI NO: 1346029 NR Description: Farnesyl pyrophosphate synthetase 2
  misc_feature (117)..(454): NCBI GI NO: 13537421 NR Description: farnesyl pyrophosphate synthase [Humulus lupulus]
  misc_feature (115)..(454): NCBI GI NO: 25452945 NR Description: Farnesyl pyrophosphate synthetase 1

SEQ ID NO: 34802 - protein, 350 aa, Zea mays subsp. mays; identical to SEQ ID NO: 24359
  peptide (1)..(350): Ceres Seq. ID no. 12387224
  misc_feature (42)..(313): Pfam Name: Pfam Description:  Polyprenyl synthetase
  misc_feature (1)..(350): NCBI GI NO: 1346033 NR Description: Farnesyl pyrophosphate synthetase
  misc_feature (1)..(350): NCBI GI NO: 34911542 NR Description: putative farnesyl-pyrophosphate synthetase
  misc_feature (54)..(350): NCBI GI NO: 25458583 NR Description: probable farnesyl pyrophosphate synthase
  misc_feature (1)..(47): NCBI GI NO: 25458583 NR Description: probable farnesyl pyrophosphate synthase
  misc_feature (2)..(350): NCBI GI NO: 18958450 NR Description: farnesyl pyrophosphare synthase [Musa acuminata]
  misc_feature (11)..(350): NCBI GI NO: 1346028 NR Description: Farnesyl pyrophosphate synthetase 1
  misc_feature (11)..(350): NCBI GI NO: 7433992 NR Description: farnesyl-pyrophosphate synthetase
  misc_feature (11)..(350): NCBI GI NO: 1346029 NR Description: Farnesyl pyrophosphate synthetase 2
  misc_feature (13)..(350): NCBI GI NO: 13537421 NR Description: farnesyl pyrophosphate synthase [Humulus lupulus]
  misc_feature (11)..(350): NCBI GI NO: 25452945 NR Description: Farnesyl pyrophosphate synthetase 1

SEQ ID NO: 34803 - protein, 305 aa, Zea mays subsp. mays; identical to SEQ ID NO: 24360
  peptide (1)..(305): Ceres Seq. ID no. 12387225
  misc_feature (1)..(268): Pfam Name: Pfam Description:  Polyprenyl synthetase
  misc_feature (1)..(305): NCBI GI NO: 1346033 NR Description: Farnesyl pyrophosphate synthetase
  misc_feature (1)..(305): NCBI GI NO: 34911542 NR Description: putative farnesyl-pyrophosphate synthetase
  misc_feature (9)..(305): NCBI GI NO: 25458583 NR Description: probable farnesyl pyrophosphate synthase
  misc_feature (1)..(305): NCBI GI NO: 18958450 NR Description: farnesyl pyrophosphare synthase [Musa acuminata]
  misc_feature (1)..(305): NCBI GI NO: 1346028 NR Description: Farnesyl pyrophosphate synthetase 1
  misc_feature (1)..(305): NCBI GI NO: 7433992 NR Description: farnesyl-pyrophosphate synthetase
  misc_feature (1)..(305): NCBI GI NO: 1346029 NR Description: Farnesyl pyrophosphate synthetase 2
  misc_feature (1)..(305): NCBI GI NO: 13537421 NR Description: farnesyl pyrophosphate synthase [Humulus lupulus]
  misc_feature (1)..(305): NCBI GI NO: 25452945 NR Description: Farnesyl pyrophosphate synthetase 1
  misc_feature (1)..(305): NCBI GI NO: 14279425 NR Description: farnesyl pyrophosphate synthase [Humulus lupulus]

SEQ ID NO: 34804 - DNA, 1585 bp, Zea mays subsp. mays
  misc_feature (1)..(1585): Ceres Seq. ID no. 12367895
aaatttcccggagaccctcgagcaaaaatctggtctggttcaaactcgccttttgcctgcgggcggcgggcgttcttacgggccatgtcgcagcgcgacggcgacctcaccggagctcatccggaagaaggagaccgccacgccgttcgaatggatggctccgacgacgatgagctggaccaacctacgagtaaagcgactgagcacatcacggctatggacgtgaggaaggggaaggatatgcaagggatcccctggaacgtgatgccgactacaagggacaagtacaggcagtcacggctgcaggggtacgccaactttgagaacgtgcctaattccggaaggctttctgagaaggaatgcatgcctgcagagaaaggccaactctactacgagtttcagcacagcacgaggtcggtgaaaccgaccatccgtcatttccagttgaggaatttagtgtgggcaacaacaaggcacgatgtgtatcttatgtcaaacttttctgtgcttcattggtcagcaatgacttgtaagaagcaagaagtcattaatcttcaaggacacgtgacaccgtgcgagaagcaccatcggaattactacgaggggttttatcagactccagtcagtactttggcggtgaagcataacttgcttgttactggtgggtttcatggggagataatatgcaagtttctggatcgtcaaggagtaagctactgttgcaagacaacaaatgatgacgacggtattactaattctctggagatatttgagaagcctagtggttctctgcacttccttgcgtcaaacaatgattgtggacttagagactttgacatggaaaaatttcgaatatgcaaccacttccattttgcttggcctgtgaatcatacatcgttgagcccagatggtaaacttgctgctattgtgggggacagtcctgatggacttctgattgacgctaattcaggaaagacggttcacaaactccatggccatttggattactcctttgcgtcggcatggaatccagacggccgaacattcgccacggggaaccaagacaagacgtgcagggtctgggacgtccgcaatctctccagatcagttgttgtattgggtggcaacatcggagccgtcaggtcgattcgctacacgtcagacgggaagttcatggcgatgactgaacccgcggacttcatccacatcttcgatgttgagagtgggtacagcaggaagcaggagctggacttctttggtgagatcgcaggcatatcgttcagtcctgacactgaagctctctttgtcggtgtgcatgatcgcttcttcaactgctgcctcctccagttcagtcggcgacggttctactcgtaccttgattcaacactgtgagcttgtgctggtgtagacctgtgaggtcgacatcacaggctttagaagcaagaaagttgtggctatgttcataggtgttgctgtgaagaaactggagaacgatacgtttacttttgctgaacaagctgtaggtattcggcgacccatcttttctgggtgatcagagtctcaattaagattcccgctttctgtt

SEQ ID NO: 34805 - protein, 463 aa, Zea mays subsp. mays
  peptide (1)..(463): Ceres Seq. ID no. 12367896
  misc_feature (54)..(463): NCBI GI NO: 18399975 NR Description: expressed protein; protein id: At3g13340
  misc_feature (54)..(463): NCBI GI NO: 18405485 NR Description: expressed protein; protein id: At1g55680
  misc_feature (51)..(463): NCBI GI NO: 18423837 NR Description: WD-repeat protein-like; protein id: At5g56190
  misc_feature (51)..(463): NCBI GI NO: 30696707 NR Description: WD-40 repeat protein family [Arabidopsis thaliana]
  misc_feature (51)..(463): NCBI GI NO: 21536732 NR Description: WD-repeat protein-like [Arabidopsis thaliana]
  misc_feature (51)..(463): NCBI GI NO: 9758639 NR Description: WD-repeat protein-like [Arabidopsis thaliana]
  misc_feature (51)..(461): NCBI GI NO: 13937195 NR Description: At1g78070/F28K19_28 [Arabidopsis thaliana]
  misc_feature (56)..(463): NCBI GI NO: 9294540 NR Description: WD domain protein-like [Arabidopsis thaliana]
  misc_feature (193)..(463): NCBI GI NO: 25405994 NR Description: protein F20N2.10 [imported] - Arabidopsis thaliana
  misc_feature (52)..(193): NCBI GI NO: 25405994 NR Description: protein F20N2.10 [imported] - Arabidopsis thaliana
KFPGDPRAKIWSGSNSPFACGRRAFLRAMSQRDGDLTGAHPEEGDRHAVRMDGSDDDELDQPTSKATEHITAMDVRKGKDMQGIPWNVMPTTRDKYRQSRLQGYANFENVPNSGRLSEKECMPAEKGQLYYEFQHSTRSVKPTIRHFQLRNLVWATTRHDVYLMSNFSVLHWSAMTCKKQEVINLQGHVTPCEKHHRNYYEGFYQTPVSTLAVKHNLLVTGGFHGEIICKFLDRQGVSYCCKTTNDDDGITNSLEIFEKPSGSLHFLASNNDCGLRDFDMEKFRICNHFHFAWPVNHTSLSPDGKLAAIVGDSPDGLLIDANSGKTVHKLHGHLDYSFASAWNPDGRTFATGNQDKTCRVWDVRNLSRSVVVLGGNIGAVRSIRYTSDGKFMAMTEPADFIHIFDVESGYSRKQELDFFGEIAGISFSPDTEALFVGVHDRFFNCCLLQFSRRRFYSYLDSTL

SEQ ID NO: 34806 - protein, 435 aa, Zea mays subsp. mays
  peptide (1)..(435): Ceres Seq. ID no. 12367897
  misc_feature (26)..(435): NCBI GI NO: 18399975 NR Description: expressed protein; protein id: At3g13340
  misc_feature (26)..(435): NCBI GI NO: 18405485 NR Description: expressed protein; protein id: At1g55680
  misc_feature (23)..(435): NCBI GI NO: 18423837 NR Description: WD-repeat protein-like; protein id: At5g56190
  misc_feature (23)..(435): NCBI GI NO: 30696707 NR Description: WD-40 repeat protein family [Arabidopsis thaliana]
  misc_feature (23)..(435): NCBI GI NO: 21536732 NR Description: WD-repeat protein-like [Arabidopsis thaliana]
  misc_feature (23)..(435): NCBI GI NO: 9758639 NR Description: WD-repeat protein-like [Arabidopsis thaliana]
  misc_feature (23)..(433): NCBI GI NO: 13937195 NR Description: At1g78070/F28K19_28 [Arabidopsis thaliana]
  misc_feature (28)..(435): NCBI GI NO: 9294540 NR Description: WD domain protein-like [Arabidopsis thaliana]
  misc_feature (165)..(435): NCBI GI NO: 25405994 NR Description: protein F20N2.10 [imported] - Arabidopsis thaliana
  misc_feature (24)..(165): NCBI GI NO: 25405994 NR Description: protein F20N2.10 [imported] - Arabidopsis thaliana
MSQRDGDLTGAHPEEGDRHAVRMDGSDDDELDQPTSKATEHITAMDVRKGKDMQGIPWNVMPTTRDKYRQSRLQGYANFENVPNSGRLSEKECMPAEKGQLYYEFQHSTRSVKPTIRHFQLRNLVWATTRHDVYLMSNFSVLHWSAMTCKKQEVINLQGHVTPCEKHHRNYYEGFYQTPVSTLAVKHNLLVTGGFHGEIICKFLDRQGVSYCCKTTNDDDGITNSLEIFEKPSGSLHFLASNNDCGLRDFDMEKFRICNHFHFAWPVNHTSLSPDGKLAAIVGDSPDGLLIDANSGKTVHKLHGHLDYSFASAWNPDGRTFATGNQDKTCRVWDVRNLSRSVVVLGGNIGAVRSIRYTSDGKFMAMTEPADFIHIFDVESGYSRKQELDFFGEIAGISFSPDTEALFVGVHDRFFNCCLLQFSRRRFYSYLDSTL

SEQ ID NO: 34807 - protein, 413 aa, Zea mays subsp. mays
  peptide (1)..(413): Ceres Seq. ID no. 12367898
  misc_feature (4)..(413): NCBI GI NO: 18399975 NR Description: expressed protein; protein id: At3g13340
  misc_feature (4)..(413): NCBI GI NO: 18405485 NR Description: expressed protein; protein id: At1g55680
  misc_feature (1)..(413): NCBI GI NO: 18423837 NR Description: WD-repeat protein-like; protein id: At5g56190
  misc_feature (1)..(413): NCBI GI NO: 30696707 NR Description: WD-40 repeat protein family [Arabidopsis thaliana]
  misc_feature (1)..(413): NCBI GI NO: 21536732 NR Description: WD-repeat protein-like [Arabidopsis thaliana]
  misc_feature (1)..(413): NCBI GI NO: 9758639 NR Description: WD-repeat protein-like [Arabidopsis thaliana]
  misc_feature (1)..(411): NCBI GI NO: 13937195 NR Description: At1g78070/F28K19_28 [Arabidopsis thaliana]
  misc_feature (6)..(413): NCBI GI NO: 9294540 NR Description: WD domain protein-like [Arabidopsis thaliana]
  misc_feature (143)..(413): NCBI GI NO: 25405994 NR Description: protein F20N2.10 [imported] - Arabidopsis thaliana
  misc_feature (2)..(143): NCBI GI NO: 25405994 NR Description: protein F20N2.10 [imported] - Arabidopsis thaliana
MDGSDDDELDQPTSKATEHITAMDVRKGKDMQGIPWNVMPTTRDKYRQSRLQGYANFENVPNSGRLSEKECMPAEKGQLYYEFQHSTRSVKPTIRHFQLRNLVWATTRHDVYLMSNFSVLHWSAMTCKKQEVINLQGHVTPCEKHHRNYYEGFYQTPVSTLAVKHNLLVTGGFHGEIICKFLDRQGVSYCCKTTNDDDGITNSLEIFEKPSGSLHFLASNNDCGLRDFDMEKFRICNHFHFAWPVNHTSLSPDGKLAAIVGDSPDGLLIDANSGKTVHKLHGHLDYSFASAWNPDGRTFATGNQDKTCRVWDVRNLSRSVVVLGGNIGAVRSIRYTSDGKFMAMTEPADFIHIFDVESGYSRKQELDFFGEIAGISFSPDTEALFVGVHDRFFNCCLLQFSRRRFYSYLDSTL

SEQ ID NO: 34808 - DNA, 1506 bp, Zea mays subsp. mays
  misc_feature (1)..(1506): Ceres Seq. ID no. 12362128
attaaatagaaagcgagcttcattcgtttttgattggcgtcgcagcaaccacctgtcaagtgtcaacactccagtccactacaatcatcgctgtaggagatggaggaggcggcggcggcggcggcggaggtgaggtatgggatagtcggggtggggatgatgggccgggagcacctccacaacctcgcccacctcgccacagaggtcgagcgggagcagtccgtccgggtgcgggtcaccggcctcgccgacccccaccaggagtcactccgccttggcctccagctcgccgctgagctcggcctcccgcctccccagacctttccaggtcaccgcgagctgctggacagcgggctctgtgacgccatcatcgtatcatccccaaacatgacccactacgagatactcatggacatcatccaccatcgtgaaccgcagcacatccttgtcgagaagcccctgtgcaccactgtgcaggactgcaagaaggtcattgaagctgctaaacagagaccagagatagttgtgcaagttggattagaatacaggtatatgccacccgttgctaagctgatagacatcgttaagagcggtacactaggacaagtcagaatggtggcaatacgcgaacaccgttttcctttccttgttaaggtaaacaactggaatagattcaattgtaacagtgggggaactctagtagagaagtgctgccacttctttgatctgatgatattgtttgcggctgcaaatccagttcgcgtgatggcttcaggagccattgatgttaaccataagaatgaagtgtatgatggacaggtaccagatattattgataatgcatatgtgatagtagaatttgataatggctcccgtggcatgcttgatctctgcatgtttgctgaaggaagtagaaacgagcaagaaatttgtgtggttggtgacattgggaagggcgaaacttttgttccagagagcattgtcaggtttggaaagagaacagaaggcagagatggagttgtaacaataatggcggaagatgaacggatcaagtatcaaggtcttcatcatggatccagctacttggagcacctcaatttcttgtctgctataagggctcaaggtgcatccggaccatctgtgaacttaagtgacggcctactatctgttgccgtcggtgtggctgggcaattatcaatcgagcagggccggtttgtaaccatggaagaggtcttaggtttgtagcctggtgataattcaggcatcctaatgtactgtaaaaccttttgtgtattattaggtatatgttcttaataatgctgcggactgacgagtttatgcaaagttaggataacattataacatgcatttcaaatagaggaatatgatgataatcttcaagcaaatgtcatggagtagcagggttatgttatctgcaagtgatatcttggacctcttggttgtgattaatggaccaatatctagaacatgtcatattatttcttg

SEQ ID NO: 34809 - protein, 381 aa, Zea mays subsp. mays
  peptide (1)..(381): Ceres Seq. ID no. 12362129
  misc_feature (159)..(269): Pfam Name: Pfam Description:  Oxidoreductase family
  misc_feature (75)..(377): NCBI GI NO: 37573125 NR Description: organic cation transporter-like protein
  misc_feature (5)..(75): NCBI GI NO: 37573125 NR Description: organic cation transporter-like protein
  misc_feature (12)..(379): NCBI GI NO: 15236047 NR Description: putative protein; protein id: At4g17370.1
  misc_feature (7)..(373): NCBI GI NO: 22987816 NR Description: hypothetical protein [Burkholderia fungorum]
  misc_feature (12)..(226): NCBI GI NO: 23018126 NR Description: hypothetical protein [Thermobifida fusca]
  misc_feature (3)..(287): NCBI GI NO: 29348881 NR Description: putative hydrogenase
  misc_feature (41)..(229): NCBI GI NO: 16080062 NR Description: similar to hypothetical proteins
  misc_feature (15)..(373): NCBI GI NO: 40743395 NR Description: hypothetical protein AN5425.2
  misc_feature (11)..(226): NCBI GI NO: 16264562 NR Description: putative oxidoreductase protein
  misc_feature (11)..(226): NCBI GI NO: 17936479 NR Description: oxidoreductase
MEEAAAAAAEVRYGIVGVGMMGREHLHNLAHLATEVEREQSVRVRVTGLADPHQESLRLGLQLAAELGLPPPQTFPGHRELLDSGLCDAIIVSSPNMTHYEILMDIIHHREPQHILVEKPLCTTVQDCKKVIEAAKQRPEIVVQVGLEYRYMPPVAKLIDIVKSGTLGQVRMVAIREHRFPFLVKVNNWNRFNCNSGGTLVEKCCHFFDLMILFAAANPVRVMASGAIDVNHKNEVYDGQVPDIIDNAYVIVEFDNGSRGMLDLCMFAEGSRNEQEICVVGDIGKGETFVPESIVRFGKRTEGRDGVVTIMAEDERIKYQGLHHGSSYLEHLNFLSAIRAQGASGPSVNLSDGLLSVAVGVAGQLSIEQGRFVTMEEVLGL

SEQ ID NO: 34810 - protein, 362 aa, Zea mays subsp. mays
  peptide (1)..(362): Ceres Seq. ID no. 12362130
  misc_feature (140)..(250): Pfam Name: Pfam Description:  Oxidoreductase family
  misc_feature (56)..(358): NCBI GI NO: 37573125 NR Description: organic cation transporter-like protein
  misc_feature (1)..(56): NCBI GI NO: 37573125 NR Description: organic cation transporter-like protein
  misc_feature (1)..(360): NCBI GI NO: 15236047 NR Description: putative protein; protein id: At4g17370.1
  misc_feature (1)..(354): NCBI GI NO: 22987816 NR Description: hypothetical protein [Burkholderia fungorum]
  misc_feature (1)..(207): NCBI GI NO: 23018126 NR Description: hypothetical protein [Thermobifida fusca]
  misc_feature (1)..(268): NCBI GI NO: 29348881 NR Description: putative hydrogenase
  misc_feature (22)..(210): NCBI GI NO: 16080062 NR Description: similar to hypothetical proteins
  misc_feature (1)..(354): NCBI GI NO: 40743395 NR Description: hypothetical protein AN5425.2
  misc_feature (1)..(207): NCBI GI NO: 16264562 NR Description: putative oxidoreductase protein
  misc_feature (1)..(207): NCBI GI NO: 17936479 NR Description: oxidoreductase
MMGREHLHNLAHLATEVEREQSVRVRVTGLADPHQESLRLGLQLAAELGLPPPQTFPGHRELLDSGLCDAIIVSSPNMTHYEILMDIIHHREPQHILVEKPLCTTVQDCKKVIEAAKQRPEIVVQVGLEYRYMPPVAKLIDIVKSGTLGQVRMVAIREHRFPFLVKVNNWNRFNCNSGGTLVEKCCHFFDLMILFAAANPVRVMASGAIDVNHKNEVYDGQVPDIIDNAYVIVEFDNGSRGMLDLCMFAEGSRNEQEICVVGDIGKGETFVPESIVRFGKRTEGRDGVVTIMAEDERIKYQGLHHGSSYLEHLNFLSAIRAQGASGPSVNLSDGLLSVAVGVAGQLSIEQGRFVTMEEVLGL

SEQ ID NO: 34811 - protein, 361 aa, Zea mays subsp. mays
  peptide (1)..(361): Ceres Seq. ID no. 12362131
  misc_feature (139)..(249): Pfam Name: Pfam Description:  Oxidoreductase family
  misc_feature (55)..(357): NCBI GI NO: 37573125 NR Description: organic cation transporter-like protein
  misc_feature (1)..(55): NCBI GI NO: 37573125 NR Description: organic cation transporter-like protein
  misc_feature (1)..(359): NCBI GI NO: 15236047 NR Description: putative protein; protein id: At4g17370.1
  misc_feature (1)..(353): NCBI GI NO: 22987816 NR Description: hypothetical protein [Burkholderia fungorum]
  misc_feature (1)..(206): NCBI GI NO: 23018126 NR Description: hypothetical protein [Thermobifida fusca]
  misc_feature (1)..(267): NCBI GI NO: 29348881 NR Description: putative hydrogenase
  misc_feature (21)..(209): NCBI GI NO: 16080062 NR Description: similar to hypothetical proteins
  misc_feature (1)..(353): NCBI GI NO: 40743395 NR Description: hypothetical protein AN5425.2
  misc_feature (1)..(206): NCBI GI NO: 16264562 NR Description: putative oxidoreductase protein
  misc_feature (1)..(206): NCBI GI NO: 17936479 NR Description: oxidoreductase
MGREHLHNLAHLATEVEREQSVRVRVTGLADPHQESLRLGLQLAAELGLPPPQTFPGHRELLDSGLCDAIIVSSPNMTHYEILMDIIHHREPQHILVEKPLCTTVQDCKKVIEAAKQRPEIVVQVGLEYRYMPPVAKLIDIVKSGTLGQVRMVAIREHRFPFLVKVNNWNRFNCNSGGTLVEKCCHFFDLMILFAAANPVRVMASGAIDVNHKNEVYDGQVPDIIDNAYVIVEFDNGSRGMLDLCMFAEGSRNEQEICVVGDIGKGETFVPESIVRFGKRTEGRDGVVTIMAEDERIKYQGLHHGSSYLEHLNFLSAIRAQGASGPSVNLSDGLLSVAVGVAGQLSIEQGRFVTMEEVLGL

SEQ ID NO: 34812 - DNA, 1158 bp, Zea mays subsp. mays
  misc_feature (1)..(1158): Ceres Seq. ID no. 12355511
agggactcgcggttcgtggcggccctggccagagtctgcgcccgctcctgcccccgccccgggccaggccaccctcgcctcctcgcgcctataaagtgcgggcgtacggcgtacccgattgccccaagccgcaacctcaaccaccttcccaaatctcagtagtcgcctctcgtcgtcttcgtctagccccggcccgttccaaaacctccgtagccgccgccgccaccccggcgaccgaagatgatctccccggacgcagcccgcaacgtagtcggcatcatcggcaatgtcatctccttcggcctcttcctgtccccagtgctgacgttctggcggatctacaaggccaaggacgtggaggagttcaagccggacccttacctggcgacgctgctcaactgcatgctctgggtgttctatggcatccccgtcgtccaccccaacagcattctcgtcgtcaccatcaacggcatcggcctcgtcatcgaggccgtctacctcactatcttcttcctctattccgacagccagaagcgcaagaaggcgttcgcgatcctggccgtggagattctgttcatggtcgccgtggtgctcggtgtgatcctcggcgcgcacactcacgagaaacgttccatgatcgtcggcatcctctgcgtcatcttcggctcgatgatgtacgcctcaccactcactatcatgagtcgagtgatcaagaccaagagcgttgagtacatgcccttcctcctgtcgctggtgagcttcctcaacggctgctgctggacggcctacgcgctcatccgcttcgacctctacgtcacgatcccgaacgccctgggcgcattcttcggcctcgtccagctgatcctctacttctgctactacaagtcgacccccaagaaggagaagaacgtggagctgcccaccgtctccagcaacgtcggcggcggcaacgtcaccgtcagcgttgagcgatagatgatgtagctgccgccgcccgtcgagaacgaactcgacgagacgtgctttacccacaagtagttttggccttgtctaattgctcttctcggatgatcgtttaagtgagtgttagttagttttgccctgcgtgtgatgtcaggaacaattaatatatccatgtggctgtgtttgccattctag

SEQ ID NO: 34813 - protein, 244 aa, Zea mays subsp. mays; identical to SEQ ID NO: 25592
  peptide (1)..(244): Ceres Seq. ID no. 12355512
  misc_feature (9)..(98): Pfam Name: Pfam Description:  MtN3/saliva family
  misc_feature (1)..(244): NCBI GI NO: 34912462 NR Description: MtN3-like protein
  misc_feature (1)..(244): NCBI GI NO: 34912454 NR Description: P0681B11.31
  misc_feature (1)..(225): NCBI GI NO: 18405611 NR Description: Expressed protein; protein id: At3g28007
  misc_feature (1)..(225): NCBI GI NO: 21592355 NR Description: contains similarity to nodulin MtN3 protein
  misc_feature (8)..(219): NCBI GI NO: 18413388 NR Description: putative protein; protein id: At4g10850
  misc_feature (1)..(225): NCBI GI NO: 18421965 NR Description: putative protein; protein id: At5g40260
  misc_feature (1)..(194): NCBI GI NO: 10177463 NR Description: contains similarity to MtN3 protein~gene_id:MQB2
  misc_feature (39)..(217): NCBI GI NO: 431154 NR Description: ORF [Lilium longiflorum]
  misc_feature (8)..(243): NCBI GI NO: 15219732 NR Description: hypothetical protein; protein id: At1g66770.1
  misc_feature (39)..(225): NCBI GI NO: 11994120 NR Description: contains similarity to nodulin MtN3protein~gene_id:MMG15

SEQ ID NO: 34814 - protein, 241 aa, Zea mays subsp. mays
  peptide (1)..(241): Ceres Seq. ID no. 12355513
GLAVRGGPGQSLRPLLPPPRARPPSPPRAYKVRAYGVPDCPKPQPQPPSQISVVASRRLRLAPARSKTSVAAAATPATEDDLPGRSPQRSRHHRQCHLLRPLPVPSADVLADLQGQGRGGVQAGPLPGDAAQLHALGVLWHPRRPPQQHSRRHHQRHRPRHRGRLPHYLLPLFRQPEAQEGVRDPGRGDSVHGRRGARCDPRRAHSRETFHDRRHPLRHLRLDDVRLTTHYHESSDQDQER

SEQ ID NO: 34815 - protein, 190 aa, Zea mays subsp. mays; identical to SEQ ID NO: 25594
  peptide (1)..(190): Ceres Seq. ID no. 12355514
  misc_feature (1)..(190): NCBI GI NO: 34912462 NR Description: MtN3-like protein
  misc_feature (1)..(190): NCBI GI NO: 34912454 NR Description: P0681B11.31
  misc_feature (1)..(171): NCBI GI NO: 18405611 NR Description: Expressed protein; protein id: At3g28007
  misc_feature (1)..(171): NCBI GI NO: 21592355 NR Description: contains similarity to nodulin MtN3 protein
  misc_feature (1)..(165): NCBI GI NO: 18413388 NR Description: putative protein; protein id: At4g10850
  misc_feature (1)..(171): NCBI GI NO: 18421965 NR Description: putative protein; protein id: At5g40260
  misc_feature (1)..(140): NCBI GI NO: 10177463 NR Description: contains similarity to MtN3 protein~gene_id:MQB2
  misc_feature (1)..(163): NCBI GI NO: 431154 NR Description: ORF [Lilium longiflorum]
  misc_feature (1)..(189): NCBI GI NO: 15219732 NR Description: hypothetical protein; protein id: At1g66770.1
  misc_feature (1)..(171): NCBI GI NO: 11994120 NR Description: contains similarity to nodulin MtN3protein~gene_id:MMG15

SEQ ID NO: 34816 - DNA, 1282 bp, Zea mays subsp. mays
  misc_feature (1)..(1282): Ceres Seq. ID no. 12411405
atctccgcgcattttatatgcaggcttgcgcctgtcacttctcccctgtccttgctccccctcgatcccgcatcagtgcgtcacattcaccgggaatggcaacgctcaaggtcccagccactgttcctcccgtcgccgatgactgcgaccagctgcgcaaagcattccaagggtggggcacgaacgaggcgctcatcatctccatcctcggccaccgcgacgccgcgcagcgccgcgccatccgccgcgcttacgccgaggcctacggcgaggagctcctccgctccatcacggacgagatctccggcgacttcgagagggccgtgatcctgtggacgctggacccagcggagcgcgacgcggtgctggccaacgaggcggcgcggaagtggaagcccgggaaccgtgtgctcgtcgagatcgcctgcacgcgcacctccgcgcagatcttcgcgaccaggcaggcttatcacgagcggttcaagcgctcgcttgaggaagacatcgctgcgcacgtcactggggacttccgcaagctattggtgccacttgtaagtacttaccgctatgatggaccagaggtcaacacaaggttggcacactcagaagccaaactacttcatgagaagatccatcacaaggcttacagtgatgatgagatcatcagaatcctcaccactaggagcaaacctcagctgattgctacattcaatcattacaatgatgcatttggccaccgaatcaacaaggatctgaaggctgacccccaggacgagtacctcagaacgctgcgggcgatcatccggtgcttcagttgccctgacaggtactttgagaaggtggctaggcaggccatagcggggctaggcacagatgagaactccctgaccagggtcatcaccacccgcgctgaggtggacctcaaactgattaaggaggcgtaccagaagaggaacagcgtgccgctggagcgggccgtcgcgggggacacctccggcgactacgagagcatgctcctcgcgctcctggggcaggagtgatgagccgtactggtgcgctggtgcctttctgaccggcgccgtggtgtttgttcgtgatcgtaataaacctgattgcctagctgtacgtgaggctgtttcttcggtcctggtactgtcgctgcagcatgcatagcagtggaccagtggtgataaataagttactgtgctttcgacgaatgaaccctttttttgtgtctaagttgtggaacctcgagaaagtttttgtgtctaaggctgtcttt

SEQ ID NO: 34817 - protein, 345 aa, Zea mays subsp. mays
  peptide (1)..(345): Ceres Seq. ID no. 12411406
  misc_feature (199)..(266): Pfam Name: Pfam Description:  Annexin
  misc_feature (32)..(345): NCBI GI NO: 6272285 NR Description: annexin p33 [Zea mays]
  misc_feature (32)..(345): NCBI GI NO: 7441506 NR Description: annexin P33 - maize
  misc_feature (32)..(345): NCBI GI NO: 7441507 NR Description: annexin P35 - maize
  misc_feature (32)..(343): NCBI GI NO: 7484723 NR Description: fiber annexin - upland cotton
  misc_feature (33)..(343): NCBI GI NO: 15214410 NR Description: annexin [Gossypium hirsutum]
  misc_feature (33)..(343): NCBI GI NO: 33357398 NR Description: Chain A, Annexin Gh1 From Cotton
  misc_feature (32)..(343): NCBI GI NO: 3928134 NR Description: annexin P38 [Capsicum annuum]
  misc_feature (32)..(344): NCBI GI NO: 2459926 NR Description: annexin [Lavatera thuringiaca]
  misc_feature (34)..(343): NCBI GI NO: 7441511 NR Description: annexin 2 - upland cotton (fragment)
  misc_feature (32)..(343): NCBI GI NO: 4580920 NR Description: vacuole-associated annexin VCaB42
LRAFYMQACACHFSPVLAPPRSRISASHSPGMATLKVPATVPPVADDCDQLRKAFQGWGTNEALIISILGHRDAAQRRAIRRAYAEAYGEELLRSITDEISGDFERAVILWTLDPAERDAVLANEAARKWKPGNRVLVEIACTRTSAQIFATRQAYHERFKRSLEEDIAAHVTGDFRKLLVPLVSTYRYDGPEVNTRLAHSEAKLLHEKIHHKAYSDDEIIRILTTRSKPQLIATFNHYNDAFGHRINKDLKADPQDEYLRTLRAIIRCFSCPDRYFEKVARQAIAGLGTDENSLTRVITTRAEVDLKLIKEAYQKRNSVPLERAVAGDTSGDYESMLLALLGQE

SEQ ID NO: 34818 - protein, 340 aa, Zea mays subsp. mays
  peptide (1)..(340): Ceres Seq. ID no. 12411407
  misc_feature (194)..(261): Pfam Name: Pfam Description:  Annexin
  misc_feature (27)..(340): NCBI GI NO: 6272285 NR Description: annexin p33 [Zea mays]
  misc_feature (27)..(340): NCBI GI NO: 7441506 NR Description: annexin P33 - maize
  misc_feature (27)..(340): NCBI GI NO: 7441507 NR Description: annexin P35 - maize
  misc_feature (27)..(338): NCBI GI NO: 7484723 NR Description: fiber annexin - upland cotton
  misc_feature (28)..(338): NCBI GI NO: 15214410 NR Description: annexin [Gossypium hirsutum]
  misc_feature (28)..(338): NCBI GI NO: 33357398 NR Description: Chain A, Annexin Gh1 From Cotton
  misc_feature (27)..(338): NCBI GI NO: 3928134 NR Description: annexin P38 [Capsicum annuum]
  misc_feature (27)..(339): NCBI GI NO: 2459926 NR Description: annexin [Lavatera thuringiaca]
  misc_feature (29)..(338): NCBI GI NO: 7441511 NR Description: annexin 2 - upland cotton (fragment)
  misc_feature (27)..(338): NCBI GI NO: 4580920 NR Description: vacuole-associated annexin VCaB42
MQACACHFSPVLAPPRSRISASHSPGMATLKVPATVPPVADDCDQLRKAFQGWGTNEALIISILGHRDAAQRRAIRRAYAEAYGEELLRSITDEISGDFERAVILWTLDPAERDAVLANEAARKWKPGNRVLVEIACTRTSAQIFATRQAYHERFKRSLEEDIAAHVTGDFRKLLVPLVSTYRYDGPEVNTRLAHSEAKLLHEKIHHKAYSDDEIIRILTTRSKPQLIATFNHYNDAFGHRINKDLKADPQDEYLRTLRAIIRCFSCPDRYFEKVARQAIAGLGTDENSLTRVITTRAEVDLKLIKEAYQKRNSVPLERAVAGDTSGDYESMLLALLGQE

SEQ ID NO: 34819 - protein, 314 aa, Zea mays subsp. mays
  peptide (1)..(314): Ceres Seq. ID no. 12411408
  misc_feature (168)..(235): Pfam Name: Pfam Description:  Annexin
  misc_feature (1)..(314): NCBI GI NO: 6272285 NR Description: annexin p33 [Zea mays]
  misc_feature (1)..(314): NCBI GI NO: 7441506 NR Description: annexin P33 - maize
  misc_feature (1)..(314): NCBI GI NO: 7441507 NR Description: annexin P35 - maize
  misc_feature (1)..(312): NCBI GI NO: 7484723 NR Description: fiber annexin - upland cotton
  misc_feature (2)..(312): NCBI GI NO: 15214410 NR Description: annexin [Gossypium hirsutum]
  misc_feature (2)..(312): NCBI GI NO: 33357398 NR Description: Chain A, Annexin Gh1 From Cotton
  misc_feature (1)..(312): NCBI GI NO: 3928134 NR Description: annexin P38 [Capsicum annuum]
  misc_feature (1)..(313): NCBI GI NO: 2459926 NR Description: annexin [Lavatera thuringiaca]
  misc_feature (3)..(312): NCBI GI NO: 7441511 NR Description: annexin 2 - upland cotton (fragment)
  misc_feature (1)..(312): NCBI GI NO: 4580920 NR Description: vacuole-associated annexin VCaB42
MATLKVPATVPPVADDCDQLRKAFQGWGTNEALIISILGHRDAAQRRAIRRAYAEAYGEELLRSITDEISGDFERAVILWTLDPAERDAVLANEAARKWKPGNRVLVEIACTRTSAQIFATRQAYHERFKRSLEEDIAAHVTGDFRKLLVPLVSTYRYDGPEVNTRLAHSEAKLLHEKIHHKAYSDDEIIRILTTRSKPQLIATFNHYNDAFGHRINKDLKADPQDEYLRTLRAIIRCFSCPDRYFEKVARQAIAGLGTDENSLTRVITTRAEVDLKLIKEAYQKRNSVPLERAVAGDTSGDYESMLLALLGQE

SEQ ID NO: 34820 - DNA, 1076 bp, Zea mays subsp. mays; identical to SEQ ID NO: 26135
  misc_feature (1)..(1076): Ceres Seq. ID no. 12337188

SEQ ID NO: 34821 - protein, 296 aa, Zea mays subsp. mays; identical to SEQ ID NO: 26136
  peptide (1)..(296): Ceres Seq. ID no. 12337189
  misc_feature (98)..(293): Pfam Name: Pfam Description:  Translin family
  misc_feature (6)..(296): NCBI GI NO: 37534782 NR Description: translin-like protein
  misc_feature (79)..(227): NCBI GI NO: 25408524 NR Description: translin-like protein
  misc_feature (211)..(294): NCBI GI NO: 25408524 NR Description: translin-like protein
  misc_feature (79)..(294): NCBI GI NO: 18404301 NR Description: translin-like protein; protein id: At2g37020
  misc_feature (75)..(293): NCBI GI NO: 31213187 NR Description: ENSANGP00000021806 [Anopheles gambiae]
  misc_feature (87)..(293): NCBI GI NO: 20129859 NR Description: CG11761-PA [Drosophila melanogaster]
  misc_feature (82)..(293): NCBI GI NO: 7648677 NR Description: translin [Xenopus laevis]
  misc_feature (83)..(293): NCBI GI NO: 6136058 NR Description: Translin
  misc_feature (76)..(292): NCBI GI NO: 21730459 NR Description: Chain A
  misc_feature (100)..(292): NCBI GI NO: 6755899 NR Description: translin; testis/brain-RNA-binding protein

SEQ ID NO: 34822 - protein, 291 aa, Zea mays subsp. mays; identical to SEQ ID NO: 26137
  peptide (1)..(291): Ceres Seq. ID no. 12337190
  misc_feature (93)..(288): Pfam Name: Pfam Description:  Translin family
  misc_feature (1)..(291): NCBI GI NO: 37534782 NR Description: translin-like protein
  misc_feature (74)..(222): NCBI GI NO: 25408524 NR Description: translin-like protein
  misc_feature (206)..(289): NCBI GI NO: 25408524 NR Description: translin-like protein
  misc_feature (74)..(289): NCBI GI NO: 18404301 NR Description: translin-like protein; protein id: At2g37020
  misc_feature (70)..(288): NCBI GI NO: 31213187 NR Description: ENSANGP00000021806 [Anopheles gambiae]
  misc_feature (82)..(288): NCBI GI NO: 20129859 NR Description: CG11761-PA [Drosophila melanogaster]
  misc_feature (77)..(288): NCBI GI NO: 7648677 NR Description: translin [Xenopus laevis]
  misc_feature (78)..(288): NCBI GI NO: 6136058 NR Description: Translin
  misc_feature (71)..(287): NCBI GI NO: 21730459 NR Description: Chain A
  misc_feature (95)..(287): NCBI GI NO: 6755899 NR Description: translin; testis/brain-RNA-binding protein

SEQ ID NO: 34823 - protein, 214 aa, Zea mays subsp. mays; identical to SEQ ID NO: 26138
  peptide (1)..(214): Ceres Seq. ID no. 12337191
  misc_feature (16)..(211): Pfam Name: Pfam Description:  Translin family
  misc_feature (1)..(214): NCBI GI NO: 37534782 NR Description: translin-like protein
  misc_feature (1)..(145): NCBI GI NO: 25408524 NR Description: translin-like protein
  misc_feature (129)..(212): NCBI GI NO: 25408524 NR Description: translin-like protein
  misc_feature (1)..(212): NCBI GI NO: 18404301 NR Description: translin-like protein; protein id: At2g37020
  misc_feature (1)..(211): NCBI GI NO: 31213187 NR Description: ENSANGP00000021806 [Anopheles gambiae]
  misc_feature (5)..(211): NCBI GI NO: 20129859 NR Description: CG11761-PA [Drosophila melanogaster]
  misc_feature (1)..(211): NCBI GI NO: 7648677 NR Description: translin [Xenopus laevis]
  misc_feature (1)..(211): NCBI GI NO: 6136058 NR Description: Translin
  misc_feature (1)..(210): NCBI GI NO: 21730459 NR Description: Chain A
  misc_feature (18)..(210): NCBI GI NO: 6755899 NR Description: translin; testis/brain-RNA-binding protein

SEQ ID NO: 34824 - DNA, 1449 bp, Zea mays subsp. mays
  misc_feature (1)..(1449): Ceres Seq. ID no. 12355833
gaacaatccgttggcggattgctgcacatccgctcgatctgatagagtggttgattcagacgtcctccgctgccagtctgcgttgtcataccgtggagtttgttcgtccaggatattgccttcggaggacgatagtcttgcaagggctcttcgctcgtgccactcgcagcctttctcattcgtagaggaaggagacaccggtgcatcagggatgataagcttagcagagtatctaggaactaatgtagctgaccacatccctgaaactcccaacaacctgtcagaggagatggtgagatgcatggcggggatatactgcagactcgcagatcctcccttggttcaccacggctcgtcctcttcaccgtcgtcgtcgttctcctcgactagcgcaatctctccgcagtatgtgggggacatgtggagtcccaaatacaggagagaggcgactctggactcccgtctgataaacccgttccatgtcgatggtctgaaggagttcagtggaccttacaacacaatggttgaggttcctatgattagccgggacagtcggaggctgaaagaagccgaggacctgctccagacttacaagttgattttgtatcggttggaagccgttgatctgaggagaatgacagatgaagaaaagatcgcattctgggtcaacatacacaatgctttgctgatgcatgcttatctgaagaatggcgtcccacagaacaatctaaagaaaacatccctacttgttaaggctgcctgcaaaatagccggacgcaacatcaacgccgccgtcatccagagcattgttcttgggtgcaacacacactgccccggacagtggctacggacgctgctttaccccaggatcaaaagcaaggtgagcaaagcggggcatgagtggcgggcctttgccgttgcgcaaccggagcctcttttacgctttgcgctttgttccggcagccattctgatcccgcggtgagggtgtacactccgaagcggctgttccaccagctggagtcggccaaggaggagttcatccgggcgacggccggcgtgtggaaggagcagaagctgctgctccccaagctggtggaggcgtacgccaaggacgtgaagctctcgccgcagggcctcgtggacatggtccagcgctacctcccggagagcatgaggatggccgtgcagcggtgccagcacggcggcaggtcgtcgggcaaggtcgtggagtgggtgtcctacaacccggccttccgctacctgctcgccagggacctcgcgttccctcacctcagctgaccgttcgttaatctttagtagtatatgcgtgtgtgccatagggttagaagtagagaagggatcatgtgcagtttttgtgtggtggttgtcaatggcttttgtagatgatgaacaggaaacaggggaagaaatgagagaaagcacgtttg

SEQ ID NO: 34825 - protein, 432 aa, Zea mays subsp. mays
  peptide (1)..(432): Ceres Seq. ID no. 12355834
  misc_feature (198)..(347): Pfam Name: Pfam Description:  Protein of unknown function, DUF547
  misc_feature (1)..(432): NCBI GI NO: 40539066 NR Description: hypothetical protein
  misc_feature (29)..(427): NCBI GI NO: 15240016 NR Description: putative protein; protein id: At5g66600.1
  misc_feature (23)..(237): NCBI GI NO: 20330763 NR Description: Hypothetical protein
  misc_feature (247)..(429): NCBI GI NO: 20330763 NR Description: Hypothetical protein
  misc_feature (61)..(426): NCBI GI NO: 7486263 NR Description: hypothetical protein At2g23700
  misc_feature (61)..(426): NCBI GI NO: 15224054 NR Description: unknown protein; protein id: At2g23700.1
  misc_feature (61)..(426): NCBI GI NO: 39104579 NR Description: unknown protein [Arabidopsis thaliana]
  misc_feature (14)..(426): NCBI GI NO: 28916180 NR Description: putative ternary complex factor MIP1
  misc_feature (150)..(422): NCBI GI NO: 9294699 NR Description: gb|AAC17092
  misc_feature (1)..(136): NCBI GI NO: 9294699 NR Description: gb|AAC17092
NNPLADCCTSARSDRVVDSDVLRCQSALSYRGVCSSRILPSEDDSLARALRSCHSQPFSFVEEGDTGASGMISLAEYLGTNVADHIPETPNNLSEEMVRCMAGIYCRLADPPLVHHGSSSSPSSSFSSTSAISPQYVGDMWSPKYRREATLDSRLINPFHVDGLKEFSGPYNTMVEVPMISRDSRRLKEAEDLLQTYKLILYRLEAVDLRRMTDEEKIAFWVNIHNALLMHAYLKNGVPQNNLKKTSLLVKAACKIAGRNINAAVIQSIVLGCNTHCPGQWLRTLLYPRIKSKVSKAGHEWRAFAVAQPEPLLRFALCSGSHSDPAVRVYTPKRLFHQLESAKEEFIRATAGVWKEQKLLLPKLVEAYAKDVKLSPQGLVDMVQRYLPESMRMAVQRCQHGGRSSGKVVEWVSYNPAFRYLLARDLAFPHLS

SEQ ID NO: 34826 - protein, 362 aa, Zea mays subsp. mays
  peptide (1)..(362): Ceres Seq. ID no. 12355835
  misc_feature (128)..(277): Pfam Name: Pfam Description:  Protein of unknown function, DUF547
  misc_feature (1)..(362): NCBI GI NO: 40539066 NR Description: hypothetical protein
  misc_feature (1)..(357): NCBI GI NO: 15240016 NR Description: putative protein; protein id: At5g66600.1
  misc_feature (1)..(167): NCBI GI NO: 20330763 NR Description: Hypothetical protein
  misc_feature (177)..(359): NCBI GI NO: 20330763 NR Description: Hypothetical protein
  misc_feature (1)..(356): NCBI GI NO: 7486263 NR Description: hypothetical protein At2g23700
  misc_feature (1)..(356): NCBI GI NO: 15224054 NR Description: unknown protein; protein id: At2g23700.1
  misc_feature (1)..(356): NCBI GI NO: 39104579 NR Description: unknown protein [Arabidopsis thaliana]
  misc_feature (1)..(356): NCBI GI NO: 28916180 NR Description: putative ternary complex factor MIP1
  misc_feature (80)..(352): NCBI GI NO: 9294699 NR Description: gb|AAC17092
  misc_feature (1)..(66): NCBI GI NO: 9294699 NR Description: gb|AAC17092
MISLAEYLGTNVADHIPETPNNLSEEMVRCMAGIYCRLADPPLVHHGSSSSPSSSFSSTSAISPQYVGDMWSPKYRREATLDSRLINPFHVDGLKEFSGPYNTMVEVPMISRDSRRLKEAEDLLQTYKLILYRLEAVDLRRMTDEEKIAFWVNIHNALLMHAYLKNGVPQNNLKKTSLLVKAACKIAGRNINAAVIQSIVLGCNTHCPGQWLRTLLYPRIKSKVSKAGHEWRAFAVAQPEPLLRFALCSGSHSDPAVRVYTPKRLFHQLESAKEEFIRATAGVWKEQKLLLPKLVEAYAKDVKLSPQGLVDMVQRYLPESMRMAVQRCQHGGRSSGKVVEWVSYNPAFRYLLARDLAFPHLS

SEQ ID NO: 34827 - protein, 336 aa, Zea mays subsp. mays
  peptide (1)..(336): Ceres Seq. ID no. 12355836
  misc_feature (102)..(251): Pfam Name: Pfam Description:  Protein of unknown function, DUF547
  misc_feature (1)..(336): NCBI GI NO: 40539066 NR Description: hypothetical protein
  misc_feature (1)..(331): NCBI GI NO: 15240016 NR Description: putative protein; protein id: At5g66600.1
  misc_feature (1)..(141): NCBI GI NO: 20330763 NR Description: Hypothetical protein
  misc_feature (151)..(333): NCBI GI NO: 20330763 NR Description: Hypothetical protein
  misc_feature (1)..(330): NCBI GI NO: 7486263 NR Description: hypothetical protein At2g23700
  misc_feature (1)..(330): NCBI GI NO: 15224054 NR Description: unknown protein; protein id: At2g23700.1
  misc_feature (1)..(330): NCBI GI NO: 39104579 NR Description: unknown protein [Arabidopsis thaliana]
  misc_feature (1)..(330): NCBI GI NO: 28916180 NR Description: putative ternary complex factor MIP1
  misc_feature (54)..(326): NCBI GI NO: 9294699 NR Description: gb|AAC17092
  misc_feature (1)..(40): NCBI GI NO: 9294699 NR Description: gb|AAC17092
MVRCMAGIYCRLADPPLVHHGSSSSPSSSFSSTSAISPQYVGDMWSPKYRREATLDSRLINPFHVDGLKEFSGPYNTMVEVPMISRDSRRLKEAEDLLQTYKLILYRLEAVDLRRMTDEEKIAFWVNIHNALLMHAYLKNGVPQNNLKKTSLLVKAACKIAGRNINAAVIQSIVLGCNTHCPGQWLRTLLYPRIKSKVSKAGHEWRAFAVAQPEPLLRFALCSGSHSDPAVRVYTPKRLFHQLESAKEEFIRATAGVWKEQKLLLPKLVEAYAKDVKLSPQGLVDMVQRYLPESMRMAVQRCQHGGRSSGKVVEWVSYNPAFRYLLARDLAFPHLS

SEQ ID NO: 34828 - DNA, 1870 bp, Zea mays subsp. mays
  misc_feature (1)..(1870): Ceres Seq. ID no. 12376390
aaatcctcgcttccctcccccacgtcgcgtccgatcggcgacggtgcgccatgtcgatgctggacaccttcttcagcaagggcggcggcggcggcttccgcggcgccaagtgcaagacgctgctgaagctgtcgatcccgcggataaagctgctgcgggaaccggcgggagctgcagctgcgccagatgcgccgggacatcgccaagctcctagaggccggccaggaggccactgcccggatcagggtggagcacatcatccgggaggagaacatgatggccgcgcaggagatcctcgagctcttctgcgagctcatcgcggttcgcctgcccatcatcgaggcccaaaaggagtgtcctattgatctcaaagaagcaatatcaagtgtctgttttgccgctccaagatgtgcagatctacctgaactgatgcaagttcaaatgatgtttgcaactaaatatgggaaggaatttgtcgctgcagcttcagagttgatgcctgattgtggggtcaatcgtcagataattgaattgctttctattcgtcctcctcctgttgatgcaaagttgaaactgctgaaggagatagctgaggaacatgaagttgattgggatccatcagagacagagacagaatttctcaaacctcatgaagatctattgaatggaccgacctacttcaatgtatccacactacctcttcccaaggagaaacatgaggaaacagtagttgcaagtgctgccgagcagcctgatgaagactatgagtcagataccggtcttgactcactggatttgcctgaagtcccaaaagctgcaattcgtccaccttctgacgcaccattgaccccagatatttgcccacatgttcagggctctcagtcacttcctcatgagttctcagatcctggtaacttggaggagaatccaacagctggtggtgcttttaatgttattcagatgaaaagcttggagcatcttgtttatgcaccatctgatcagtcaaacataccggatttgccaaatgaaaagaagcagtttattccttttgcatctccaccgcccgttctttctccttcggtgggaaaagccgagacagttccctcaccttctctgtctcctccagtgaagccgacagagccagaaccagaaatcctcacaaagaaaattgatgaagtgaccacacctccagtacttccctcagattatattttcacaaaacagccagaacaagtgcggacaatctctccttctgagagtggggcaaatattgacttggacgacgttttatctgctgcgcagacagctgctgaatcagctgagcgagctgcatcagcagcccgtgctgctgcaaaccttgcacaactgcgcatttcagacctgaaagaagaattccaaggtttatagcaattacggtgatagcgtccaaaaggaaagccatcatcagactgaggcgacacaggaaccggtatttgatcaccaggactccttcaccaatgatacacaggactatgtgtcatcccatgtgccgcagaggtcgtcatctttggaggacgatccatatttctcgtatcccaacttgttctcagcgccaaagccctgaaggcggaaactagtggtctgcaagtagttgttcagaatagtctgaaacatgagatatcactttttcagctctgtccggtcctcttatgtttggtcttttctgatgcctccgaaaattctgtttatgttgagttggtacatagcggacaaaagggagactatgaaacctctgtctagttttgtctctgtaaattgtacatgtgcggtgtttgtatcagttgtctgaaacatttctgcagtctactggtaataacagaaattgaatctc

SEQ ID NO: 34829 - protein, 406 aa, Zea mays subsp. mays
  peptide (1)..(406): Ceres Seq. ID no. 12376391
  misc_feature (1)..(103): Pfam Name: Pfam Description:  Eukaryotic protein of unknown function, DUF292
  misc_feature (1)..(399): NCBI GI NO: 40253290 NR Description: unknown protein
  misc_feature (1)..(240): NCBI GI NO: 15218545 NR Description: hypothetical protein; protein id: At1g34220.1
  misc_feature (112)..(240): NCBI GI NO: 33589706 NR Description: At1g34220 [Arabidopsis thaliana]
  misc_feature (1)..(119): NCBI GI NO: 33589706 NR Description: At1g34220 [Arabidopsis thaliana]
  misc_feature (227)..(401): NCBI GI NO: 40253290 NR Description: unknown protein
  misc_feature (230)..(399): NCBI GI NO: 33589706 NR Description: At1g34220 [Arabidopsis thaliana]
  misc_feature (1)..(181): NCBI GI NO: 15237108 NR Description: putative protein; protein id: At4g35730.1
  misc_feature (1)..(256): NCBI GI NO: 34910388 NR Description: P0692C11.15
  misc_feature (351)..(392): NCBI GI NO: 34910388 NR Description: P0692C11.15
  misc_feature (1)..(161): NCBI GI NO: 18395668 NR Description: expressed protein; protein id: At1g25420
MRRDIAKLLEAGQEATARIRVEHIIREENMMAAQEILELFCELIAVRLPIIEAQKECPIDLKEAISSVCFAAPRCADLPELMQVQMMFATKYGKEFVAAASELMPDCGVNRQIIELLSIRPPPVDAKLKLLKEIAEEHEVDWDPSETETEFLKPHEDLLNGPTYFNVSTLPLPKEKHEETVVASAAEQPDEDYESDTGLDSLDLPEVPKAAIRPPSDAPLTPDICPHVQGSQSLPHEFSDPGNLEENPTAGGAFNVIQMKSLEHLVYAPSDQSNIPDLPNEKKQFIPFASPPPVLSPSVGKAETVPSPSLSPPVKPTEPEPEILTKKIDEVTTPPVLPSDYIFTKQPEQVRTISPSESGANIDLDDVLSAAQTAAESAERAASAARAAANLAQLRISDLKEEFQGL

SEQ ID NO: 34830 - protein, 377 aa, Zea mays subsp. mays
  peptide (1)..(377): Ceres Seq. ID no. 12376392
  misc_feature (1)..(74): Pfam Name: Pfam Description:  Eukaryotic protein of unknown function, DUF292
  misc_feature (1)..(370): NCBI GI NO: 40253290 NR Description: unknown protein
  misc_feature (1)..(211): NCBI GI NO: 15218545 NR Description: hypothetical protein; protein id: At1g34220.1
  misc_feature (83)..(211): NCBI GI NO: 33589706 NR Description: At1g34220 [Arabidopsis thaliana]
  misc_feature (1)..(90): NCBI GI NO: 33589706 NR Description: At1g34220 [Arabidopsis thaliana]
  misc_feature (198)..(372): NCBI GI NO: 40253290 NR Description: unknown protein
  misc_feature (201)..(370): NCBI GI NO: 33589706 NR Description: At1g34220 [Arabidopsis thaliana]
  misc_feature (1)..(152): NCBI GI NO: 15237108 NR Description: putative protein; protein id: At4g35730.1
  misc_feature (1)..(227): NCBI GI NO: 34910388 NR Description: P0692C11.15
  misc_feature (322)..(363): NCBI GI NO: 34910388 NR Description: P0692C11.15
  misc_feature (1)..(132): NCBI GI NO: 18395668 NR Description: expressed protein; protein id: At1g25420
MMAAQEILELFCELIAVRLPIIEAQKECPIDLKEAISSVCFAAPRCADLPELMQVQMMFATKYGKEFVAAASELMPDCGVNRQIIELLSIRPPPVDAKLKLLKEIAEEHEVDWDPSETETEFLKPHEDLLNGPTYFNVSTLPLPKEKHEETVVASAAEQPDEDYESDTGLDSLDLPEVPKAAIRPPSDAPLTPDICPHVQGSQSLPHEFSDPGNLEENPTAGGAFNVIQMKSLEHLVYAPSDQSNIPDLPNEKKQFIPFASPPPVLSPSVGKAETVPSPSLSPPVKPTEPEPEILTKKIDEVTTPPVLPSDYIFTKQPEQVRTISPSESGANIDLDDVLSAAQTAAESAERAASAARAAANLAQLRISDLKEEFQGL

SEQ ID NO: 34831 - protein, 376 aa, Zea mays subsp. mays
  peptide (1)..(376): Ceres Seq. ID no. 12376393
  misc_feature (1)..(73): Pfam Name: Pfam Description:  Eukaryotic protein of unknown function, DUF292
  misc_feature (1)..(369): NCBI GI NO: 40253290 NR Description: unknown protein
  misc_feature (1)..(210): NCBI GI NO: 15218545 NR Description: hypothetical protein; protein id: At1g34220.1
  misc_feature (82)..(210): NCBI GI NO: 33589706 NR Description: At1g34220 [Arabidopsis thaliana]
  misc_feature (1)..(89): NCBI GI NO: 33589706 NR Description: At1g34220 [Arabidopsis thaliana]
  misc_feature (197)..(371): NCBI GI NO: 40253290 NR Description: unknown protein
  misc_feature (200)..(369): NCBI GI NO: 33589706 NR Description: At1g34220 [Arabidopsis thaliana]
  misc_feature (1)..(151): NCBI GI NO: 15237108 NR Description: putative protein; protein id: At4g35730.1
  misc_feature (1)..(226): NCBI GI NO: 34910388 NR Description: P0692C11.15
  misc_feature (321)..(362): NCBI GI NO: 34910388 NR Description: P0692C11.15
  misc_feature (1)..(131): NCBI GI NO: 18395668 NR Description: expressed protein; protein id: At1g25420
MAAQEILELFCELIAVRLPIIEAQKECPIDLKEAISSVCFAAPRCADLPELMQVQMMFATKYGKEFVAAASELMPDCGVNRQIIELLSIRPPPVDAKLKLLKEIAEEHEVDWDPSETETEFLKPHEDLLNGPTYFNVSTLPLPKEKHEETVVASAAEQPDEDYESDTGLDSLDLPEVPKAAIRPPSDAPLTPDICPHVQGSQSLPHEFSDPGNLEENPTAGGAFNVIQMKSLEHLVYAPSDQSNIPDLPNEKKQFIPFASPPPVLSPSVGKAETVPSPSLSPPVKPTEPEPEILTKKIDEVTTPPVLPSDYIFTKQPEQVRTISPSESGANIDLDDVLSAAQTAAESAERAASAARAAANLAQLRISDLKEEFQGL

SEQ ID NO: 34832 - DNA, 1558 bp, Zea mays subsp. mays
  misc_feature (1)..(1558): Ceres Seq. ID no. 12374009
aagctataggcgaaacttcgggggtcgtcgagggttctcgaccctcccttcccctctctcgcccgctcgctccctcaccgccggcgttctcgccgccagctacggacggggcacactgcgcagggtcccagccccgcctctcacccgaacgtcttcgctcccctcaccgggtaggcgtcgcgctctactggcaccaccccggccctcgcgctctactggcaccggaccggcgcggggtggcgcggagacctgtcccggccaggagaccgttccgtgctataccggtgaagatgctctttgcatagctcaagctccaaactgatggattctgatgacaagaagtttggaaatgggccaagggagcttactggtgctgttgatttgattaaccactacaaactgctgccacaccatgatttcttttgcaagaaacctttgccactggcaatatcagatacacattatcttcacaatattgtgggagacactgaaattcgaaaaggagaaggaatggagttagatcaacttgttcagaatgcatatatgagggataaacctgcttatattcagcccttcgatatggaaacactggggcaagcgttccaacttcgagaaacagctcctgtggttttgccctctactgaaaagggtataccgactatttcgggtaaaccaaaaagcgagtccaaggacaaagagaagaagcataaaaagcacaaagacagagagagggacaaagacaaggaacataagaagcacaaacatcggcataaggatcgaagtaaggacaaagataaagacaaagacaaggataagaaaaaagataagagtggtcatcatgattctgattcaaagaaacatcatgaaaagaagaggaagcacgagggaactgaagattcagcagatgtgcataagcacaagaagagtaagcacaagagttccaaaaccgatgagatggggaatggacttattagttaacacttcctagttctagcttcaatccttgtaatttgctgttaaaaggagactgatggtctctgccatcaaaaccctgtgcagaatagtgatgacaacataaaagttggagatcttgataagaacgcgataaagaagtatttttgcagagtccattccgaggaaaattaaattacttaatacaggactaatccttcgaactgtgcaaccttctgttcctccctgacgaattggttgtaggagcggttgaaaggatatgccatgagattgtttcgattgcagggccagcgcacttattgatactaggcttcttatttaactcctaatttcggatgtagcgtgcatgagtatcctgttgagtagctgtggatggttttacagttggtctagagatgtagttgagggcagggaattggaaagaatttcgtgttcccgtcgtactgaccttggttgatagagagtttaaccagtagctaaattaaatgttgctagtcagttccaagtttattctgcgtggaatgaattggagtcaaattagcacactgcttatttaaccatgataaagatcttgttattacaaagt

SEQ ID NO: 34833 - protein, 218 aa, Zea mays subsp. mays
  peptide (1)..(218): Ceres Seq. ID no. 12374010
  misc_feature (117)..(203): Pfam Name: Pfam Description:  SART-1 family
  misc_feature (1)..(213): NCBI GI NO: 38454176 NR Description: At5g12230 [Arabidopsis thaliana]
  misc_feature (1)..(213): NCBI GI NO: 15239910 NR Description: unknown protein; protein id: At5g12230.1
  misc_feature (1)..(213): NCBI GI NO: 15239764 NR Description: putative protein; protein id: At5g19480.1
  misc_feature (48)..(214): NCBI GI NO: 23619174 NR Description: hypothetical protein [Plasmodium falciparum 3D7]
  misc_feature (114)..(201): NCBI GI NO: 29246869 NR Description: GLP_191_32543_34384 [Giardia lamblia ATCC 50803]
  misc_feature (119)..(208): NCBI GI NO: 23508991 NR Description: hypothetical protein [Plasmodium falciparum 3D7]
  misc_feature (116)..(211): NCBI GI NO: 17539584 NR Description: Putative nuclear protein
  misc_feature (106)..(206): NCBI GI NO: 23612468 NR Description: heat shock protein 86 family protein
  misc_feature (117)..(215): NCBI GI NO: 23486889 NR Description: hypothetical protein [Plasmodium yoelii yoelii]
  misc_feature (116)..(211): NCBI GI NO: 17509191 NR Description: Putative nuclear protein
MDSDDKKFGNGPRELTGAVDLINHYKLLPHHDFFCKKPLPLAISDTHYLHNIVGDTEIRKGEGMELDQLVQNAYMRDKPAYIQPFDMETLGQAFQLRETAPVVLPSTEKGIPTISGKPKSESKDKEKKHKKHKDRERDKDKEHKKHKHRHKDRSKDKDKDKDKDKKKDKSGHHDSDSKKHHEKKRKHEGTEDSADVHKHKKSKHKSSKTDEMGNGLIS

SEQ ID NO: 34834 - protein, 155 aa, Zea mays subsp. mays
  peptide (1)..(155): Ceres Seq. ID no. 12374011
  misc_feature (54)..(140): Pfam Name: Pfam Description:  SART-1 family
  misc_feature (1)..(150): NCBI GI NO: 38454176 NR Description: At5g12230 [Arabidopsis thaliana]
  misc_feature (1)..(150): NCBI GI NO: 15239910 NR Description: unknown protein; protein id: At5g12230.1
  misc_feature (1)..(150): NCBI GI NO: 15239764 NR Description: putative protein; protein id: At5g19480.1
  misc_feature (1)..(151): NCBI GI NO: 23619174 NR Description: hypothetical protein [Plasmodium falciparum 3D7]
  misc_feature (51)..(138): NCBI GI NO: 29246869 NR Description: GLP_191_32543_34384 [Giardia lamblia ATCC 50803]
  misc_feature (56)..(145): NCBI GI NO: 23508991 NR Description: hypothetical protein [Plasmodium falciparum 3D7]
  misc_feature (53)..(148): NCBI GI NO: 17539584 NR Description: Putative nuclear protein
  misc_feature (43)..(143): NCBI GI NO: 23612468 NR Description: heat shock protein 86 family protein
  misc_feature (54)..(152): NCBI GI NO: 23486889 NR Description: hypothetical protein [Plasmodium yoelii yoelii]
  misc_feature (53)..(148): NCBI GI NO: 17509191 NR Description: Putative nuclear protein
MELDQLVQNAYMRDKPAYIQPFDMETLGQAFQLRETAPVVLPSTEKGIPTISGKPKSESKDKEKKHKKHKDRERDKDKEHKKHKHRHKDRSKDKDKDKDKDKKKDKSGHHDSDSKKHHEKKRKHEGTEDSADVHKHKKSKHKSSKTDEMGNGLIS

SEQ ID NO: 34835 - protein, 144 aa, Zea mays subsp. mays
  peptide (1)..(144): Ceres Seq. ID no. 12374012
  misc_feature (43)..(129): Pfam Name: Pfam Description:  SART-1 family
  misc_feature (1)..(139): NCBI GI NO: 38454176 NR Description: At5g12230 [Arabidopsis thaliana]
  misc_feature (1)..(139): NCBI GI NO: 15239910 NR Description: unknown protein; protein id: At5g12230.1
  misc_feature (1)..(139): NCBI GI NO: 15239764 NR Description: putative protein; protein id: At5g19480.1
  misc_feature (1)..(140): NCBI GI NO: 23619174 NR Description: hypothetical protein [Plasmodium falciparum 3D7]
  misc_feature (40)..(127): NCBI GI NO: 29246869 NR Description: GLP_191_32543_34384 [Giardia lamblia ATCC 50803]
  misc_feature (45)..(134): NCBI GI NO: 23508991 NR Description: hypothetical protein [Plasmodium falciparum 3D7]
  misc_feature (42)..(137): NCBI GI NO: 17539584 NR Description: Putative nuclear protein
  misc_feature (32)..(132): NCBI GI NO: 23612468 NR Description: heat shock protein 86 family protein
  misc_feature (43)..(141): NCBI GI NO: 23486889 NR Description: hypothetical protein [Plasmodium yoelii yoelii]
  misc_feature (42)..(137): NCBI GI NO: 17509191 NR Description: Putative nuclear protein
MRDKPAYIQPFDMETLGQAFQLRETAPVVLPSTEKGIPTISGKPKSESKDKEKKHKKHKDRERDKDKEHKKHKHRHKDRSKDKDKDKDKDKKKDKSGHHDSDSKKHHEKKRKHEGTEDSADVHKHKKSKHKSSKTDEMGNGLIS

SEQ ID NO: 34836 - DNA, 1950 bp, Zea mays subsp. mays
  misc_feature (1)..(1950): Ceres Seq. ID no. 12343962
aactaatcactacctctccctctccgtcgcgacacaggccacggcgggcggcggcggaggcttccgtgcggctcttggcggattgaacgcccactcgagctgcgccggcggctgtttcagccgtccttagatagaccctgctttcctcccgggcgaatcaaagttgcacaaatgccgacaccagtgaagtcggtgctccccgtggtgctcctcggctgcggcggcgtcggccgctacctcctccgccacatcgtctcctgtcgtcccctccacgccaaccagggcgtggccatccgggtggtgggcgtcgccgatagctcctccctgctcgtcgccgaagatgtccactccaccggcctcgatgacgcgctcctcacccagctctgcgccgccaagtccgcaggctctcccctctcctccctgctcggccgagggcactgtcagctgttcaagaaccctgaggctaggggcaaagtcatagacgccgctaccacacttggaagtacaactggtctggtgctagttgactgttctgcaacttatgacactgttagcctgctgaaagatgctgtggatcatggatgctgtgtcgtattggcaaacaagaaacctcttaccggtgcttatgaggattttcagaagttggtctccaacttccgtcggataagatttgaatctactgttggagcaggtttgcctgtgatagcttctgtaacccgtattattgcatctggagaccctattactcgtattgttggcagtctgagtggtacacttgggtatgtgatgagtgagcttgaggatggaaagaaatttagtgaagttgtaaaaactgccaagtctcttggctatacagaaccagatccacgtgatgatcttggtggaatggatgtggctagaaaggcattgatcctggctaggcttcttgggcaacagataagcatggagagtatcaatgttgagagtttatatcctagtgaattaggacctgatgcagtgtccacaaaggacttccttgaaagtggtttagtgcaacttgacaagagcatggaagaaagaatcagagcagcatcttcgagaggaaacgttcttcgttacgtctgtgagattgaaagcgcagggtgccaagtaggccttaaagagctcccaaaggattctgcgctgggtagattgaggggaagtgacaatgtggtcgagatatacagcagatgttaccagagctcccctctggtgatccagggcgcaggagctggcaacgacaccactgccgccggcgtccttgctgacataatcgacctccaagacctgttccagacgatggcttgatcgttgatcggcatccacaccagtacaccatcttgatttttgcaaggcaccagagcgtttgatactttgatcggtgccagtggaatcccccactgcccactggttggcttcgctccttgtcatgtgtgcattttgttcacgggcatgctctcaggctgagagcctgagacgtctgacattcgaaatgtaattttgagcaggcgtgtgggggatttctttacagtttacataaaggaactttgtttcagtgaaataatgtcgcggtctccacattaaactaataaacagtccgagctacattgccgctatctgatagtgaaataatatcgctggcagcctgaaaccgtgaacgagagacgtgggaaattgatgcaattcaccctgatgcagattcggcaattgatgcaaggttgcaattcagtgtcctgaaatgtctacgaggagaggagaggagatgagatggctggaattttaaatactactcttgcatcacgcaattcaattctgtgttccgttattatatatcgttcactgatgcgacagcatagcagactagtagtcaataataatttttgttggaattgccacgaacccgccaccataaggcattgttcgtttctactc

SEQ ID NO: 34837 - protein, 384 aa, Zea mays subsp. mays
  peptide (1)..(384): Ceres Seq. ID no. 12343963
  misc_feature (176)..(374): Pfam Name: Pfam Description:  Homoserine dehydrogenase
  misc_feature (9)..(380): NCBI GI NO: 15242147 NR Description: homoserine dehydrogenase-like protein
  misc_feature (9)..(380): NCBI GI NO: 21537197 NR Description: homoserine dehydrogenase-like protein
  misc_feature (113)..(374): NCBI GI NO: 22971485 NR Description: hypothetical protein [Chloroflexus aurantiacus]
  misc_feature (116)..(374): NCBI GI NO: 15601978 NR Description: ThrA [Pasteurella multocida]
  misc_feature (6)..(57): NCBI GI NO: 15601978 NR Description: ThrA [Pasteurella multocida]
  misc_feature (116)..(374): NCBI GI NO: 16120788 NR Description: bifunctional aspartokinase/ homoserine dehydrogenaseI
  misc_feature (1)..(65): NCBI GI NO: 16120788 NR Description: bifunctional aspartokinase/ homoserine dehydrogenaseI
  misc_feature (116)..(374): NCBI GI NO: 22127591 NR Description: aspartokinase I, homoserine dehydrogenase I
  misc_feature (1)..(65): NCBI GI NO: 22127591 NR Description: aspartokinase I, homoserine dehydrogenase I
  misc_feature (116)..(374): NCBI GI NO: 26245920 NR Description: Aspartokinase I; Homoserine dehydrogenase I
MPTPVKSVLPVVLLGCGGVGRYLLRHIVSCRPLHANQGVAIRVVGVADSSSLLVAEDVHSTGLDDALLTQLCAAKSAGSPLSSLLGRGHCQLFKNPEARGKVIDAATTLGSTTGLVLVDCSATYDTVSLLKDAVDHGCCVVLANKKPLTGAYEDFQKLVSNFRRIRFESTVGAGLPVIASVTRIIASGDPITRIVGSLSGTLGYVMSELEDGKKFSEVVKTAKSLGYTEPDPRDDLGGMDVARKALILARLLGQQISMESINVESLYPSELGPDAVSTKDFLESGLVQLDKSMEERIRAASSRGNVLRYVCEIESAGCQVGLKELPKDSALGRLRGSDNVVEIYSRCYQSSPLVIQGAGAGNDTTAAGVLADIIDLQDLFQTMA

SEQ ID NO: 34838 - DNA, 948 bp, Zea mays subsp. mays
  misc_feature (1)..(948): Ceres Seq. ID no. 12347805
atctcctttcagtaacagtatgcagccttaggagaagctaagctgtcttctaactctctctctcgagttcatagtttttgctcttcctctctcatggtcacaatgcttgcagctagttctctagtgaacagcaacctcgcttgctcatcaaggatatcatcctgttcagacttcacatatagccactcctggcgtcccatacatgctatgaaactccatcagatgcgtgctgtgagctcaatacgtataagttgtgctgccactaaacctgcaaagactcctgctgaagaagaatggaaagttaagcggcaactgctatcagaaaagcgggtacgaagtgtcgatgtgaaggaagcactgcgccttcaaaaggaaaacaactttgtcattcttgatgtcaggccagaagcagagtttaaagaggctcatccacctggcgccatcaatgtacaaatatacagattaatcaaggaatggacagcgtgggatattgcgaggcgtgcagcgtttgcgttcttcggcatatttgctggaacagaagagaatcctgagttcatacagagtgttgatacgaaggttgggaaagatgcgaagataattgtggcatgctctacaggagggacactgaagccaacgcaaaatttccctgatgggaagcaatctcggtccctgatagctgcgtacttgttggtcctgaatggctacagcaacgtgtaccatctggaaggaggactttacacatggttcaaagaaggactaccagctgttgcaggagaagagtaagagagacattacgaacatagtgttcgcatgctggagagagtggagagtggagactagagttgcgaggacttgtagtgatgtgcttgcttcacagtcacagggttgtcgattgttgtgtacggattgagatgtcgaagatttctcctgccaatgtgatgctgtcct

SEQ ID NO: 34839 - protein, 229 aa, Zea mays subsp. mays
  peptide (1)..(229): Ceres Seq. ID no. 12347806
  misc_feature (84)..(220): Pfam Name: Pfam Description:  Rhodanese-like domain
  misc_feature (49)..(229): NCBI GI NO: 18417050 NR Description: rhodanese-like domain protein
  misc_feature (49)..(229): NCBI GI NO: 21553366 NR Description: unknown [Arabidopsis thaliana]
  misc_feature (49)..(229): NCBI GI NO: 7487511 NR Description: hypothetical protein T29A15
  misc_feature (74)..(128): NCBI GI NO: 30250144 NR Description: putative transmembrane protein
  misc_feature (195)..(225): NCBI GI NO: 30250144 NR Description: putative transmembrane protein
MVTMLAASSLVNSNLACSSRISSCSDFTYSHSWRPIHAMKLHQMRAVSSIRISCAATKPAKTPAEEEWKVKRQLLSEKRVRSVDVKEALRLQKENNFVILDVRPEAEFKEAHPPGAINVQIYRLIKEWTAWDIARRAAFAFFGIFAGTEENPEFIQSVDTKVGKDAKIIVACSTGGTLKPTQNFPDGKQSRSLIAAYLLVLNGYSNVYHLEGGLYTWFKEGLPAVAGEE

SEQ ID NO: 34840 - protein, 226 aa, Zea mays subsp. mays
  peptide (1)..(226): Ceres Seq. ID no. 12347807
  misc_feature (81)..(217): Pfam Name: Pfam Description:  Rhodanese-like domain
  misc_feature (46)..(226): NCBI GI NO: 18417050 NR Description: rhodanese-like domain protein
  misc_feature (46)..(226): NCBI GI NO: 21553366 NR Description: unknown [Arabidopsis thaliana]
  misc_feature (46)..(226): NCBI GI NO: 7487511 NR Description: hypothetical protein T29A15
  misc_feature (71)..(125): NCBI GI NO: 30250144 NR Description: putative transmembrane protein
  misc_feature (192)..(222): NCBI GI NO: 30250144 NR Description: putative transmembrane protein
MLAASSLVNSNLACSSRISSCSDFTYSHSWRPIHAMKLHQMRAVSSIRISCAATKPAKTPAEEEWKVKRQLLSEKRVRSVDVKEALRLQKENNFVILDVRPEAEFKEAHPPGAINVQIYRLIKEWTAWDIARRAAFAFFGIFAGTEENPEFIQSVDTKVGKDAKIIVACSTGGTLKPTQNFPDGKQSRSLIAAYLLVLNGYSNVYHLEGGLYTWFKEGLPAVAGEE

SEQ ID NO: 34841 - protein, 191 aa, Zea mays subsp. mays
  peptide (1)..(191): Ceres Seq. ID no. 12347808
  misc_feature (46)..(182): Pfam Name: Pfam Description:  Rhodanese-like domain
  misc_feature (11)..(191): NCBI GI NO: 18417050 NR Description: rhodanese-like domain protein
  misc_feature (11)..(191): NCBI GI NO: 21553366 NR Description: unknown [Arabidopsis thaliana]
  misc_feature (11)..(191): NCBI GI NO: 7487511 NR Description: hypothetical protein T29A15
  misc_feature (36)..(90): NCBI GI NO: 30250144 NR Description: putative transmembrane protein
  misc_feature (157)..(187): NCBI GI NO: 30250144 NR Description: putative transmembrane protein
MKLHQMRAVSSIRISCAATKPAKTPAEEEWKVKRQLLSEKRVRSVDVKEALRLQKENNFVILDVRPEAEFKEAHPPGAINVQIYRLIKEWTAWDIARRAAFAFFGIFAGTEENPEFIQSVDTKVGKDAKIIVACSTGGTLKPTQNFPDGKQSRSLIAAYLLVLNGYSNVYHLEGGLYTWFKEGLPAVAGEE

SEQ ID NO: 34842 - DNA, 1784 bp, Zea mays subsp. mays
  misc_feature (1)..(1784): Ceres Seq. ID no. 12367303
cttggattggggagctccgcctccctctcctcaagtttgaccaaccctcacccacctccctccgtcgtctagtatgcttcttgcctcccgcctgcttcctccgccgccctcctccgccgcggccggttcctcctcatcctctctgactccgatcccaactcaaaacacagagaactctgaaagctaatcggcaatggataaccacatccatagtcagccagctgctaacctctactaccagttcggcatggggactgagcagcaatacccaccaccgttcgcctcaccaccatccaccaacatcccgcacatggactggaacccggccacgatgctagacaacctcaccttcatcgaggagaagatacagcaagtgaaggacgtcatccgcacaatggtggacaacgccgggcaggtgcaggtccagtgccaccaccaaggcaggcgagctgctggctcagaagcagaagcagcaggtggtcaacgcggacctgacatgccttatagttcagctcatctccaccgccggcagcctgctcccgtcactgaagaactcgtcgttcctcagccacccccaccctgctggccacgtggacatggctaaccatgttggcccaagctcgagcctagtgcctaatgcgatgaccgtttctgaagactatgaggagctgttcaagggatggaccgatggcggcattgaggtcgacgacgacggcgttcttgtcgaggagcaggaaattaccaaggacggagacagcctctcgtacgagctgctgcagctggaggaggacgagatactggcgccgcacacgcacttttgcaccatctgcgggaaagggttcaagcgggacgcgaacctgcggatgcacatgcgagggcacggcgacgagtacaagagcccggcggcgctggccaagccgccgagggacccgggcgcggagcaggagccggcgaagcggcggtactcgtgcccgttcgcggggtgcaagcggaacaagctgcacaaaagcttccagcccctcaagaccatcctgtgcgtgaagaaccactacaggcggagccactgcgagaagagccacacctgcggccggtgccacgccaagaagttctccatcgtggccgacctgaggacgcacgagaagcactgcggccgccgggacaggtgggtgtgctcctgcgggacgagtttctcgaggaaggacaagctcttcgcgcacgtcgccttgttccaaggtcacacgcccgcgttgtcgtcgccgctggaggaggagccgccgaaggcttgctcggaccagcaccagaccggccgtgctgggagccgtcgggaaccagcgaaagtcccagctggctcagtgggcggcggcagcggcagcagcttcgtgtggggtgcctcgtcctcaggggagaacagtgctctggatatcaaaggttttgttgatggatgcagtggtgacttcctctcgacggcgaactttggctccttcaacctcagcttcgggcctgctgacgggttcacaggagagccttctagtggtggttcgttctcgatgctacctcctgagcactttcagagtgctcagaagaaggggcagaactgaatatggataatctcagacagctttagatgtatgtatctgggcggcttcagatgcaccaccatcatctctggttcatgctcgtttttctccactgtagtgtagaacattgtcacagtttgagattgttgtctccttccttcctatgtacccgcctttatcgctggaagccgactgttgaactttcgc

SEQ ID NO: 34843 - protein, 333 aa, Zea mays subsp. mays
  peptide (1)..(333): Ceres Seq. ID no. 12367304
  misc_feature (73)..(95): Pfam Name: Pfam Description:  Zinc finger, C2H2 type
  misc_feature (31)..(277): NCBI GI NO: 34908682 NR Description: putative zinc finger protein
  misc_feature (1)..(38): NCBI GI NO: 34908682 NR Description: putative zinc finger protein
  misc_feature (1)..(319): NCBI GI NO: 15218606 NR Description: zinc finger protein, putative
  misc_feature (1)..(319): NCBI GI NO: 21593564 NR Description: zinc finger protein, putative
  misc_feature (9)..(242): NCBI GI NO: 28376689 NR Description: putative zinc finger protein
  misc_feature (56)..(227): NCBI GI NO: 10177236 NR Description: contains similarity to C2H2-type zinc fingerprotein~gene_id:MRN17
  misc_feature (56)..(227): NCBI GI NO: 30688719 NR Description: expressed protein [Arabidopsis thaliana]
  misc_feature (51)..(239): NCBI GI NO: 10241636 NR Description: putative zinc finger protein
  misc_feature (51)..(237): NCBI GI NO: 38346456 NR Description: OSJNBa0019G23.4
  misc_feature (16)..(233): NCBI GI NO: 28973719 NR Description: putative zinc finger protein
MANHVGPSSSLVPNAMTVSEDYEELFKGWTDGGIEVDDDGVLVEEQEITKDGDSLSYELLQLEEDEILAPHTHFCTICGKGFKRDANLRMHMRGHGDEYKSPAALAKPPRDPGAEQEPAKRRYSCPFAGCKRNKLHKSFQPLKTILCVKNHYRRSHCEKSHTCGRCHAKKFSIVADLRTHEKHCGRRDRWVCSCGTSFSRKDKLFAHVALFQGHTPALSSPLEEEPPKACSDQHQTGRAGSRREPAKVPAGSVGGGSGSSFVWGASSSGENSALDIKGFVDGCSGDFLSTANFGSFNLSFGPADGFTGEPSSGGSFSMLPPEHFQSAQKKGQN

SEQ ID NO: 34844 - protein, 318 aa, Zea mays subsp. mays
  peptide (1)..(318): Ceres Seq. ID no. 12367305
  misc_feature (58)..(80): Pfam Name: Pfam Description:  Zinc finger, C2H2 type
  misc_feature (16)..(262): NCBI GI NO: 34908682 NR Description: putative zinc finger protein
  misc_feature (1)..(23): NCBI GI NO: 34908682 NR Description: putative zinc finger protein
  misc_feature (1)..(304): NCBI GI NO: 15218606 NR Description: zinc finger protein, putative
  misc_feature (1)..(304): NCBI GI NO: 21593564 NR Description: zinc finger protein, putative
  misc_feature (1)..(227): NCBI GI NO: 28376689 NR Description: putative zinc finger protein
  misc_feature (41)..(212): NCBI GI NO: 10177236 NR Description: contains similarity to C2H2-type zinc fingerprotein~gene_id:MRN17
  misc_feature (41)..(212): NCBI GI NO: 30688719 NR Description: expressed protein [Arabidopsis thaliana]
  misc_feature (36)..(224): NCBI GI NO: 10241636 NR Description: putative zinc finger protein
  misc_feature (36)..(222): NCBI GI NO: 38346456 NR Description: OSJNBa0019G23.4
  misc_feature (1)..(218): NCBI GI NO: 28973719 NR Description: putative zinc finger protein
MTVSEDYEELFKGWTDGGIEVDDDGVLVEEQEITKDGDSLSYELLQLEEDEILAPHTHFCTICGKGFKRDANLRMHMRGHGDEYKSPAALAKPPRDPGAEQEPAKRRYSCPFAGCKRNKLHKSFQPLKTILCVKNHYRRSHCEKSHTCGRCHAKKFSIVADLRTHEKHCGRRDRWVCSCGTSFSRKDKLFAHVALFQGHTPALSSPLEEEPPKACSDQHQTGRAGSRREPAKVPAGSVGGGSGSSFVWGASSSGENSALDIKGFVDGCSGDFLSTANFGSFNLSFGPADGFTGEPSSGGSFSMLPPEHFQSAQKKGQN

SEQ ID NO: 34845 - protein, 244 aa, Zea mays subsp. mays
  peptide (1)..(244): Ceres Seq. ID no. 12367306
  misc_feature (1)..(188): NCBI GI NO: 34908682 NR Description: putative zinc finger protein
  misc_feature (1)..(230): NCBI GI NO: 15218606 NR Description: zinc finger protein, putative
  misc_feature (1)..(230): NCBI GI NO: 21593564 NR Description: zinc finger protein, putative
  misc_feature (1)..(153): NCBI GI NO: 28376689 NR Description: putative zinc finger protein
  misc_feature (1)..(138): NCBI GI NO: 10177236 NR Description: contains similarity to C2H2-type zinc fingerprotein~gene_id:MRN17
  misc_feature (1)..(138): NCBI GI NO: 30688719 NR Description: expressed protein [Arabidopsis thaliana]
  misc_feature (1)..(150): NCBI GI NO: 10241636 NR Description: putative zinc finger protein
  misc_feature (1)..(148): NCBI GI NO: 38346456 NR Description: OSJNBa0019G23.4
  misc_feature (1)..(144): NCBI GI NO: 28973719 NR Description: putative zinc finger protein
  misc_feature (1)..(127): NCBI GI NO: 15223781 NR Description: hypothetical protein; protein id: At1g51220.1
MHMRGHGDEYKSPAALAKPPRDPGAEQEPAKRRYSCPFAGCKRNKLHKSFQPLKTILCVKNHYRRSHCEKSHTCGRCHAKKFSIVADLRTHEKHCGRRDRWVCSCGTSFSRKDKLFAHVALFQGHTPALSSPLEEEPPKACSDQHQTGRAGSRREPAKVPAGSVGGGSGSSFVWGASSSGENSALDIKGFVDGCSGDFLSTANFGSFNLSFGPADGFTGEPSSGGSFSMLPPEHFQSAQKKGQN

SEQ ID NO: 34846 - DNA, 1500 bp, Zea mays subsp. mays
  misc_feature (1)..(1500): Ceres Seq. ID no. 12425157
  misc_feature (1072)..(1072): n is a, c, t, g, unknown, or other
gaaccaaccaaacctcaccgaatcgcaacgacagcgagaacgtccaaacgagcgcgagtctccggcgataaccaagagcgcgggcacgcaaagcggcgaagcgggaaggaagcagtaacgatggggcttgactattacaagatcctaggcgtcgacaagggcgccaccgatgacgacctcaagaaggcctaccgcaagctcgccatgaaatggcaccccgacaagaaccccaacaacaagaaggaggccgagaacaagttcaagcagatctcggaggcgtacgaggtgctgagcgacccgcagaagcgcgcggtgtacgaccagtacggcgaggagggtctcaaggggcaggtgccgccgccgggcgccggcggggcgggccccggcggcgcaaccttcttctccaccggcggcgacgggccgacggtgttccggttcaacccgcgcaacgcggaggacatcttcgccgagttcttcggcggctccagccccttcggcggtatgggcggcggtggcatgggcggcagcggcatggggggtgggatgcccggcatgcggagcggcgggacaaggttctcctcctccatcttcggggacgacatattcggctctgcgttccgcagcggcccggacgggcacggcatgcacgccggcgggcgggccgtgaaggcgccggccatagagcggaagctgccgtgcagcctcgaggagctgtacaagggcaccaccaagaagatgaagatctccagggaaatctctgacgccagtgggaagacgatcccagtggaagagatcctaacgatcgacgtgaagccggggtggaagaagggcaccaagatcacgttcccggagaagggcaacgagacgcccaacacgatcccggcggacctcgtcttcatcatcgacgagaagccgcacccggtgttcacccgcgacggcaacgacctggtggtgacccagaagatcccgctggcggaggccctgacggggtacaccgcgcacgtgacgacgctggacgggcgcagcctgacggtgcccatcagctccgtgatccacccgggctacgaggagntggtgcgaggggagggcatgccgatacccaaggacccgtccaggaagggcaacctccggatcaagttcgacatcaagttcccggcgaggctcacggcggaccagaagtccggcgtcaagaggctgctcgggcagtagagcgcgcttgtgttgttttgtattgtgtatcagacattttcgtgttggttcatcttgaactggggtggagggagctgccatttgcagcctccgcaacgacgacgacgatgacgaggccaccaagtgttgagtacagaacagctactgttgtacggtgtatggttgagaaacttgagatgtgtagcggaggattccttgtgcgaacttccagatcgtggtggttgtctgttcactggtccacgtcgttgcatttgcaacttgcaaggatcgcggatggagtaactgttggcc

SEQ ID NO: 34847 - protein, 402 aa, Zea mays subsp. mays
  peptide (1)..(402): Ceres Seq. ID no. 12425158
  misc_feature (278)..(399): Pfam Name: Pfam Description:  DnaJ C terminal region
  misc_feature (177)..(401): NCBI GI NO: 6179940 NR Description: DnaJ-like protein [Nicotiana tabacum]
  misc_feature (41)..(180): NCBI GI NO: 6179940 NR Description: DnaJ-like protein [Nicotiana tabacum]
  misc_feature (177)..(401): NCBI GI NO: 11863723 NR Description: DnaJ like protein [Lycopersicon esculentum]
  misc_feature (41)..(172): NCBI GI NO: 11863723 NR Description: DnaJ like protein [Lycopersicon esculentum]
  misc_feature (41)..(401): NCBI GI NO: 15235310 NR Description: heat-shock protein; protein id: At4g28480
  misc_feature (186)..(400): NCBI GI NO: 15240968 NR Description: heat shock protein 40-like; protein id:At5g01390
  misc_feature (41)..(181): NCBI GI NO: 15240968 NR Description: heat shock protein 40-like; protein id:At5g01390
  misc_feature (41)..(401): NCBI GI NO: 34904486 NR Description: putative heat shock protein 40
  misc_feature (41)..(401): NCBI GI NO: 21593202 NR Description: putative heat-shock protein [Arabidopsis thaliana]
  misc_feature (41)..(401): NCBI GI NO: 15218515 NR Description: putative heat-shock protein; protein id:At1g10350
  misc_feature (358)..(358): Xaa is any aa, unknown or other
EPTKPHRIATTARTSKRARVSGDNQERGHAKRRSGKEAVTMGLDYYKILGVDKGATDDDLKKAYRKLAMKWHPDKNPNNKKEAENKFKQISEAYEVLSDPQKRAVYDQYGEEGLKGQVPPPGAGGAGPGGATFFSTGGDGPTVFRFNPRNAEDIFAEFFGGSSPFGGMGGGGMGGSGMGGGMPGMRSGGTRFSSSIFGDDIFGSAFRSGPDGHGMHAGGRAVKAPAIERKLPCSLEELYKGTTKKMKISREISDASGKTIPVEEILTIDVKPGWKKGTKITFPEKGNETPNTIPADLVFIIDEKPHPVFTRDGNDLVVTQKIPLAEALTGYTAHVTTLDGRSLTVPISSVIHPGYEEXVRGEGMPIPKDPSRKGNLRIKFDIKFPARLTADQKSGVKRLLGQ

SEQ ID NO: 34848 - protein, 362 aa, Zea mays subsp. mays
  peptide (1)..(362): Ceres Seq. ID no. 12425159
  misc_feature (238)..(359): Pfam Name: Pfam Description:  DnaJ C terminal region
  misc_feature (137)..(361): NCBI GI NO: 6179940 NR Description: DnaJ-like protein [Nicotiana tabacum]
  misc_feature (1)..(140): NCBI GI NO: 6179940 NR Description: DnaJ-like protein [Nicotiana tabacum]
  misc_feature (137)..(361): NCBI GI NO: 11863723 NR Description: DnaJ like protein [Lycopersicon esculentum]
  misc_feature (1)..(132): NCBI GI NO: 11863723 NR Description: DnaJ like protein [Lycopersicon esculentum]
  misc_feature (1)..(361): NCBI GI NO: 15235310 NR Description: heat-shock protein; protein id: At4g28480
  misc_feature (146)..(360): NCBI GI NO: 15240968 NR Description: heat shock protein 40-like; protein id:At5g01390
  misc_feature (1)..(141): NCBI GI NO: 15240968 NR Description: heat shock protein 40-like; protein id:At5g01390
  misc_feature (1)..(361): NCBI GI NO: 34904486 NR Description: putative heat shock protein 40
  misc_feature (1)..(361): NCBI GI NO: 21593202 NR Description: putative heat-shock protein [Arabidopsis thaliana]
  misc_feature (1)..(361): NCBI GI NO: 15218515 NR Description: putative heat-shock protein; protein id:At1g10350
  misc_feature (318)..(318): Xaa is any aa, unknown or other
MGLDYYKILGVDKGATDDDLKKAYRKLAMKWHPDKNPNNKKEAENKFKQISEAYEVLSDPQKRAVYDQYGEEGLKGQVPPPGAGGAGPGGATFFSTGGDGPTVFRFNPRNAEDIFAEFFGGSSPFGGMGGGGMGGSGMGGGMPGMRSGGTRFSSSIFGDDIFGSAFRSGPDGHGMHAGGRAVKAPAIERKLPCSLEELYKGTTKKMKISREISDASGKTIPVEEILTIDVKPGWKKGTKITFPEKGNETPNTIPADLVFIIDEKPHPVFTRDGNDLVVTQKIPLAEALTGYTAHVTTLDGRSLTVPISSVIHPGYEEXVRGEGMPIPKDPSRKGNLRIKFDIKFPARLTADQKSGVKRLLGQ

SEQ ID NO: 34849 - protein, 334 aa, Zea mays subsp. mays
  peptide (1)..(334): Ceres Seq. ID no. 12425160
  misc_feature (210)..(331): Pfam Name: Pfam Description:  DnaJ C terminal region
  misc_feature (109)..(333): NCBI GI NO: 6179940 NR Description: DnaJ-like protein [Nicotiana tabacum]
  misc_feature (1)..(112): NCBI GI NO: 6179940 NR Description: DnaJ-like protein [Nicotiana tabacum]
  misc_feature (109)..(333): NCBI GI NO: 11863723 NR Description: DnaJ like protein [Lycopersicon esculentum]
  misc_feature (1)..(104): NCBI GI NO: 11863723 NR Description: DnaJ like protein [Lycopersicon esculentum]
  misc_feature (1)..(333): NCBI GI NO: 15235310 NR Description: heat-shock protein; protein id: At4g28480
  misc_feature (118)..(332): NCBI GI NO: 15240968 NR Description: heat shock protein 40-like; protein id:At5g01390
  misc_feature (1)..(113): NCBI GI NO: 15240968 NR Description: heat shock protein 40-like; protein id:At5g01390
  misc_feature (1)..(333): NCBI GI NO: 34904486 NR Description: putative heat shock protein 40
  misc_feature (1)..(333): NCBI GI NO: 21593202 NR Description: putative heat-shock protein [Arabidopsis thaliana]
  misc_feature (1)..(333): NCBI GI NO: 15218515 NR Description: putative heat-shock protein; protein id:At1g10350
  misc_feature (290)..(290): Xaa is any aa, unknown or other
MKWHPDKNPNNKKEAENKFKQISEAYEVLSDPQKRAVYDQYGEEGLKGQVPPPGAGGAGPGGATFFSTGGDGPTVFRFNPRNAEDIFAEFFGGSSPFGGMGGGGMGGSGMGGGMPGMRSGGTRFSSSIFGDDIFGSAFRSGPDGHGMHAGGRAVKAPAIERKLPCSLEELYKGTTKKMKISREISDASGKTIPVEEILTIDVKPGWKKGTKITFPEKGNETPNTIPADLVFIIDEKPHPVFTRDGNDLVVTQKIPLAEALTGYTAHVTTLDGRSLTVPISSVIHPGYEEXVRGEGMPIPKDPSRKGNLRIKFDIKFPARLTADQKSGVKRLLGQ

SEQ ID NO: 34850 - DNA, 625 bp, Zea mays subsp. mays
  misc_feature (1)..(625): Ceres Seq. ID no. 12355240
gcagtgcaaagcgtcaacgcaaacagaccaagatccagaagcaagaaagtgtttatagcctagccggtgcgcgcgcgagagggatagccgattatcatcaagctctgagctagcagagaagatgagcgcatcgtcgtccatgaccaagaaggcgtcgtcgttcgtggtggcggcgagcatgagcgcggtggaggcgctcaaggaccaggcggggctgtgccggtgggactacgcgctccgctccctctacaaccgcgcggccgccgccaataaggtcgtcgccggccgcgccgtcccgttgtcgttgtcgtcgtcccaaaccgcgggtggcagtggcagcgccgcggccgccggtagggccgccaggcccaggcgatcggaggaggagaagatgcacaaggcgtaccacctcgtctgctggggccctaactaattgttaggggcattctcttattaattactcctttatacacgctgtccgattcctccacttcttgttcgtacacatacagagatgtatctgcaaattttgtatgtgtaatccgtcctctggtggtttatgccacgagaattgcttattattgttgggtgataaacaaatggaaatgagaaattttgtgatgtg

SEQ ID NO: 34851 - protein, 103 aa, Zea mays subsp. mays
  peptide (1)..(103): Ceres Seq. ID no. 12355241
  misc_feature (3)..(103): NCBI GI NO: 38344798 NR Description: OSJNBa0043L09.18
  misc_feature (12)..(103): NCBI GI NO: 38344799 NR Description: OSJNBa0043L09.19
  misc_feature (12)..(103): NCBI GI NO: 38344803 NR Description: OSJNBa0043L09.23
  misc_feature (2)..(103): NCBI GI NO: 38636812 NR Description: unknown protein
  misc_feature (12)..(103): NCBI GI NO: 38344804 NR Description: OSJNBa0043L09.24
  misc_feature (7)..(103): NCBI GI NO: 15234987 NR Description: probable wound-induced protein
  misc_feature (12)..(103): NCBI GI NO: 38344805 NR Description: OSJNBa0043L09.25
  misc_feature (14)..(103): NCBI GI NO: 82114 NR Description: wound-induced protein - tomato (fragment)
  misc_feature (7)..(103): NCBI GI NO: 30681389 NR Description: wound-induced protein, putative
MSASSSMTKKASSFVVAASMSAVEALKDQAGLCRWDYALRSLYNRAAAANKVVAGRAVPLSLSSSQTAGGSGSAAAAGRAARPRRSEEEKMHKAYHLVCWGPN

SEQ ID NO: 34852 - protein, 97 aa, Zea mays subsp. mays
  peptide (1)..(97): Ceres Seq. ID no. 12355242
  misc_feature (1)..(97): NCBI GI NO: 38344798 NR Description: OSJNBa0043L09.18
  misc_feature (6)..(97): NCBI GI NO: 38344799 NR Description: OSJNBa0043L09.19
  misc_feature (6)..(97): NCBI GI NO: 38344803 NR Description: OSJNBa0043L09.23
  misc_feature (1)..(97): NCBI GI NO: 38636812 NR Description: unknown protein
  misc_feature (6)..(97): NCBI GI NO: 38344804 NR Description: OSJNBa0043L09.24
  misc_feature (1)..(97): NCBI GI NO: 15234987 NR Description: probable wound-induced protein
  misc_feature (6)..(97): NCBI GI NO: 38344805 NR Description: OSJNBa0043L09.25
  misc_feature (8)..(97): NCBI GI NO: 82114 NR Description: wound-induced protein - tomato (fragment)
  misc_feature (1)..(97): NCBI GI NO: 30681389 NR Description: wound-induced protein, putative
MTKKASSFVVAASMSAVEALKDQAGLCRWDYALRSLYNRAAAANKVVAGRAVPLSLSSSQTAGGSGSAAAAGRAARPRRSEEEKMHKAYHLVCWGPN

SEQ ID NO: 34853 - protein, 84 aa, Zea mays subsp. mays
  peptide (1)..(84): Ceres Seq. ID no. 12355243
  misc_feature (1)..(84): NCBI GI NO: 38344798 NR Description: OSJNBa0043L09.18
  misc_feature (1)..(84): NCBI GI NO: 38344799 NR Description: OSJNBa0043L09.19
  misc_feature (1)..(84): NCBI GI NO: 38344803 NR Description: OSJNBa0043L09.23
  misc_feature (1)..(84): NCBI GI NO: 38636812 NR Description: unknown protein
  misc_feature (1)..(84): NCBI GI NO: 38344804 NR Description: OSJNBa0043L09.24
  misc_feature (1)..(84): NCBI GI NO: 15234987 NR Description: probable wound-induced protein
  misc_feature (1)..(84): NCBI GI NO: 38344805 NR Description: OSJNBa0043L09.25
  misc_feature (1)..(84): NCBI GI NO: 82114 NR Description: wound-induced protein - tomato (fragment)
  misc_feature (1)..(84): NCBI GI NO: 30681389 NR Description: wound-induced protein, putative
MSAVEALKDQAGLCRWDYALRSLYNRAAAANKVVAGRAVPLSLSSSQTAGGSGSAAAAGRAARPRRSEEEKMHKAYHLVCWGPN

SEQ ID NO: 34854 - DNA, 1999 bp, Zea mays subsp. mays
  misc_feature (1)..(1999): Ceres Seq. ID no. 12345205
gagacgaaaacgagaagatcccatccactaccgcccggtcgccgtcctcccttcccgccgcgccgctccgcttgctcgccgcagatcgccctcaggattttattccgccctccgtctccgggctcgcttggatcgagatgggcgtctgcgtgtccaaggccgcctcctcctgctgctgctgctgctgctgccgcgagccgcacaacggggttactaacgacaggactgatgctgtaacggatgacgaggaggcatacgccctgcctgcgttccaggagtttaccttcgagcagttgcggctagctacatcagggtttgcggtggagaacatcgtgtctgagcagggtgagaaggctcccaatgtggtatacaaggggaagctccatgcccagcgccgcgtcgccgtcaagcgcttcaaccgctctgcctggcccgacccgcgccagttcctggaagaagctagatcagttggcctgctccgaagcaaaaggttggcaaatttgcttggctgttgctgcgaaggtgatgaaaggttgcttgttgcagaatacatgcccaatgatacgctcgcgaaacatcttttccactgggagtcacaatcaatgaaatggaccatgagattaagggttgttctctgtcttgctgaggctttagaatattgcaccaacaggggccgtgctctctaccatgatctcaatgcctatagagctctgtttgatgatgattgtaaccctagactttcctgttttggcctcatgaagaacagtcgtgatggaaaaagttatagcaccaatttggcatttacgcctccagaatacatgaggactggacgtattactcctgaaagtgtcatacacagctttggaaccttactgattgatgttcttagtgggaaacatattcctcctagccatgcccttgacctgattcgggaccgaaacttcaatatgctcttagactcatgtttagagggtcaattttcaaatgaggaaggggcagaaatggtacgattagcttcaaggtgccttcactatgaaccccgtgaacgacctaatgtccgatcacttgtgcaagtattgactcctctacagagggatgttgagactccatcttatgtgctgatgggtgttccacgtggcggtgcatcttctatccaaccattgcatctttcccctcttgccgaagcttgttccagaaaggatctgacagcaatacatgaaattctagaaaagacaggctacaaggatgatgaggggactgcaaatgagctctcgtttcagatgtggacaaatcagatgcaagatacactgaactcaaaaaagaagggtgacaatgcttttcgacaaaaggattttactactgccattgattgctattcccagttcattgaagttggtacaatggtatctccaaccatttatgctcgacgctgcttatcatatctgatgaatgacatgccacaggaggcattgaatgatgcagtgcatgctctggtaatatctccgacatggtcaacagcattctatcttcaggcagcagcacttttatcacaaggcatggagaatgaagcccaagaagcactcagggatggttatagcctagagcaaagtagcagcggtggacattgagtgtgaacagatttgtagtcccccaaatgcacataatttcaggtgcttgtttgaagagagtattattgtctatggaagcagccatcggatgtacatatggaagaaagcgataacagaggctggctctgaaggagagggcaaagacatccgaggtgaataagtgcagtagacaggaaattaatggggtgaagaaggtgaaacatttttcttggtcctactgaaacaaaagaaggaaaacgtagggggaaaaaggttgctgatgtacatgtctatccttgttggtggtagcctggtaggtgcgtaaacctgtacagcaagcgtggtttttaccttgtctttgttcttcgtttcttatgcgttagctcccattg

SEQ ID NO: 34855 - protein, 541 aa, Zea mays subsp. mays
  peptide (1)..(541): Ceres Seq. ID no. 12345206
  misc_feature (46)..(541): NCBI GI NO: 32488705 NR Description: OSJNBa0088H09.6
  misc_feature (46)..(534): NCBI GI NO: 22327962 NR Description: protein kinase - like; protein id: At5g59010
  misc_feature (57)..(539): NCBI GI NO: 22328189 NR Description: hypothetical protein; protein id: At4g00710
  misc_feature (46)..(534): NCBI GI NO: 15237604 NR Description: protein kinase-like; protein id: At5g41260.1
  misc_feature (88)..(538): NCBI GI NO: 15232406 NR Description: protein kinase -like protein; protein id:At3g54030
  misc_feature (88)..(538): NCBI GI NO: 21553556 NR Description: protein kinase-like protein [Arabidopsis thaliana]
  misc_feature (149)..(362): NCBI GI NO: 6633851 NR Description: F2K11.13 [Arabidopsis thaliana]
  misc_feature (389)..(534): NCBI GI NO: 6633851 NR Description: F2K11.13 [Arabidopsis thaliana]
  misc_feature (83)..(150): NCBI GI NO: 6633851 NR Description: F2K11.13 [Arabidopsis thaliana]
  misc_feature (44)..(539): NCBI GI NO: 7486564 NR Description: hypothetical protein F6N23
DENEKIPSTTARSPSSLPAAPLRLLAADRPQDFIPPSVSGLAWIEMGVCVSKAASSCCCCCCCREPHNGVTNDRTDAVTDDEEAYALPAFQEFTFEQLRLATSGFAVENIVSEQGEKAPNVVYKGKLHAQRRVAVKRFNRSAWPDPRQFLEEARSVGLLRSKRLANLLGCCCEGDERLLVAEYMPNDTLAKHLFHWESQSMKWTMRLRVVLCLAEALEYCTNRGRALYHDLNAYRALFDDDCNPRLSCFGLMKNSRDGKSYSTNLAFTPPEYMRTGRITPESVIHSFGTLLIDVLSGKHIPPSHALDLIRDRNFNMLLDSCLEGQFSNEEGAEMVRLASRCLHYEPRERPNVRSLVQVLTPLQRDVETPSYVLMGVPRGGASSIQPLHLSPLAEACSRKDLTAIHEILEKTGYKDDEGTANELSFQMWTNQMQDTLNSKKKGDNAFRQKDFTTAIDCYSQFIEVGTMVSPTIYARRCLSYLMNDMPQEALNDAVHALVISPTWSTAFYLQAAALLSQGMENEAQEALRDGYSLEQSSSGGH

SEQ ID NO: 34856 - protein, 496 aa, Zea mays subsp. mays
  peptide (1)..(496): Ceres Seq. ID no. 12345207
  misc_feature (1)..(496): NCBI GI NO: 32488705 NR Description: OSJNBa0088H09.6
  misc_feature (1)..(489): NCBI GI NO: 22327962 NR Description: protein kinase - like; protein id: At5g59010
  misc_feature (12)..(494): NCBI GI NO: 22328189 NR Description: hypothetical protein; protein id: At4g00710
  misc_feature (1)..(489): NCBI GI NO: 15237604 NR Description: protein kinase-like; protein id: At5g41260.1
  misc_feature (43)..(493): NCBI GI NO: 15232406 NR Description: protein kinase -like protein; protein id:At3g54030
  misc_feature (43)..(493): NCBI GI NO: 21553556 NR Description: protein kinase-like protein [Arabidopsis thaliana]
  misc_feature (104)..(317): NCBI GI NO: 6633851 NR Description: F2K11.13 [Arabidopsis thaliana]
  misc_feature (344)..(489): NCBI GI NO: 6633851 NR Description: F2K11.13 [Arabidopsis thaliana]
  misc_feature (38)..(105): NCBI GI NO: 6633851 NR Description: F2K11.13 [Arabidopsis thaliana]
  misc_feature (1)..(494): NCBI GI NO: 7486564 NR Description: hypothetical protein F6N23
MGVCVSKAASSCCCCCCCREPHNGVTNDRTDAVTDDEEAYALPAFQEFTFEQLRLATSGFAVENIVSEQGEKAPNVVYKGKLHAQRRVAVKRFNRSAWPDPRQFLEEARSVGLLRSKRLANLLGCCCEGDERLLVAEYMPNDTLAKHLFHWESQSMKWTMRLRVVLCLAEALEYCTNRGRALYHDLNAYRALFDDDCNPRLSCFGLMKNSRDGKSYSTNLAFTPPEYMRTGRITPESVIHSFGTLLIDVLSGKHIPPSHALDLIRDRNFNMLLDSCLEGQFSNEEGAEMVRLASRCLHYEPRERPNVRSLVQVLTPLQRDVETPSYVLMGVPRGGASSIQPLHLSPLAEACSRKDLTAIHEILEKTGYKDDEGTANELSFQMWTNQMQDTLNSKKKGDNAFRQKDFTTAIDCYSQFIEVGTMVSPTIYARRCLSYLMNDMPQEALNDAVHALVISPTWSTAFYLQAAALLSQGMENEAQEALRDGYSLEQSSSGGH

SEQ ID NO: 34857 - protein, 358 aa, Zea mays subsp. mays
  peptide (1)..(358): Ceres Seq. ID no. 12345208
  misc_feature (1)..(358): NCBI GI NO: 32488705 NR Description: OSJNBa0088H09.6
  misc_feature (1)..(351): NCBI GI NO: 22327962 NR Description: protein kinase - like; protein id: At5g59010
  misc_feature (1)..(356): NCBI GI NO: 22328189 NR Description: hypothetical protein; protein id: At4g00710
  misc_feature (1)..(351): NCBI GI NO: 15237604 NR Description: protein kinase-like; protein id: At5g41260.1
  misc_feature (1)..(355): NCBI GI NO: 15232406 NR Description: protein kinase -like protein; protein id:At3g54030
  misc_feature (1)..(355): NCBI GI NO: 21553556 NR Description: protein kinase-like protein [Arabidopsis thaliana]
  misc_feature (1)..(179): NCBI GI NO: 6633851 NR Description: F2K11.13 [Arabidopsis thaliana]
  misc_feature (206)..(351): NCBI GI NO: 6633851 NR Description: F2K11.13 [Arabidopsis thaliana]
  misc_feature (1)..(356): NCBI GI NO: 7486564 NR Description: hypothetical protein F6N23
  misc_feature (1)..(351): NCBI GI NO: 15223469 NR Description: protein kinase, putative; protein id: At1g01740.1
MPNDTLAKHLFHWESQSMKWTMRLRVVLCLAEALEYCTNRGRALYHDLNAYRALFDDDCNPRLSCFGLMKNSRDGKSYSTNLAFTPPEYMRTGRITPESVIHSFGTLLIDVLSGKHIPPSHALDLIRDRNFNMLLDSCLEGQFSNEEGAEMVRLASRCLHYEPRERPNVRSLVQVLTPLQRDVETPSYVLMGVPRGGASSIQPLHLSPLAEACSRKDLTAIHEILEKTGYKDDEGTANELSFQMWTNQMQDTLNSKKKGDNAFRQKDFTTAIDCYSQFIEVGTMVSPTIYARRCLSYLMNDMPQEALNDAVHALVISPTWSTAFYLQAAALLSQGMENEAQEALRDGYSLEQSSSGGH

SEQ ID NO: 34858 - DNA, 2095 bp, Zea mays subsp. mays
  misc_feature (1)..(2095): Ceres Seq. ID no. 12351850
aacacgaggagagactgcggcagcggagtgcagagagcggacgcaacgcaacaccgcccactctctatcactgacgatcgaagcgaggagcgcactgaagccagccgccgatgagtcgcctcctctcgcggcagcaccttgccgccgtccgtcgatctgcaccctttgcgtgcgtgtccaggtggctgcacacgccgtcattcgcgacggtgtctccgcaagaggtttcaggttccagcccagcggaagtgcagaattttgtgcagggcagctggacagcatctgctaactggaactggatagtcgatcccctgaacggtgataaattcatcaaagttgctgaggttcagggaacagaaataaagccattcgtggagagtttatctaaatgcccaaagcatggacttcacaacccacttaaagctccagagaggtacctcatgtatggagatatatctgcaaaagctgcgcatatgctgggccaacctgcagtcttagatttctttgctaaacttatccagagggtatctcccaagagctaccaacaagctcttgcagaagttcaagtttctcaaaagtttttggaaaacttttgtggagaccaggtacgctttctggcaaggtcatttgctgtaccaggtaaccatcttggacaaagaagtaatggctaccgttggccatatggcccagttgcaattatcacaccattcaattttccgttggagatccccttactacaattgatgggagcactatacatgggaaataaaccagtactcaaggttgacagcaaggttagcattgtgatggaacaaatgattaggttgcttcatgattgtggattgccagcagaggatatggatttcataaattctgatggtgccgtaatgaacaagcttctgttagaggctaatccgaaaatgacccttttcactgggagttcacgggtagcagagaaattggctgctgatttgaaaggccgagttaaattggaggatgctggttttgattggaaaattcttggtccagatgttcaagaggttgattatgttgcatgggtttgcgatcaggatgcttatgcttgtagcggtcagaaatgctctgctcaatctgttctattcatgcacaagaattggtcttctagtggtctgcttgagaaaatgaagaaactttctgaaagaaggaagcttgaagatttaacaattggtccagtccttacagttactacagaagccatgatagagcacatgaacaaccttctcaaaataagaggatcgaaggttctgtttggtggtgaaccgttagggaatcactcaattcccaaaatttatggtgccatgaagcctactgctgtatttgttcctctagaagaaattctaaaaagtgggaacttcgagcttgtgacaaaggagatatttggtccattccaggtagtcacagaatactctgaggatcagcttgagttggtcttagaagcctgcgaaaggatgaatgcgcatctgacagctgcagttgtctcaaacgacccgctattcctgcaggatgtacttgggagatccgttaacgggacaacctacgccggaattcgagcgaggaccacgggcgctccacagaaccactggtttggcccggccggtgatccgcgaggcgcagggatcgggactccggaagccatcaaacttgtctggtcctgccacagggaagtcatatatgacgtcgggcccgtgcccgagagctgggcgcttccttccgcgacctgattagctagacgaggatagactattccatgtcatcacgaggaataaaaggggaagataagcgaagccagcaggactggagcgaccgaccgagagcgagtggctgcatgcctaggcattcattctctgcacgcaactgcattttcaaccctggagaaaacataataaatgttcgttcccctgtacttgagatacatggtacttggaccggaatgtcggactagctcatgagcggacaagtcgtctgttcgcagctgcactcggttatcttcttaggacttgtttgttagattatatattataataaattttatattaacgcttagttcaaaatttgt

SEQ ID NO: 34859 - protein, 549 aa, Zea mays subsp. mays
  peptide (1)..(549): Ceres Seq. ID no. 12351851
  misc_feature (1)..(549): NCBI GI NO: 18449341 NR Description: putative aldehyde dehydrogenase MIS1 [Zea mays]
  misc_feature (1)..(549): NCBI GI NO: 18449343 NR Description: putative aldehyde dehydrogenase WIS1
  misc_feature (1)..(549): NCBI GI NO: 18449337 NR Description: putative aldehyde dehydrogenase BIS1
  misc_feature (1)..(549): NCBI GI NO: 34921534 NR Description: Probable aldehyde dehydrogenase
  misc_feature (22)..(549): NCBI GI NO: 15383744 NR Description: delta-1-pyrroline-5- carboxylate dehydrogenaseprecursor
  misc_feature (22)..(549): NCBI GI NO: 18424599 NR Description: dehydrogenase; protein id: At5g62530
  misc_feature (22)..(549): NCBI GI NO: 10178084 NR Description: dehydrogenase [Arabidopsis thaliana]
  misc_feature (47)..(517): NCBI GI NO: 23098316 NR Description: aldehyde dehydrogenase
  misc_feature (42)..(521): NCBI GI NO: 37523417 NR Description: aldehyde dehydrogenase [Gloeobacter violaceus]
  misc_feature (42)..(521): NCBI GI NO: 23128328 NR Description: hypothetical protein [Nostoc punctiforme]
MSRLLSRQHLAAVRRSAPFACVSRWLHTPSFATVSPQEVSGSSPAEVQNFVQGSWTASANWNWIVDPLNGDKFIKVAEVQGTEIKPFVESLSKCPKHGLHNPLKAPERYLMYGDISAKAAHMLGQPAVLDFFAKLIQRVSPKSYQQALAEVQVSQKFLENFCGDQVRFLARSFAVPGNHLGQRSNGYRWPYGPVAIITPFNFPLEIPLLQLMGALYMGNKPVLKVDSKVSIVMEQMIRLLHDCGLPAEDMDFINSDGAVMNKLLLEANPKMTLFTGSSRVAEKLAADLKGRVKLEDAGFDWKILGPDVQEVDYVAWVCDQDAYACSGQKCSAQSVLFMHKNWSSSGLLEKMKKLSERRKLEDLTIGPVLTVTTEAMIEHMNNLLKIRGSKVLFGGEPLGNHSIPKIYGAMKPTAVFVPLEEILKSGNFELVTKEIFGPFQVVTEYSEDQLELVLEACERMNAHLTAAVVSNDPLFLQDVLGRSVNGTTYAGIRARTTGAPQNHWFGPAGDPRGAGIGTPEAIKLVWSCHREVIYDVGPVPESWALPSAT

SEQ ID NO: 34860 - protein, 439 aa, Zea mays subsp. mays
  peptide (1)..(439): Ceres Seq. ID no. 12351852
  misc_feature (1)..(439): NCBI GI NO: 18449341 NR Description: putative aldehyde dehydrogenase MIS1 [Zea mays]
  misc_feature (1)..(439): NCBI GI NO: 18449343 NR Description: putative aldehyde dehydrogenase WIS1
  misc_feature (1)..(439): NCBI GI NO: 18449337 NR Description: putative aldehyde dehydrogenase BIS1
  misc_feature (1)..(439): NCBI GI NO: 34921534 NR Description: Probable aldehyde dehydrogenase
  misc_feature (1)..(439): NCBI GI NO: 15383744 NR Description: delta-1-pyrroline-5- carboxylate dehydrogenaseprecursor
  misc_feature (1)..(439): NCBI GI NO: 18424599 NR Description: dehydrogenase; protein id: At5g62530
  misc_feature (1)..(439): NCBI GI NO: 10178084 NR Description: dehydrogenase [Arabidopsis thaliana]
  misc_feature (1)..(407): NCBI GI NO: 23098316 NR Description: aldehyde dehydrogenase
  misc_feature (1)..(411): NCBI GI NO: 37523417 NR Description: aldehyde dehydrogenase [Gloeobacter violaceus]
  misc_feature (1)..(411): NCBI GI NO: 23128328 NR Description: hypothetical protein [Nostoc punctiforme]
MYGDISAKAAHMLGQPAVLDFFAKLIQRVSPKSYQQALAEVQVSQKFLENFCGDQVRFLARSFAVPGNHLGQRSNGYRWPYGPVAIITPFNFPLEIPLLQLMGALYMGNKPVLKVDSKVSIVMEQMIRLLHDCGLPAEDMDFINSDGAVMNKLLLEANPKMTLFTGSSRVAEKLAADLKGRVKLEDAGFDWKILGPDVQEVDYVAWVCDQDAYACSGQKCSAQSVLFMHKNWSSSGLLEKMKKLSERRKLEDLTIGPVLTVTTEAMIEHMNNLLKIRGSKVLFGGEPLGNHSIPKIYGAMKPTAVFVPLEEILKSGNFELVTKEIFGPFQVVTEYSEDQLELVLEACERMNAHLTAAVVSNDPLFLQDVLGRSVNGTTYAGIRARTTGAPQNHWFGPAGDPRGAGIGTPEAIKLVWSCHREVIYDVGPVPESWALPSAT

SEQ ID NO: 34861 - protein, 428 aa, Zea mays subsp. mays
  peptide (1)..(428): Ceres Seq. ID no. 12351853
  misc_feature (1)..(428): NCBI GI NO: 18449341 NR Description: putative aldehyde dehydrogenase MIS1 [Zea mays]
  misc_feature (1)..(428): NCBI GI NO: 18449343 NR Description: putative aldehyde dehydrogenase WIS1
  misc_feature (1)..(428): NCBI GI NO: 18449337 NR Description: putative aldehyde dehydrogenase BIS1
  misc_feature (1)..(428): NCBI GI NO: 34921534 NR Description: Probable aldehyde dehydrogenase
  misc_feature (1)..(428): NCBI GI NO: 15383744 NR Description: delta-1-pyrroline-5- carboxylate dehydrogenaseprecursor
  misc_feature (1)..(428): NCBI GI NO: 18424599 NR Description: dehydrogenase; protein id: At5g62530
  misc_feature (1)..(428): NCBI GI NO: 10178084 NR Description: dehydrogenase [Arabidopsis thaliana]
  misc_feature (1)..(396): NCBI GI NO: 23098316 NR Description: aldehyde dehydrogenase
  misc_feature (1)..(400): NCBI GI NO: 37523417 NR Description: aldehyde dehydrogenase [Gloeobacter violaceus]
  misc_feature (1)..(400): NCBI GI NO: 23128328 NR Description: hypothetical protein [Nostoc punctiforme]
MLGQPAVLDFFAKLIQRVSPKSYQQALAEVQVSQKFLENFCGDQVRFLARSFAVPGNHLGQRSNGYRWPYGPVAIITPFNFPLEIPLLQLMGALYMGNKPVLKVDSKVSIVMEQMIRLLHDCGLPAEDMDFINSDGAVMNKLLLEANPKMTLFTGSSRVAEKLAADLKGRVKLEDAGFDWKILGPDVQEVDYVAWVCDQDAYACSGQKCSAQSVLFMHKNWSSSGLLEKMKKLSERRKLEDLTIGPVLTVTTEAMIEHMNNLLKIRGSKVLFGGEPLGNHSIPKIYGAMKPTAVFVPLEEILKSGNFELVTKEIFGPFQVVTEYSEDQLELVLEACERMNAHLTAAVVSNDPLFLQDVLGRSVNGTTYAGIRARTTGAPQNHWFGPAGDPRGAGIGTPEAIKLVWSCHREVIYDVGPVPESWALPSAT

SEQ ID NO: 34862 - DNA, 1481 bp, Zea mays subsp. mays
  misc_feature (1)..(1481): Ceres Seq. ID no. 12411397
accaccacccaccagtccaccaccactgctcgcactcactccaccgctgcccacttcttgtttgtattgtatccagactccagaggaagccgagagggccaatgaggcaaggcatgagctccccttccgccgccgcggcgctcgtgctcctcctggccctgctcgccggaggccagtgccgagaggcccagctcgacgccgcggacgccggcaccggcacggagaactacaccgccagcgacgccgccgtgtactggggcccctggcagagggcccgggccacctggtacggccagcccaacggcgccggccccgacgacaacggtggcgcgtgcggattcaagcacaccaaccagtaccccttcatgtccatgggctcctgcggcaaccagccattgttcaaggacggcaagggctgcggctcctgctacaagattcggtgcaggaaggacccgtcctgctccgggcggacggagacggtgatcatcaccgacatgaactactacccggtgtccaagtaccacttcgacctcagcggcactgcgttcggcaggctggccaagcccggcctcaacgacaagctccgccactccggcatcatcgacatcgagttcaccagggtgccgtgcgagttcccgggcctgaagatcgggttccacgtggaggagtactcgaaccccgtctacttcgcggtgctggtggagtacgaggacggcgacggcgacgtggtgcaggtggacctgatggagtccaagacggcgcgcggcccgccgacggggcggtggacgccgatgcgcgagtcctggggctccgtctggcgcatggacaccaaccaccgcatgcagccgcccttctccatccgcatccgcaacgagtccggcaagacgctcgtcgccaacaacgtcatcccggccaactggcgccccaacaccttctaccgctccttcgtccagtacagctaaccgatcgggatccgtgccctgcccgcaattggagctggctggctggggcgctactcggctcggtcaccatcgtctacagtactatactatgctctactaccactagactgctgctgttactactagtctactaccaccaagtacggcggaacggaacagctagtcgtcgtcggcggccttgggaggggaggtgtctccggtcaccgtgccgttgcagttgtatcgtgatcatggtcctgggagttgttgcatccggggcgcgctttttaggtcaggcgtcgtgtgcgatgtttgtggggtcaggctggcatgtcatgccgtgcgtgaccctgattgcgagccggcaagcaagaagacaaaaaaactaaagccgtgtgggaaaatggaggaggcaggcgtacaagctacgctctcccgcccactgttgcttttataatttatcatcatcatcatcttcattccgatcggtgattaatcgaaaagtatattgtaatgtataaacgccattttcctttcgtc

SEQ ID NO: 34863 - protein, 442 aa, Zea mays subsp. mays
  peptide (1)..(442): Ceres Seq. ID no. 12411398
PPPTSPPPLLALTPPLPTSCLYCIQTPEEAERANEARHELPFRRRGARAPPGPARRRPVPRGPARRRGRRHRHGELHRQRRRRVLGPLAEGPGHLVRPAQRRRPRRQRWRVRIQAHQPVPLHVHGLLRQPAIVQGRQGLRLLLQDSVQEGPVLLRADGDGDHHRHELLPGVQVPLRPQRHCVRQAGQARPQRQAPPLRHHRHRVHQGAVRVPGPEDRVPRGGVLEPRLLRGAGGVRGRRRRRGAGGPDGVQDGARPADGAVDADARVLGLRLAHGHQPPHAAALLHPHPQRVRQDARRQQRHPGQLAPQHLLPLLRPVQLTDRDPCPARNWSWLAGALLGSVTIVYSTILCSTTTRLLLLLLVYYHQVRRNGTASRRRRPWEGRCLRSPCRCSCIVIMVLGVVASGARFLGQASCAMFVGSGWHVMPCVTLIASRQARRQKN

SEQ ID NO: 34864 - protein, 319 aa, Zea mays subsp. mays
  peptide (1)..(319): Ceres Seq. ID no. 12411399
  misc_feature (216)..(303): Pfam Name: Pfam Description:  Pollen allergen
  misc_feature (34)..(319): NCBI GI NO: 14193775 NR Description: beta-expansin 8 [Zea mays]
  misc_feature (38)..(319): NCBI GI NO: 37536762 NR Description: beta-expansin EXPB4
  misc_feature (38)..(319): NCBI GI NO: 8118425 NR Description: beta-expansin [Oryza sativa]
  misc_feature (34)..(319): NCBI GI NO: 37536756 NR Description: beta-expansin EXPB6
  misc_feature (69)..(319): NCBI GI NO: 14330330 NR Description: beta expansin B3 [Festuca pratensis]
  misc_feature (69)..(319): NCBI GI NO: 37536760 NR Description: beta-expansin EXPB3
  misc_feature (44)..(319): NCBI GI NO: 14330328 NR Description: beta expansin B2 [Festuca pratensis]
  misc_feature (49)..(319): NCBI GI NO: 11346546 NR Description: beta-expansin [Oryza sativa]
  misc_feature (75)..(318): NCBI GI NO: 14193773 NR Description: beta-expansin 7 [Zea mays]
  misc_feature (70)..(318): NCBI GI NO: 8118432 NR Description: beta-expansin [Oryza sativa]
HHPPVHHHCSHSLHRCPLLVCIVSRLQRKPRGPMRQGMSSPSAAAALVLLLALLAGGQCREAQLDAADAGTGTENYTASDAAVYWGPWQRARATWYGQPNGAGPDDNGGACGFKHTNQYPFMSMGSCGNQPLFKDGKGCGSCYKIRCRKDPSCSGRTETVIITDMNYYPVSKYHFDLSGTAFGRLAKPGLNDKLRHSGIIDIEFTRVPCEFPGLKIGFHVEEYSNPVYFAVLVEYEDGDGDVVQVDLMESKTARGPPTGRWTPMRESWGSVWRMDTNHRMQPPFSIRIRNESGKTLVANNVIPANWRPNTFYRSFVQYS

SEQ ID NO: 34865 - protein, 286 aa, Zea mays subsp. mays
  peptide (1)..(286): Ceres Seq. ID no. 12411400
  misc_feature (183)..(270): Pfam Name: Pfam Description:  Pollen allergen
  misc_feature (1)..(286): NCBI GI NO: 14193775 NR Description: beta-expansin 8 [Zea mays]
  misc_feature (5)..(286): NCBI GI NO: 37536762 NR Description: beta-expansin EXPB4
  misc_feature (5)..(286): NCBI GI NO: 8118425 NR Description: beta-expansin [Oryza sativa]
  misc_feature (1)..(286): NCBI GI NO: 37536756 NR Description: beta-expansin EXPB6
  misc_feature (36)..(286): NCBI GI NO: 14330330 NR Description: beta expansin B3 [Festuca pratensis]
  misc_feature (36)..(286): NCBI GI NO: 37536760 NR Description: beta-expansin EXPB3
  misc_feature (11)..(286): NCBI GI NO: 14330328 NR Description: beta expansin B2 [Festuca pratensis]
  misc_feature (16)..(286): NCBI GI NO: 11346546 NR Description: beta-expansin [Oryza sativa]
  misc_feature (42)..(285): NCBI GI NO: 14193773 NR Description: beta-expansin 7 [Zea mays]
  misc_feature (37)..(285): NCBI GI NO: 8118432 NR Description: beta-expansin [Oryza sativa]
MRQGMSSPSAAAALVLLLALLAGGQCREAQLDAADAGTGTENYTASDAAVYWGPWQRARATWYGQPNGAGPDDNGGACGFKHTNQYPFMSMGSCGNQPLFKDGKGCGSCYKIRCRKDPSCSGRTETVIITDMNYYPVSKYHFDLSGTAFGRLAKPGLNDKLRHSGIIDIEFTRVPCEFPGLKIGFHVEEYSNPVYFAVLVEYEDGDGDVVQVDLMESKTARGPPTGRWTPMRESWGSVWRMDTNHRMQPPFSIRIRNESGKTLVANNVIPANWRPNTFYRSFVQYS

SEQ ID NO: 34866 - DNA, 2023 bp, Zea mays subsp. mays
  misc_feature (1)..(2023): Ceres Seq. ID no. 12411393
agaaggaagccaacagatttcagtatttcacggtcaccagtccctcctacccgcttcccataaaatcttctgatctgtaacgcattcgtcgtcgcccacatccgcttcgctctcttgctcttttagtcccatctcccatcccacctggaggcgaatttcgtctggggaaaaagtcggcggccatggcggggcgagactccctcccggagggctctctcttcctcggattggacagctccactcaatcactgaaagctacggtgctcaataatgagctcacaatagtagcttctgaaattgttaattttgactctgaattgccacactacaaaactgaaggtggggtgtacagagacccagcagatgataggcacattttttcaccaaccattatgtgggtggaagctttggaggtgctgcttgagaagctaaaaccaaagatcaacttcggtaaggtagtggctgtttctgggagtgggcagcaacatggcagtgtttattggaagaagggcagccatgctgtgttatcctccttggatgctagtaaaagcttgttatcgcaactcaaggatgcattttctacaatgaactcaccattatggatggatagtagcacaacaaagcaatgcagagaaatagagaatgcagttggaggtgcactggagttagcaaaactgacaggatctcgtgcgtatgaaagattcactggcccccagataaggaagatctatcagacagagcctgatgtttatgaagataccgagagaatatctttggtgagctcgttcatggcatctatccttgttggaagctatgcaagtattgatgaaactgatggtgcggggatgaacttgatggatatcaagcaaaggacctggtcaaagtctgctttagaggcaactgctcctggacttgaagcaaagcttggaaatctggcaccagcatattcagctgctggccgaattgctccttattttgtagaaaggtttcagtttgataagaactgtttggtcattcagtggtctggagataatcctaatagccttgcaggtttaactctgaatacccctggtgatcttgccattagccttggtactagtgatacagtattcgggataacaacagaagctaaaccaagccttgaaggacatgttttccccaatcctgttgagcctaatggttatatggtcatgctatgctacaaaaatggctccttgaccagagaagatgtacgaaatcgctgtgcagacaaatcatgggacgtttttaacagctatctggagaaaacgccccctctaaatggtgggaagttaggattctactacaaagaccatgaaatcctccctccacttccagtgggtttccatcggtacactgttgaaaacctcaacgacgtctcatcagacgctctgttggagcgtgaagtggaagaatttgacccaccgtccgaggttcgtgccatcattgagggccaaatgctgtcgatgcgaggccacaccgagaggtttggcatgccgaaccctcccaaacggatcatagcaaccggcggggcatcctccaacgaaagcatcctcaagtcagtcgcgcagatcttcggctgccctgtcttcacagtccagagacctgattcggcatcgctgggcgcagcgctgagagctgcccacgggtggctatgcaacgcgcaaggtagcttcgtccccatctcgtgcctgtaccagggcaacctggagaagacctcccttggctcgaagctggcagtcccggccggcgacaaggagcaggaccgggagctcctccagaagtacaccctcctgatgaggaagagaatggagatcgagagacgcctggtggagaagatcgggcgatcgtaggaaaaaaaactcatgaagcgctgctgaggctggcaggaccgaataatttgtgaataaatatggattatctcgatggtaggaaacaaattcatggcaggaccgaacaattcgtgaataaaagtggattatcgtccattatgcagaactttctc

SEQ ID NO: 34867 - protein, 562 aa, Zea mays subsp. mays
  peptide (1)..(562): Ceres Seq. ID no. 12411394
  misc_feature (12)..(290): Pfam Name: Pfam Description:  FGGY family of carbohydrate kinases
  misc_feature (1)..(562): NCBI GI NO: 23237892 NR Description: putative xylulose kinase
  misc_feature (6)..(560): NCBI GI NO: 15240526 NR Description: xylulose kinase; protein id: At5g49650
  misc_feature (6)..(560): NCBI GI NO: 8809688 NR Description: xylulose kinase [Arabidopsis thaliana]
  misc_feature (14)..(508): NCBI GI NO: 18860918 NR Description: xylulokinase homolog; xylulokinase (H
  misc_feature (14)..(495): NCBI GI NO: 19343554 NR Description: Similar to xylulokinase homolog (H. influenzae)
  misc_feature (14)..(495): NCBI GI NO: 34866669 NR Description: similar to xylulokinase homolog; xylulokinase (H
  misc_feature (14)..(508): NCBI GI NO: 3298502 NR Description: xylulokinase [Homo sapiens]
  misc_feature (13)..(546): NCBI GI NO: 21356607 NR Description: CG3534-PA [Drosophila melanogaster]
  misc_feature (13)..(497): NCBI GI NO: 17554530 NR Description: Predicted CDS, carbohydrate kinase like
  misc_feature (9)..(494): NCBI GI NO: 39585048 NR Description: Hypothetical protein CBG06848
MAGRDSLPEGSLFLGLDSSTQSLKATVLNNELTIVASEIVNFDSELPHYKTEGGVYRDPADDRHIFSPTIMWVEALEVLLEKLKPKINFGKVVAVSGSGQQHGSVYWKKGSHAVLSSLDASKSLLSQLKDAFSTMNSPLWMDSSTTKQCREIENAVGGALELAKLTGSRAYERFTGPQIRKIYQTEPDVYEDTERISLVSSFMASILVGSYASIDETDGAGMNLMDIKQRTWSKSALEATAPGLEAKLGNLAPAYSAAGRIAPYFVERFQFDKNCLVIQWSGDNPNSLAGLTLNTPGDLAISLGTSDTVFGITTEAKPSLEGHVFPNPVEPNGYMVMLCYKNGSLTREDVRNRCADKSWDVFNSYLEKTPPLNGGKLGFYYKDHEILPPLPVGFHRYTVENLNDVSSDALLEREVEEFDPPSEVRAIIEGQMLSMRGHTERFGMPNPPKRIIATGGASSNESILKSVAQIFGCPVFTVQRPDSASLGAALRAAHGWLCNAQGSFVPISCLYQGNLEKTSLGSKLAVPAGDKEQDRELLQKYTLLMRKRMEIERRLVEKIGRS

SEQ ID NO: 34868 - protein, 492 aa, Zea mays subsp. mays
  peptide (1)..(492): Ceres Seq. ID no. 12411395
  misc_feature (1)..(220): Pfam Name: Pfam Description:  FGGY family of carbohydrate kinases
  misc_feature (1)..(492): NCBI GI NO: 23237892 NR Description: putative xylulose kinase
  misc_feature (1)..(490): NCBI GI NO: 15240526 NR Description: xylulose kinase; protein id: At5g49650
  misc_feature (1)..(490): NCBI GI NO: 8809688 NR Description: xylulose kinase [Arabidopsis thaliana]
  misc_feature (1)..(438): NCBI GI NO: 18860918 NR Description: xylulokinase homolog; xylulokinase (H
  misc_feature (1)..(425): NCBI GI NO: 19343554 NR Description: Similar to xylulokinase homolog (H. influenzae)
  misc_feature (1)..(425): NCBI GI NO: 34866669 NR Description: similar to xylulokinase homolog; xylulokinase (H
  misc_feature (1)..(438): NCBI GI NO: 3298502 NR Description: xylulokinase [Homo sapiens]
  misc_feature (1)..(476): NCBI GI NO: 21356607 NR Description: CG3534-PA [Drosophila melanogaster]
  misc_feature (1)..(427): NCBI GI NO: 17554530 NR Description: Predicted CDS, carbohydrate kinase like
  misc_feature (1)..(424): NCBI GI NO: 39585048 NR Description: Hypothetical protein CBG06848
MWVEALEVLLEKLKPKINFGKVVAVSGSGQQHGSVYWKKGSHAVLSSLDASKSLLSQLKDAFSTMNSPLWMDSSTTKQCREIENAVGGALELAKLTGSRAYERFTGPQIRKIYQTEPDVYEDTERISLVSSFMASILVGSYASIDETDGAGMNLMDIKQRTWSKSALEATAPGLEAKLGNLAPAYSAAGRIAPYFVERFQFDKNCLVIQWSGDNPNSLAGLTLNTPGDLAISLGTSDTVFGITTEAKPSLEGHVFPNPVEPNGYMVMLCYKNGSLTREDVRNRCADKSWDVFNSYLEKTPPLNGGKLGFYYKDHEILPPLPVGFHRYTVENLNDVSSDALLEREVEEFDPPSEVRAIIEGQMLSMRGHTERFGMPNPPKRIIATGGASSNESILKSVAQIFGCPVFTVQRPDSASLGAALRAAHGWLCNAQGSFVPISCLYQGNLEKTSLGSKLAVPAGDKEQDRELLQKYTLLMRKRMEIERRLVEKIGRS

SEQ ID NO: 34869 - protein, 428 aa, Zea mays subsp. mays
  peptide (1)..(428): Ceres Seq. ID no. 12411396
  misc_feature (1)..(156): Pfam Name: Pfam Description:  FGGY family of carbohydrate kinases
  misc_feature (1)..(428): NCBI GI NO: 23237892 NR Description: putative xylulose kinase
  misc_feature (1)..(426): NCBI GI NO: 15240526 NR Description: xylulose kinase; protein id: At5g49650
  misc_feature (1)..(426): NCBI GI NO: 8809688 NR Description: xylulose kinase [Arabidopsis thaliana]
  misc_feature (1)..(374): NCBI GI NO: 18860918 NR Description: xylulokinase homolog; xylulokinase (H
  misc_feature (1)..(361): NCBI GI NO: 19343554 NR Description: Similar to xylulokinase homolog (H. influenzae)
  misc_feature (1)..(361): NCBI GI NO: 34866669 NR Description: similar to xylulokinase homolog; xylulokinase (H
  misc_feature (1)..(374): NCBI GI NO: 3298502 NR Description: xylulokinase [Homo sapiens]
  misc_feature (1)..(412): NCBI GI NO: 21356607 NR Description: CG3534-PA [Drosophila melanogaster]
  misc_feature (1)..(363): NCBI GI NO: 17554530 NR Description: Predicted CDS, carbohydrate kinase like
  misc_feature (1)..(360): NCBI GI NO: 39585048 NR Description: Hypothetical protein CBG06848
MNSPLWMDSSTTKQCREIENAVGGALELAKLTGSRAYERFTGPQIRKIYQTEPDVYEDTERISLVSSFMASILVGSYASIDETDGAGMNLMDIKQRTWSKSALEATAPGLEAKLGNLAPAYSAAGRIAPYFVERFQFDKNCLVIQWSGDNPNSLAGLTLNTPGDLAISLGTSDTVFGITTEAKPSLEGHVFPNPVEPNGYMVMLCYKNGSLTREDVRNRCADKSWDVFNSYLEKTPPLNGGKLGFYYKDHEILPPLPVGFHRYTVENLNDVSSDALLEREVEEFDPPSEVRAIIEGQMLSMRGHTERFGMPNPPKRIIATGGASSNESILKSVAQIFGCPVFTVQRPDSASLGAALRAAHGWLCNAQGSFVPISCLYQGNLEKTSLGSKLAVPAGDKEQDRELLQKYTLLMRKRMEIERRLVEKIGRS

SEQ ID NO: 34870 - DNA, 1464 bp, Zea mays subsp. mays
  misc_feature (1)..(1464): Ceres Seq. ID no. 12408541
ctgccattaagactagctaactagcgtgaaagagctcctccgacgactactagctctcgcttgctccgacgacccctgccggccgcctctggtacaacgtacgagaggaagagagacgatcgatggccggcgccaccgtgaccgtggacgaggtgaggaagggccagcgcgcgaccggccccgccaccgtgctggccatcgggacggcgacgcccgccaactgcgtgtaccaggccgactacccggactactacttccggatcaccaagagcgaccacctcaccgacctcaaggagaagttcaagaggatgtgcgacaagtcgatgatccggaagcggtacatgcacctgacggaggagttcctgtcggagaacccgagcatgtgcgcgtacatggcgccgtcgctggacgcgcggcaggacgtggtggtgacggaggtgccgaagctggggaaggcggccggcgcagaaggcgatcaaggagtgggggcagcccaagtcgcggatcacgcacctggtgttctgcaccacgtcgggggtggacatgccgggcgccgactaccagctgaccaaggcgctggggctgcgcccgtccgtgaaccgcctgatgatgtaccagcaggggtgcttcgcgggcggcacggtgctgcgcgtggccaaggacctggcggagaacaaccgcggggcgagggtcctggtggtgtgctcggagatcacggccgtgacgttccgcgggccgtccgagtcgcacctggactcgctcgtggggcaggcgctgttcggcgacggcgcggcggccgtcgtggtgggcgccgacccggacgggcgggtcgagcgcccgctgttccagctcgtgtcggcggcgcagaccatcctgcccgactcggagggcgccatcgacggccacctccgcgaggtggggctgacgttccacctgctcaaggacgtgcccgggctcatctccaagaacatcgagcgcgcgctggaggacgcgttcgagccgctcggcatctccgactggaactccatcttctgggtggcgcaccccggcgggcccgccatcctggaccaggtggaggccagggtcgggctggacaaggccaggatgcgcgccacccgccacgtcctctccgagtacggcaacatgtccagcgcctgcgtgctcttcatcctggacgagatgcgcaagcgctccgccgaggacggccaggccaccaccggcgaggggctcgactggggcgtcctcttcggcttcggcccgggcctcaccgtcgagaccgtcgtgctccacagcgtccccatcaccaccggagcgcccaccgccgcctgagtcgtccatctatcctcgcgatcgctccagacatgaacgacccgacctacgaataatgtatctgcgtaattaattactatctgtcttgtgtcctagtagctgttttaaaacccttaattaattttattatgggcg

SEQ ID NO: 34871 - protein, 420 aa, Zea mays subsp. mays
  peptide (1)..(420): Ceres Seq. ID no. 12408542
  misc_feature (5)..(113): Pfam Name: Pfam Description:  Chalcone and stilbene synthases
  misc_feature (1)..(113): NCBI GI NO: 116380 NR Description: CHALCONE SYNTHASE C2
  misc_feature (1)..(116): NCBI GI NO: 116374 NR Description: CHALCONE SYNTHASE WHP1
  misc_feature (1)..(113): NCBI GI NO: 21263491 NR Description: Chalcone synthase 6
  misc_feature (1)..(113): NCBI GI NO: 21263494 NR Description: Chalcone synthase 3
  misc_feature (1)..(113): NCBI GI NO: 12229613 NR Description: Chalcone synthase 1
  misc_feature (1)..(113): NCBI GI NO: 21263495 NR Description: Chalcone synthase 2
  misc_feature (1)..(113): NCBI GI NO: 21263492 NR Description: Chalcone synthase 5
  misc_feature (1)..(113): NCBI GI NO: 21263493 NR Description: Chalcone synthase 4
  misc_feature (1)..(113): NCBI GI NO: 12229612 NR Description: Chalcone synthase 7
  misc_feature (4)..(113): NCBI GI NO: 13442780 NR Description: chalcone synthase
MAGATVTVDEVRKGQRATGPATVLAIGTATPANCVYQADYPDYYFRITKSDHLTDLKEKFKRMCDKSMIRKRYMHLTEEFLSENPSMCAYMAPSLDARQDVVVTEVPKLGKAAGAEGDQGVGAAQVADHAPGVLHHVGGGHAGRRLPADQGAGAAPVREPPDDVPAGVLRGRHGAARGQGPGGEQPRGEGPGGVLGDHGRDVPRAVRVAPGLARGAGAVRRRRGGRRGGRRPGRAGRAPAVPARVGGADHPARLGGRHRRPPPRGGADVPPAQGRARAHLQEHRARAGGRVRAARHLRLELHLLGGAPRRARHPGPGGGQGRAGQGQDARHPPRPLRVRQHVQRLRALHPGRDAQALRRGRPGHHRRGARLGRPLRLRPGPHRRDRRAPQRPHHHRSAHRRLSRPSILAIAPDMNDPTYE

SEQ ID NO: 34872 - protein, 358 aa, Zea mays subsp. mays
  peptide (1)..(358): Ceres Seq. ID no. 12408543
  misc_feature (1)..(51): Pfam Name: Pfam Description:  Chalcone and stilbene synthases
  misc_feature (1)..(51): NCBI GI NO: 116380 NR Description: CHALCONE SYNTHASE C2
  misc_feature (1)..(54): NCBI GI NO: 116374 NR Description: CHALCONE SYNTHASE WHP1
  misc_feature (1)..(51): NCBI GI NO: 21263491 NR Description: Chalcone synthase 6
  misc_feature (1)..(51): NCBI GI NO: 21263494 NR Description: Chalcone synthase 3
  misc_feature (1)..(51): NCBI GI NO: 12229613 NR Description: Chalcone synthase 1
  misc_feature (1)..(51): NCBI GI NO: 21263495 NR Description: Chalcone synthase 2
  misc_feature (1)..(51): NCBI GI NO: 21263492 NR Description: Chalcone synthase 5
  misc_feature (1)..(51): NCBI GI NO: 21263493 NR Description: Chalcone synthase 4
  misc_feature (1)..(51): NCBI GI NO: 12229612 NR Description: Chalcone synthase 7
  misc_feature (1)..(51): NCBI GI NO: 13442780 NR Description: chalcone synthase
MCDKSMIRKRYMHLTEEFLSENPSMCAYMAPSLDARQDVVVTEVPKLGKAAGAEGDQGVGAAQVADHAPGVLHHVGGGHAGRRLPADQGAGAAPVREPPDDVPAGVLRGRHGAARGQGPGGEQPRGEGPGGVLGDHGRDVPRAVRVAPGLARGAGAVRRRRGGRRGGRRPGRAGRAPAVPARVGGADHPARLGGRHRRPPPRGGADVPPAQGRARAHLQEHRARAGGRVRAARHLRLELHLLGGAPRRARHPGPGGGQGRAGQGQDARHPPRPLRVRQHVQRLRALHPGRDAQALRRGRPGHHRRGARLGRPLRLRPGPHRRDRRAPQRPHHHRSAHRRLSRPSILAIAPDMNDPTYE

SEQ ID NO: 34873 - protein, 353 aa, Zea mays subsp. mays
  peptide (1)..(353): Ceres Seq. ID no. 12408544
  misc_feature (1)..(46): NCBI GI NO: 116380 NR Description: CHALCONE SYNTHASE C2
  misc_feature (1)..(49): NCBI GI NO: 116374 NR Description: CHALCONE SYNTHASE WHP1
  misc_feature (1)..(46): NCBI GI NO: 21263491 NR Description: Chalcone synthase 6
  misc_feature (1)..(46): NCBI GI NO: 21263494 NR Description: Chalcone synthase 3
  misc_feature (1)..(46): NCBI GI NO: 12229613 NR Description: Chalcone synthase 1
  misc_feature (1)..(46): NCBI GI NO: 21263495 NR Description: Chalcone synthase 2
  misc_feature (1)..(46): NCBI GI NO: 21263492 NR Description: Chalcone synthase 5
  misc_feature (1)..(46): NCBI GI NO: 21263493 NR Description: Chalcone synthase 4
  misc_feature (1)..(46): NCBI GI NO: 12229612 NR Description: Chalcone synthase 7
  misc_feature (1)..(46): NCBI GI NO: 13442780 NR Description: chalcone synthase
MIRKRYMHLTEEFLSENPSMCAYMAPSLDARQDVVVTEVPKLGKAAGAEGDQGVGAAQVADHAPGVLHHVGGGHAGRRLPADQGAGAAPVREPPDDVPAGVLRGRHGAARGQGPGGEQPRGEGPGGVLGDHGRDVPRAVRVAPGLARGAGAVRRRRGGRRGGRRPGRAGRAPAVPARVGGADHPARLGGRHRRPPPRGGADVPPAQGRARAHLQEHRARAGGRVRAARHLRLELHLLGGAPRRARHPGPGGGQGRAGQGQDARHPPRPLRVRQHVQRLRALHPGRDAQALRRGRPGHHRRGARLGRPLRLRPGPHRRDRRAPQRPHHHRSAHRRLSRPSILAIAPDMNDPTYE

SEQ ID NO: 34874 - DNA, 1878 bp, Zea mays subsp. mays
  misc_feature (1)..(1878): Ceres Seq. ID no. 12345179
atccgattggttggcctatttatctcccagtcccactccgtccactcgagctctccaccagctttccccttctctacggtccgggaatcggaagctcacggcagaagtttagccatggggcagacgcatcttttgttgctcgcttgtttctgggtcctgtcaacatgctccttgctacttgatgcttcctccgatggactgttaagaatcaacctgaacaagaagagactggacaaggaagctttgactgctgcgaaattggcgaagaaggagagcaaccttcgaaggtctgtgggtgctgaccagtatctcagtgcctcaactgatgacatagtccctttggacaactacctggacacccagtactttggacagatcagcatcggcacgccaccacagaacttcacagtgatattcgacactggaagctccaacttgtgggttcccctcatccaagtgctacttttcgatagcatgctacttacaccacagatacaagtcaaccaagtcgaagacttacacaaagaatggagaatcttgtacgataacatatggttctgggcaaatcgctggcttcttcagtgaggacaatgtgttggttggcaaccttgttgtgcaaaatcagaaatttattgagacaactcgagaaaccagccctactttcatcattgggaagtttgatggaattcttggtctcggatttcctgaaatttctgtaggaggagcccctccaatttggcagagcatgaaacagcagaaactggtcgcaaaggatgtcttctctttctggcttaatcgtgaccctgatgcatcttctggaggaggcgagcttgtctttggtggtgttgacccaaaacactacaaaggggaccatacatatgttcccgttacacgcaaaggctactggcagtttgacatgggagatcttattattggtggccactcaactggtttctgtgctggtggctgtgctgctattgtggactcagggacttcattgcttgctggtccaactaccatagtggctcaagtcaatcatgcaattggggctgagggaatcatcagtacagaatgcaaagaagtggtgagcgagtatggagagatgatccttgagttgctcatatcgcagacaagcccacagaaagtgtgcactcagattggtctctgtgtatttgatggtgcccattctgtcagcaatccaattgaatctgttgttgagaaacagaagcgtggttctgatcttttctgtactgcttgtgagatggctgttgtctggatacagaatcagctccgtgaaaacaagacaaaagaactcattttgaattatgctaatcagctctgtgagcgtctccctagccccaatggcgagtcaactgttgattgccatcagatctcaaagatgccaaatcttgcattcaccatagcaaacaagactttcaccttaacaccagagcagtacatagtgaagctggagcaagcaggacaaactatctgcatcagtgggtttatggcatttgacgtaccgcctcctcgtggtcctctctggatacttggtgatgtttttatgggtgcctaccacactgtttttgacttcggtgagaacaggattgggtttgccaaatctgcatgaggactggagttctgcgctttagtagcatgtccagtttgttatccgggtattgtacatatatatgttgccaactggtgtaatccgcagtgtttaatagtatatattcatgcagaaatctagaagattgtggcatgatatgtgtttgcaaatggagctatgctatgtatggagctccaggacctagagttttatgtaaagggagacgatgaggattagggcttttaacctattctcatcacgttattgtc

SEQ ID NO: 34875 - protein, 294 aa, Zea mays subsp. mays
  peptide (1)..(294): Ceres Seq. ID no. 12345180
  misc_feature (1)..(149): Pfam Name: Pfam Description:  Eukaryotic aspartyl protease
  misc_feature (1)..(294): NCBI GI NO: 1168537 NR Description: Aspartic proteinase precursor
  misc_feature (1)..(294): NCBI GI NO: 7435839 NR Description: aspartic proteinase precursor
  misc_feature (1)..(293): NCBI GI NO: 15425751 NR Description: aspartic proteinase 2 [Glycine max]
  misc_feature (1)..(294): NCBI GI NO: 21616051 NR Description: aspartic proteinase [Theobroma cacao]
  misc_feature (1)..(294): NCBI GI NO: 12231174 NR Description: aspartic proteinase 2 [Nepenthes alata]
  misc_feature (1)..(294): NCBI GI NO: 13897888 NR Description: putative aspartic protease [Ipomoea batatas]
  misc_feature (1)..(294): NCBI GI NO: 1168536 NR Description: Phytepsin precursor (Aspartic proteinase)
  misc_feature (1)..(294): NCBI GI NO: 12231178 NR Description: aspartic proteinase 4 [Nepenthes alata]
  misc_feature (1)..(294): NCBI GI NO: 2499819 NR Description: Aspartic proteinase oryzasin 1 precursor
  misc_feature (1)..(106): NCBI GI NO: 3378673 NR Description: Cathepsin D [Podarcis sicula]
MKQQKLVAKDVFSFWLNRDPDASSGGGELVFGGVDPKHYKGDHTYVPVTRKGYWQFDMGDLIIGGHSTGFCAGGCAAIVDSGTSLLAGPTTIVAQVNHAIGAEGIISTECKEVVSEYGEMILELLISQTSPQKVCTQIGLCVFDGAHSVSNPIESVVEKQKRGSDLFCTACEMAVVWIQNQLRENKTKELILNYANQLCERLPSPNGESTVDCHQISKMPNLAFTIANKTFTLTPEQYIVKLEQAGQTICISGFMAFDVPPPRGPLWILGDVFMGAYHTVFDFGENRIGFAKSA

SEQ ID NO: 34876 - protein, 237 aa, Zea mays subsp. mays
  peptide (1)..(237): Ceres Seq. ID no. 12345181
  misc_feature (1)..(92): Pfam Name: Pfam Description:  Eukaryotic aspartyl protease
  misc_feature (1)..(237): NCBI GI NO: 1168537 NR Description: Aspartic proteinase precursor
  misc_feature (1)..(237): NCBI GI NO: 7435839 NR Description: aspartic proteinase precursor
  misc_feature (1)..(236): NCBI GI NO: 15425751 NR Description: aspartic proteinase 2 [Glycine max]
  misc_feature (1)..(237): NCBI GI NO: 21616051 NR Description: aspartic proteinase [Theobroma cacao]
  misc_feature (1)..(237): NCBI GI NO: 12231174 NR Description: aspartic proteinase 2 [Nepenthes alata]
  misc_feature (1)..(237): NCBI GI NO: 13897888 NR Description: putative aspartic protease [Ipomoea batatas]
  misc_feature (1)..(237): NCBI GI NO: 1168536 NR Description: Phytepsin precursor (Aspartic proteinase)
  misc_feature (1)..(237): NCBI GI NO: 12231178 NR Description: aspartic proteinase 4 [Nepenthes alata]
  misc_feature (1)..(237): NCBI GI NO: 2499819 NR Description: Aspartic proteinase oryzasin 1 precursor
  misc_feature (1)..(49): NCBI GI NO: 3378673 NR Description: Cathepsin D [Podarcis sicula]
MGDLIIGGHSTGFCAGGCAAIVDSGTSLLAGPTTIVAQVNHAIGAEGIISTECKEVVSEYGEMILELLISQTSPQKVCTQIGLCVFDGAHSVSNPIESVVEKQKRGSDLFCTACEMAVVWIQNQLRENKTKELILNYANQLCERLPSPNGESTVDCHQISKMPNLAFTIANKTFTLTPEQYIVKLEQAGQTICISGFMAFDVPPPRGPLWILGDVFMGAYHTVFDFGENRIGFAKSA

SEQ ID NO: 34877 - protein, 194 aa, Zea mays subsp. mays
  peptide (1)..(194): Ceres Seq. ID no. 12345182
  misc_feature (67)..(149): Pfam Name: Pfam Description:  Eukaryotic aspartyl protease
  misc_feature (39)..(149): NCBI GI NO: 1168537 NR Description: Aspartic proteinase precursor
  misc_feature (39)..(149): NCBI GI NO: 7435839 NR Description: aspartic proteinase precursor
  misc_feature (39)..(149): NCBI GI NO: 15425751 NR Description: aspartic proteinase 2 [Glycine max]
  misc_feature (50)..(149): NCBI GI NO: 21616051 NR Description: aspartic proteinase [Theobroma cacao]
  misc_feature (39)..(149): NCBI GI NO: 12231174 NR Description: aspartic proteinase 2 [Nepenthes alata]
  misc_feature (39)..(149): NCBI GI NO: 13897888 NR Description: putative aspartic protease [Ipomoea batatas]
  misc_feature (39)..(149): NCBI GI NO: 12231178 NR Description: aspartic proteinase 4 [Nepenthes alata]
  misc_feature (44)..(149): NCBI GI NO: 1168536 NR Description: Phytepsin precursor (Aspartic proteinase)
  misc_feature (44)..(149): NCBI GI NO: 2499819 NR Description: Aspartic proteinase oryzasin 1 precursor
  misc_feature (114)..(157): NCBI GI NO: 3378673 NR Description: Cathepsin D [Podarcis sicula]
IRLVGLFISQSHSVHSSSPPAFPFSTVRESEAHGRSLAMGQTHLLLLACFWVLSTCSLLLDASSDGLLRINLNKKRLDKEALTAAKLAKKESNLRRSVGADQYLSASTDDIVPLDNYLDTQYFGQISIGTPPQNFTVIFDTGSSNLWVPLIQVLLFDSMLLTPQIQVNQVEDLHKEWRILYDNIWFWANRWLLQ

SEQ ID NO: 34878 - DNA, 1260 bp, Zea mays subsp. mays
  misc_feature (1)..(1260): Ceres Seq. ID no. 12411385
gtattccttcagggaacggcttccatagcgctgaagcgaggcgtgccgcattgggttgttcgagagctcctagtgttgccctactacatgatggagggcgatctccccacgcccgcgaacgctagggttgttgccgtggtcaccggcggcaacaaggggatcgggctggaggtgtgccgcagctggcctgcagcggcgtcaccgtcgtcttgacagccagggacgacgcgaggggcgcggcggccgtggagaacctcagaggcctggggctctccgatgtcctcttccaccgactggacgttaccgacgctccgagcatcgctcgactcgctggtttcctcgagacccgtttcgggaagctagacatcctggtaaataatgccgcgattggcggggttgagtatgttcatgaccaagattgtggctcagtaacgagcgaggaaaaggcaaagttgagcggcatggacatggatcagaggcttggatggctgtgggagaattgccgggagacctacgacgatgcaaagacaggcctacgaacaaactactacggcacaaagcaagtaatcgagactttactgcctctactgcaagcctcctccgatgggaggatcgttaacgtctcctcccacttcggccagctaaggcttttccgaaacgaggagctgaagcgggagctgaacgacattgacaacctcaccccggagaggctggatggcctgctggacatgttcttaaatgacttggaggccggcgaggtggagtcgtcgaacggctggccgatgtatttctcggcgtacaaggtggccaaggcggccatgaacgcgtactcgaggatcctggcgaggcggcaccccgagctgcgcgtcaactgcgtgcaccccggctatgtcaggaccgacatgaccatacactcggggctgttgacaccggaggaaggtggcagcagggtggccatggtggcgctgctgccgggaggcgggccaaccggcgcgttctttgaagattttcaacagtcgtcgttcgtgtgatgttgaacatgcagctgcatctcatatgtattctatagatattatttatgtgaaagatgctacagtacgctccccctgcgtttacattcagcgcacctctgaactcttaaacttcaagtcttcaacgacaaatctagacatgatgctgcaaaacatttttaatgtctcctctttcaaaacacgagtttcgtgcgtcatgcacgaagcacaaagagttttttttctcttc

SEQ ID NO: 34879 - protein, 189 aa, Zea mays subsp. mays
  peptide (1)..(189): Ceres Seq. ID no. 12411386
  misc_feature (1)..(189): NCBI GI NO: 38346772 NR Description: OSJNBa0081C01.23
  misc_feature (1)..(189): NCBI GI NO: 38346769 NR Description: OSJNBa0081C01.20
  misc_feature (1)..(189): NCBI GI NO: 38346768 NR Description: OSJNBa0081C01.19
  misc_feature (1)..(189): NCBI GI NO: 38346774 NR Description: OSJNBa0081C01.25
  misc_feature (1)..(189): NCBI GI NO: 38346767 NR Description: OSJNBa0081C01.18
  misc_feature (1)..(181): NCBI GI NO: 33146492 NR Description: carbonyl reductase -like protein
  misc_feature (1)..(188): NCBI GI NO: 15224100 NR Description: putative carbonyl reductase; protein id:At2g24190
  misc_feature (1)..(188): NCBI GI NO: 18378884 NR Description: carbonyl reductase, putative; protein id:At1g01800
  misc_feature (1)..(188): NCBI GI NO: 25518668 NR Description: hypothetical protein T1N6
  misc_feature (1)..(188): NCBI GI NO: 15233062 NR Description: putative protein; protein id: At3g61220
MDMDQRLGWLWENCRETYDDAKTGLRTNYYGTKQVIETLLPLLQASSDGRIVNVSSHFGQLRLFRNEELKRELNDIDNLTPERLDGLLDMFLNDLEAGEVESSNGWPMYFSAYKVAKAAMNAYSRILARRHPELRVNCVHPGYVRTDMTIHSGLLTPEEGGSRVAMVALLPGGGPTGAFFEDFQQSSFV

SEQ ID NO: 34880 - protein, 187 aa, Zea mays subsp. mays
  peptide (1)..(187): Ceres Seq. ID no. 12411387
  misc_feature (1)..(187): NCBI GI NO: 38346772 NR Description: OSJNBa0081C01.23
  misc_feature (1)..(187): NCBI GI NO: 38346769 NR Description: OSJNBa0081C01.20
  misc_feature (1)..(187): NCBI GI NO: 38346768 NR Description: OSJNBa0081C01.19
  misc_feature (1)..(187): NCBI GI NO: 38346774 NR Description: OSJNBa0081C01.25
  misc_feature (1)..(187): NCBI GI NO: 38346767 NR Description: OSJNBa0081C01.18
  misc_feature (1)..(179): NCBI GI NO: 33146492 NR Description: carbonyl reductase -like protein
  misc_feature (1)..(186): NCBI GI NO: 15224100 NR Description: putative carbonyl reductase; protein id:At2g24190
  misc_feature (1)..(186): NCBI GI NO: 18378884 NR Description: carbonyl reductase, putative; protein id:At1g01800
  misc_feature (1)..(186): NCBI GI NO: 25518668 NR Description: hypothetical protein T1N6
  misc_feature (1)..(186): NCBI GI NO: 15233062 NR Description: putative protein; protein id: At3g61220
MDQRLGWLWENCRETYDDAKTGLRTNYYGTKQVIETLLPLLQASSDGRIVNVSSHFGQLRLFRNEELKRELNDIDNLTPERLDGLLDMFLNDLEAGEVESSNGWPMYFSAYKVAKAAMNAYSRILARRHPELRVNCVHPGYVRTDMTIHSGLLTPEEGGSRVAMVALLPGGGPTGAFFEDFQQSSFV

SEQ ID NO: 34881 - protein, 100 aa, Zea mays subsp. mays
  peptide (1)..(100): Ceres Seq. ID no. 12411388
  misc_feature (1)..(100): NCBI GI NO: 38346772 NR Description: OSJNBa0081C01.23
  misc_feature (1)..(100): NCBI GI NO: 38346769 NR Description: OSJNBa0081C01.20
  misc_feature (1)..(100): NCBI GI NO: 38346768 NR Description: OSJNBa0081C01.19
  misc_feature (1)..(100): NCBI GI NO: 38346774 NR Description: OSJNBa0081C01.25
  misc_feature (1)..(100): NCBI GI NO: 38346767 NR Description: OSJNBa0081C01.18
  misc_feature (1)..(92): NCBI GI NO: 33146492 NR Description: carbonyl reductase -like protein
  misc_feature (1)..(99): NCBI GI NO: 15224100 NR Description: putative carbonyl reductase; protein id:At2g24190
  misc_feature (1)..(99): NCBI GI NO: 18378884 NR Description: carbonyl reductase, putative; protein id:At1g01800
  misc_feature (1)..(99): NCBI GI NO: 25518668 NR Description: hypothetical protein T1N6
  misc_feature (1)..(99): NCBI GI NO: 15233062 NR Description: putative protein; protein id: At3g61220
MFLNDLEAGEVESSNGWPMYFSAYKVAKAAMNAYSRILARRHPELRVNCVHPGYVRTDMTIHSGLLTPEEGGSRVAMVALLPGGGPTGAFFEDFQQSSFV

SEQ ID NO: 34882 - DNA, 1444 bp, Zea mays subsp. mays
  misc_feature (1)..(1444): Ceres Seq. ID no. 13502459
gcacgagaccattacctagaacatcctaatcgaaaagtcatcaatcaaatactcagacaaccatggggcaccagcaggcgcagcacggcaaggacgacaccgaggagctgcttgcagcccaccggcagctgtggtgccatgccctgggctacgtcaagtccatggcgctcaagtgcgccctggacctgcgcatccccgacaccatcgaccgctgcggcgggagcgccaccctgggcgagctgctcgccgccagcgagatcccggcgtccaaccacgactacctccggcgggtcatgcgcacgctgacagccatgcgcatcttcgcggccagccacgaccccgccaaggccgacgacgcggccgccatctcctaccagctgaccccggcgtcccggctgctcgtcagcagcagcagcagcgtcgacgacgccgccggcgcctcgaaggagaacactactaccccgagcatcctccccaacatcgcccacctggtccgccccaacaccatctccctgctgttcagcatgggcgagtggatgaaggacgagagcgcggcgtccgtgtcgctgtacgagacggtgcaccggcaggggatgtgggcgtgcgtggaggacgacgcggccaacagggccagcttctacgagagcatggacgccgacacccggctcgtgatgcaggccgtggtccgccggtgcccgcacgtgttcgacggcgtcaagtcgctcgtcgacgtcggcggcggccgcggcaccgccgccgccgccgtcgtcgccgccttcccgcacatccagaggtgcaccgtcatggacctcccccacgtcgtcgccgaggctcccgccggcaccgccggcctgtccttccacggcggcgacatgttcgagcacatcccgtcggctgacgcactcatgctcaagtggatcctgcacgactgggatgaggacaagtgcatcaagataatggagcgctgcaaggaagcgatcggtggcaaggaagcaggggggaaggtgattataatagacacggtgctcggatctcgggcagacgacgacgacgacgacaagacgtgcagggagacgtatgtgttggatctccacatactgagcttcgtgaacggggcggagcgggaggagcaggagtggaggaggatcttcctggcggctgggttccgtgactacaagatcacgcacacccgaggcatcccgtccatcatcgaggtcttcccgtgatgatgatggatcgagagtcgatcatatatgcatgtttgtacgtgtttgtgtcataataaatcgatcgatcatgttgtttaccctttttatttcggtatgtagttgcatctgcgggcgggctaaaataaatcacggcaggctgggcttcatcaagcccatgtatccatctgtgtgtaataatgcaatggaaaacgaaccaaaaagaatgcttccattcc

SEQ ID NO: 34883 - protein, 387 aa, Zea mays subsp. mays
  peptide (1)..(387): Ceres Seq. ID no. 13502460
  misc_feature (100)..(373): Pfam Name: Pfam Description:  O-methyltransferase
  misc_feature (13)..(387): NCBI GI NO: 4098238 NR Description: o-methyltransferase [Triticum aestivum]
  misc_feature (84)..(387): NCBI GI NO: 37530600 NR Description: putative o-methyltransferase ZRP4
  misc_feature (4)..(115): NCBI GI NO: 37530600 NR Description: putative o-methyltransferase ZRP4
  misc_feature (84)..(387): NCBI GI NO: 37530606 NR Description: putative o-methyltransferase ZRP4
  misc_feature (13)..(116): NCBI GI NO: 37530606 NR Description: putative o-methyltransferase ZRP4
  misc_feature (14)..(387): NCBI GI NO: 1353193 NR Description: O-METHYLTRANSFERASE ZRP4 (OMT)
  misc_feature (14)..(387): NCBI GI NO: 22093735 NR Description: putative o-methyltransferase
  misc_feature (14)..(387): NCBI GI NO: 34909608 NR Description: putative o-methyltransferase
  misc_feature (135)..(387): NCBI GI NO: 20514367 NR Description: orcinol O-methyltransferase [Rosa hybrid cultivar]
  misc_feature (3)..(114): NCBI GI NO: 20514367 NR Description: orcinol O-methyltransferase [Rosa hybrid cultivar]
MGHQQAQHGKDDTEELLAAHRQLWCHALGYVKSMALKCALDLRIPDTIDRCGGSATLGELLAASEIPASNHDYLRRVMRTLTAMRIFAASHDPAKADDAAAISYQLTPASRLLVSSSSSVDDAAGASKENTTTPSILPNIAHLVRPNTISLLFSMGEWMKDESAASVSLYETVHRQGMWACVEDDAANRASFYESMDADTRLVMQAVVRRCPHVFDGVKSLVDVGGGRGTAAAAVVAAFPHIQRCTVMDLPHVVAEAPAGTAGLSFHGGDMFEHIPSADALMLKWILHDWDEDKCIKIMERCKEAIGGKEAGGKVIIIDTVLGSRADDDDDDKTCRETYVLDLHILSFVNGAEREEQEWRRIFLAAGFRDYKITHTRGIPSIIEVFP

SEQ ID NO: 34884 - protein, 354 aa, Zea mays subsp. mays
  peptide (1)..(354): Ceres Seq. ID no. 13502461
  misc_feature (67)..(340): Pfam Name: Pfam Description:  O-methyltransferase
  misc_feature (1)..(354): NCBI GI NO: 4098238 NR Description: o-methyltransferase [Triticum aestivum]
  misc_feature (51)..(354): NCBI GI NO: 37530600 NR Description: putative o-methyltransferase ZRP4
  misc_feature (1)..(82): NCBI GI NO: 37530600 NR Description: putative o-methyltransferase ZRP4
  misc_feature (51)..(354): NCBI GI NO: 37530606 NR Description: putative o-methyltransferase ZRP4
  misc_feature (1)..(83): NCBI GI NO: 37530606 NR Description: putative o-methyltransferase ZRP4
  misc_feature (1)..(354): NCBI GI NO: 1353193 NR Description: O-METHYLTRANSFERASE ZRP4 (OMT)
  misc_feature (1)..(354): NCBI GI NO: 22093735 NR Description: putative o-methyltransferase
  misc_feature (1)..(354): NCBI GI NO: 34909608 NR Description: putative o-methyltransferase
  misc_feature (102)..(354): NCBI GI NO: 20514367 NR Description: orcinol O-methyltransferase [Rosa hybrid cultivar]
  misc_feature (1)..(81): NCBI GI NO: 20514367 NR Description: orcinol O-methyltransferase [Rosa hybrid cultivar]
MALKCALDLRIPDTIDRCGGSATLGELLAASEIPASNHDYLRRVMRTLTAMRIFAASHDPAKADDAAAISYQLTPASRLLVSSSSSVDDAAGASKENTTTPSILPNIAHLVRPNTISLLFSMGEWMKDESAASVSLYETVHRQGMWACVEDDAANRASFYESMDADTRLVMQAVVRRCPHVFDGVKSLVDVGGGRGTAAAAVVAAFPHIQRCTVMDLPHVVAEAPAGTAGLSFHGGDMFEHIPSADALMLKWILHDWDEDKCIKIMERCKEAIGGKEAGGKVIIIDTVLGSRADDDDDDKTCRETYVLDLHILSFVNGAEREEQEWRRIFLAAGFRDYKITHTRGIPSIIEVFP

SEQ ID NO: 34885 - protein, 310 aa, Zea mays subsp. mays
  peptide (1)..(310): Ceres Seq. ID no. 13502462
  misc_feature (23)..(296): Pfam Name: Pfam Description:  O-methyltransferase
  misc_feature (1)..(310): NCBI GI NO: 4098238 NR Description: o-methyltransferase [Triticum aestivum]
  misc_feature (7)..(310): NCBI GI NO: 37530600 NR Description: putative o-methyltransferase ZRP4
  misc_feature (1)..(38): NCBI GI NO: 37530600 NR Description: putative o-methyltransferase ZRP4
  misc_feature (7)..(310): NCBI GI NO: 37530606 NR Description: putative o-methyltransferase ZRP4
  misc_feature (1)..(39): NCBI GI NO: 37530606 NR Description: putative o-methyltransferase ZRP4
  misc_feature (1)..(310): NCBI GI NO: 1353193 NR Description: O-METHYLTRANSFERASE ZRP4 (OMT)
  misc_feature (1)..(310): NCBI GI NO: 22093735 NR Description: putative o-methyltransferase
  misc_feature (1)..(310): NCBI GI NO: 34909608 NR Description: putative o-methyltransferase
  misc_feature (58)..(310): NCBI GI NO: 20514367 NR Description: orcinol O-methyltransferase [Rosa hybrid cultivar]
  misc_feature (1)..(37): NCBI GI NO: 20514367 NR Description: orcinol O-methyltransferase [Rosa hybrid cultivar]
MRTLTAMRIFAASHDPAKADDAAAISYQLTPASRLLVSSSSSVDDAAGASKENTTTPSILPNIAHLVRPNTISLLFSMGEWMKDESAASVSLYETVHRQGMWACVEDDAANRASFYESMDADTRLVMQAVVRRCPHVFDGVKSLVDVGGGRGTAAAAVVAAFPHIQRCTVMDLPHVVAEAPAGTAGLSFHGGDMFEHIPSADALMLKWILHDWDEDKCIKIMERCKEAIGGKEAGGKVIIIDTVLGSRADDDDDDKTCRETYVLDLHILSFVNGAEREEQEWRRIFLAAGFRDYKITHTRGIPSIIEVFP

SEQ ID NO: 34886 - DNA, 1715 bp, Zea mays subsp. mays
  misc_feature (1)..(1715): Ceres Seq. ID no. 12411377
gaaaaccaccatccccgttccccaacccccccaaagccgagagccatcccgcccgcagccgcaaccaggcaagcaagcgggagccgccaactcgtgcctctcggcagcggcgtctgaactctgaaccgaccgaccgttccgttcacccccaccatggaggcgccgccgggaccggggcccatggagctggacgccccacctcccgccgccgccgcggcgattcctcccgccggcagcgacaagcacaaggtggacggggaagggggagacgctgtgacgggccatatcatctccaccaccatcggcgggaagaacggcgagcccaatcggaccatcagttacatggcagaacgtgtcgtgggtacaggctcatttgggatcgtcttccaggctaagtgtctggaaacaggagagacctttgccatcaagaaggtgctgcaagatcggcgttacaagaaccgggagctgcaacttatgcgtgccatggagcaccccaacgtcatctgcctgaagcactgcttcttctcgacaacgagcagggacgaattgtttttaaaccttgtcatggaattcgtccctgagactctataccgggtcctgaagcactacagcaatgcgaaccagaggatgcctcttatctacgtcaagctctacatgtatcagctttttagaggcctagcttatattcataatgtaccaggagtctgccatagggatgtgaagccacaaaatgttttggttgatcctctcacccaccaggtcaagctctgtgactttggtagtgcaaaagttctgattcctggtgaaccgaacatatcttacatatgctctcgttactatcgtgcccctgagctcatatttggtgcgacggagtatacaagttcaatagacatatggtcagctggttgtgttctagctgagttgcttcttggacagccactatttccaggagagagcgctgttgatcagttggtagagatcatcaaggttcttggtactccaacccgtgaggagatacggtgcatgaatcccaactatactgagttcaggtttcctcagataaaggctcatccatggcacaagattttccacaagagaatgcctcctgaagccatagaccttgcttcccgtctccttcagtattcaccaagtcttcgctgctctgctcttgacgcatgtgctcatcccttcttcgatgagctgcggacaccgaatgcacgcctaccaaacggccgcccgttccctccgctctttaacttcaagcacgaactagcaaatgcctctccagaccttgtcagcaggcttgtgccggagcacattagacggcagatcggtgtcaacttcgggagcagctaggagggcaggcgctgcgatggtcggagttttcggtcttggtttccccttctggagagtgggaggggctcaagcagtacctgagaaaagtagtgaaaccgtgtatattatctgaccgtgaaggagtactaccgccagtaactggcgcatgttcgtccagtagttatggtaagaatgtaggaggtgaagactggttaatgtgtagggtcgtttttttttgttttgatattactaccattttgttgtaatgttcgtcggtacttccagcagtagtgtagctggccacgttttgttcgtccgccatgatgtaaatgatcatcgcccaactgtaatgcatgttctctctgatcgtttcgtagtcc

SEQ ID NO: 34887 - protein, 400 aa, Zea mays subsp. mays
  peptide (1)..(400): Ceres Seq. ID no. 12411378
  misc_feature (63)..(347): Pfam Name: Pfam Description:  Protein kinase domain
  misc_feature (4)..(400): NCBI GI NO: 15221476 NR Description: shaggy-like kinase, putative; protein id:At1g06390
  misc_feature (36)..(397): NCBI GI NO: 15233984 NR Description: shaggy-like protein kinase etha (EC 2
  misc_feature (36)..(397): NCBI GI NO: 12643751 NR Description: Shaggy-related protein kinase eta (ASK-eta)
  misc_feature (36)..(397): NCBI GI NO: 18700188 NR Description: AT4g18710/F28A21_120 [Arabidopsis thaliana]
  misc_feature (1)..(397): NCBI GI NO: 12643750 NR Description: Shaggy-related protein kinase delta
  misc_feature (1)..(397): NCBI GI NO: 15224593 NR Description: putative shaggy-like protein kinase dzeta
  misc_feature (1)..(397): NCBI GI NO: 21593135 NR Description: putative shaggy-like protein kinase dzeta
  misc_feature (1)..(394): NCBI GI NO: 7434281 NR Description: probable shaggy-like protein kinase etha (EC2
  misc_feature (37)..(392): NCBI GI NO: 15230058 NR Description: shaggy related protein kinase, ASK-GAMMA
  misc_feature (1)..(391): NCBI GI NO: 7434282 NR Description: shaggy protein kinase (EC 2
MEAPPGPGPMELDAPPPAAAAAIPPAGSDKHKVDGEGGDAVTGHIISTTIGGKNGEPNRTISYMAERVVGTGSFGIVFQAKCLETGETFAIKKVLQDRRYKNRELQLMRAMEHPNVICLKHCFFSTTSRDELFLNLVMEFVPETLYRVLKHYSNANQRMPLIYVKLYMYQLFRGLAYIHNVPGVCHRDVKPQNVLVDPLTHQVKLCDFGSAKVLIPGEPNISYICSRYYRAPELIFGATEYTSSIDIWSAGCVLAELLLGQPLFPGESAVDQLVEIIKVLGTPTREEIRCMNPNYTEFRFPQIKAHPWHKIFHKRMPPEAIDLASRLLQYSPSLRCSALDACAHPFFDELRTPNARLPNGRPFPPLFNFKHELANASPDLVSRLVPEHIRRQIGVNFGSS

SEQ ID NO: 34888 - protein, 391 aa, Zea mays subsp. mays
  peptide (1)..(391): Ceres Seq. ID no. 12411379
  misc_feature (54)..(338): Pfam Name: Pfam Description:  Protein kinase domain
  misc_feature (1)..(391): NCBI GI NO: 15221476 NR Description: shaggy-like kinase, putative; protein id:At1g06390
  misc_feature (27)..(388): NCBI GI NO: 15233984 NR Description: shaggy-like protein kinase etha (EC 2
  misc_feature (27)..(388): NCBI GI NO: 12643751 NR Description: Shaggy-related protein kinase eta (ASK-eta)
  misc_feature (27)..(388): NCBI GI NO: 18700188 NR Description: AT4g18710/F28A21_120 [Arabidopsis thaliana]
  misc_feature (1)..(388): NCBI GI NO: 12643750 NR Description: Shaggy-related protein kinase delta
  misc_feature (1)..(388): NCBI GI NO: 15224593 NR Description: putative shaggy-like protein kinase dzeta
  misc_feature (1)..(388): NCBI GI NO: 21593135 NR Description: putative shaggy-like protein kinase dzeta
  misc_feature (1)..(385): NCBI GI NO: 7434281 NR Description: probable shaggy-like protein kinase etha (EC2
  misc_feature (28)..(383): NCBI GI NO: 15230058 NR Description: shaggy related protein kinase, ASK-GAMMA
  misc_feature (1)..(382): NCBI GI NO: 7434282 NR Description: shaggy protein kinase (EC 2
MELDAPPPAAAAAIPPAGSDKHKVDGEGGDAVTGHIISTTIGGKNGEPNRTISYMAERVVGTGSFGIVFQAKCLETGETFAIKKVLQDRRYKNRELQLMRAMEHPNVICLKHCFFSTTSRDELFLNLVMEFVPETLYRVLKHYSNANQRMPLIYVKLYMYQLFRGLAYIHNVPGVCHRDVKPQNVLVDPLTHQVKLCDFGSAKVLIPGEPNISYICSRYYRAPELIFGATEYTSSIDIWSAGCVLAELLLGQPLFPGESAVDQLVEIIKVLGTPTREEIRCMNPNYTEFRFPQIKAHPWHKIFHKRMPPEAIDLASRLLQYSPSLRCSALDACAHPFFDELRTPNARLPNGRPFPPLFNFKHELANASPDLVSRLVPEHIRRQIGVNFGSS

SEQ ID NO: 34889 - protein, 337 aa, Zea mays subsp. mays; identical to SEQ ID NO: 23294
  peptide (1)..(337): Ceres Seq. ID no. 12411380
  misc_feature (1)..(284): Pfam Name: Pfam Description:  Protein kinase domain
  misc_feature (1)..(337): NCBI GI NO: 15221476 NR Description: shaggy-like kinase, putative; protein id:At1g06390
  misc_feature (1)..(334): NCBI GI NO: 15233984 NR Description: shaggy-like protein kinase etha (EC 2
  misc_feature (1)..(334): NCBI GI NO: 12643751 NR Description: Shaggy-related protein kinase eta (ASK-eta)
  misc_feature (1)..(334): NCBI GI NO: 18700188 NR Description: AT4g18710/F28A21_120 [Arabidopsis thaliana]
  misc_feature (1)..(334): NCBI GI NO: 12643750 NR Description: Shaggy-related protein kinase delta
  misc_feature (1)..(334): NCBI GI NO: 15224593 NR Description: putative shaggy-like protein kinase dzeta
  misc_feature (1)..(334): NCBI GI NO: 21593135 NR Description: putative shaggy-like protein kinase dzeta
  misc_feature (1)..(331): NCBI GI NO: 7434281 NR Description: probable shaggy-like protein kinase etha (EC2
  misc_feature (1)..(329): NCBI GI NO: 15230058 NR Description: shaggy related protein kinase, ASK-GAMMA
  misc_feature (1)..(328): NCBI GI NO: 7434282 NR Description: shaggy protein kinase (EC 2

SEQ ID NO: 34890 - DNA, 1262 bp, Zea mays subsp. mays
  misc_feature (1)..(1262): Ceres Seq. ID no. 12351854
aatcactccattcatcgccggagtcccgaccaaattatccacacacgcgcctcgcctcccactcccccgaactcacacgccgcggcggagcaccaccgcggccgcccaccatgacctccgcctccaccttcctctctctgcgcctgcccactccctcccacgccacttcgtccctttccttccccccgtctctgctccggcaggcgcgtggcggtgtggcgtcctcgacgctggtggcgcgggcggcagggccaacgggagcggcgggagctccatcgccgctattcaacccccggggagacccgttcctgtctaccctcgcagccgcctcaccggaggaccttgcggccgccgctggtggcgagcgccgtggagaggaccacctgccgttcctcgagatcttccagaacaccaaactcatggcctcgcccgcgcaggtggaacggtctagcagctcgtatagtcagcacagacctagaaggcctcctccagatttgccttcattgcttcttcacggccgaatcgtttatattggcatgccgttggtaccagcagtgactgagctcattgttgcccagttgatgtaccttgaatggatgaacagtaaagaacctgtttatatatacatcaactcaactggaacggctcgcgatgatggtgaaccggtcgggatggagagcgaaggttttgcaatctatgatgcaatgatgcgtatgaaaactgagatccacacactttgtataggagctgcagcaggcccatgcatgtcttgtgcttgcagctggaaaaaaaggcaaacgttatatgttccctcatgccaaagctatgattcagcaaccacgtattccttcttatgggatgatgcaagcatcagatgttgttattcgtgcaaaggaggttgtgcacaacaggaacacattggtcaaacttttagcaaggcatactggaaatccaccagagaaaatagacaaggtaatgagaggaccattttacatggactccttgaaggcaaaggagtttggagtcattgacaagatcctttggcgcggtcaggagaagtacatggctgacatgctctccccagatgagtgggacaaagttgccggagtcagacatcctgatctaatgtaatgttattcattgaaagttcaacatttggttaggttaatagcttccagggggcagaaacaggtgacgctgaacaataatgcttgattatcaatgataatggttggtaagagccaaggagtacttgtttaact

SEQ ID NO: 34891 - protein, 342 aa, Zea mays subsp. mays
  peptide (1)..(342): Ceres Seq. ID no. 12351855
  misc_feature (158)..(264): Pfam Name: Pfam Description:  Clp protease
  misc_feature (55)..(264): NCBI GI NO: 18390982 NR Description: ATP-dependent Clp protease proteolytic subunit
  misc_feature (55)..(236): NCBI GI NO: 25402516 NR Description: hypothetical protein
  misc_feature (159)..(252): NCBI GI NO: 22299302 NR Description: ATP-dependent Clp protease proteolytic subunit 3
  misc_feature (153)..(252): NCBI GI NO: 17231850 NR Description: ATP-dependent Clp protease proteolytic subunit
  misc_feature (153)..(252): NCBI GI NO: 23126723 NR Description: hypothetical protein [Nostoc punctiforme]
  misc_feature (161)..(271): NCBI GI NO: 13812146 NR Description: ATP-dependent Clp protease proteolytic subunit
  misc_feature (102)..(271): NCBI GI NO: 19698857 NR Description: unknown protein [Arabidopsis thaliana]
  misc_feature (102)..(271): NCBI GI NO: 18414804 NR Description: ATP-dependent Clp protease proteolytic subunit
  misc_feature (159)..(252): NCBI GI NO: 18203214 NR Description: Putative ATP-dependent Clp protease proteolytic subunit-like
  misc_feature (157)..(252): NCBI GI NO: 18402863 NR Description: ATP-dependent Clp protease proteolytic subunit
SLHSSPESRPNYPHTRLASHSPELTRRGGAPPRPPTMTSASTFLSLRLPTPSHATSSLSFPPSLLRQARGGVASSTLVARAAGPTGAAGAPSPLFNPRGDPFLSTLAAASPEDLAAAAGGERRGEDHLPFLEIFQNTKLMASPAQVERSSSSYSQHRPRRPPPDLPSLLLHGRIVYIGMPLVPAVTELIVAQLMYLEWMNSKEPVYIYINSTGTARDDGEPVGMESEGFAIYDAMMRMKTEIHTLCIGAAAGPCMSCACSWKKRQTLYVPSCQSYDSATTYSFLWDDASIRCCYSCKGGCAQQEHIGQTFSKAYWKSTRENRQGNERTILHGLLEGKGVWSH

SEQ ID NO: 34892 - protein, 306 aa, Zea mays subsp. mays
  peptide (1)..(306): Ceres Seq. ID no. 12351856
  misc_feature (122)..(228): Pfam Name: Pfam Description:  Clp protease
  misc_feature (19)..(228): NCBI GI NO: 18390982 NR Description: ATP-dependent Clp protease proteolytic subunit
  misc_feature (19)..(200): NCBI GI NO: 25402516 NR Description: hypothetical protein
  misc_feature (123)..(216): NCBI GI NO: 22299302 NR Description: ATP-dependent Clp protease proteolytic subunit 3
  misc_feature (117)..(216): NCBI GI NO: 17231850 NR Description: ATP-dependent Clp protease proteolytic subunit
  misc_feature (117)..(216): NCBI GI NO: 23126723 NR Description: hypothetical protein [Nostoc punctiforme]
  misc_feature (125)..(235): NCBI GI NO: 13812146 NR Description: ATP-dependent Clp protease proteolytic subunit
  misc_feature (66)..(235): NCBI GI NO: 19698857 NR Description: unknown protein [Arabidopsis thaliana]
  misc_feature (66)..(235): NCBI GI NO: 18414804 NR Description: ATP-dependent Clp protease proteolytic subunit
  misc_feature (123)..(216): NCBI GI NO: 18203214 NR Description: Putative ATP-dependent Clp protease proteolytic subunit-like
  misc_feature (121)..(216): NCBI GI NO: 18402863 NR Description: ATP-dependent Clp protease proteolytic subunit
MTSASTFLSLRLPTPSHATSSLSFPPSLLRQARGGVASSTLVARAAGPTGAAGAPSPLFNPRGDPFLSTLAAASPEDLAAAAGGERRGEDHLPFLEIFQNTKLMASPAQVERSSSSYSQHRPRRPPPDLPSLLLHGRIVYIGMPLVPAVTELIVAQLMYLEWMNSKEPVYIYINSTGTARDDGEPVGMESEGFAIYDAMMRMKTEIHTLCIGAAAGPCMSCACSWKKRQTLYVPSCQSYDSATTYSFLWDDASIRCCYSCKGGCAQQEHIGQTFSKAYWKSTRENRQGNERTILHGLLEGKGVWSH

SEQ ID NO: 34893 - protein, 203 aa, Zea mays subsp. mays
  peptide (1)..(203): Ceres Seq. ID no. 12351857
  misc_feature (19)..(125): Pfam Name: Pfam Description:  Clp protease
  misc_feature (1)..(125): NCBI GI NO: 18390982 NR Description: ATP-dependent Clp protease proteolytic subunit
  misc_feature (1)..(97): NCBI GI NO: 25402516 NR Description: hypothetical protein
  misc_feature (20)..(113): NCBI GI NO: 22299302 NR Description: ATP-dependent Clp protease proteolytic subunit 3
  misc_feature (14)..(113): NCBI GI NO: 17231850 NR Description: ATP-dependent Clp protease proteolytic subunit
  misc_feature (14)..(113): NCBI GI NO: 23126723 NR Description: hypothetical protein [Nostoc punctiforme]
  misc_feature (22)..(132): NCBI GI NO: 13812146 NR Description: ATP-dependent Clp protease proteolytic subunit
  misc_feature (1)..(132): NCBI GI NO: 19698857 NR Description: unknown protein [Arabidopsis thaliana]
  misc_feature (1)..(132): NCBI GI NO: 18414804 NR Description: ATP-dependent Clp protease proteolytic subunit
  misc_feature (20)..(113): NCBI GI NO: 18203214 NR Description: Putative ATP-dependent Clp protease proteolytic subunit-like
  misc_feature (18)..(113): NCBI GI NO: 18402863 NR Description: ATP-dependent Clp protease proteolytic subunit
MASPAQVERSSSSYSQHRPRRPPPDLPSLLLHGRIVYIGMPLVPAVTELIVAQLMYLEWMNSKEPVYIYINSTGTARDDGEPVGMESEGFAIYDAMMRMKTEIHTLCIGAAAGPCMSCACSWKKRQTLYVPSCQSYDSATTYSFLWDDASIRCCYSCKGGCAQQEHIGQTFSKAYWKSTRENRQGNERTILHGLLEGKGVWSH

SEQ ID NO: 34894 - DNA, 1344 bp, Zea mays subsp. mays
  misc_feature (1)..(1344): Ceres Seq. ID no. 13498889
  misc_feature (237)..(237): n is a, c, t, g, unknown, or other
  misc_feature (217)..(217): n is a, c, t, g, unknown, or other
  misc_feature (282)..(282): n is a, c, t, g, unknown, or other
  misc_feature (239)..(239): n is a, c, t, g, unknown, or other
  misc_feature (281)..(281): n is a, c, t, g, unknown, or other
  misc_feature (353)..(353): n is a, c, t, g, unknown, or other
  misc_feature (214)..(214): n is a, c, t, g, unknown, or other
  misc_feature (240)..(240): n is a, c, t, g, unknown, or other
  misc_feature (782)..(782): n is a, c, t, g, unknown, or other
  misc_feature (252)..(252): n is a, c, t, g, unknown, or other
  misc_feature (870)..(870): n is a, c, t, g, unknown, or other
  misc_feature (369)..(369): n is a, c, t, g, unknown, or other
  misc_feature (253)..(253): n is a, c, t, g, unknown, or other
  misc_feature (213)..(213): n is a, c, t, g, unknown, or other
  misc_feature (236)..(236): n is a, c, t, g, unknown, or other
  misc_feature (218)..(218): n is a, c, t, g, unknown, or other
  misc_feature (243)..(243): n is a, c, t, g, unknown, or other
  misc_feature (874)..(874): n is a, c, t, g, unknown, or other
  misc_feature (462)..(462): n is a, c, t, g, unknown, or other
  misc_feature (781)..(781): n is a, c, t, g, unknown, or other
  misc_feature (242)..(242): n is a, c, t, g, unknown, or other
agaactagcagttgttccccttttccctccccacgccgaacgcacccgatcgcaaacaaagcgagcagcagaaacatgcgagacatgccggttgtccgccgccaggaacccaccgtcgtcaggacggaggacgacgtggtttccggcggtgaggactcggacggcgagttcgagttcccctccgtgagccgggagtccgcggcgggcgttggnnggnnccgcgtctagccgacganntnntnngcgggcggnnacgcccgggcgttctacccggtgtttgnncgagtgctggacgaggccgcagcgccggcaccgagggcgccactagggcggctgttccagctggagcaggngcggacctcgtccgtngcgtccacgtcctcctcctcctcatcatcatcggcgtcgacggcggcgggcacgggcgcggacctcgacggcgtcggcgcgtcgccggacagntactgcgtctggacgcccgggtcgtcgccggcgtcctcgccctcgcggccgccgcggaagagcgggtccacgggctccatcgcgcggtggcgccgcatcggtgagctcgtcgtcggccgcagccgcagcgacggcaaggacaagttcctcttcctctcggcgccgccgtccccggccagggacagggagcacgcccccgcctccaaggccaaggccaagctgccgcccaaaggaagcaaagccgccgcaaccgagctagacacggtctccgcgggccgccggttgtcatatggcggcggcggcgccaaggcctccaccnncggccggcgcacgttcctgccgtaccggcaggacctcgtggggctgttcgccagcgtgcacgggctcagcaggagcccacacccgttntganccggtgagccacgaccacgacgcgccgtggaggacccgttccaaacagtgagacttcaggtttgaaatcgggatttgaaatttcagacatttgacttggagatctcctgcgagccgagtcaaaaagacaaggtgtgaagtcagagaaagcaggggaaatgtgagccttctttcaggattcggctcggaatcgtgctctgcagtcggtggctaaccacctgccatgcgatttgtgtaggcgggtacacatatactacgacaaattggacaagaagtttacatgtgattgttcgtatatgttggtatatatgtagctgtgtacatactgtacattgtatagtattgcaatttaggtatacaggagtaggtgtttgcgaggaattcagaattcctcgtttgcattctacagtttcgtttatctgcgtgttgtcgcatctctaatgtctaatctaactaattgcttttctgcct

SEQ ID NO: 34895 - protein, 75 aa, Zea mays subsp. mays
  peptide (1)..(75): Ceres Seq. ID no. 13498890
  misc_feature (41)..(75): NCBI GI NO: 34911600 NR Description: P0004A09.25
  misc_feature (71)..(71): Xaa is any aa, unknown or other
  misc_feature (72)..(72): Xaa is any aa, unknown or other
  misc_feature (73)..(73): Xaa is any aa, unknown or other
RTSSCSPFPSPRRTHPIANKASSRNMRDMPVVRRQEPTVVRTEDDVVSGGEDSDGEFEFPSVSRESAAGVXXXRV

SEQ ID NO: 34896 - protein, 61 aa, Zea mays subsp. mays
  peptide (1)..(61): Ceres Seq. ID no. 13498891
  misc_feature (38)..(61): NCBI GI NO: 25989119 NR Description: unknown [Streptomyces aureofaciens]
  misc_feature (3)..(61): NCBI GI NO: 5821151 NR Description: RNA binding protein [Homo sapiens]
  misc_feature (3)..(61): NCBI GI NO: 6634015 NR Description: KIAA0324 protein [Homo sapiens]
  misc_feature (3)..(61): NCBI GI NO: 7512967 NR Description: hypothetical protein KIAA0324 - human (fragment)
  misc_feature (10)..(61): NCBI GI NO: 25143299 NR Description: pre-mRNA splicing SR protein related RSR-1 (68
  misc_feature (3)..(61): NCBI GI NO: 6649242 NR Description: splicing coactivator subunit SRm300 [Homo sapiens]
  misc_feature (3)..(61): NCBI GI NO: 19923466 NR Description: splicing coactivator subunit SRm300
  misc_feature (6)..(61): NCBI GI NO: 23018055 NR Description: hypothetical protein [Thermobifida fusca]
  misc_feature (9)..(61): NCBI GI NO: 25143299 NR Description: pre-mRNA splicing SR protein related RSR-1 (68
  misc_feature (35)..(61): NCBI GI NO: 25143299 NR Description: pre-mRNA splicing SR protein related RSR-1 (68
ELAVVPLFPPHAERTRSQTKRAAETCETCRLSAARNPPSSGRRTTWFPAVRTRTASSSSPP

SEQ ID NO: 34897 - protein, 57 aa, Zea mays subsp. mays
  peptide (1)..(57): Ceres Seq. ID no. 13498892
  misc_feature (1)..(44): NCBI GI NO: 25989119 NR Description: unknown [Streptomyces aureofaciens]
  misc_feature (1)..(44): NCBI GI NO: 5821151 NR Description: RNA binding protein [Homo sapiens]
  misc_feature (1)..(44): NCBI GI NO: 6634015 NR Description: KIAA0324 protein [Homo sapiens]
  misc_feature (1)..(44): NCBI GI NO: 7512967 NR Description: hypothetical protein KIAA0324 - human (fragment)
  misc_feature (1)..(55): NCBI GI NO: 25143299 NR Description: pre-mRNA splicing SR protein related RSR-1 (68
  misc_feature (1)..(44): NCBI GI NO: 6649242 NR Description: splicing coactivator subunit SRm300 [Homo sapiens]
  misc_feature (1)..(44): NCBI GI NO: 19923466 NR Description: splicing coactivator subunit SRm300
  misc_feature (1)..(36): NCBI GI NO: 23018055 NR Description: hypothetical protein [Thermobifida fusca]
  misc_feature (1)..(21): NCBI GI NO: 34393619 NR Description: hypothetical protein
  misc_feature (10)..(10): Xaa is any aa, unknown or other
  misc_feature (11)..(11): Xaa is any aa, unknown or other
  misc_feature (40)..(40): Xaa is any aa, unknown or other
  misc_feature (41)..(41): Xaa is any aa, unknown or other
MAAAAPRPPXXAGARSCRTGRTSWGCSPACTGSAGAHTRXXPVSHDHDAPWRTRSKQ

SEQ ID NO: 34898 - protein, 50 aa, Zea mays subsp. mays
  peptide (1)..(50): Ceres Seq. ID no. 13498893
  misc_feature (16)..(50): NCBI GI NO: 34911600 NR Description: P0004A09.25
  misc_feature (46)..(46): Xaa is any aa, unknown or other
  misc_feature (47)..(47): Xaa is any aa, unknown or other
  misc_feature (48)..(48): Xaa is any aa, unknown or other
MRDMPVVRRQEPTVVRTEDDVVSGGEDSDGEFEFPSVSRESAAGVXXXRV

SEQ ID NO: 34899 - DNA, 1654 bp, Zea mays subsp. mays
  misc_feature (1)..(1654): Ceres Seq. ID no. 13492518
catttccgcgtcgtctccgcccgcagccggcagccccaccacccaccacatcggccgccatgccgggtggggcccacggcgccggcgccgcggacccgatgcaggtggaccagccgctcccccctgccgccgcaggcacagcacacgcccccgccgacgccaagcatgctggttctatgattgaagggagtgatccggtcacaggccatataatctcgacaaccattggagggaagaatggagagcctaaaaggactatcagctacatggcagagagagttgtgggaactggatcatttggaatcgtcttccaggcaaaatgtctggagactggtgagactgttgcgattaagaaggttttgcaggacaagcgctacaagaacagggagctacaaatcatgcgatccatggatcactgcaatgttgtttccttgaagcattgcttcttctctaccacaagcagagatgaacttttccttaacttagtgatggagtttgttcccgagtcattatatcgggtgttgaaacattacagcaatatgaaccagaggatgccactcatttatgtcaaattatatacctaccagatatttcgaggcttagcctatattcacacagtacctggagtttgccacagggatgtgaaaccacaaaatcttttggttgatccaccgactcaccaagtgaagatatgtgattttgggagtgccaaaatgttggtcaaaggtgaagcaaacatatcatatatatgttcacgttattaccgtgctccagagctcatatttggggcaactgagtacacaacatcaattgatatttggtcagctggatgtgttcttgctgagctgcttcttggccagcctctcttccctggtgaaagtgctgtggatcagcttgttgagataataaaggttcttggtaccccaacgcgcgaggaaatccgatgtatgaatccaaactacaccgagtttagatttcctcagatcaaagctcacccatggcacaagattttccacaagcggatgcctccagaagctatagatctcgcttcacgcttgctccagtattcaccaaatctaagatgcactgctcttgaagcgtgtgcacatccattctttgacgatttgcgagaaccacatgcgaggttgccaaatggacggccatttcctccactgttcaactttaaacaggaactagcaaatgcctccccagagctcatcaacaggttgatcccagaccatgctaggcggcatcttgggctcacattattgcccgctactggaccataggcgaaggctctatggtggtgcttcgttgtgcggaaggcaacctgcattcaaggtgtagaatctgacaattattggaaggtcaaacatgagctggcgcgtaaggagaggtggtatgttctcgtgcagccagccttaatttgtcgcatgtcttaatgcaaaaatctgatttttgcccaagtagtgagaggagggaagggggtggtcggtgtattgttaagctattgaaggaattcgatccctgctattgtgttactttctccaacgtttaaacgttgtagtgcgcctgtaagtgttccatatatcccctgttgtcagtcagtgtaattctgtaaatgttattaatgggaaattatttcgtgcttttc

SEQ ID NO: 34900 - protein, 428 aa, Zea mays subsp. mays
  peptide (1)..(428): Ceres Seq. ID no. 13492519
  misc_feature (88)..(372): Pfam Name: Pfam Description:  Protein kinase domain
  misc_feature (18)..(419): NCBI GI NO: 7434281 NR Description: probable shaggy-like protein kinase etha (EC2
  misc_feature (52)..(427): NCBI GI NO: 15233984 NR Description: shaggy-related protein kinase etha (EC 2.7.1.-)
  misc_feature (18)..(422): NCBI GI NO: 15221476 NR Description: shaggy-related kinase [Arabidopsis thaliana]
  misc_feature (52)..(427): NCBI GI NO: 12643751 NR Description: Shaggy-related protein kinase eta (ASK-eta)
  misc_feature (52)..(427): NCBI GI NO: 18700188 NR Description: AT4g18710/F28A21_120 [Arabidopsis thaliana]
  misc_feature (52)..(418): NCBI GI NO: 15224593 NR Description: shaggy-related protein kinase dzeta
  misc_feature (52)..(418): NCBI GI NO: 12643750 NR Description: Shaggy-related protein kinase delta
  misc_feature (52)..(418): NCBI GI NO: 21593135 NR Description: putative shaggy-like protein kinase dzeta
  misc_feature (52)..(423): NCBI GI NO: 22326813 NR Description: serine/threonine protein kinase, Msk family
  misc_feature (17)..(416): NCBI GI NO: 1076649 NR Description: shaggy protein kinase 4 (EC 2
FPRRLRPQPAAPPPTTSAAMPGGAHGAGAADPMQVDQPLPPAAAGTAHAPADAKHAGSMIEGSDPVTGHIISTTIGGKNGEPKRTISYMAERVVGTGSFGIVFQAKCLETGETVAIKKVLQDKRYKNRELQIMRSMDHCNVVSLKHCFFSTTSRDELFLNLVMEFVPESLYRVLKHYSNMNQRMPLIYVKLYTYQIFRGLAYIHTVPGVCHRDVKPQNLLVDPPTHQVKICDFGSAKMLVKGEANISYICSRYYRAPELIFGATEYTTSIDIWSAGCVLAELLLGQPLFPGESAVDQLVEIIKVLGTPTREEIRCMNPNYTEFRFPQIKAHPWHKIFHKRMPPEAIDLASRLLQYSPNLRCTALEACAHPFFDDLREPHARLPNGRPFPPLFNFKQELANASPELINRLIPDHARRHLGLTLLPATGP

SEQ ID NO: 34901 - protein, 409 aa, Zea mays subsp. mays
  peptide (1)..(409): Ceres Seq. ID no. 13492520
  misc_feature (69)..(353): Pfam Name: Pfam Description:  Protein kinase domain
  misc_feature (1)..(400): NCBI GI NO: 7434281 NR Description: probable shaggy-like protein kinase etha (EC2
  misc_feature (33)..(408): NCBI GI NO: 15233984 NR Description: shaggy-related protein kinase etha (EC 2.7.1.-)
  misc_feature (1)..(403): NCBI GI NO: 15221476 NR Description: shaggy-related kinase [Arabidopsis thaliana]
  misc_feature (33)..(408): NCBI GI NO: 12643751 NR Description: Shaggy-related protein kinase eta (ASK-eta)
  misc_feature (33)..(408): NCBI GI NO: 18700188 NR Description: AT4g18710/F28A21_120 [Arabidopsis thaliana]
  misc_feature (33)..(399): NCBI GI NO: 15224593 NR Description: shaggy-related protein kinase dzeta
  misc_feature (33)..(399): NCBI GI NO: 12643750 NR Description: Shaggy-related protein kinase delta
  misc_feature (33)..(399): NCBI GI NO: 21593135 NR Description: putative shaggy-like protein kinase dzeta
  misc_feature (33)..(404): NCBI GI NO: 22326813 NR Description: serine/threonine protein kinase, Msk family
  misc_feature (1)..(397): NCBI GI NO: 1076649 NR Description: shaggy protein kinase 4 (EC 2
MPGGAHGAGAADPMQVDQPLPPAAAGTAHAPADAKHAGSMIEGSDPVTGHIISTTIGGKNGEPKRTISYMAERVVGTGSFGIVFQAKCLETGETVAIKKVLQDKRYKNRELQIMRSMDHCNVVSLKHCFFSTTSRDELFLNLVMEFVPESLYRVLKHYSNMNQRMPLIYVKLYTYQIFRGLAYIHTVPGVCHRDVKPQNLLVDPPTHQVKICDFGSAKMLVKGEANISYICSRYYRAPELIFGATEYTTSIDIWSAGCVLAELLLGQPLFPGESAVDQLVEIIKVLGTPTREEIRCMNPNYTEFRFPQIKAHPWHKIFHKRMPPEAIDLASRLLQYSPNLRCTALEACAHPFFDDLREPHARLPNGRPFPPLFNFKQELANASPELINRLIPDHARRHLGLTLLPATGP

SEQ ID NO: 34902 - protein, 396 aa, Zea mays subsp. mays
  peptide (1)..(396): Ceres Seq. ID no. 13492521
  misc_feature (56)..(340): Pfam Name: Pfam Description:  Protein kinase domain
  misc_feature (1)..(387): NCBI GI NO: 7434281 NR Description: probable shaggy-like protein kinase etha (EC2
  misc_feature (20)..(395): NCBI GI NO: 15233984 NR Description: shaggy-related protein kinase etha (EC 2.7.1.-)
  misc_feature (1)..(390): NCBI GI NO: 15221476 NR Description: shaggy-related kinase [Arabidopsis thaliana]
  misc_feature (20)..(395): NCBI GI NO: 12643751 NR Description: Shaggy-related protein kinase eta (ASK-eta)
  misc_feature (20)..(395): NCBI GI NO: 18700188 NR Description: AT4g18710/F28A21_120 [Arabidopsis thaliana]
  misc_feature (20)..(386): NCBI GI NO: 15224593 NR Description: shaggy-related protein kinase dzeta
  misc_feature (20)..(386): NCBI GI NO: 12643750 NR Description: Shaggy-related protein kinase delta
  misc_feature (20)..(386): NCBI GI NO: 21593135 NR Description: putative shaggy-like protein kinase dzeta
  misc_feature (20)..(391): NCBI GI NO: 22326813 NR Description: serine/threonine protein kinase, Msk family
  misc_feature (1)..(384): NCBI GI NO: 1076649 NR Description: shaggy protein kinase 4 (EC 2
MQVDQPLPPAAAGTAHAPADAKHAGSMIEGSDPVTGHIISTTIGGKNGEPKRTISYMAERVVGTGSFGIVFQAKCLETGETVAIKKVLQDKRYKNRELQIMRSMDHCNVVSLKHCFFSTTSRDELFLNLVMEFVPESLYRVLKHYSNMNQRMPLIYVKLYTYQIFRGLAYIHTVPGVCHRDVKPQNLLVDPPTHQVKICDFGSAKMLVKGEANISYICSRYYRAPELIFGATEYTTSIDIWSAGCVLAELLLGQPLFPGESAVDQLVEIIKVLGTPTREEIRCMNPNYTEFRFPQIKAHPWHKIFHKRMPPEAIDLASRLLQYSPNLRCTALEACAHPFFDDLREPHARLPNGRPFPPLFNFKQELANASPELINRLIPDHARRHLGLTLLPATGP

SEQ ID NO: 34903 - DNA, 1176 bp, Zea mays subsp. mays
  misc_feature (1)..(1176): Ceres Seq. ID no. 12347474
aaacatccccaacccacgaccctccgccaccggccatcgcctgcatcagatctcccgcccgtccgttacatctcagcgcgacgcggccgcggccatgacgccatcctccgctctcgccctcgcgcaccacgccgcggcatccccgctcccgtcctccacgccgcggccctcccccaggtccagctctctgagcctgggcccgggctccgccgggctcgggccgcgccggctcgtcgcggcagcgcccccacgggcgttcttctcctcgtccccctaccagccgccccagccggaggggttctcgcagcaccgcgagtacggcctggtccccatggtcatcgagaccacctcccggggggagcgcgcctacgacatcttctcgcgcctgcttaaggagcgcatcgtctgcatccacgggcccatcgccgacgacacggcctcgctcgtcgtcgcgcagctgctcttcctcgagtccgagaacccgctcaagcccgtccacctctacatcaactcccccgggggcgtcgtcaccgcggggctcgccatctacgacaccatgcagtacatccgctgccccgtcaccaccctctgcatcggccaggcggcctccatgggctcgctcctcctcgcggctggggcgccgggtgagaggcgcgcgcttcccaacgccagggtcatgatccaccagccctcgggcggcgcgcaggggcaagccaccgacatcgcccatccaggccaaggagatcctcaaaatgcgcgaccgcctcaacaagatctaccagaagcacacgcgccagcccatcgataagattgagcagtgcatggagagggacctcttcatggaccctgaagaggcgcgcgactggggcctcatcgacgaggtcatcgagaatcgacctgcctcgttcatgcccgacggaatcggtggaggcctcgatgtgcccaggctcggtggcgttggcggcggacgggggagggacgtcgaggaaccttccgcggtgtgaggattggcctcaaaggtgaaatccttcctcatccggtggatgtgttgtttgttgttagatccaaaggttcaattcttactatacaaggttaaccttgttattatggttatggaaacgtccggctccccattgtccttgttgcttaaattgcttcaattgagctattggggat

SEQ ID NO: 34904 - protein, 268 aa, Zea mays subsp. mays
  peptide (1)..(268): Ceres Seq. ID no. 12347475
  misc_feature (117)..(246): Pfam Name: Pfam Description:  Clp protease
  misc_feature (75)..(242): NCBI GI NO: 38344435 NR Description: OSJNBa0038O10.7
  misc_feature (104)..(246): NCBI GI NO: 18420643 NR Description: ATP-dependent Clp protease proteolytic subunit
  misc_feature (54)..(242): NCBI GI NO: 34882298 NR Description: similar to ClpP protease [Rattus norvegicus]
  misc_feature (108)..(241): NCBI GI NO: 31238393 NR Description: ENSANGP00000017225 [Anopheles gambiae]
  misc_feature (68)..(242): NCBI GI NO: 8393156 NR Description: caseinolytic protease
  misc_feature (104)..(242): NCBI GI NO: 5174419 NR Description: endopeptidase Clp precursor
  misc_feature (108)..(241): NCBI GI NO: 23108078 NR Description: hypothetical protein
  misc_feature (108)..(246): NCBI GI NO: 18203228 NR Description: ATP-dependent Clp protease proteolytic subunit
  misc_feature (108)..(246): NCBI GI NO: 23501987 NR Description: ATP-dependent Clp protease
  misc_feature (108)..(241): NCBI GI NO: 16126206 NR Description: ATP-dependent Clp protease, proteolytic subunit
NIPNPRPSATGHRLHQISRPSVTSQRDAAAAMTPSSALALAHHAAASPLPSSTPRPSPRSSSLSLGPGSAGLGPRRLVAAAPPRAFFSSSPYQPPQPEGFSQHREYGLVPMVIETTSRGERAYDIFSRLLKERIVCIHGPIADDTASLVVAQLLFLESENPLKPVHLYINSPGGVVTAGLAIYDTMQYIRCPVTTLCIGQAASMGSLLLAAGAPGERRALPNARVMIHQPSGGAQGQATDIAHPGQGDPQNARPPQQDLPEAHAPAHR

SEQ ID NO: 34905 - protein, 237 aa, Zea mays subsp. mays
  peptide (1)..(237): Ceres Seq. ID no. 12347476
  misc_feature (86)..(215): Pfam Name: Pfam Description:  Clp protease
  misc_feature (44)..(211): NCBI GI NO: 38344435 NR Description: OSJNBa0038O10.7
  misc_feature (73)..(215): NCBI GI NO: 18420643 NR Description: ATP-dependent Clp protease proteolytic subunit
  misc_feature (23)..(211): NCBI GI NO: 34882298 NR Description: similar to ClpP protease [Rattus norvegicus]
  misc_feature (77)..(210): NCBI GI NO: 31238393 NR Description: ENSANGP00000017225 [Anopheles gambiae]
  misc_feature (37)..(211): NCBI GI NO: 8393156 NR Description: caseinolytic protease
  misc_feature (73)..(211): NCBI GI NO: 5174419 NR Description: endopeptidase Clp precursor
  misc_feature (77)..(210): NCBI GI NO: 23108078 NR Description: hypothetical protein
  misc_feature (77)..(215): NCBI GI NO: 18203228 NR Description: ATP-dependent Clp protease proteolytic subunit
  misc_feature (77)..(215): NCBI GI NO: 23501987 NR Description: ATP-dependent Clp protease
  misc_feature (77)..(210): NCBI GI NO: 16126206 NR Description: ATP-dependent Clp protease, proteolytic subunit
MTPSSALALAHHAAASPLPSSTPRPSPRSSSLSLGPGSAGLGPRRLVAAAPPRAFFSSSPYQPPQPEGFSQHREYGLVPMVIETTSRGERAYDIFSRLLKERIVCIHGPIADDTASLVVAQLLFLESENPLKPVHLYINSPGGVVTAGLAIYDTMQYIRCPVTTLCIGQAASMGSLLLAAGAPGERRALPNARVMIHQPSGGAQGQATDIAHPGQGDPQNARPPQQDLPEAHAPAHR

SEQ ID NO: 34906 - protein, 158 aa, Zea mays subsp. mays
  peptide (1)..(158): Ceres Seq. ID no. 12347477
  misc_feature (7)..(136): Pfam Name: Pfam Description:  Clp protease
  misc_feature (1)..(132): NCBI GI NO: 38344435 NR Description: OSJNBa0038O10.7
  misc_feature (1)..(136): NCBI GI NO: 18420643 NR Description: ATP-dependent Clp protease proteolytic subunit
  misc_feature (1)..(132): NCBI GI NO: 34882298 NR Description: similar to ClpP protease [Rattus norvegicus]
  misc_feature (1)..(131): NCBI GI NO: 31238393 NR Description: ENSANGP00000017225 [Anopheles gambiae]
  misc_feature (1)..(132): NCBI GI NO: 8393156 NR Description: caseinolytic protease
  misc_feature (1)..(132): NCBI GI NO: 5174419 NR Description: endopeptidase Clp precursor
  misc_feature (1)..(131): NCBI GI NO: 23108078 NR Description: hypothetical protein
  misc_feature (1)..(136): NCBI GI NO: 18203228 NR Description: ATP-dependent Clp protease proteolytic subunit
  misc_feature (1)..(136): NCBI GI NO: 23501987 NR Description: ATP-dependent Clp protease
  misc_feature (1)..(131): NCBI GI NO: 16126206 NR Description: ATP-dependent Clp protease, proteolytic subunit
MVIETTSRGERAYDIFSRLLKERIVCIHGPIADDTASLVVAQLLFLESENPLKPVHLYINSPGGVVTAGLAIYDTMQYIRCPVTTLCIGQAASMGSLLLAAGAPGERRALPNARVMIHQPSGGAQGQATDIAHPGQGDPQNARPPQQDLPEAHAPAHR

SEQ ID NO: 34907 - DNA, 1623 bp, Zea mays subsp. mays
  misc_feature (1)..(1623): Ceres Seq. ID no. 12345183
acctcacaagtccaaatcagtttgtctgctccgcccgttgcccgtggcccgtcggtctctcttgcagtctcgccgctccccttcctcccccgcaggaatccgaatcagtaagtccggcgacctaggtctctcggcttgtccgcagcccgccggtcagtaatggcgcaggatgatccggttgtttctgctcagtggctgcacgagcacctagggatgcctgatgttaaggtaaaaaaaaaacatctagtttgcgtgttcatattcacttcagagacacttcagtaatgcttccttcatcgaagaagaaagttcagagatatacttcttctatcccctgcgttactggtatgtggagaatataacagtttggttgtctatcaatttgatattcccttttatgtgttgtgttcttattactcccagaaataattagagggttagggacatatgtgctttgtgacagttatcagcttgttttaggttttggatgcttcctggtacatgccggtagagaacagggatccatggaaagaatatcaggtggcacacatccccggtgcgctattcttcgacttagatggcatagttgatcggacaactgatttaccgcacatgctgccatcagaagaggcttttgcagcagcaatttctgagctggatataaaaaaccaggataaagttattgtctatgatggaaagggattcttcagtgcacctcgtgtttggtggatgtttagagtgtttgggcacaagaaagtctgggtactagacggcggtttgcctcagtggcaagcttctgggttcaacgtggaaaaggccagccctgacgatgacgcagttctgaaatcaatcgctgcaaacagggctgtcaaaagggtttataatggtgaacagacaaatacaatctcgtttcagactgaatttcagcctaatctattctgggcactggaaaaggtcgcacaaaacgtcactgctaagacgtaccaacagatagatgccagagcaaagggcagattcgacggcgtggcgccagagccacgggaaggggtaaggagtgggcatataccaggaagcgtctgcgttccgttccccgagatgttcgacggcgcaccaccgagccttctcctccccgccgacgagctgcggcggaagtttcagcacgcaggaatctccctggaccgacccatcgtcgtgacctgcggatccggcgtgactgcctgcatactcgctctggggctgtacaggatcggaaagcgtgatgtgccagtctacgatgggtcctcgacggagtgggagggtcagtcggactccgattaccccaaagtcaccgctcctggtacagcttgagcgtctgggactgggagttggcagttttagactgccagcatgatggcattgtgtttgcgacaggctgaaccgattttatcgagcactggaagcattgtattcgctactggtaggcctgctaatggcaaaaattccaacccacgcccacccatacccaaatctaataacttgatattcatcccactcccacccaaaaatataagaagaaaattaaacctaacccatccaatgatattattgatccctaaaccaacccgtaattgggtggaaacccgt

SEQ ID NO: 34908 - protein, 281 aa, Zea mays subsp. mays
  peptide (1)..(281): Ceres Seq. ID no. 12345184
  misc_feature (1)..(99): Pfam Name: Pfam Description:  Rhodanese-like domain
  misc_feature (1)..(280): NCBI GI NO: 14571545 NR Description: thiosulfate transferase [Triticum aestivum]
  misc_feature (1)..(270): NCBI GI NO: 4406372 NR Description: thiosulfate sulfurtransferase [Datisca glomerata]
  misc_feature (1)..(269): NCBI GI NO: 18412307 NR Description: mercaptopyruvate sulfurtransferase
  misc_feature (1)..(269): NCBI GI NO: 25288794 NR Description: thiosulfate sulfurtransferase (EC 2
  misc_feature (1)..(264): NCBI GI NO: 18394364 NR Description: mercaptopyruvate sulfurtransferase
  misc_feature (1)..(264): NCBI GI NO: 30684873 NR Description: mercaptopyruvate sulfurtransferase (Mst2/Rdh2)
  misc_feature (1)..(264): NCBI GI NO: 25456716 NR Description: thiosulfate sulfurtransferase (EC 2.8.1.1)
  misc_feature (1)..(264): NCBI GI NO: 25288797 NR Description: hypothetical protein F3O9.26
  misc_feature (137)..(278): NCBI GI NO: 16125674 NR Description: rhodanese family protein
  misc_feature (1)..(104): NCBI GI NO: 16125674 NR Description: rhodanese family protein
MPVENRDPWKEYQVAHIPGALFFDLDGIVDRTTDLPHMLPSEEAFAAAISELDIKNQDKVIVYDGKGFFSAPRVWWMFRVFGHKKVWVLDGGLPQWQASGFNVEKASPDDDAVLKSIAANRAVKRVYNGEQTNTISFQTEFQPNLFWALEKVAQNVTAKTYQQIDARAKGRFDGVAPEPREGVRSGHIPGSVCVPFPEMFDGAPPSLLLPADELRRKFQHAGISLDRPIVVTCGSGVTACILALGLYRIGKRDVPVYDGSSTEWEGQSDSDYPKVTAPGTA

SEQ ID NO: 34909 - protein, 244 aa, Zea mays subsp. mays
  peptide (1)..(244): Ceres Seq. ID no. 12345185
  misc_feature (1)..(62): Pfam Name: Pfam Description:  Rhodanese-like domain
  misc_feature (1)..(243): NCBI GI NO: 14571545 NR Description: thiosulfate transferase [Triticum aestivum]
  misc_feature (1)..(233): NCBI GI NO: 4406372 NR Description: thiosulfate sulfurtransferase [Datisca glomerata]
  misc_feature (1)..(232): NCBI GI NO: 18412307 NR Description: mercaptopyruvate sulfurtransferase
  misc_feature (1)..(232): NCBI GI NO: 25288794 NR Description: thiosulfate sulfurtransferase (EC 2
  misc_feature (1)..(227): NCBI GI NO: 18394364 NR Description: mercaptopyruvate sulfurtransferase
  misc_feature (1)..(227): NCBI GI NO: 30684873 NR Description: mercaptopyruvate sulfurtransferase (Mst2/Rdh2)
  misc_feature (1)..(227): NCBI GI NO: 25456716 NR Description: thiosulfate sulfurtransferase (EC 2.8.1.1)
  misc_feature (1)..(227): NCBI GI NO: 25288797 NR Description: hypothetical protein F3O9.26
  misc_feature (100)..(241): NCBI GI NO: 16125674 NR Description: rhodanese family protein
  misc_feature (1)..(67): NCBI GI NO: 16125674 NR Description: rhodanese family protein
MLPSEEAFAAAISELDIKNQDKVIVYDGKGFFSAPRVWWMFRVFGHKKVWVLDGGLPQWQASGFNVEKASPDDDAVLKSIAANRAVKRVYNGEQTNTISFQTEFQPNLFWALEKVAQNVTAKTYQQIDARAKGRFDGVAPEPREGVRSGHIPGSVCVPFPEMFDGAPPSLLLPADELRRKFQHAGISLDRPIVVTCGSGVTACILALGLYRIGKRDVPVYDGSSTEWEGQSDSDYPKVTAPGTA

SEQ ID NO: 34910 - protein, 205 aa, Zea mays subsp. mays
  peptide (1)..(205): Ceres Seq. ID no. 12345186
  misc_feature (1)..(204): NCBI GI NO: 14571545 NR Description: thiosulfate transferase [Triticum aestivum]
  misc_feature (1)..(194): NCBI GI NO: 4406372 NR Description: thiosulfate sulfurtransferase [Datisca glomerata]
  misc_feature (1)..(193): NCBI GI NO: 18412307 NR Description: mercaptopyruvate sulfurtransferase
  misc_feature (1)..(193): NCBI GI NO: 25288794 NR Description: thiosulfate sulfurtransferase (EC 2
  misc_feature (1)..(188): NCBI GI NO: 18394364 NR Description: mercaptopyruvate sulfurtransferase
  misc_feature (1)..(188): NCBI GI NO: 30684873 NR Description: mercaptopyruvate sulfurtransferase (Mst2/Rdh2)
  misc_feature (1)..(188): NCBI GI NO: 25456716 NR Description: thiosulfate sulfurtransferase (EC 2.8.1.1)
  misc_feature (1)..(188): NCBI GI NO: 25288797 NR Description: hypothetical protein F3O9.26
  misc_feature (61)..(202): NCBI GI NO: 16125674 NR Description: rhodanese family protein
  misc_feature (1)..(28): NCBI GI NO: 16125674 NR Description: rhodanese family protein
MFRVFGHKKVWVLDGGLPQWQASGFNVEKASPDDDAVLKSIAANRAVKRVYNGEQTNTISFQTEFQPNLFWALEKVAQNVTAKTYQQIDARAKGRFDGVAPEPREGVRSGHIPGSVCVPFPEMFDGAPPSLLLPADELRRKFQHAGISLDRPIVVTCGSGVTACILALGLYRIGKRDVPVYDGSSTEWEGQSDSDYPKVTAPGTA

SEQ ID NO: 34911 - DNA, 1883 bp, Zea mays subsp. mays
  misc_feature (1)..(1883): Ceres Seq. ID no. 13494565
ctaatcactagtataaagcaggcggagacagccggcccctctggcctcgctgctcccccttcctccccgtccccacccacatgccctgcctccgccccgccccgccctgcccaaggtgattgattgattggttgcttggttgcttgcttcgtttcacgctttccccttcctttgctgagatccaaaagctgagactcagcttgtcgatccatctgttctgtgcgcctactcgtatcttaggatccatctgtatgttgtttacttgttttcctgattgaatcgcgcattggatgcctggtggttggccttgctcctagtcttttcatttacacgagctttcgacgaagccgcgtctggtctgtctgctccatcacaagagcacgcaaatggttcgatctgccgtgccagatgattgctgcattcagtgggacgtcatgcacatccacgatggattgtagcgtcagcactctgatctttccttgtcgatttgtttgtcgcagctgagttcccccaccccccaacaaacaattactagagtagctgcattggcggggaaattaaagcgctagaagctcagcagcaatggcggagcaggcgggcgccggaaggtactggtgccacatgtgcgccgcggccgttagccccgcggagggcgaggtggagatgaagtgcccgttctgccacagcggcttcctcgaggagatggagaccgcccgcggggccgcgaccgacgacggtgacggcgacggcgcggtggctcaggtgcaccccggcgccgaccgcccgagctccatctgggcgcacgctatcctcagcacggtcgacagctccgcccgtcgccgccgcaaccggcggcagcaggaggccgccagcgacgtctacgactggaacgaccccgagttctcgctgcgccggcggcgcgtcaccgcgttcctgcggctcctgcacgagctccgggaccgccagctgcagcggctggagtccgctgccggcgtcgccctcgaaggcgaccagctgaccccgttcggccggagcctcttcatcggcgcagctggcggcgagcatggcgtggcgctgggcgactacttcctcggccccagcctcgacgccttggtacagcagctcgccgagaacgatgcggcgcggcacggaacgccgccggccaagaaggaggccgtggaggcaatgccgaccgtggaaatcgccggcggcaacgatggcgacgacgcggccagctgcccggtctgcctggaggactacgcggccggcgagcgcgcccgcgagatgccctgcaggcacaggttccacgccaattgcatcgtgccgtggctcgagatgcacagctcctgccctgtctgccggttccagctgccggccaccgacgacaagagctcatgcaacggcggcgacggtggtttcgtcagtgtcgatgcggatcgtgaaggcagtgacaacggcgggggtgatggtagggcaagctctcggggcaatgccgagctagctgaagctgaagagagtggcaggcggttgccgccatccttgcagtggctcaacagcctgttctcgccgtcggcgcagtcctccggtagcggcggcagcagttcgcatcattgggagaactaagcaatattgccatggttgctgccgcttgaaagcttggcccgttggttggtcccaatgtacataggaaggagcaggagcgcatgccgggttggtgccatggaaaaatctggacccttttttctctgatatgtatcatggctgtaaaaaagaacagaaatgggcaaatgtatgaacttgccgcgctcttgcgtgaactgggtgctaatcatcgtcttactactcaattttggtttttattaacaaaactatagtatttatgc

SEQ ID NO: 34912 - protein, 346 aa, Zea mays subsp. mays
  peptide (1)..(346): Ceres Seq. ID no. 13494566
  misc_feature (219)..(259): Pfam Name: RING finger Pfam Description: Zinc finger, C3HC4 type
  misc_feature (1)..(342): NCBI GI NO: 34903272 NR Description: unnamed protein product
  misc_feature (104)..(346): NCBI GI NO: 15241188 NR Description: expressed protein [Arabidopsis thaliana]
  misc_feature (3)..(93): NCBI GI NO: 15241188 NR Description: expressed protein [Arabidopsis thaliana]
  misc_feature (80)..(346): NCBI GI NO: 22328949 NR Description: expressed protein [Arabidopsis thaliana]
  misc_feature (7)..(93): NCBI GI NO: 22328949 NR Description: expressed protein [Arabidopsis thaliana]
  misc_feature (3)..(340): NCBI GI NO: 18405411 NR Description: expressed protein [Arabidopsis thaliana]
  misc_feature (80)..(346): NCBI GI NO: 7486783 NR Description: hypothetical protein M3E9
  misc_feature (19)..(93): NCBI GI NO: 7486783 NR Description: hypothetical protein M3E9
  misc_feature (9)..(340): NCBI GI NO: 37535546 NR Description: putative zinc finger protein
  misc_feature (166)..(292): NCBI GI NO: 11994207 NR Description: gene_id:MPN9.20~unknown protein
MAEQAGAGRYWCHMCAAAVSPAEGEVEMKCPFCHSGFLEEMETARGAATDDGDGDGAVAQVHPGADRPSSIWAHAILSTVDSSARRRRNRRQQEAASDVYDWNDPEFSLRRRRVTAFLRLLHELRDRQLQRLESAAGVALEGDQLTPFGRSLFIGAAGGEHGVALGDYFLGPSLDALVQQLAENDAARHGTPPAKKEAVEAMPTVEIAGGNDGDDAASCPVCLEDYAAGERAREMPCRHRFHANCIVPWLEMHSSCPVCRFQLPATDDKSSCNGGDGGFVSVDADREGSDNGGGDGRASSRGNAELAEAEESGRRLPPSLQWLNSLFSPSAQSSGSGGSSSHHWEN

SEQ ID NO: 34913 - protein, 333 aa, Zea mays subsp. mays
  peptide (1)..(333): Ceres Seq. ID no. 13494567
  misc_feature (206)..(246): Pfam Name: RING finger Pfam Description: Zinc finger, C3HC4 type
  misc_feature (1)..(329): NCBI GI NO: 34903272 NR Description: unnamed protein product
  misc_feature (91)..(333): NCBI GI NO: 15241188 NR Description: expressed protein [Arabidopsis thaliana]
  misc_feature (1)..(80): NCBI GI NO: 15241188 NR Description: expressed protein [Arabidopsis thaliana]
  misc_feature (67)..(333): NCBI GI NO: 22328949 NR Description: expressed protein [Arabidopsis thaliana]
  misc_feature (1)..(80): NCBI GI NO: 22328949 NR Description: expressed protein [Arabidopsis thaliana]
  misc_feature (1)..(327): NCBI GI NO: 18405411 NR Description: expressed protein [Arabidopsis thaliana]
  misc_feature (67)..(333): NCBI GI NO: 7486783 NR Description: hypothetical protein M3E9
  misc_feature (6)..(80): NCBI GI NO: 7486783 NR Description: hypothetical protein M3E9
  misc_feature (1)..(327): NCBI GI NO: 37535546 NR Description: putative zinc finger protein
  misc_feature (153)..(279): NCBI GI NO: 11994207 NR Description: gene_id:MPN9.20~unknown protein
MCAAAVSPAEGEVEMKCPFCHSGFLEEMETARGAATDDGDGDGAVAQVHPGADRPSSIWAHAILSTVDSSARRRRNRRQQEAASDVYDWNDPEFSLRRRRVTAFLRLLHELRDRQLQRLESAAGVALEGDQLTPFGRSLFIGAAGGEHGVALGDYFLGPSLDALVQQLAENDAARHGTPPAKKEAVEAMPTVEIAGGNDGDDAASCPVCLEDYAAGERAREMPCRHRFHANCIVPWLEMHSSCPVCRFQLPATDDKSSCNGGDGGFVSVDADREGSDNGGGDGRASSRGNAELAEAEESGRRLPPSLQWLNSLFSPSAQSSGSGGSSSHHWEN

SEQ ID NO: 34914 - protein, 319 aa, Zea mays subsp. mays
  peptide (1)..(319): Ceres Seq. ID no. 13494568
  misc_feature (192)..(232): Pfam Name: RING finger Pfam Description: Zinc finger, C3HC4 type
  misc_feature (1)..(315): NCBI GI NO: 34903272 NR Description: unnamed protein product
  misc_feature (77)..(319): NCBI GI NO: 15241188 NR Description: expressed protein [Arabidopsis thaliana]
  misc_feature (1)..(66): NCBI GI NO: 15241188 NR Description: expressed protein [Arabidopsis thaliana]
  misc_feature (53)..(319): NCBI GI NO: 22328949 NR Description: expressed protein [Arabidopsis thaliana]
  misc_feature (1)..(66): NCBI GI NO: 22328949 NR Description: expressed protein [Arabidopsis thaliana]
  misc_feature (1)..(313): NCBI GI NO: 18405411 NR Description: expressed protein [Arabidopsis thaliana]
  misc_feature (53)..(319): NCBI GI NO: 7486783 NR Description: hypothetical protein M3E9
  misc_feature (1)..(66): NCBI GI NO: 7486783 NR Description: hypothetical protein M3E9
  misc_feature (1)..(313): NCBI GI NO: 37535546 NR Description: putative zinc finger protein
  misc_feature (139)..(265): NCBI GI NO: 11994207 NR Description: gene_id:MPN9.20~unknown protein
MKCPFCHSGFLEEMETARGAATDDGDGDGAVAQVHPGADRPSSIWAHAILSTVDSSARRRRNRRQQEAASDVYDWNDPEFSLRRRRVTAFLRLLHELRDRQLQRLESAAGVALEGDQLTPFGRSLFIGAAGGEHGVALGDYFLGPSLDALVQQLAENDAARHGTPPAKKEAVEAMPTVEIAGGNDGDDAASCPVCLEDYAAGERAREMPCRHRFHANCIVPWLEMHSSCPVCRFQLPATDDKSSCNGGDGGFVSVDADREGSDNGGGDGRASSRGNAELAEAEESGRRLPPSLQWLNSLFSPSAQSSGSGGSSSHHWEN

SEQ ID NO: 34915 - DNA, 1376 bp, Zea mays subsp. mays; identical to SEQ ID NO: 34227
  misc_feature (1)..(1376): Ceres Seq. ID no. 12404602

SEQ ID NO: 34916 - protein, 264 aa, Zea mays subsp. mays; identical to SEQ ID NO: 34228
  peptide (1)..(264): Ceres Seq. ID no. 12404603
  misc_feature (12)..(87): NCBI GI NO: 34913714 NR Description: putative peroxidase
  misc_feature (15)..(87): NCBI GI NO: 7453853 NR Description: peroxidase prx14 precursor [Spinacia oleracea]
  misc_feature (11)..(87): NCBI GI NO: 7453855 NR Description: peroxidase prx15 precursor [Spinacia oleracea]
  misc_feature (41)..(87): NCBI GI NO: 7658147 NR Description: peroxidase [Asparagus officinalis]
  misc_feature (15)..(87): NCBI GI NO: 34903044 NR Description: unnamed protein product
  misc_feature (11)..(87): NCBI GI NO: 25044849 NR Description: peroxidase [Ananas comosus]
  misc_feature (11)..(87): NCBI GI NO: 15239370 NR Description: peroxidase, putative; protein id: At5g66390.1
  misc_feature (11)..(87): NCBI GI NO: 1402918 NR Description: peroxidase [Arabidopsis thaliana]
  misc_feature (37)..(87): NCBI GI NO: 7453851 NR Description: peroxidase prx13 precursor [Spinacia oleracea]
  misc_feature (37)..(87): NCBI GI NO: 15234394 NR Description: peroxidase, putative; protein id: At4g36430

SEQ ID NO: 34917 - protein, 212 aa, Zea mays subsp. mays; identical to SEQ ID NO: 34229
  peptide (1)..(212): Ceres Seq. ID no. 12404604
  misc_feature (1)..(35): NCBI GI NO: 34913714 NR Description: putative peroxidase
  misc_feature (1)..(35): NCBI GI NO: 7453853 NR Description: peroxidase prx14 precursor [Spinacia oleracea]
  misc_feature (1)..(35): NCBI GI NO: 7453855 NR Description: peroxidase prx15 precursor [Spinacia oleracea]
  misc_feature (1)..(35): NCBI GI NO: 7658147 NR Description: peroxidase [Asparagus officinalis]
  misc_feature (1)..(35): NCBI GI NO: 34903044 NR Description: unnamed protein product
  misc_feature (1)..(35): NCBI GI NO: 25044849 NR Description: peroxidase [Ananas comosus]
  misc_feature (1)..(35): NCBI GI NO: 15239370 NR Description: peroxidase, putative; protein id: At5g66390.1
  misc_feature (1)..(35): NCBI GI NO: 1402918 NR Description: peroxidase [Arabidopsis thaliana]
  misc_feature (1)..(35): NCBI GI NO: 7453851 NR Description: peroxidase prx13 precursor [Spinacia oleracea]
  misc_feature (1)..(35): NCBI GI NO: 15234394 NR Description: peroxidase, putative; protein id: At4g36430

SEQ ID NO: 34918 - protein, 194 aa, Zea mays subsp. mays; identical to SEQ ID NO: 34230
  peptide (1)..(194): Ceres Seq. ID no. 12404605
  misc_feature (1)..(17): NCBI GI NO: 34913714 NR Description: putative peroxidase
  misc_feature (1)..(17): NCBI GI NO: 7453853 NR Description: peroxidase prx14 precursor [Spinacia oleracea]
  misc_feature (1)..(17): NCBI GI NO: 7453855 NR Description: peroxidase prx15 precursor [Spinacia oleracea]
  misc_feature (1)..(17): NCBI GI NO: 7658147 NR Description: peroxidase [Asparagus officinalis]
  misc_feature (1)..(17): NCBI GI NO: 34903044 NR Description: unnamed protein product
  misc_feature (1)..(17): NCBI GI NO: 25044849 NR Description: peroxidase [Ananas comosus]
  misc_feature (1)..(17): NCBI GI NO: 15239370 NR Description: peroxidase, putative; protein id: At5g66390.1
  misc_feature (1)..(17): NCBI GI NO: 1402918 NR Description: peroxidase [Arabidopsis thaliana]
  misc_feature (1)..(17): NCBI GI NO: 7453851 NR Description: peroxidase prx13 precursor [Spinacia oleracea]
  misc_feature (1)..(17): NCBI GI NO: 15234394 NR Description: peroxidase, putative; protein id: At4g36430

SEQ ID NO: 34919 - DNA, 1393 bp, Zea mays subsp. mays
  misc_feature (1)..(1393): Ceres Seq. ID no. 12351858
aagggtggccagctagccgaagaaacacccagacgaagcggccgtttttggcatctcgtatgtgcaacttcgctggaaccctcctcgactgattttaccgcacagcagaaaaggagataaaacacgacaaaaattgaaggaaaacgcattcacatcttctcttcgtccgccgccgccgcctctcttcattggtagcaccttaatccgaccccagtccagcccgccgccatggaggcgctgacggccacggacaaatgcttctccccggccagggcgatgttcccgatgccgattgtgaggccacctgcatcaccagaccatgccagtcagtatctggaggacttgttgcaggagcaacagaagctcgggccattcgtgcaggtgctcccaatctgcggcaggctgttgaatcaagagataatgagaacatcaaacctgctttctaactttggagttagaggaaatgagaggttgccaccaattgcaagtccgaaccacatgcatccattgccccggggacctgatttctgtggaaacggtttcggtccatggaatgagatgcatcctgagagaagtggttttcctaggggagccatgggttggcaaggtgctgtacagaaccattcctcctacattgtcaagaagatcgtgcgattggaagttccaacagatgcttaccccaattttaacttcattggccgtttgcttgggccgaggggacactcactaaagagaatcgaagctactacaggttgccgtgttttcatcagagggaaaggctccataaaagatcctgtgaaagaggaacagctcaagggaagacctggctatgaacacttggatgatccaacacatatcttgattgaggccgaattacctgctgatgttattgatgctagactggcacaagcacaggagatactagaggagtcgctgaaaccagtggatgagtcacaagacaacatcaagagacaacaacttcgagaacttgccatgttgaactctgtatatcgagagggtagcctgcatcagaacggcagcgcctctccgttcagcaatggggcacaaaacagtgacagggaggagattcagctctgatccttcccggaaactctcgcgttagtcctgctctcatgacagacatagcttctctgatgctcaagctcccgtgatggtattggaattcatgccattgctaactggtgaattttgatatcccttgtgacattgacctgcggatgagaagactagcgagaaaaaactcccccatggctgtgtacttaggatatttcgtttattgcttgcgcccactattagtgcagagatgtctaagttctagtattttgagctctttgattatctataaagttatgactccgcaaaatatttgatt

SEQ ID NO: 34920 - protein, 289 aa, Zea mays subsp. mays
  peptide (1)..(289): Ceres Seq. ID no. 12351859
  misc_feature (142)..(197): Pfam Name: Pfam Description:  KH domain
  misc_feature (1)..(279): NCBI GI NO: 34909270 NR Description: P0454H12.18
  misc_feature (11)..(278): NCBI GI NO: 34900448 NR Description: contains EST C27129
  misc_feature (11)..(279): NCBI GI NO: 12322716 NR Description: unknown protein; 28504-31237
  misc_feature (11)..(279): NCBI GI NO: 30680583 NR Description: KH domain protein [Arabidopsis thaliana]
  misc_feature (1)..(280): NCBI GI NO: 15224909 NR Description: KH domain protein; protein id: At2g38610
  misc_feature (1)..(278): NCBI GI NO: 40645104 NR Description: hypothetical protein [Nicotiana tabacum]
  misc_feature (34)..(286): NCBI GI NO: 15241136 NR Description: KH domain protein; protein id: At5g56140.1
  misc_feature (34)..(286): NCBI GI NO: 19424087 NR Description: putative RNA-binding protein
  misc_feature (34)..(277): NCBI GI NO: 15236738 NR Description: KH domain protein; protein id: At4g26480.1
  misc_feature (34)..(277): NCBI GI NO: 20268733 NR Description: unknown protein [Arabidopsis thaliana]
MEALTATDKCFSPARAMFPMPIVRPPASPDHASQYLEDLLQEQQKLGPFVQVLPICGRLLNQEIMRTSNLLSNFGVRGNERLPPIASPNHMHPLPRGPDFCGNGFGPWNEMHPERSGFPRGAMGWQGAVQNHSSYIVKKIVRLEVPTDAYPNFNFIGRLLGPRGHSLKRIEATTGCRVFIRGKGSIKDPVKEEQLKGRPGYEHLDDPTHILIEAELPADVIDARLAQAQEILEESLKPVDESQDNIKRQQLRELAMLNSVYREGSLHQNGSASPFSNGAQNSDREEIQL

SEQ ID NO: 34921 - protein, 273 aa, Zea mays subsp. mays
  peptide (1)..(273): Ceres Seq. ID no. 12351860
  misc_feature (126)..(181): Pfam Name: Pfam Description:  KH domain
  misc_feature (1)..(263): NCBI GI NO: 34909270 NR Description: P0454H12.18
  misc_feature (1)..(262): NCBI GI NO: 34900448 NR Description: contains EST C27129
  misc_feature (1)..(263): NCBI GI NO: 12322716 NR Description: unknown protein; 28504-31237
  misc_feature (1)..(263): NCBI GI NO: 30680583 NR Description: KH domain protein [Arabidopsis thaliana]
  misc_feature (1)..(264): NCBI GI NO: 15224909 NR Description: KH domain protein; protein id: At2g38610
  misc_feature (1)..(262): NCBI GI NO: 40645104 NR Description: hypothetical protein [Nicotiana tabacum]
  misc_feature (18)..(270): NCBI GI NO: 15241136 NR Description: KH domain protein; protein id: At5g56140.1
  misc_feature (18)..(270): NCBI GI NO: 19424087 NR Description: putative RNA-binding protein
  misc_feature (18)..(261): NCBI GI NO: 15236738 NR Description: KH domain protein; protein id: At4g26480.1
  misc_feature (18)..(261): NCBI GI NO: 20268733 NR Description: unknown protein [Arabidopsis thaliana]
MFPMPIVRPPASPDHASQYLEDLLQEQQKLGPFVQVLPICGRLLNQEIMRTSNLLSNFGVRGNERLPPIASPNHMHPLPRGPDFCGNGFGPWNEMHPERSGFPRGAMGWQGAVQNHSSYIVKKIVRLEVPTDAYPNFNFIGRLLGPRGHSLKRIEATTGCRVFIRGKGSIKDPVKEEQLKGRPGYEHLDDPTHILIEAELPADVIDARLAQAQEILEESLKPVDESQDNIKRQQLRELAMLNSVYREGSLHQNGSASPFSNGAQNSDREEIQL

SEQ ID NO: 34922 - protein, 270 aa, Zea mays subsp. mays
  peptide (1)..(270): Ceres Seq. ID no. 12351861
  misc_feature (123)..(178): Pfam Name: Pfam Description:  KH domain
  misc_feature (1)..(260): NCBI GI NO: 34909270 NR Description: P0454H12.18
  misc_feature (1)..(259): NCBI GI NO: 34900448 NR Description: contains EST C27129
  misc_feature (1)..(260): NCBI GI NO: 12322716 NR Description: unknown protein; 28504-31237
  misc_feature (1)..(260): NCBI GI NO: 30680583 NR Description: KH domain protein [Arabidopsis thaliana]
  misc_feature (1)..(261): NCBI GI NO: 15224909 NR Description: KH domain protein; protein id: At2g38610
  misc_feature (1)..(259): NCBI GI NO: 40645104 NR Description: hypothetical protein [Nicotiana tabacum]
  misc_feature (15)..(267): NCBI GI NO: 15241136 NR Description: KH domain protein; protein id: At5g56140.1
  misc_feature (15)..(267): NCBI GI NO: 19424087 NR Description: putative RNA-binding protein
  misc_feature (15)..(258): NCBI GI NO: 15236738 NR Description: KH domain protein; protein id: At4g26480.1
  misc_feature (15)..(258): NCBI GI NO: 20268733 NR Description: unknown protein [Arabidopsis thaliana]
MPIVRPPASPDHASQYLEDLLQEQQKLGPFVQVLPICGRLLNQEIMRTSNLLSNFGVRGNERLPPIASPNHMHPLPRGPDFCGNGFGPWNEMHPERSGFPRGAMGWQGAVQNHSSYIVKKIVRLEVPTDAYPNFNFIGRLLGPRGHSLKRIEATTGCRVFIRGKGSIKDPVKEEQLKGRPGYEHLDDPTHILIEAELPADVIDARLAQAQEILEESLKPVDESQDNIKRQQLRELAMLNSVYREGSLHQNGSASPFSNGAQNSDREEIQL

SEQ ID NO: 34923 - DNA, 1475 bp, Zea mays subsp. mays
  misc_feature (1)..(1475): Ceres Seq. ID no. 12352669
cccaagaaggcagctgctagctgagagcctccagctcaggtagtgagcaagctcctctctgccctggcctcttcttcgttcattcttgtccactcgaggactgcccgtttgacgactgctcgatcagtgtgctagctagctagagcaagagaagggctgtaagcgaggagatcgatcgagatggctttcctcaacatggagcagcagacctgggccttcacctttggtatcctaggtaacatagtctcactgatggtgtttctttcgccgctgccgacgttctaccgcgtgtaccgcaacaagtcgacggaggggttccagtcgacgccgtacgtggtgaccctcttcagctgcatgctgtggatcttgtacgccctgctcaagcccggcgccgagctgctggtcaccatcaacggcgtgggctgcgtcgtcgagaccgtgtacctggccatgtacctggtgtacgcgcccaaggccgcccgggtgctggcggccaagatgctgctggggctcaacgtcgccgtcttcggcctcgtcgcgctcgtcaccatgcttctctccgacgccggcctccgcgtgcacgtgctcggctggatctgcgtcagcgtctcgctcagcgtcttcgccgcgccgctcagcataatgcggcaggtgatccggaccaagagcgtggagttcatgcccatctcgctctccttcttcctggtgctcagcgcggtggtctggttcgcgtacggcgcgctgaagaaggacgtgttcgtggcgttccccaacgtgctgggcttcgtcttcggcctcgcacagatggcgctgtacatggcgtacagcaggaacaggaagcccgcggcggcgctggtgatactaccggagcagtccaaggaggaggcggccgagggcaaggccagctgcggcggcgccgaggtgcaccccatcgacatcgcggaggtccacgacctgcaggccgtggtcgtcgacgtagacgtggagcctgtcacctacgccgctgcgtccggtatggtcgacggcagtgtcggcaggcctagggcgccggagcagctggtgatcaagcccgacatggtcaccgtcattgcggcggaggcgtaggttggttaagtagtagcagagtgagtcgatatcgatctgcctacctacagtacagccgcggcggccagatgtactggcagcgttcatgcaggctcgttgacttgaccggtcgagatggttggagtagccgggccgagtagcccagacgtactggcctgtgtcatgaaccggcaagctgataacgcgagcgagagggacgttggttcatcacattcagaagacggcaagctgatagtttctgtctctaggtctgtgtgtgtgtgtctgtaatcgactccatcagcttgccgcctttcctgtcctattctgattgttttcatccattgatgccgtcgtcgcagtaataaacttggaacgaacgattccacact

SEQ ID NO: 34924 - protein, 307 aa, Zea mays subsp. mays
  peptide (1)..(307): Ceres Seq. ID no. 12352670
  misc_feature (13)..(100): Pfam Name: Pfam Description:  MtN3/saliva family
  misc_feature (12)..(282): NCBI GI NO: 21593422 NR Description: senescence-associated protein (SAG29)
  misc_feature (12)..(282): NCBI GI NO: 15240040 NR Description: senescence-associated protein
  misc_feature (6)..(218): NCBI GI NO: 1619602 NR Description: MtN3 [Medicago truncatula]
  misc_feature (6)..(221): NCBI GI NO: 14715258 NR Description: N3 like protein [Medicago truncatula]
  misc_feature (1)..(215): NCBI GI NO: 15229019 NR Description: MTN3-like protein; protein id: At3g48740
  misc_feature (10)..(222): NCBI GI NO: 15237803 NR Description: MtN3-like protein; protein id: At5g23660
  misc_feature (12)..(220): NCBI GI NO: 11345413 NR Description: NEC1 [Petunia x hybrida]
  misc_feature (11)..(223): NCBI GI NO: 21593109 NR Description: MtN3-like protein [Arabidopsis thaliana]
  misc_feature (11)..(223): NCBI GI NO: 15241278 NR Description: MtN3-like protein; protein id: At5g50800
  misc_feature (6)..(238): NCBI GI NO: 15241265 NR Description: MtN3-like protein; protein id: At5g50790
MAFLNMEQQTWAFTFGILGNIVSLMVFLSPLPTFYRVYRNKSTEGFQSTPYVVTLFSCMLWILYALLKPGAELLVTINGVGCVVETVYLAMYLVYAPKAARVLAAKMLLGLNVAVFGLVALVTMLLSDAGLRVHVLGWICVSVSLSVFAAPLSIMRQVIRTKSVEFMPISLSFFLVLSAVVWFAYGALKKDVFVAFPNVLGFVFGLAQMALYMAYSRNRKPAAALVILPEQSKEEAAEGKASCGGAEVHPIDIAEVHDLQAVVVDVDVEPVTYAAASGMVDGSVGRPRAPEQLVIKPDMVTVIAAEA

SEQ ID NO: 34925 - protein, 302 aa, Zea mays subsp. mays
  peptide (1)..(302): Ceres Seq. ID no. 12352671
  misc_feature (8)..(95): Pfam Name: Pfam Description:  MtN3/saliva family
  misc_feature (7)..(277): NCBI GI NO: 21593422 NR Description: senescence-associated protein (SAG29)
  misc_feature (7)..(277): NCBI GI NO: 15240040 NR Description: senescence-associated protein
  misc_feature (1)..(213): NCBI GI NO: 1619602 NR Description: MtN3 [Medicago truncatula]
  misc_feature (1)..(216): NCBI GI NO: 14715258 NR Description: N3 like protein [Medicago truncatula]
  misc_feature (1)..(210): NCBI GI NO: 15229019 NR Description: MTN3-like protein; protein id: At3g48740
  misc_feature (5)..(217): NCBI GI NO: 15237803 NR Description: MtN3-like protein; protein id: At5g23660
  misc_feature (7)..(215): NCBI GI NO: 11345413 NR Description: NEC1 [Petunia x hybrida]
  misc_feature (6)..(218): NCBI GI NO: 21593109 NR Description: MtN3-like protein [Arabidopsis thaliana]
  misc_feature (6)..(218): NCBI GI NO: 15241278 NR Description: MtN3-like protein; protein id: At5g50800
  misc_feature (1)..(233): NCBI GI NO: 15241265 NR Description: MtN3-like protein; protein id: At5g50790
MEQQTWAFTFGILGNIVSLMVFLSPLPTFYRVYRNKSTEGFQSTPYVVTLFSCMLWILYALLKPGAELLVTINGVGCVVETVYLAMYLVYAPKAARVLAAKMLLGLNVAVFGLVALVTMLLSDAGLRVHVLGWICVSVSLSVFAAPLSIMRQVIRTKSVEFMPISLSFFLVLSAVVWFAYGALKKDVFVAFPNVLGFVFGLAQMALYMAYSRNRKPAAALVILPEQSKEEAAEGKASCGGAEVHPIDIAEVHDLQAVVVDVDVEPVTYAAASGMVDGSVGRPRAPEQLVIKPDMVTVIAAEA

SEQ ID NO: 34926 - protein, 283 aa, Zea mays subsp. mays
  peptide (1)..(283): Ceres Seq. ID no. 12352672
  misc_feature (1)..(76): Pfam Name: Pfam Description:  MtN3/saliva family
  misc_feature (1)..(258): NCBI GI NO: 21593422 NR Description: senescence-associated protein (SAG29)
  misc_feature (1)..(258): NCBI GI NO: 15240040 NR Description: senescence-associated protein
  misc_feature (1)..(194): NCBI GI NO: 1619602 NR Description: MtN3 [Medicago truncatula]
  misc_feature (1)..(197): NCBI GI NO: 14715258 NR Description: N3 like protein [Medicago truncatula]
  misc_feature (1)..(191): NCBI GI NO: 15229019 NR Description: MTN3-like protein; protein id: At3g48740
  misc_feature (1)..(198): NCBI GI NO: 15237803 NR Description: MtN3-like protein; protein id: At5g23660
  misc_feature (1)..(196): NCBI GI NO: 11345413 NR Description: NEC1 [Petunia x hybrida]
  misc_feature (1)..(199): NCBI GI NO: 21593109 NR Description: MtN3-like protein [Arabidopsis thaliana]
  misc_feature (1)..(199): NCBI GI NO: 15241278 NR Description: MtN3-like protein; protein id: At5g50800
  misc_feature (1)..(214): NCBI GI NO: 15241265 NR Description: MtN3-like protein; protein id: At5g50790
MVFLSPLPTFYRVYRNKSTEGFQSTPYVVTLFSCMLWILYALLKPGAELLVTINGVGCVVETVYLAMYLVYAPKAARVLAAKMLLGLNVAVFGLVALVTMLLSDAGLRVHVLGWICVSVSLSVFAAPLSIMRQVIRTKSVEFMPISLSFFLVLSAVVWFAYGALKKDVFVAFPNVLGFVFGLAQMALYMAYSRNRKPAAALVILPEQSKEEAAEGKASCGGAEVHPIDIAEVHDLQAVVVDVDVEPVTYAAASGMVDGSVGRPRAPEQLVIKPDMVTVIAAEA

SEQ ID NO: 34927 - DNA, 1415 bp, Zea mays subsp. mays
  misc_feature (1)..(1415): Ceres Seq. ID no. 12358173
acggccgaccttatgtgacagttcgggcaccgacgtccgtctccgtacttccggctgtgtgcgaaactgcgaacgcgtgatatctccgcgtacgcaaacgcgacgcgaaggtcagcacggacaactctacccctccgcctcgaccctgaccccccacctcgtcggcgatgagttcctcttccaacggcgggaagaagccggctcccggcggcggccgcagggggtcccgccatccgcacgctcgctgacataagccgtgggcccaccggcttcccaggtgccggaggcggcgacagcggcagcgacgacgacgagccacaggaatactacaccggtggcgagaagagtggaatgcttgttcaagatccaacaagaagaaatgatgtggatgcgatatttgaacaagccagacaagcgggtatcaaaggaatgcctcctcctcttgatggcgagtcttccagctctaggagctttacagggactggccgacttcttacaggggagacaatatcatctgctgcacctcaggaaccagtaccaattcgagtacgccacaatatacatttgtggaacaatggctttagtgtggatgatggtccactgagatactacgacgatcctgaaaatgcagagttccttgagagccttaagatgtcaaagtgccccaaggagctggtgcctactgatggagaacatgttgatgcgtctgttattagaaggatggaagattacagggaacctgtaaggcctcgatcagctttccagggtgttggaagaacccttggtggtggaccttccccagatgagagcgcaacagctgctcctgcatcagcggcccctgctgcttcgaggtccgctggcgttgtcgtggatgactcccagccatttacgtccatacagctgaggctggctgacggcactcgcatgggtcgcccggttcaacatgcaccacaccgtgggagacatcaggtcctttatagacgcagctcggcctggagctgcaaggccttatcagctgcagacgggtttccctcccaagcagctggctgacccaacgcagaccgtggagcaagctgggcttgcaaactctgttatcatgcagaagatgtaaatgcttcggctggcaacctggggagctcggatgcatcgtactgcatcttctgaaaaccgtaatattatggttgatcatgttatcagatactgctctggtgcatcattctcagtcatggttacttacagtagcatctggtgcctcgttgggagcacaggagtttataattcatctaggaactgaagtatgctttcttgcatcactattgcatcacttttttcatttttaatattggtgttatgatatttcgtgtttccatggccgcttccttgcaagttgaagcgcgactcgcaagtcgcagcat

SEQ ID NO: 34928 - protein, 232 aa, Zea mays subsp. mays
  peptide (1)..(232): Ceres Seq. ID no. 12358174
  misc_feature (33)..(111): Pfam Name: Pfam Description:  Fibronectin type III domain
  misc_feature (1)..(198): NCBI GI NO: 13123657 NR Description: phosphatase-like protein Mtc923
  misc_feature (1)..(198): NCBI GI NO: 18412499 NR Description: putative membrane trafficking factor
  misc_feature (1)..(198): NCBI GI NO: 13123659 NR Description: phosphatase-like protein Psc923 [Pisum sativum]
  misc_feature (1)..(198): NCBI GI NO: 7487458 NR Description: hypothetical protein T27D20
  misc_feature (1)..(192): NCBI GI NO: 18414442 NR Description: phosphatase like protein; protein id: At4g15410
  misc_feature (1)..(192): NCBI GI NO: 15292665 NR Description: putative phosphatase [Arabidopsis thaliana]
  misc_feature (1)..(192): NCBI GI NO: 15234731 NR Description: putative protein; protein id: At4g22150.1
  misc_feature (1)..(192): NCBI GI NO: 7485149 NR Description: hypothetical protein - Arabidopsis thaliana
  misc_feature (1)..(202): NCBI GI NO: 20149635 NR Description: p47 [Homo sapiens]
  misc_feature (1)..(202): NCBI GI NO: 5531827 NR Description: p47 [Homo sapiens]
MLVQDPTRRNDVDAIFEQARQAGIKGMPPPLDGESSSSRSFTGTGRLLTGETISSAAPQEPVPIRVRHNIHLWNNGFSVDDGPLRYYDDPENAEFLESLKMSKCPKELVPTDGEHVDASVIRRMEDYREPVRPRSAFQGVGRTLGGGPSPDESATAAPASAAPAASRSAGVVVDDSQPFTSIQLRLADGTRMGRPVQHAPHRGRHQVLYRRSSAWSCKALSAADGFPSQAAG

SEQ ID NO: 34929 - protein, 206 aa, Zea mays subsp. mays
  peptide (1)..(206): Ceres Seq. ID no. 12358175
  misc_feature (7)..(85): Pfam Name: Pfam Description:  Fibronectin type III domain
  misc_feature (1)..(172): NCBI GI NO: 13123657 NR Description: phosphatase-like protein Mtc923
  misc_feature (1)..(172): NCBI GI NO: 18412499 NR Description: putative membrane trafficking factor
  misc_feature (1)..(172): NCBI GI NO: 13123659 NR Description: phosphatase-like protein Psc923 [Pisum sativum]
  misc_feature (1)..(172): NCBI GI NO: 7487458 NR Description: hypothetical protein T27D20
  misc_feature (1)..(166): NCBI GI NO: 18414442 NR Description: phosphatase like protein; protein id: At4g15410
  misc_feature (1)..(166): NCBI GI NO: 15292665 NR Description: putative phosphatase [Arabidopsis thaliana]
  misc_feature (1)..(166): NCBI GI NO: 15234731 NR Description: putative protein; protein id: At4g22150.1
  misc_feature (1)..(166): NCBI GI NO: 7485149 NR Description: hypothetical protein - Arabidopsis thaliana
  misc_feature (1)..(176): NCBI GI NO: 20149635 NR Description: p47 [Homo sapiens]
  misc_feature (1)..(176): NCBI GI NO: 5531827 NR Description: p47 [Homo sapiens]
MPPPLDGESSSSRSFTGTGRLLTGETISSAAPQEPVPIRVRHNIHLWNNGFSVDDGPLRYYDDPENAEFLESLKMSKCPKELVPTDGEHVDASVIRRMEDYREPVRPRSAFQGVGRTLGGGPSPDESATAAPASAAPAASRSAGVVVDDSQPFTSIQLRLADGTRMGRPVQHAPHRGRHQVLYRRSSAWSCKALSAADGFPSQAAG

SEQ ID NO: 34930 - protein, 132 aa, Zea mays subsp. mays
  peptide (1)..(132): Ceres Seq. ID no. 12358176
  misc_feature (1)..(98): NCBI GI NO: 13123657 NR Description: phosphatase-like protein Mtc923
  misc_feature (1)..(98): NCBI GI NO: 18412499 NR Description: putative membrane trafficking factor
  misc_feature (1)..(98): NCBI GI NO: 13123659 NR Description: phosphatase-like protein Psc923 [Pisum sativum]
  misc_feature (1)..(98): NCBI GI NO: 7487458 NR Description: hypothetical protein T27D20
  misc_feature (1)..(92): NCBI GI NO: 18414442 NR Description: phosphatase like protein; protein id: At4g15410
  misc_feature (1)..(92): NCBI GI NO: 15292665 NR Description: putative phosphatase [Arabidopsis thaliana]
  misc_feature (1)..(92): NCBI GI NO: 15234731 NR Description: putative protein; protein id: At4g22150.1
  misc_feature (1)..(92): NCBI GI NO: 7485149 NR Description: hypothetical protein - Arabidopsis thaliana
  misc_feature (1)..(102): NCBI GI NO: 20149635 NR Description: p47 [Homo sapiens]
  misc_feature (1)..(102): NCBI GI NO: 5531827 NR Description: p47 [Homo sapiens]
MSKCPKELVPTDGEHVDASVIRRMEDYREPVRPRSAFQGVGRTLGGGPSPDESATAAPASAAPAASRSAGVVVDDSQPFTSIQLRLADGTRMGRPVQHAPHRGRHQVLYRRSSAWSCKALSAADGFPSQAAG

SEQ ID NO: 34931 - DNA, 760 bp, Zea mays subsp. mays
  misc_feature (1)..(760): Ceres Seq. ID no. 12413713
gcacgagaccattacctagaacatcctaatcgaaaagccactgcaaccccggaacagagcgaggcgacgccgaggcacctcatctccgttgatattttcgactatttaggcgaagggaaatggcgaccgttccaggggatctgatctggcagattgtgaggaagaacaactccttcctggtgaagcagtttggcaacggcaatgccaaggtgcagttcaccaaggagcccaacaacctctacaatttacactcctacaagtactctggcttagcaaacaagaaaactgtaacgatccagccagctgctggaaaggactcggctgtggtcctctctactaccaagaccaagaagcagaacacacccgcgaagctcagccacaagtctgtgatgcgcaaggagttccgcaagatggccaaggctgtgaaaaaccaggttggcgacaactattacaggcctgatctgaccaagtcggcccttggtaggctgagctctgtgtaccgcagcctccaggttgccaagtctggtgtcaagaagaagaacaggcagcctacgcactaagcctgtgttctgtcgttggtgcccatagtctcagcttatatttatccaatgtctccaacagttttgagacttgttagaactagagcaaatcgtgttaagatgttgccgtttgtcattctatagcaagaattccatgacaaagattgcttggcacttgattgctgctttgtttgcaagctggctggccgggattacccctg

SEQ ID NO: 34932 - protein, 146 aa, Zea mays subsp. mays
  peptide (1)..(146): Ceres Seq. ID no. 12413714
  misc_feature (5)..(137): Pfam Name: Pfam Description:  Ribosomal L28e protein family
  misc_feature (1)..(143): NCBI GI NO: 34910390 NR Description: ribosomal protein L28-like
  misc_feature (1)..(143): NCBI GI NO: 15224835 NR Description: putative ribosomal protein L28
  misc_feature (1)..(143): NCBI GI NO: 15233567 NR Description: putative protein; protein id: At4g29410
  misc_feature (1)..(139): NCBI GI NO: 20976820 NR Description: GH04183p [Drosophila melanogaster]
  misc_feature (3)..(135): NCBI GI NO: 19114036 NR Description: 60s ribosomal protein L28/L44
  misc_feature (8)..(135): NCBI GI NO: 24418650 NR Description: 60S ribosomal protein L28
  misc_feature (1)..(139): NCBI GI NO: 24656625 NR Description: CG12740-PA [Drosophila melanogaster]
  misc_feature (8)..(145): NCBI GI NO: 13904866 NR Description: ribosomal protein L28; 60S ribosomal protein L28
  misc_feature (1)..(139): NCBI GI NO: 38047791 NR Description: similar to Drosophila melanogaster CG12740
  misc_feature (8)..(145): NCBI GI NO: 38112699 NR Description: 60S ribosomal protein L28 [Hippocampus comes]
MATVPGDLIWQIVRKNNSFLVKQFGNGNAKVQFTKEPNNLYNLHSYKYSGLANKKTVTIQPAAGKDSAVVLSTTKTKKQNTPAKLSHKSVMRKEFRKMAKAVKNQVGDNYYRPDLTKSALGRLSSVYRSLQVAKSGVKKKNRQPTH

SEQ ID NO: 34933 - DNA, 1675 bp, Zea mays subsp. mays; identical to SEQ ID NO: 30236
  misc_feature (1)..(1675): Ceres Seq. ID no. 12545410

SEQ ID NO: 34934 - protein, 425 aa, Zea mays subsp. mays; identical to SEQ ID NO: 30237
  peptide (1)..(425): Ceres Seq. ID no. 12545411
  misc_feature (14)..(421): Pfam Name: Pfam Description:  Transferase family
  misc_feature (1)..(425): NCBI GI NO: 2130139 NR Description: hypothetical protein - maize
  misc_feature (1)..(422): NCBI GI NO: 38345799 NR Description: OSJNBa0085I10.16
  misc_feature (160)..(422): NCBI GI NO: 38568010 NR Description: OSJNBa0070C17.2
  misc_feature (7)..(415): NCBI GI NO: 21593424 NR Description: fatty acid elongase-like protein (cer2-like)
  misc_feature (7)..(415): NCBI GI NO: 18403923 NR Description: expressed protein; protein id: At3g23840
  misc_feature (5)..(415): NCBI GI NO: 15236357 NR Description: fatty acid elongase - like protein
  misc_feature (20)..(415): NCBI GI NO: 15233851 NR Description: CER2; protein id: At4g24510
  misc_feature (1)..(152): NCBI GI NO: 38568009 NR Description: OSJNBa0070C17.1
  misc_feature (35)..(407): NCBI GI NO: 30017587 NR Description: unknown protein
  misc_feature (20)..(294): NCBI GI NO: 15239747 NR Description: anthranilate N-benzoyltransferase

SEQ ID NO: 34935 - protein, 356 aa, Zea mays subsp. mays; identical to SEQ ID NO: 30238
  peptide (1)..(356): Ceres Seq. ID no. 12545412
  misc_feature (1)..(352): Pfam Name: Pfam Description:  Transferase family
  misc_feature (1)..(356): NCBI GI NO: 2130139 NR Description: hypothetical protein - maize
  misc_feature (1)..(353): NCBI GI NO: 38345799 NR Description: OSJNBa0085I10.16
  misc_feature (91)..(353): NCBI GI NO: 38568010 NR Description: OSJNBa0070C17.2
  misc_feature (1)..(346): NCBI GI NO: 21593424 NR Description: fatty acid elongase-like protein (cer2-like)
  misc_feature (1)..(346): NCBI GI NO: 18403923 NR Description: expressed protein; protein id: At3g23840
  misc_feature (1)..(346): NCBI GI NO: 15236357 NR Description: fatty acid elongase - like protein
  misc_feature (1)..(346): NCBI GI NO: 15233851 NR Description: CER2; protein id: At4g24510
  misc_feature (1)..(83): NCBI GI NO: 38568009 NR Description: OSJNBa0070C17.1
  misc_feature (1)..(338): NCBI GI NO: 30017587 NR Description: unknown protein
  misc_feature (1)..(225): NCBI GI NO: 15239747 NR Description: anthranilate N-benzoyltransferase

SEQ ID NO: 34936 - protein, 310 aa, Zea mays subsp. mays; identical to SEQ ID NO: 30239
  peptide (1)..(310): Ceres Seq. ID no. 12545413
  misc_feature (1)..(306): Pfam Name: Pfam Description:  Transferase family
  misc_feature (1)..(310): NCBI GI NO: 2130139 NR Description: hypothetical protein - maize
  misc_feature (1)..(307): NCBI GI NO: 38345799 NR Description: OSJNBa0085I10.16
  misc_feature (45)..(307): NCBI GI NO: 38568010 NR Description: OSJNBa0070C17.2
  misc_feature (1)..(300): NCBI GI NO: 21593424 NR Description: fatty acid elongase-like protein (cer2-like)
  misc_feature (1)..(300): NCBI GI NO: 18403923 NR Description: expressed protein; protein id: At3g23840
  misc_feature (1)..(300): NCBI GI NO: 15236357 NR Description: fatty acid elongase - like protein
  misc_feature (1)..(300): NCBI GI NO: 15233851 NR Description: CER2; protein id: At4g24510
  misc_feature (1)..(37): NCBI GI NO: 38568009 NR Description: OSJNBa0070C17.1
  misc_feature (1)..(292): NCBI GI NO: 30017587 NR Description: unknown protein
  misc_feature (1)..(179): NCBI GI NO: 15239747 NR Description: anthranilate N-benzoyltransferase

SEQ ID NO: 34937 - DNA, 1077 bp, Zea mays subsp. mays
  misc_feature (1)..(1077): Ceres Seq. ID no. 13495185
cccccactgtcgccgctcctcgtcttccactctctccactttgctgcttcttctcccttattaatgctcgtgggctcctatgatccgccctccgccgcgggtttcttgatccatccccggcccaaggaagcggaccccggcgaacactcctgacagattcgcccgtccgccgctccctcgattcggtcctccccgtcagcggcaggtgtttaggacctctgcagcatagcatctggtccgtccctggagatgtccggcgtacaggagcagttcgagatcaagttccggctgccggacggcaccgacatcggacccaggcggttcccgccggcgtccaccgtcgccacgctcaaggagaccatcatcgcccagtggcccaaagataaggaaaaaggtcctaggactgtgaatgatcttaagcttattaatgctgggaagatactggagaacaacaaaaccctatcagaatgcaaaagcccgatttgcgacttctctgcgatgacaacaatgcatgtcgtcatccgcgcaccgacttcaagcaaacagtctgataaaagagcagaaaagaaagcgaaaaatttcaggtgcggttgtgccattatgtgacagcattgtgaatagtagcagagagaacgtggccatttcagttttctccctttttttttcctgctctcgctggagtgttgtattatgttcgaggcgctttctcctttcattttgttttgaagtaccgcgtgcaagcttcaacagctgtcaagtgccctttaatcgtgagtgtgcatcaagcacagaattagaaggcggttggctgctaattacccttaatcttgagtttgtcaagcacacaatttgaaggcagtcattagcgtcgaaactacgatgtccaccctatccaatcttccatggtttcacgcttctcttctatatttatgctaccctgggtgacaaatgtttaatgtatgccttccatgctagatgaactttttggaacgccattctaactcatcaatttctattctgtaaaactaaaaccagttgtaatctgccatagatcagtatgcttgctatatgggagtc

SEQ ID NO: 34938 - protein, 118 aa, Zea mays subsp. mays
  peptide (1)..(118): Ceres Seq. ID no. 13495186
  misc_feature (9)..(94): Pfam Name: Pfam Description:  Ubiquitin family
  misc_feature (1)..(118): NCBI GI NO: 18417680 NR Description: expressed protein [Arabidopsis thaliana]
  misc_feature (1)..(118): NCBI GI NO: 15219188 NR Description: ubiquitin family [Arabidopsis thaliana]
  misc_feature (1)..(98): NCBI GI NO: 11358132 NR Description: hypothetical protein T20K14_70 - Arabidopsisthaliana
  misc_feature (1)..(118): NCBI GI NO: 15232032 NR Description: ubiquitin family [Arabidopsis thaliana]
  misc_feature (4)..(118): NCBI GI NO: 4097587 NR Description: NTGP5 [Nicotiana tabacum]
  misc_feature (1)..(100): NCBI GI NO: 25402954 NR Description: protein F2E2.12 [imported] - Arabidopsis thaliana
  misc_feature (3)..(118): NCBI GI NO: 21592966 NR Description: ubiquitin-fusion protein, putative
  misc_feature (3)..(118): NCBI GI NO: 15218145 NR Description: expressed protein [Arabidopsis thaliana]
  misc_feature (6)..(118): NCBI GI NO: 38347220 NR Description: OSJNBa0055C08.14
  misc_feature (5)..(118): NCBI GI NO: 22331362 NR Description: ubiquitin family [Arabidopsis thaliana]
MSGVQEQFEIKFRLPDGTDIGPRRFPPASTVATLKETIIAQWPKDKEKGPRTVNDLKLINAGKILENNKTLSECKSPICDFSAMTTMHVVIRAPTSSKQSDKRAEKKAKNFRCGCAIM

SEQ ID NO: 34939 - protein, 113 aa, Zea mays subsp. mays
  peptide (1)..(113): Ceres Seq. ID no. 13495187
MSSSAHRLQANSLIKEQKRKRKISGAVVPLCDSIVNSSRENVAISVFSLFFSCSRWSVVLCSRRFLLSFCFEVPRASFNSCQVPFNRECASSTELEGGWLLITLNLEFVKHTI

SEQ ID NO: 34940 - DNA, 1406 bp, Zea mays subsp. mays
  misc_feature (1)..(1406): Ceres Seq. ID no. 12352673
aaacaccgccgcccccacatctatccacccgcccgcccgtccgtccgttcgttcgtctccacgcgcaaacgagagagagaaggctaggtcgtcgtcgtcgtgaggcggagagatctgggaggaggaggagcgatggacgggaagctacccccgccgaacccgaacctgccgtaccgggaggactgctggagcgagggcgagacggcggcgctcgtcgacgcctggggctcgcgctacctcgacctcaaccgcgggagcctccgccagccgcagtggcgggaggtcgccgacgccgtcaactcccgcccgggggcctccgcgcgcggccgcccgccgcgcaccgacatccagtgcaagaaccgcgtcgacacgctcaagaagaagtacaaggccgagcgcgcgcgcggcgggccgtcgccgtggtccttctacggccagctcgacatcctcgtcgggcccacgctcaacggcaccaagaaaccgtccccgccgcgcgccgcgctgcccgtgttccggaggcgccagacgccgccgcgctccccgtcgccgcaatcgccgccgccgcttcccgtggccctcccgctgcacaattaccgccgtggctccgacctcccttccgcaaacttcatccataagggccgccgcggcggccgccgccgccgccgccgccgcggagtccgactcggaagatggctacaacaacaacgagtacgacgatgacgaaggctctcagcagtcgccgtcacgttctgtatcttctcgctccggtggtgctcctgctgttggcaccaagaggaagatgcgcagcgggagcggtggattcggggagctagcgagggcaatcgagaccttcgcggatatgtacgagcgcatggaagcggccaagcagcgacacgcggaggagatggagaggcagcgaatcaagttcctcaaggatctggagctgaagcggatgcggtcttttgtggacatgcagctgcagctttcgagggcaaagcacgccaggaagggtgatgcttcctcggagatgctcatgtctctcgctgcactgcccttcctcagcagctctgcttatctttaagggcatgttcggttagggatggattcttccatcccctcaatccacccctatccgaacaagcttaaattggaagaatttggtaaatgaatattttgaccttcaattaggaatttaggatacagtgagttggttgctgtgctagacttgttcgtggattgtttgtgtttcctaagatactgtaatttttcatacgaaccatggaggtattgcaggtcttcaaaatttaaatgtaccttgcaatgcattatgcccaagttttttcttagatggaatgaaatttactggtttacaacacttactgtcagtgtaatacgaatctcatctc

SEQ ID NO: 34941 - protein, 210 aa, Zea mays subsp. mays
  peptide (1)..(210): Ceres Seq. ID no. 12352674
TPPPPHLSTRPPVRPFVRLHAQTRERRLGRRRREAERSGRRRSDGREATPAEPEPAVPGGLLERGRDGGARRRLGLALPRPQPREPPPAAVAGGRRRRQLPPGGLRARPPAAHRHPVQEPRRHAQEEVQGRARARRAVAVVLLRPARHPRRAHAQRHQETVPAARRAARVPEAPDAAALPVAAIAAAASRGPPAAQLPPWLRPPFRKLHP

SEQ ID NO: 34942 - protein, 195 aa, Zea mays subsp. mays
  peptide (1)..(195): Ceres Seq. ID no. 12352675
  misc_feature (1)..(166): NCBI GI NO: 34911060 NR Description: putative 6b-interacting protein 1
  misc_feature (5)..(146): NCBI GI NO: 18149189 NR Description: 6b-interacting protein 1 [Nicotiana tabacum]
  misc_feature (15)..(119): NCBI GI NO: 18414919 NR Description: putative protein; protein id: At5g05550
  misc_feature (15)..(119): NCBI GI NO: 10178132 NR Description: gb|AAF01512
  misc_feature (15)..(119): NCBI GI NO: 30680994 NR Description: expressed protein [Arabidopsis thaliana]
  misc_feature (8)..(160): NCBI GI NO: 11357442 NR Description: hypothetical protein F14P22
  misc_feature (8)..(160): NCBI GI NO: 30694843 NR Description: expressed protein [Arabidopsis thaliana]
  misc_feature (15)..(111): NCBI GI NO: 6016685 NR Description: hypothetical protein [Arabidopsis thaliana]
  misc_feature (15)..(111): NCBI GI NO: 21537288 NR Description: unknown [Arabidopsis thaliana]
  misc_feature (15)..(111): NCBI GI NO: 18399118 NR Description: expressed protein; protein id: At3g11100
MDGKLPPPNPNLPYREDCWSEGETAALVDAWGSRYLDLNRGSLRQPQWREVADAVNSRPGASARGRPPRTDIQCKNRVDTLKKKYKAERARGGPSPWSFYGQLDILVGPTLNGTKKPSPPRAALPVFRRRQTPPRSPSPQSPPPLPVALPLHNYRRGSDLPSANFIHKGRRGGRRRRRRRGVRLGRWLQQQRVRR

SEQ ID NO: 34943 - DNA, 1100 bp, Zea mays subsp. mays
  misc_feature (1)..(1100): Ceres Seq. ID no. 13498885
caggacacggtcgccacacgacgactcccacgcgcagccaccgcacggccgtgttgccaccaaaccgcgtggcggtgttacgctcttcgcccagatcaaaatcgaatcgatcccccaacccgatcgcctcgtcgtcaaaaaatccccattcgttccccttctcgcctccacgaaccttcacaaattgccctctcagatcttctcctaatctcactcaagccctagccaaatcccagccctagcgacaccaaccagctcgccagcgaccatggggaacccggagaagctgatgaatcagatcttcgacctcaagttcacctccaagtcgctgcagcggcaggcgcgcaagtgcgagaaggaggagaaggagcagaagctcaaggtcaagaaggcgatcgagaagggcaacatggacggcgcccgcatctacgccgagaacgccatccgcaagcgcaccgagcacatgaactacctccgcctcgcctctcgcctcgacgccgtcgtggcccgcctcgacacgcaggccaagatgcaggtcatcggcaagtccatgcagtccatcgtcaagtcgctcgactccgcgctcgccaccgggaacctccagaagatgtccgagaccatggacaatttcgagcgccagttcgtcaacatggaggtccaggccgagttcatggagggcgccatggccggctccacctccctctccacgcccgagaccgaggtcaacagcctcatgcagcaggtcgcggacgactacgggctcgaggtctccgtcggtctgccgcaggcagccgcccacgccatccctgccgccaaggataaggagaaagtcgacgaggatgacctttctcgccgcctcgccgagcttaaggcccgcggctgagagggtgtttcaggctttatcagatgcgattcatgcttatgctgttgagccgcaatgacccattgtgctgtggactgctactcatgtttggtagattcgtaaatactactgttatatgcttgaagccgtgttggcattgccatgtgggtctgtgtgactcgatggaaactttgctgtcttattgtactatcaaatccaataatttgcgcgattgagg

SEQ ID NO: 34944 - protein, 204 aa, Zea mays subsp. mays
  peptide (1)..(204): Ceres Seq. ID no. 13498886
  misc_feature (9)..(179): Pfam Name: Pfam Description:  SNF7
  misc_feature (1)..(204): NCBI GI NO: 30270581 NR Description: superal1 [Zea mays]
  misc_feature (1)..(204): NCBI GI NO: 29367557 NR Description: development protein-like protein
  misc_feature (1)..(204): NCBI GI NO: 18410249 NR Description: developmental protein DG1118 -related
  misc_feature (1)..(204): NCBI GI NO: 21537090 NR Description: developmental protein, putative
  misc_feature (1)..(204): NCBI GI NO: 28916459 NR Description: putative developmental protein
  misc_feature (1)..(204): NCBI GI NO: 15220819 NR Description: developmental protein -related
  misc_feature (1)..(203): NCBI GI NO: 25518422 NR Description: hypothetical protein F11A6
  misc_feature (1)..(201): NCBI GI NO: 39644911 NR Description: CHMP1.5 protein [Homo sapiens]
  misc_feature (9)..(203): NCBI GI NO: 3789911 NR Description: developmental protein DG1118
  misc_feature (1)..(201): NCBI GI NO: 17933108 NR Description: C18orf2 [Homo sapiens]
MGNPEKLMNQIFDLKFTSKSLQRQARKCEKEEKEQKLKVKKAIEKGNMDGARIYAENAIRKRTEHMNYLRLASRLDAVVARLDTQAKMQVIGKSMQSIVKSLDSALATGNLQKMSETMDNFERQFVNMEVQAEFMEGAMAGSTSLSTPETEVNSLMQQVADDYGLEVSVGLPQAAAHAIPAAKDKEKVDEDDLSRRLAELKARG

SEQ ID NO: 34945 - protein, 197 aa, Zea mays subsp. mays
  peptide (1)..(197): Ceres Seq. ID no. 13498887
  misc_feature (2)..(172): Pfam Name: Pfam Description:  SNF7
  misc_feature (1)..(197): NCBI GI NO: 30270581 NR Description: superal1 [Zea mays]
  misc_feature (1)..(197): NCBI GI NO: 29367557 NR Description: development protein-like protein
  misc_feature (1)..(197): NCBI GI NO: 18410249 NR Description: developmental protein DG1118 -related
  misc_feature (1)..(197): NCBI GI NO: 21537090 NR Description: developmental protein, putative
  misc_feature (1)..(197): NCBI GI NO: 28916459 NR Description: putative developmental protein
  misc_feature (1)..(197): NCBI GI NO: 15220819 NR Description: developmental protein -related
  misc_feature (1)..(196): NCBI GI NO: 25518422 NR Description: hypothetical protein F11A6
  misc_feature (1)..(194): NCBI GI NO: 39644911 NR Description: CHMP1.5 protein [Homo sapiens]
  misc_feature (2)..(196): NCBI GI NO: 3789911 NR Description: developmental protein DG1118
  misc_feature (1)..(194): NCBI GI NO: 17933108 NR Description: C18orf2 [Homo sapiens]
MNQIFDLKFTSKSLQRQARKCEKEEKEQKLKVKKAIEKGNMDGARIYAENAIRKRTEHMNYLRLASRLDAVVARLDTQAKMQVIGKSMQSIVKSLDSALATGNLQKMSETMDNFERQFVNMEVQAEFMEGAMAGSTSLSTPETEVNSLMQQVADDYGLEVSVGLPQAAAHAIPAAKDKEKVDEDDLSRRLAELKARG

SEQ ID NO: 34946 - protein, 157 aa, Zea mays subsp. mays
  peptide (1)..(157): Ceres Seq. ID no. 13498888
  misc_feature (1)..(132): Pfam Name: Pfam Description:  SNF7
  misc_feature (1)..(157): NCBI GI NO: 30270581 NR Description: superal1 [Zea mays]
  misc_feature (1)..(157): NCBI GI NO: 29367557 NR Description: development protein-like protein
  misc_feature (1)..(157): NCBI GI NO: 18410249 NR Description: developmental protein DG1118 -related
  misc_feature (1)..(157): NCBI GI NO: 21537090 NR Description: developmental protein, putative
  misc_feature (1)..(157): NCBI GI NO: 28916459 NR Description: putative developmental protein
  misc_feature (1)..(157): NCBI GI NO: 15220819 NR Description: developmental protein -related
  misc_feature (1)..(156): NCBI GI NO: 25518422 NR Description: hypothetical protein F11A6
  misc_feature (1)..(154): NCBI GI NO: 39644911 NR Description: CHMP1.5 protein [Homo sapiens]
  misc_feature (1)..(156): NCBI GI NO: 3789911 NR Description: developmental protein DG1118
  misc_feature (1)..(154): NCBI GI NO: 17933108 NR Description: C18orf2 [Homo sapiens]
MDGARIYAENAIRKRTEHMNYLRLASRLDAVVARLDTQAKMQVIGKSMQSIVKSLDSALATGNLQKMSETMDNFERQFVNMEVQAEFMEGAMAGSTSLSTPETEVNSLMQQVADDYGLEVSVGLPQAAAHAIPAAKDKEKVDEDDLSRRLAELKARG

SEQ ID NO: 34947 - DNA, 678 bp, Zea mays subsp. mays
  misc_feature (1)..(678): Ceres Seq. ID no. 12413709
gtaagaaccactttcacctgaactcctgaagcaaaagcaatggccatgagagcgcttccgctgaccccttccaggagctcctcgtttggagctcaccaaaccaggccgagcggcggcggccccagatcagtgagagcttatgcgaagggagacgaggagggcgacaagcagtccctcttcggaagcatcaccgaggcgctggacttctcgcaggtccggtcggagaaggacgccgagctgctgtacgaggccagggagtccaccagaggtggagggaggatgacgagggagcagtacggagcacttaggcggaagattggtggcacctaccaggatttcttcaagtcatatgttgaagtcgacgggcaatacgtggaggagggttgggtcgacaagacctgcaagatctgcaagaaggacacaaggggggagccgaggcaggttgacaagctaggaagatacgctcacgttgcgtgcctggagaaccccaaaccgacgaactttttcgccaaaatcttcgccagatgaactatgctgcgtccgtcgaaagcgttgtctcgctcgctcgtggttagagagtacaatatataggtagtgttgttgtggcttcaaaggggacaagattgtgcacaattttccaaatggattggtatgtactgatgagcatcagcgcgttcc

SEQ ID NO: 34948 - protein, 162 aa, Zea mays subsp. mays
  peptide (1)..(162): Ceres Seq. ID no. 12413710
  misc_feature (1)..(162): NCBI GI NO: 34907850 NR Description: P0031D02.12
  misc_feature (1)..(162): NCBI GI NO: 15228878 NR Description: putative protein; protein id: At3g56290
MAMRALPLTPSRSSSFGAHQTRPSGGGPRSVRAYAKGDEEGDKQSLFGSITEALDFSQVRSEKDAELLYEARESTRGGGRMTREQYGALRRKIGGTYQDFFKSYVEVDGQYVEEGWVDKTCKICKKDTRGEPRQVDKLGRYAHVACLENPKPTNFFAKIFAR

SEQ ID NO: 34949 - protein, 160 aa, Zea mays subsp. mays
  peptide (1)..(160): Ceres Seq. ID no. 12413711
  misc_feature (1)..(160): NCBI GI NO: 34907850 NR Description: P0031D02.12
  misc_feature (1)..(160): NCBI GI NO: 15228878 NR Description: putative protein; protein id: At3g56290
MRALPLTPSRSSSFGAHQTRPSGGGPRSVRAYAKGDEEGDKQSLFGSITEALDFSQVRSEKDAELLYEARESTRGGGRMTREQYGALRRKIGGTYQDFFKSYVEVDGQYVEEGWVDKTCKICKKDTRGEPRQVDKLGRYAHVACLENPKPTNFFAKIFAR

SEQ ID NO: 34950 - protein, 82 aa, Zea mays subsp. mays
  peptide (1)..(82): Ceres Seq. ID no. 12413712
  misc_feature (1)..(82): NCBI GI NO: 34907850 NR Description: P0031D02.12
  misc_feature (1)..(82): NCBI GI NO: 15228878 NR Description: putative protein; protein id: At3g56290
MTREQYGALRRKIGGTYQDFFKSYVEVDGQYVEEGWVDKTCKICKKDTRGEPRQVDKLGRYAHVACLENPKPTNFFAKIFAR

SEQ ID NO: 34951 - DNA, 1806 bp, Zea mays subsp. mays
  misc_feature (1)..(1806): Ceres Seq. ID no. 12411349
cttcctctctgttctctctctctctctcttcctccagtagtccagtcctcctccttcgaatcccaaggtggcggccagagagtagagatagagagagagtgggactatagagacgttaagaacatcctaatcgaaaaccgttgctgcttgttattattaacgccgccgccgcctcctgcattcgtatggtccgcgtcgtcacggggctcctgcgttcgtaaggcaccgccgcagcgtctcggctggatcaacaggccggccgatccgtcttctccccctcctcctgcgggtcggcgtttggggatcatggcggcgcgggcggctgacgagaacaggagaccggcggcagggaagcccgcgccaggcgtccgagacatggcgagccggcgcgcgctcacggacatcaagaacctcgtcggggctgccccgtacccctgcgccatcgccaagaagcccatgctgcagaagagcagaagggacgaaaagcagccagcgttggcaagcagccggcccatgacaaggaaattcgccgcctccttggcgagcaagggccaacctgaatgtcagccgatcgtagctgatccagaacccgaattttgtcaacagaaggaatcagtaggcgatggcaccgttgatattgacgtggaactctacgagctggtcgacgatagtgatagtgacatcgacatgggtgcgacagagaacaaggacattatgaacgaagatgaattgctcatggatattgacagtgcagactcggggaacccgcttgctgcaacagaatatgttgaagagctttacaccttttacagagaaaatgaggctaagagttgtgtaaggccagattacatgtccagccaacaagacataaactcaaagatgagagcaattctgattgactggctgattgaggttcactacaagtttgaactgatggatgagacgctctttcttatggtaaacataatagatagattcttggaaaaggaagtggttccaaggaagaagctacaactggttggagtcacagctatgctgctcgcttgtaaatatgaggaggtatctgttccagttgttgaggaccttgtgctgatatctgaccgtgcctacacaaaagggcaaattctagaaatggaaaagttgattctgaacacgctgcagttcaacatgtctgttccaacaccttatgtcttcatgaagaggtttctgaaagctgcagatgcagataaacagcttgagctagcgtcatttttcatgctggagctctgcttggtagaataccaaatgctggattatcggccttcgcatctggctgctgctgcggtttatactgcgcagtgtgctatcaatcgttgccagcactggacaaaggtctgcgagtctcatagcagatacactagcgaccaactcctggagtgctcgaggatgatggtagattttcaccagaaggctggaaccagtaagctcactggcgtgcacaggaagtacagtacctacaagttcggttgcgtggccaagattttgcctgcgcagttcctgctggagtcgggagggacaccgcctccttcaggtgcaaactagttgaatcgacctattcaactgggtggattttttaaagtttttagaatactccatgaacaagatgcagaaaacatcgtgttgatgttgcccaaaagtgcatcgaatttctttggagagttatgattaacaactttttttttatctatgttgaatgacgagtgacggtcggtcacgttgtgcttgtgcagttatactgcggctaataacaaactgtccagttattct

SEQ ID NO: 34952 - protein, 526 aa, Zea mays subsp. mays
  peptide (1)..(526): Ceres Seq. ID no. 12411350
  misc_feature (265)..(391): Pfam Name: Pfam Description:  Cyclin, N-terminal domain
  misc_feature (108)..(517): NCBI GI NO: 38345935 NR Description: OSJNBb0078D11.10
  misc_feature (108)..(517): NCBI GI NO: 6331704 NR Description: cyclin [Oryza sativa]
  misc_feature (118)..(516): NCBI GI NO: 3913236 NR Description: G2/mitotic-specific cyclin 2
  misc_feature (128)..(516): NCBI GI NO: 2130122 NR Description: cyclin III - maize
  misc_feature (128)..(514): NCBI GI NO: 22330658 NR Description: Cyclin B2;4; protein id: At1g76310.1
  misc_feature (128)..(514): NCBI GI NO: 25294186 NR Description: hypothetical protein F15M4.19
  misc_feature (128)..(516): NCBI GI NO: 1168893 NR Description: G2/mitotic-specific cyclin 1
  misc_feature (128)..(516): NCBI GI NO: 1362054 NR Description: mitosis-specific cyclin CycIII - alfalfa
  misc_feature (128)..(514): NCBI GI NO: 15217987 NR Description: Cyclin B2;3; protein id: At1g20610.1
  misc_feature (128)..(514): NCBI GI NO: 25294182 NR Description: protein F2D10.10 [imported] - Arabidopsis thaliana
LPLCSLSLSLPPVVQSSSFESQGGGQRVEIEREWDYRDVKNILIENRCCLLLLTPPPPPAFVWSASSRGSCVRKAPPQRLGWINRPADPSSPPPPAGRRLGIMAARAADENRRPAAGKPAPGVRDMASRRALTDIKNLVGAAPYPCAIAKKPMLQKSRRDEKQPALASSRPMTRKFAASLASKGQPECQPIVADPEPEFCQQKESVGDGTVDIDVELYELVDDSDSDIDMGATENKDIMNEDELLMDIDSADSGNPLAATEYVEELYTFYRENEAKSCVRPDYMSSQQDINSKMRAILIDWLIEVHYKFELMDETLFLMVNIIDRFLEKEVVPRKKLQLVGVTAMLLACKYEEVSVPVVEDLVLISDRAYTKGQILEMEKLILNTLQFNMSVPTPYVFMKRFLKAADADKQLELASFFMLELCLVEYQMLDYRPSHLAAAAVYTAQCAINRCQHWTKVCESHSRYTSDQLLECSRMMVDFHQKAGTSKLTGVHRKYSTYKFGCVAKILPAQFLLESGGTPPPSGAN

SEQ ID NO: 34953 - protein, 424 aa, Zea mays subsp. mays
  peptide (1)..(424): Ceres Seq. ID no. 12411351
  misc_feature (163)..(289): Pfam Name: Pfam Description:  Cyclin, N-terminal domain
  misc_feature (6)..(415): NCBI GI NO: 38345935 NR Description: OSJNBb0078D11.10
  misc_feature (6)..(415): NCBI GI NO: 6331704 NR Description: cyclin [Oryza sativa]
  misc_feature (16)..(414): NCBI GI NO: 3913236 NR Description: G2/mitotic-specific cyclin 2
  misc_feature (26)..(414): NCBI GI NO: 2130122 NR Description: cyclin III - maize
  misc_feature (26)..(412): NCBI GI NO: 22330658 NR Description: Cyclin B2;4; protein id: At1g76310.1
  misc_feature (26)..(412): NCBI GI NO: 25294186 NR Description: hypothetical protein F15M4.19
  misc_feature (26)..(414): NCBI GI NO: 1168893 NR Description: G2/mitotic-specific cyclin 1
  misc_feature (26)..(414): NCBI GI NO: 1362054 NR Description: mitosis-specific cyclin CycIII - alfalfa
  misc_feature (26)..(412): NCBI GI NO: 15217987 NR Description: Cyclin B2;3; protein id: At1g20610.1
  misc_feature (26)..(412): NCBI GI NO: 25294182 NR Description: protein F2D10.10 [imported] - Arabidopsis thaliana
MAARAADENRRPAAGKPAPGVRDMASRRALTDIKNLVGAAPYPCAIAKKPMLQKSRRDEKQPALASSRPMTRKFAASLASKGQPECQPIVADPEPEFCQQKESVGDGTVDIDVELYELVDDSDSDIDMGATENKDIMNEDELLMDIDSADSGNPLAATEYVEELYTFYRENEAKSCVRPDYMSSQQDINSKMRAILIDWLIEVHYKFELMDETLFLMVNIIDRFLEKEVVPRKKLQLVGVTAMLLACKYEEVSVPVVEDLVLISDRAYTKGQILEMEKLILNTLQFNMSVPTPYVFMKRFLKAADADKQLELASFFMLELCLVEYQMLDYRPSHLAAAAVYTAQCAINRCQHWTKVCESHSRYTSDQLLECSRMMVDFHQKAGTSKLTGVHRKYSTYKFGCVAKILPAQFLLESGGTPPPSGAN

SEQ ID NO: 34954 - protein, 401 aa, Zea mays subsp. mays
  peptide (1)..(401): Ceres Seq. ID no. 12411352
  misc_feature (140)..(266): Pfam Name: Pfam Description:  Cyclin, N-terminal domain
  misc_feature (1)..(392): NCBI GI NO: 38345935 NR Description: OSJNBb0078D11.10
  misc_feature (1)..(392): NCBI GI NO: 6331704 NR Description: cyclin [Oryza sativa]
  misc_feature (1)..(391): NCBI GI NO: 3913236 NR Description: G2/mitotic-specific cyclin 2
  misc_feature (3)..(391): NCBI GI NO: 2130122 NR Description: cyclin III - maize
  misc_feature (3)..(389): NCBI GI NO: 22330658 NR Description: Cyclin B2;4; protein id: At1g76310.1
  misc_feature (3)..(389): NCBI GI NO: 25294186 NR Description: hypothetical protein F15M4.19
  misc_feature (3)..(391): NCBI GI NO: 1168893 NR Description: G2/mitotic-specific cyclin 1
  misc_feature (3)..(391): NCBI GI NO: 1362054 NR Description: mitosis-specific cyclin CycIII - alfalfa
  misc_feature (3)..(389): NCBI GI NO: 15217987 NR Description: Cyclin B2;3; protein id: At1g20610.1
  misc_feature (3)..(389): NCBI GI NO: 25294182 NR Description: protein F2D10.10 [imported] - Arabidopsis thaliana
MASRRALTDIKNLVGAAPYPCAIAKKPMLQKSRRDEKQPALASSRPMTRKFAASLASKGQPECQPIVADPEPEFCQQKESVGDGTVDIDVELYELVDDSDSDIDMGATENKDIMNEDELLMDIDSADSGNPLAATEYVEELYTFYRENEAKSCVRPDYMSSQQDINSKMRAILIDWLIEVHYKFELMDETLFLMVNIIDRFLEKEVVPRKKLQLVGVTAMLLACKYEEVSVPVVEDLVLISDRAYTKGQILEMEKLILNTLQFNMSVPTPYVFMKRFLKAADADKQLELASFFMLELCLVEYQMLDYRPSHLAAAAVYTAQCAINRCQHWTKVCESHSRYTSDQLLECSRMMVDFHQKAGTSKLTGVHRKYSTYKFGCVAKILPAQFLLESGGTPPPSGAN

SEQ ID NO: 34955 - DNA, 1193 bp, Zea mays subsp. mays
  misc_feature (1)..(1193): Ceres Seq. ID no. 12406389
  misc_feature (371)..(371): n is a, c, t, g, unknown, or other
  misc_feature (370)..(370): n is a, c, t, g, unknown, or other
  misc_feature (827)..(827): n is a, c, t, g, unknown, or other
  misc_feature (825)..(825): n is a, c, t, g, unknown, or other
  misc_feature (821)..(821): n is a, c, t, g, unknown, or other
  misc_feature (418)..(418): n is a, c, t, g, unknown, or other
  misc_feature (369)..(369): n is a, c, t, g, unknown, or other
  misc_feature (368)..(368): n is a, c, t, g, unknown, or other
  misc_feature (465)..(465): n is a, c, t, g, unknown, or other
  misc_feature (823)..(823): n is a, c, t, g, unknown, or other
actcggagtcggaggcgccacgcgcgcgtgtataaataactgcgcctcactgctgcggtgcacggtgtccccctccctccccgctgtctgtggctgcaggccacccccatagcccccgagctctgtgtgcgatggactactcgggcaccaaggagtcgcctcctgccggggcttggtggtcgagggagacggtggccgtggtgaccggcgcgaaccgcggcatcggccacgcgctcgccgcccgcctggccgagcacggcctcaccgtggtgctcaccgcgcgggacggcgagcgcggggaggccgccgcggcgccgctcctcgcgcgcgggctcgcagtcgtcttccgcaggctcgacgtctccgannnngcctccgtcgccgagttcgccgcgtggatccgcgacgccctcggcgngcctcgacatcctggtgaacaacgcagccgtgtcgtttaacgagatngacaccaacctccgtggagcacgccgaggctgtcctcaggaccaacttctacggggccaagatgctcaccgaagcgctcctgccgctgttccggcagtcgtcggcgaccagcaggatcctcaacgtcagctcccagcttggccttctcaacaaggtgagcgacccgtcgctgagggcgctgctgctggacgaggacgggctgacggaggcggggatagaggcgatggtgtcgcggttcctggcgcaggtgaaggacgggacgtggggcgggcagggttggcccaaggtgtggacggactactcggtctccaagctggccctgaacgcctactcgcggctgctggcgcggcggctgncnangngccggcgcgcgcgtgagcgtcaactgcttctgccccgggttcacgcgcacgggcatgaccaagggctgggggaagcgcaccgccgaggaggcggccgacgtcgccgcgcggctcgcgctgctggcgcccgccgagctccccacggggaccttcttcaagtggtgcacgccgcagctctactccaagctgtgactgtgactggatagctacgcctaccgtcgtcggcagtgtgtgcgtgcgctccgtgaacgctggagtatatatatatagttcggttcctttagctactctgatcagaagtcagaaacgggagtgtcgatctgccaaggtgctttcggttgaacacagctcgtttgtgacctctcg

SEQ ID NO: 34956 - protein, 168 aa, Zea mays subsp. mays
  peptide (1)..(168): Ceres Seq. ID no. 12406390
  misc_feature (1)..(151): NCBI GI NO: 21740778 NR Description: OSJNBa0067K08.19
  misc_feature (1)..(97): NCBI GI NO: 15231739 NR Description: putative protein; protein id: At3g59710.1
  misc_feature (1)..(98): NCBI GI NO: 15241346 NR Description: carbonyl reductase-like protein
  misc_feature (1)..(98): NCBI GI NO: 34907100 NR Description: putative carbonyl reductase-like protein
  misc_feature (1)..(109): NCBI GI NO: 15240361 NR Description: carbonyl reductase - like protein
  misc_feature (1)..(109): NCBI GI NO: 10176876 NR Description: carbonyl reductase-like protein
  misc_feature (1)..(97): NCBI GI NO: 38346769 NR Description: OSJNBa0081C01.20
  misc_feature (1)..(97): NCBI GI NO: 15233062 NR Description: putative protein; protein id: At3g61220
  misc_feature (1)..(97): NCBI GI NO: 38346772 NR Description: OSJNBa0081C01.23
  misc_feature (1)..(97): NCBI GI NO: 15224100 NR Description: putative carbonyl reductase; protein id:At2g24190
  misc_feature (99)..(99): Xaa is any aa, unknown or other
  misc_feature (100)..(100): Xaa is any aa, unknown or other
  misc_feature (101)..(101): Xaa is any aa, unknown or other
MLTEALLPLFRQSSATSRILNVSSQLGLLNKVSDPSLRALLLDEDGLTEAGIEAMVSRFLAQVKDGTWGGQGWPKVWTDYSVSKLALNAYSRLLARRLXXXRRARERQLLLPRVHAHGHDQGLGEAHRRGGGRRRRAARAAGARRAPHGDLLQVVHAAALLQAVTVTG

SEQ ID NO: 34957 - protein, 114 aa, Zea mays subsp. mays
  peptide (1)..(114): Ceres Seq. ID no. 12406391
  misc_feature (1)..(97): NCBI GI NO: 21740778 NR Description: OSJNBa0067K08.19
  misc_feature (1)..(43): NCBI GI NO: 15231739 NR Description: putative protein; protein id: At3g59710.1
  misc_feature (1)..(44): NCBI GI NO: 15241346 NR Description: carbonyl reductase-like protein
  misc_feature (1)..(44): NCBI GI NO: 34907100 NR Description: putative carbonyl reductase-like protein
  misc_feature (1)..(55): NCBI GI NO: 15240361 NR Description: carbonyl reductase - like protein
  misc_feature (1)..(55): NCBI GI NO: 10176876 NR Description: carbonyl reductase-like protein
  misc_feature (1)..(43): NCBI GI NO: 38346769 NR Description: OSJNBa0081C01.20
  misc_feature (1)..(43): NCBI GI NO: 15233062 NR Description: putative protein; protein id: At3g61220
  misc_feature (1)..(43): NCBI GI NO: 38346772 NR Description: OSJNBa0081C01.23
  misc_feature (1)..(43): NCBI GI NO: 15224100 NR Description: putative carbonyl reductase; protein id:At2g24190
  misc_feature (45)..(45): Xaa is any aa, unknown or other
  misc_feature (46)..(46): Xaa is any aa, unknown or other
  misc_feature (47)..(47): Xaa is any aa, unknown or other
MVSRFLAQVKDGTWGGQGWPKVWTDYSVSKLALNAYSRLLARRLXXXRRARERQLLLPRVHAHGHDQGLGEAHRRGGGRRRRAARAAGARRAPHGDLLQVVHAAALLQAVTVTG

SEQ ID NO: 34958 - protein, 108 aa, Zea mays subsp. mays
  peptide (1)..(108): Ceres Seq. ID no. 12406392
  misc_feature (1)..(95): NCBI GI NO: 21740778 NR Description: OSJNBa0067K08.19
  misc_feature (15)..(95): NCBI GI NO: 15231739 NR Description: putative protein; protein id: At3g59710.1
  misc_feature (15)..(95): NCBI GI NO: 15241346 NR Description: carbonyl reductase-like protein
  misc_feature (10)..(95): NCBI GI NO: 34907100 NR Description: putative carbonyl reductase-like protein
  misc_feature (15)..(95): NCBI GI NO: 15240361 NR Description: carbonyl reductase - like protein
  misc_feature (15)..(95): NCBI GI NO: 10176876 NR Description: carbonyl reductase-like protein
  misc_feature (21)..(95): NCBI GI NO: 38346769 NR Description: OSJNBa0081C01.20
  misc_feature (22)..(95): NCBI GI NO: 15233062 NR Description: putative protein; protein id: At3g61220
  misc_feature (21)..(95): NCBI GI NO: 38346772 NR Description: OSJNBa0081C01.23
  misc_feature (22)..(95): NCBI GI NO: 15224100 NR Description: putative carbonyl reductase; protein id:At2g24190
  misc_feature (79)..(79): Xaa is any aa, unknown or other
  misc_feature (80)..(80): Xaa is any aa, unknown or other
  misc_feature (96)..(96): Xaa is any aa, unknown or other
MDYSGTKESPPAGAWWSRETVAVVTGANRGIGHALAARLAEHGLTVVLTARDGERGEAAAAPLLARGLAVVFRRLDVSXXASVAEFAAWIRDALGXPRHPGEQRSRVV

SEQ ID NO: 34959 - DNA, 1988 bp, Zea mays subsp. mays
  misc_feature (1)..(1988): Ceres Seq. ID no. 12411341
aaactagtgtgtgaaatatctcctacaatatatatccggctctctctgtgtgcgtgctctaactgcagcggagcctcacagttgttcgtgtgctgtgtatttgtcactggtggtgctgtgcagaccaagctactgcgggagggagaagggtgtgtgccggcccgccgccaagcactgctacccggccggcggccatggaggtgagctccgtggagttcggtcatcacgcggcggccgcctcaaagtgctttgacgacgacggtcgcctcaagcgcacagggacgatgtggacggcgagcgcgcacattatcacggccgtgatagggtccggggtgctgtcgctcgcgtgggccatcgcgcagctcggctgggtggcaggccccaccgtcatgctgctcttctccttcgtcacctactacacatcggccctactcgccgactgctaccgctccggcgacgcctgcaccggcaagcgcaactacacgtacatggacgcggttaacgccaatctcagtggcgtcaaggtctggttctgcggcttcctgcagtacgccaacatcgtcggagtcgccataggctacaccattgccgcctctattagcatgctggcgatccagagggcgaactgcttccacgtggaggggcacggggacccctgcaacatctccagcacgccctacatgatcatcttcggcgtcgtgcagattttcttctcgcagatcccggacttcgaccagatatcgtggctctccatcctcgccgccgtcatgtccttcacctactccaccatcggcctgggcctgggcatcgcgcaggtggtgtccaacaagggcgtgcagggcagcctgacggggatcagcgtcggcgcggtcaccccggtcgacaagatgtggcgcagcctgcaggcgttcggcgacatcgccttcgcctactcctactccctcatcctcatcgagatccaggacaccatccgcgcgccgccgccgtccgagtccaaggtcatgcggcgcgccaccgtcgtcagcgtggccgtcaccacgttcttctacatgctgtgcgggtgcatggggtacgccgcgttcggggacaacgcccccgggaacctcctcacgggcttcggcttctacgagcccttctggctcctcgacgtcgccaacgccgccatcgccgtgcacctcgtcggcgcctaccaggtctactgccagcccctgttcgccttcgtcgagaagtgggcgcgccagaggtggcccaagtcccgctacatcacgggcgaggtcgacgtcccgctcccgctcgggaccgccggcggccggtgctacaagctcagcctgttccggctgacgtggcggacggcgttcgtggtggccacgacggtggtgtccatgctgctgcccttcttcaacgacgtggtcgggctcctgggcgcgctggggttctggccgctcaccgtctacttccccgtggagatgtacatcgtgcagaagaaggtgcccaggtggagcacgcggtgggtgtgcctgcagctgctcagcgtcgcctgcctcgtcatcaccgtcgcctccgccgcaggctccgttgccgggatcgtctctgacctcaaagtgtacaaaccgttcgtcaccacctcctgatggaccggcctagcttccgtgcagttcaaaacacacatacgcacgaacagatcattaattggcgcctagtatatatgtgcagtctttaattaaattaactaggcattaatcgatcgatcaccactacgcgtcgttctagtgatgcgcgtagcttgcatcaccgctcgctgatttaatttccattgtttttctttgatgatctggttagccgaaatggctagtgaattaagagaaaacaaatagtagcagtactgtgtgagtaatcccaagtcaaatacgttattgaagttgtcggcggtacaaaacgcttgtaaaatgtttgtgtttcaattaatcaagaagaattgtacgtgtttc

SEQ ID NO: 34960 - protein, 478 aa, Zea mays subsp. mays
  peptide (1)..(478): Ceres Seq. ID no. 12411342
  misc_feature (1)..(474): NCBI GI NO: 20161442 NR Description: putative amino acid transport protein
  misc_feature (16)..(474): NCBI GI NO: 27447657 NR Description: amino acid transporter [Lycopersicon esculentum]
  misc_feature (1)..(477): NCBI GI NO: 7442735 NR Description: amino acid transport protein AAP1 - castor bean
  misc_feature (16)..(474): NCBI GI NO: 21553710 NR Description: amino acid carrier, putative
  misc_feature (16)..(474): NCBI GI NO: 15223930 NR Description: amino acid carrier, putative; protein id:At1g77380
  misc_feature (16)..(476): NCBI GI NO: 15216030 NR Description: amino acid permease AAP4 [Vicia faba var. minor]
  misc_feature (16)..(477): NCBI GI NO: 27447653 NR Description: amino acid transporter [Lycopersicon esculentum]
  misc_feature (15)..(477): NCBI GI NO: 15242347 NR Description: amino acid transport protein AAP2
  misc_feature (15)..(477): NCBI GI NO: 21536895 NR Description: amino acid transport protein AAP2
  misc_feature (15)..(477): NCBI GI NO: 15237539 NR Description: amino acid transporter AAP4
MEVSSVEFGHHAAAASKCFDDDGRLKRTGTMWTASAHIITAVIGSGVLSLAWAIAQLGWVAGPTVMLLFSFVTYYTSALLADCYRSGDACTGKRNYTYMDAVNANLSGVKVWFCGFLQYANIVGVAIGYTIAASISMLAIQRANCFHVEGHGDPCNISSTPYMIIFGVVQIFFSQIPDFDQISWLSILAAVMSFTYSTIGLGLGIAQVVSNKGVQGSLTGISVGAVTPVDKMWRSLQAFGDIAFAYSYSLILIEIQDTIRAPPPSESKVMRRATVVSVAVTTFFYMLCGCMGYAAFGDNAPGNLLTGFGFYEPFWLLDVANAAIAVHLVGAYQVYCQPLFAFVEKWARQRWPKSRYITGEVDVPLPLGTAGGRCYKLSLFRLTWRTAFVVATTVVSMLLPFFNDVVGLLGALGFWPLTVYFPVEMYIVQKKVPRWSTRWVCLQLLSVACLVITVASAAGSVAGIVSDLKVYKPFVTTS

SEQ ID NO: 34961 - protein, 448 aa, Zea mays subsp. mays
  peptide (1)..(448): Ceres Seq. ID no. 12411343
  misc_feature (1)..(444): NCBI GI NO: 20161442 NR Description: putative amino acid transport protein
  misc_feature (1)..(444): NCBI GI NO: 27447657 NR Description: amino acid transporter [Lycopersicon esculentum]
  misc_feature (1)..(447): NCBI GI NO: 7442735 NR Description: amino acid transport protein AAP1 - castor bean
  misc_feature (1)..(444): NCBI GI NO: 21553710 NR Description: amino acid carrier, putative
  misc_feature (1)..(444): NCBI GI NO: 15223930 NR Description: amino acid carrier, putative; protein id:At1g77380
  misc_feature (1)..(446): NCBI GI NO: 15216030 NR Description: amino acid permease AAP4 [Vicia faba var. minor]
  misc_feature (1)..(447): NCBI GI NO: 27447653 NR Description: amino acid transporter [Lycopersicon esculentum]
  misc_feature (1)..(447): NCBI GI NO: 15242347 NR Description: amino acid transport protein AAP2
  misc_feature (1)..(447): NCBI GI NO: 21536895 NR Description: amino acid transport protein AAP2
  misc_feature (1)..(447): NCBI GI NO: 15237539 NR Description: amino acid transporter AAP4
MWTASAHIITAVIGSGVLSLAWAIAQLGWVAGPTVMLLFSFVTYYTSALLADCYRSGDACTGKRNYTYMDAVNANLSGVKVWFCGFLQYANIVGVAIGYTIAASISMLAIQRANCFHVEGHGDPCNISSTPYMIIFGVVQIFFSQIPDFDQISWLSILAAVMSFTYSTIGLGLGIAQVVSNKGVQGSLTGISVGAVTPVDKMWRSLQAFGDIAFAYSYSLILIEIQDTIRAPPPSESKVMRRATVVSVAVTTFFYMLCGCMGYAAFGDNAPGNLLTGFGFYEPFWLLDVANAAIAVHLVGAYQVYCQPLFAFVEKWARQRWPKSRYITGEVDVPLPLGTAGGRCYKLSLFRLTWRTAFVVATTVVSMLLPFFNDVVGLLGALGFWPLTVYFPVEMYIVQKKVPRWSTRWVCLQLLSVACLVITVASAAGSVAGIVSDLKVYKPFVTTS

SEQ ID NO: 34962 - protein, 413 aa, Zea mays subsp. mays
  peptide (1)..(413): Ceres Seq. ID no. 12411344
  misc_feature (1)..(409): NCBI GI NO: 20161442 NR Description: putative amino acid transport protein
  misc_feature (1)..(409): NCBI GI NO: 27447657 NR Description: amino acid transporter [Lycopersicon esculentum]
  misc_feature (1)..(412): NCBI GI NO: 7442735 NR Description: amino acid transport protein AAP1 - castor bean
  misc_feature (1)..(409): NCBI GI NO: 21553710 NR Description: amino acid carrier, putative
  misc_feature (1)..(409): NCBI GI NO: 15223930 NR Description: amino acid carrier, putative; protein id:At1g77380
  misc_feature (1)..(411): NCBI GI NO: 15216030 NR Description: amino acid permease AAP4 [Vicia faba var. minor]
  misc_feature (1)..(412): NCBI GI NO: 27447653 NR Description: amino acid transporter [Lycopersicon esculentum]
  misc_feature (1)..(412): NCBI GI NO: 15242347 NR Description: amino acid transport protein AAP2
  misc_feature (1)..(412): NCBI GI NO: 21536895 NR Description: amino acid transport protein AAP2
  misc_feature (1)..(412): NCBI GI NO: 15237539 NR Description: amino acid transporter AAP4
MLLFSFVTYYTSALLADCYRSGDACTGKRNYTYMDAVNANLSGVKVWFCGFLQYANIVGVAIGYTIAASISMLAIQRANCFHVEGHGDPCNISSTPYMIIFGVVQIFFSQIPDFDQISWLSILAAVMSFTYSTIGLGLGIAQVVSNKGVQGSLTGISVGAVTPVDKMWRSLQAFGDIAFAYSYSLILIEIQDTIRAPPPSESKVMRRATVVSVAVTTFFYMLCGCMGYAAFGDNAPGNLLTGFGFYEPFWLLDVANAAIAVHLVGAYQVYCQPLFAFVEKWARQRWPKSRYITGEVDVPLPLGTAGGRCYKLSLFRLTWRTAFVVATTVVSMLLPFFNDVVGLLGALGFWPLTVYFPVEMYIVQKKVPRWSTRWVCLQLLSVACLVITVASAAGSVAGIVSDLKVYKPFVTTS

SEQ ID NO: 34963 - DNA, 902 bp, Zea mays subsp. mays
  misc_feature (1)..(902): Ceres Seq. ID no. 12377811
  misc_feature (669)..(669): n is a, c, t, g, unknown, or other
  misc_feature (890)..(890): n is a, c, t, g, unknown, or other
  misc_feature (724)..(724): n is a, c, t, g, unknown, or other
gagtagtaattagtttgtgcccgtgtccgtgtttggttgaataataaattgacgaaagagggccaagtatagcttagagagagaagctagctagctgaaatggaggctagcagccgccgccgcgtctctcttgtgccactgctggtggtgatcatcgggtgctgtgcctgccgcgcccagatcccgatcccggcgaggacggacgggttcgtgtacggcgggaagccgccggcgtggggcgagacggtggtggtagaggcgttcttggacccagtgtgccccgacagccgcgacgcgtggccggcgctcaagatggtcgtcgagcactatagctcacgcgtgtccgtcgtcgttcacctcttcccgctgccttaccacagctatgccttcattgcgtgccggtcaattcatgcggtgaacaaactaaatccgtcgttcgtgtaccctctgctggagaagttcttcaaataccagaaacgttactataatcagccaacatacgaaaaatcaagagctacagtggttgatgaaataaccaagaaccttgttgtgcccatcatcggtgaaactaatttggcggcattcagagcaggtttcaacgattcacattctgatcaggctacaaggatatctttcaagaacggctgtgcacgaggtgtgaccgggacnccctacttctttgtgaatggcatacccatcaacgattcaggttctcctctggaanacaaggactggatttctatcctgcgtcccttggttggaaagatgtaacgcggttgctagtttgttcatcaataaagtcctagtagagtaaacaaacaaaagctgaataataaataacattaatcagcatcgtcattctcaggaaaaaaaaagagtgctaactcagnaactctcctcgc

SEQ ID NO: 34964 - protein, 223 aa, Zea mays subsp. mays
  peptide (1)..(223): Ceres Seq. ID no. 12377812
  misc_feature (1)..(223): NCBI GI NO: 38346025 NR Description: OSJNBb0071D01.2
  misc_feature (9)..(220): NCBI GI NO: 15222928 NR Description: unknown protein; protein id: At1g76020.1
  misc_feature (8)..(220): NCBI GI NO: 22329686 NR Description: unknown protein; protein id: At1g20225
  misc_feature (8)..(219): NCBI GI NO: 25518088 NR Description: T20H2.2 protein - Arabidopsis thaliana
  misc_feature (9)..(197): NCBI GI NO: 8778813 NR Description: T4O12.23 [Arabidopsis thaliana]
  misc_feature (190)..(190): Xaa is any aa, unknown or other
  misc_feature (209)..(209): Xaa is any aa, unknown or other
MEASSRRRVSLVPLLVVIIGCCACRAQIPIPARTDGFVYGGKPPAWGETVVVEAFLDPVCPDSRDAWPALKMVVEHYSSRVSVVVHLFPLPYHSYAFIACRSIHAVNKLNPSFVYPLLEKFFKYQKRYYNQPTYEKSRATVVDEITKNLVVPIIGETNLAAFRAGFNDSHSDQATRISFKNGCARGVTGXPYFFVNGIPINDSGSPLEXKDWISILRPLVGKM

SEQ ID NO: 34965 - protein, 152 aa, Zea mays subsp. mays
  peptide (1)..(152): Ceres Seq. ID no. 12377813
  misc_feature (1)..(152): NCBI GI NO: 38346025 NR Description: OSJNBb0071D01.2
  misc_feature (1)..(149): NCBI GI NO: 15222928 NR Description: unknown protein; protein id: At1g76020.1
  misc_feature (1)..(149): NCBI GI NO: 22329686 NR Description: unknown protein; protein id: At1g20225
  misc_feature (1)..(148): NCBI GI NO: 25518088 NR Description: T20H2.2 protein - Arabidopsis thaliana
  misc_feature (1)..(126): NCBI GI NO: 8778813 NR Description: T4O12.23 [Arabidopsis thaliana]
  misc_feature (119)..(119): Xaa is any aa, unknown or other
  misc_feature (138)..(138): Xaa is any aa, unknown or other
MVVEHYSSRVSVVVHLFPLPYHSYAFIACRSIHAVNKLNPSFVYPLLEKFFKYQKRYYNQPTYEKSRATVVDEITKNLVVPIIGETNLAAFRAGFNDSHSDQATRISFKNGCARGVTGXPYFFVNGIPINDSGSPLEXKDWISILRPLVGKM

SEQ ID NO: 34966 - DNA, 1619 bp, Zea mays subsp. mays
  misc_feature (1)..(1619): Ceres Seq. ID no. 12369137
  misc_feature (705)..(705): n is a, c, t, g, unknown, or other
gtgcccgtttcgcctcgcgcctgcgttgctctgctatttccatttccattgcacccatttccggggtcgcctgcgttgcttcgcgtgggagcgtgattcgtttaggcctctcgccaatttcggagggcgacggcgacgtgctttcggcgggcgggcagagaaaatctagagtcttgggtttgccagacgcgcctttgtgggagacagacacttgctctcgcctccaatggccgagatctgctgcgaggaagccaagtcgacgccggcaaccgccgtggctgcggcttcagtctccgccacggccgcagcggccgcagccgtggcagtggcctcctcggcgttagagaggaggcgacgcaggctggagatgaggaggttccgcgtcgcgagcgatcccgaggagctggtcgcggatgacgtccgcgctgccaagcggcagaggctggcgcgcacgctgtccggctcctgccccgacgcgggctcggactccgacaggccggccctgcccaggtacggggtcacctccgtctgcggccgacggcgcgagatggaggacacggtctccatcaggccggacttcctgcccggcaccagcaagcacaacttcttcggcgtcttcgacggccacggctgctcccacgtagcgacgatgtgccaggacaacatgcacgaggttgtcgcggacgagcacacgaaggctgcctntggcgaggagacggcgtggaagggcgtgatggagaggagcttctcgcgattggatgagcaggccgccagctgggcgaccagccgcagccgcgacgagcctgcctgcaggtgcgagcagcagatgcccttgcgctgcgatcacgtggggtccaccgccgtggtcgccgtcgttagccccagccacgtagtcgtcgccaacgccggcgactcgcgcgccgtcctctcccgcggcggcgtccccgttccgctctccgtcgaccacaagcctgaccgacctgacgagctggctcgcatcgaggcggcgggtggccgcgtcatttactgggatggtgcccgtgttctcggcgtcctcgccatgtctcgagccataggggataggtacctaaagccgtttgtgtcgtcggagccggaggtaacggtgacggagcgcaccgacgacgacgagtgtctgatcctggccagcgacggcctgtgggacgtcgtgaccaacgagatggcgtgcgaggtcgtccgggcgtgcttccgtagcaacggtccgccggcgccggccgctcgcccgaacggcgtggccctcccggcagccggcgcgggcgccgaggacggatcggcggttgtcaagggtgtgggcaaggaggactccgacaaggcgtgctccgacgcggccatgctgctggcaaagctggcgctggcccggcggagcgccgacaatgttagcgtggtcgtcgtggatctccgccggggcatatgattctcggagcgaagcagagcagggcaaaatcatatgctccatgcttgaaactagctcttctgaaatccacgctaatttctcccccattttgaccatccttctattttgatgtagtattagtagtagatcctgatcagatgaatataatagacgcttttcttctctc

SEQ ID NO: 34967 - protein, 408 aa, Zea mays subsp. mays
  peptide (1)..(408): Ceres Seq. ID no. 12369138
  misc_feature (94)..(397): Pfam Name: Pfam Description:  Protein phosphatase 2C
  misc_feature (11)..(408): NCBI GI NO: 34908256 NR Description: putative protein phosphatase 2C
  misc_feature (42)..(406): NCBI GI NO: 34902050 NR Description: putative Serine/threonine phosphatases
  misc_feature (1)..(338): NCBI GI NO: 15229745 NR Description: protein phosphatase 2C
  misc_feature (365)..(406): NCBI GI NO: 15229745 NR Description: protein phosphatase 2C
  misc_feature (57)..(408): NCBI GI NO: 10432446 NR Description: protein phosphatase 2C [Nicotiana tabacum]
  misc_feature (67)..(406): NCBI GI NO: 7768151 NR Description: protein phpsphatase 2C (PP2C) [Fagus sylvatica]
  misc_feature (94)..(374): NCBI GI NO: 33309516 NR Description: protein phosphatase 2C [Prunus avium]
  misc_feature (373)..(406): NCBI GI NO: 33309516 NR Description: protein phosphatase 2C [Prunus avium]
  misc_feature (25)..(338): NCBI GI NO: 15227078 NR Description: protein phosphatase 2C
  misc_feature (373)..(406): NCBI GI NO: 15227078 NR Description: protein phosphatase 2C
  misc_feature (160)..(160): Xaa is any aa, unknown or other
MAEICCEEAKSTPATAVAAASVSATAAAAAAVAVASSALERRRRRLEMRRFRVASDPEELVADDVRAAKRQRLARTLSGSCPDAGSDSDRPALPRYGVTSVCGRRREMEDTVSIRPDFLPGTSKHNFFGVFDGHGCSHVATMCQDNMHEVVADEHTKAAXGEETAWKGVMERSFSRLDEQAASWATSRSRDEPACRCEQQMPLRCDHVGSTAVVAVVSPSHVVVANAGDSRAVLSRGGVPVPLSVDHKPDRPDELARIEAAGGRVIYWDGARVLGVLAMSRAIGDRYLKPFVSSEPEVTVTERTDDDECLILASDGLWDVVTNEMACEVVRACFRSNGPPAPAARPNGVALPAAGAGAEDGSAVVKGVGKEDSDKACSDAAMLLAKLALARRSADNVSVVVVDLRRGI

SEQ ID NO: 34968 - protein, 361 aa, Zea mays subsp. mays
  peptide (1)..(361): Ceres Seq. ID no. 12369139
  misc_feature (47)..(350): Pfam Name: Pfam Description:  Protein phosphatase 2C
  misc_feature (1)..(361): NCBI GI NO: 34908256 NR Description: putative protein phosphatase 2C
  misc_feature (1)..(359): NCBI GI NO: 34902050 NR Description: putative Serine/threonine phosphatases
  misc_feature (1)..(291): NCBI GI NO: 15229745 NR Description: protein phosphatase 2C
  misc_feature (318)..(359): NCBI GI NO: 15229745 NR Description: protein phosphatase 2C
  misc_feature (10)..(361): NCBI GI NO: 10432446 NR Description: protein phosphatase 2C [Nicotiana tabacum]
  misc_feature (20)..(359): NCBI GI NO: 7768151 NR Description: protein phpsphatase 2C (PP2C) [Fagus sylvatica]
  misc_feature (47)..(327): NCBI GI NO: 33309516 NR Description: protein phosphatase 2C [Prunus avium]
  misc_feature (326)..(359): NCBI GI NO: 33309516 NR Description: protein phosphatase 2C [Prunus avium]
  misc_feature (1)..(291): NCBI GI NO: 15227078 NR Description: protein phosphatase 2C
  misc_feature (326)..(359): NCBI GI NO: 15227078 NR Description: protein phosphatase 2C
  misc_feature (113)..(113): Xaa is any aa, unknown or other
MRRFRVASDPEELVADDVRAAKRQRLARTLSGSCPDAGSDSDRPALPRYGVTSVCGRRREMEDTVSIRPDFLPGTSKHNFFGVFDGHGCSHVATMCQDNMHEVVADEHTKAAXGEETAWKGVMERSFSRLDEQAASWATSRSRDEPACRCEQQMPLRCDHVGSTAVVAVVSPSHVVVANAGDSRAVLSRGGVPVPLSVDHKPDRPDELARIEAAGGRVIYWDGARVLGVLAMSRAIGDRYLKPFVSSEPEVTVTERTDDDECLILASDGLWDVVTNEMACEVVRACFRSNGPPAPAARPNGVALPAAGAGAEDGSAVVKGVGKEDSDKACSDAAMLLAKLALARRSADNVSVVVVDLRRGI

SEQ ID NO: 34969 - protein, 301 aa, Zea mays subsp. mays
  peptide (1)..(301): Ceres Seq. ID no. 12369140
  misc_feature (1)..(290): Pfam Name: Pfam Description:  Protein phosphatase 2C
  misc_feature (1)..(301): NCBI GI NO: 34908256 NR Description: putative protein phosphatase 2C
  misc_feature (1)..(299): NCBI GI NO: 34902050 NR Description: putative Serine/threonine phosphatases
  misc_feature (1)..(231): NCBI GI NO: 15229745 NR Description: protein phosphatase 2C
  misc_feature (258)..(299): NCBI GI NO: 15229745 NR Description: protein phosphatase 2C
  misc_feature (1)..(301): NCBI GI NO: 10432446 NR Description: protein phosphatase 2C [Nicotiana tabacum]
  misc_feature (1)..(299): NCBI GI NO: 7768151 NR Description: protein phpsphatase 2C (PP2C) [Fagus sylvatica]
  misc_feature (1)..(267): NCBI GI NO: 33309516 NR Description: protein phosphatase 2C [Prunus avium]
  misc_feature (266)..(299): NCBI GI NO: 33309516 NR Description: protein phosphatase 2C [Prunus avium]
  misc_feature (1)..(231): NCBI GI NO: 15227078 NR Description: protein phosphatase 2C
  misc_feature (266)..(299): NCBI GI NO: 15227078 NR Description: protein phosphatase 2C
  misc_feature (53)..(53): Xaa is any aa, unknown or other
MEDTVSIRPDFLPGTSKHNFFGVFDGHGCSHVATMCQDNMHEVVADEHTKAAXGEETAWKGVMERSFSRLDEQAASWATSRSRDEPACRCEQQMPLRCDHVGSTAVVAVVSPSHVVVANAGDSRAVLSRGGVPVPLSVDHKPDRPDELARIEAAGGRVIYWDGARVLGVLAMSRAIGDRYLKPFVSSEPEVTVTERTDDDECLILASDGLWDVVTNEMACEVVRACFRSNGPPAPAARPNGVALPAAGAGAEDGSAVVKGVGKEDSDKACSDAAMLLAKLALARRSADNVSVVVVDLRRGI

SEQ ID NO: 34970 - DNA, 2115 bp, Zea mays subsp. mays
  misc_feature (1)..(2115): Ceres Seq. ID no. 12365140
ataagaaattcgattttcacccaaccctaagcccctcctccctcgtaatcccactccagccgccgccgcgccgccgcctctagcctccggatccaatccagcatcgccgccgcaaaccatgggcttcgacgtgggcgtcgtcccgttcaaccccgacggctggggtcctcctgacgtcccggcgattccgcagtctctggggcgcggtgcctccatccccttcgcgcccttctcccgctccgacaagctgggccgcatcgccgactggacgcgcaaccacgccggtcccgccgccttcgccgcggcgtcacgggactccgtattcgacttcacctccgcggacgactcgctcgtcgccggggccgaggactcctcgttccgcctcgtcgatgctaagccgcagccgcggccgcaacggttcggccccaagtggcgcttcaaccagcgccagcagctcccacagcgccaagacgaggaggtggaggcgcgccgccgcttggccgagaaggagcgcgcacgccgcgatcgccacttccagaacaaccgctcacatcaccaccctggcttccggggcaaccagccctcgtcgtcagccaagccctccgtcgacatccagcccgactggaccatgcgcgagcagatccccttcgccaacttcaccaagctctccttctccgtgtccgaccagcccgaggatctcctcttatgcggcgccgtcgagtcctacgatcgggcctatgaccgtgtcaaccccaaggccgcgcgccgtctcgagcgcttcaagtcccgcaacttcttcaaggtcaccaccaccgacgaccctgtcatccgccgcctcgctgaggaggacaaagccacggtgttcgcgactgatgccatcctcgccgctctcatgtgcacgccccgcagcatcctgtcgtgggacattgtcgtgcagcgtgtgggcaacaagctgttccttgacaagcgtgatggctcccagctcgacctgctcactgtcaatgagactgcgcaggagcagcttcctgagaacaaggatgacatcaactccgcacactcgctcgctgttgaggccacctacatcaaccagaacttctctcagcaggtgctgcaccgcaatggtgagaaggttaactttgacgagcccaacccatttgcttctgagggtgaagaggctgcatctgttggctaccgctaccgccgttggaagttgaatgatgagatcagccttgttgctcgctgtgaggtgcatgctgtcagtgttgatcaaagtggtactcgccagtttattaccgtcaatgccctaaatgagtttgattcaaagattactggtgttgactggaggcagaagcttgagacccagcgtggagctgtccttgctacagagctcaagaacaatgccaacaaacttgctcgctggactgcccaggctttgcttgctggtgctgacatgatgaagttgggctatgtgtcacgggtgaacccccgtgatcagtacaaccattctgtgctcactgtgatgggatacaagccaagggattttgctgcacagatcaacctcaacactgcaaacatgtggggaatcgtcaagtcaattgtggacatctgcatgaagtttgaagagggcaagtatgtgtttgtcaaagatccagcaaagccacagttgaggatctatgaggtaccatctgatgcgtttgagaatgattatgttgaagagccacttccagaggaggagcaggttcgcccgcttggagaagttgacgccactgcagaggaaatggatgcagttgctgaggcagaggccaacaatgtatcttctgctaatggtggtgagggtgggaagagtgcagaagcgacccttgcttgaagggaatagagggttcttttaccctttgcaagaaaattcccttttttggttaattatctgtgtcgtggaagacatgatccgctggtattgatacatgtcttcttatggctaatgcgaaaactatcacatttgtttttttttctctttcatgcttagacatgctatagtttttttaagcacccctcgatcgtttctgctgcaatgtttctgtgtaagaactattgaatctgattctgtgtttttttgtt

SEQ ID NO: 34971 - protein, 582 aa, Zea mays subsp. mays
  peptide (1)..(582): Ceres Seq. ID no. 12365141
  misc_feature (3)..(539): Pfam Name: eIF-3 Pfam Description: Eukaryotic translation initiation factor 3 subunit 7
  misc_feature (3)..(578): NCBI GI NO: 15241470 NR Description: eukaryotic translation initiation factor 3 subunit7
  misc_feature (32)..(568): NCBI GI NO: 15233469 NR Description: translation initiation factor eIF3 - like protein
  misc_feature (32)..(568): NCBI GI NO: 17528988 NR Description: putative translation initiation factor eIF3
  misc_feature (156)..(568): NCBI GI NO: 12407755 NR Description: initiation factor 3d [Arabidopsis thaliana]
  misc_feature (3)..(540): NCBI GI NO: 4503523 NR Description: eukaryotic translation initiation factor 3 subunit7
  misc_feature (3)..(540): NCBI GI NO: 34866902 NR Description: similar to eukaryotic translation initiation factor3 subunit 7
  misc_feature (3)..(540): NCBI GI NO: 26337171 NR Description: unnamed protein product [Mus musculus]
  misc_feature (3)..(541): NCBI GI NO: 27882463 NR Description: Similar to eukaryotic translation initiation factor3
  misc_feature (1)..(539): NCBI GI NO: 24649360 NR Description: Eukaryotic initiation factor 3 p66 subunit CG10161-PB
  misc_feature (3)..(540): NCBI GI NO: 38174024 NR Description: Unknown (protein for MGC:75703)
MGFDVGVVPFNPDGWGPPDVPAIPQSLGRGASIPFAPFSRSDKLGRIADWTRNHAGPAAFAAASRDSVFDFTSADDSLVAGAEDSSFRLVDAKPQPRPQRFGPKWRFNQRQQLPQRQDEEVEARRRLAEKERARRDRHFQNNRSHHHPGFRGNQPSSSAKPSVDIQPDWTMREQIPFANFTKLSFSVSDQPEDLLLCGAVESYDRAYDRVNPKAARRLERFKSRNFFKVTTTDDPVIRRLAEEDKATVFATDAILAALMCTPRSILSWDIVVQRVGNKLFLDKRDGSQLDLLTVNETAQEQLPENKDDINSAHSLAVEATYINQNFSQQVLHRNGEKVNFDEPNPFASEGEEAASVGYRYRRWKLNDEISLVARCEVHAVSVDQSGTRQFITVNALNEFDSKITGVDWRQKLETQRGAVLATELKNNANKLARWTAQALLAGADMMKLGYVSRVNPRDQYNHSVLTVMGYKPRDFAAQINLNTANMWGIVKSIVDICMKFEEGKYVFVKDPAKPQLRIYEVPSDAFENDYVEEPLPEEEQVRPLGEVDATAEEMDAVAEAEANNVSSANGGEGGKSAEATLA

SEQ ID NO: 34972 - protein, 412 aa, Zea mays subsp. mays
  peptide (1)..(412): Ceres Seq. ID no. 12365142
  misc_feature (1)..(369): Pfam Name: eIF-3 Pfam Description: Eukaryotic translation initiation factor 3 subunit 7
  misc_feature (1)..(408): NCBI GI NO: 15241470 NR Description: eukaryotic translation initiation factor 3 subunit7
  misc_feature (1)..(398): NCBI GI NO: 15233469 NR Description: translation initiation factor eIF3 - like protein
  misc_feature (1)..(398): NCBI GI NO: 17528988 NR Description: putative translation initiation factor eIF3
  misc_feature (1)..(398): NCBI GI NO: 12407755 NR Description: initiation factor 3d [Arabidopsis thaliana]
  misc_feature (1)..(370): NCBI GI NO: 4503523 NR Description: eukaryotic translation initiation factor 3 subunit7
  misc_feature (1)..(370): NCBI GI NO: 34866902 NR Description: similar to eukaryotic translation initiation factor3 subunit 7
  misc_feature (1)..(370): NCBI GI NO: 26337171 NR Description: unnamed protein product [Mus musculus]
  misc_feature (1)..(371): NCBI GI NO: 27882463 NR Description: Similar to eukaryotic translation initiation factor3
  misc_feature (1)..(369): NCBI GI NO: 24649360 NR Description: Eukaryotic initiation factor 3 p66 subunit CG10161-PB
  misc_feature (1)..(370): NCBI GI NO: 38174024 NR Description: Unknown (protein for MGC:75703)
MREQIPFANFTKLSFSVSDQPEDLLLCGAVESYDRAYDRVNPKAARRLERFKSRNFFKVTTTDDPVIRRLAEEDKATVFATDAILAALMCTPRSILSWDIVVQRVGNKLFLDKRDGSQLDLLTVNETAQEQLPENKDDINSAHSLAVEATYINQNFSQQVLHRNGEKVNFDEPNPFASEGEEAASVGYRYRRWKLNDEISLVARCEVHAVSVDQSGTRQFITVNALNEFDSKITGVDWRQKLETQRGAVLATELKNNANKLARWTAQALLAGADMMKLGYVSRVNPRDQYNHSVLTVMGYKPRDFAAQINLNTANMWGIVKSIVDICMKFEEGKYVFVKDPAKPQLRIYEVPSDAFENDYVEEPLPEEEQVRPLGEVDATAEEMDAVAEAEANNVSSANGGEGGKSAEATLA

SEQ ID NO: 34973 - protein, 324 aa, Zea mays subsp. mays
  peptide (1)..(324): Ceres Seq. ID no. 12365143
  misc_feature (1)..(281): Pfam Name: eIF-3 Pfam Description: Eukaryotic translation initiation factor 3 subunit 7
  misc_feature (1)..(320): NCBI GI NO: 15241470 NR Description: eukaryotic translation initiation factor 3 subunit7
  misc_feature (1)..(310): NCBI GI NO: 15233469 NR Description: translation initiation factor eIF3 - like protein
  misc_feature (1)..(310): NCBI GI NO: 17528988 NR Description: putative translation initiation factor eIF3
  misc_feature (1)..(310): NCBI GI NO: 12407755 NR Description: initiation factor 3d [Arabidopsis thaliana]
  misc_feature (1)..(282): NCBI GI NO: 4503523 NR Description: eukaryotic translation initiation factor 3 subunit7
  misc_feature (1)..(282): NCBI GI NO: 34866902 NR Description: similar to eukaryotic translation initiation factor3 subunit 7
  misc_feature (1)..(282): NCBI GI NO: 26337171 NR Description: unnamed protein product [Mus musculus]
  misc_feature (1)..(283): NCBI GI NO: 27882463 NR Description: Similar to eukaryotic translation initiation factor3
  misc_feature (1)..(281): NCBI GI NO: 24649360 NR Description: Eukaryotic initiation factor 3 p66 subunit CG10161-PB
  misc_feature (1)..(282): NCBI GI NO: 38174024 NR Description: Unknown (protein for MGC:75703)
MCTPRSILSWDIVVQRVGNKLFLDKRDGSQLDLLTVNETAQEQLPENKDDINSAHSLAVEATYINQNFSQQVLHRNGEKVNFDEPNPFASEGEEAASVGYRYRRWKLNDEISLVARCEVHAVSVDQSGTRQFITVNALNEFDSKITGVDWRQKLETQRGAVLATELKNNANKLARWTAQALLAGADMMKLGYVSRVNPRDQYNHSVLTVMGYKPRDFAAQINLNTANMWGIVKSIVDICMKFEEGKYVFVKDPAKPQLRIYEVPSDAFENDYVEEPLPEEEQVRPLGEVDATAEEMDAVAEAEANNVSSANGGEGGKSAEATLA

SEQ ID NO: 34974 - DNA, 1248 bp, Zea mays subsp. mays
  misc_feature (1)..(1248): Ceres Seq. ID no. 12411333
gagccaattgagtggcagccagaaaaacccagagcgcgagcagcgagcgagcgcgggctcctgtgtgcagtgtgtctgcgctagagggcgaagggcacggaccgccttcgtcaataattgcggtacgaacggggcaaatccgtcgtttaaagaggtcgctgatagcgcctgctggtggcgagagagagaaagcagcagaatcgctgagggatcgtcgatccggagaggcaaaaaagccgagagatcaggcagggcaccatggggcgcgggaaggtggtgctgcagcggatcgagaacaagatcagccggcaggtgaccttcgccaagcgccggaacggcctgctcaagaaggcgtacgagctctccatcctctgcgacgccgaggtcgcgctcgtcctcttctcccacgccggccgcctctaccagttctcatcctcctccaatctgcttaagactctagagcggtaccagaggtacatctatggcttcagccgatgctgcagtgccatctagcgatcagatgcagaataactatcaagaatatgtgaagctgaaggcacgagttgaggttttacagcactcacaaaggaatcttcttggtgaagatctggccctacttagcccaagtgaacttgaccagcttgagaatcaagtagacaagaccttgaagcaaataagatcaagaaagactcaagtgttacttgatgaactttgtgacttaaagagaaaggaacaaatgctgcaagatgcaaacagggttctgaaaaggaagctgggcgagtttgaggcagaggcggcttctcccccgcagttagcgtggcaaggcgaaggcggcatgttgtcccatgaccctccacagccagaacacttcttccaggctctggagagcaacccatgtctgcaacctacataccatacgatggacatgaaccagcagccagtgccagcgccgggcggctgctatcctgcatggatgtcttagccagtgcttcattccattgccttgagaagtgtcctgaccttcacagatccctacgagctttattactgcttttgcctgcccctttgctgcttgcggtgcttactgaactgtccaaatgaccacatggtcatatataggttattgctgtctttatcttatgttgatcacggcctgctcagctgctttagcgccatgcaaaatggcttgggcgatgcacgcttgaatgggtcgaactgcttatgttttgggagtataaatcacttagc

SEQ ID NO: 34975 - protein, 166 aa, Zea mays subsp. mays
  peptide (1)..(166): Ceres Seq. ID no. 12411334
  misc_feature (2)..(100): Pfam Name: Pfam Description:  K-box region
  misc_feature (2)..(166): NCBI GI NO: 29372758 NR Description: m24 [Zea mays]
  misc_feature (2)..(166): NCBI GI NO: 29372762 NR Description: m31 [Zea mays]
  misc_feature (2)..(166): NCBI GI NO: 5295982 NR Description: MADS box-like protein
  misc_feature (2)..(166): NCBI GI NO: 29570318 NR Description: MADS-box transcriptional factor
  misc_feature (2)..(166): NCBI GI NO: 28630965 NR Description: MADS7 [Lolium perenne]
  misc_feature (1)..(165): NCBI GI NO: 8567991 NR Description: MADS-box protein MADS4 [Nicotiana tabacum]
  misc_feature (1)..(144): NCBI GI NO: 6467976 NR Description: MADS box protein DOMADS3
  misc_feature (1)..(165): NCBI GI NO: 13384050 NR Description: MADS-box transcription factor FBP9
  misc_feature (1)..(165): NCBI GI NO: 33342042 NR Description: MADS-box transcription factor [Houttuynia cordata]
  misc_feature (1)..(165): NCBI GI NO: 20385584 NR Description: MADS-box protein 2 [Vitis vinifera]
MASADAAVPSSDQMQNNYQEYVKLKARVEVLQHSQRNLLGEDLALLSPSELDQLENQVDKTLKQIRSRKTQVLLDELCDLKRKEQMLQDANRVLKRKLGEFEAEAASPPQLAWQGEGGMLSHDPPQPEHFFQALESNPCLQPTYHTMDMNQQPVPAPGGCYPAWMS

SEQ ID NO: 34976 - protein, 153 aa, Zea mays subsp. mays; identical to SEQ ID NO: 26795
  peptide (1)..(153): Ceres Seq. ID no. 12411335
  misc_feature (1)..(87): Pfam Name: Pfam Description:  K-box region
  misc_feature (1)..(153): NCBI GI NO: 29372758 NR Description: m24 [Zea mays]
  misc_feature (1)..(153): NCBI GI NO: 29372762 NR Description: m31 [Zea mays]
  misc_feature (1)..(153): NCBI GI NO: 5295982 NR Description: MADS box-like protein
  misc_feature (1)..(153): NCBI GI NO: 29570318 NR Description: MADS-box transcriptional factor
  misc_feature (1)..(153): NCBI GI NO: 28630965 NR Description: MADS7 [Lolium perenne]
  misc_feature (1)..(152): NCBI GI NO: 8567991 NR Description: MADS-box protein MADS4 [Nicotiana tabacum]
  misc_feature (1)..(131): NCBI GI NO: 6467976 NR Description: MADS box protein DOMADS3
  misc_feature (1)..(152): NCBI GI NO: 13384050 NR Description: MADS-box transcription factor FBP9
  misc_feature (1)..(152): NCBI GI NO: 33342042 NR Description: MADS-box transcription factor [Houttuynia cordata]
  misc_feature (1)..(152): NCBI GI NO: 20385584 NR Description: MADS-box protein 2 [Vitis vinifera]

SEQ ID NO: 34977 - protein, 104 aa, Zea mays subsp. mays
  peptide (1)..(104): Ceres Seq. ID no. 12411336
SQLSGSQKNPEREQRASAGSCVQCVCARGRRARTAFVNNCGTNGANPSFKEVADSACWWRERESSRIAEGSSIRRGKKAERSGRAPWGAGRWCCSGSRTRSAGR

SEQ ID NO: 34978 - DNA, 1233 bp, Zea mays subsp. mays; identical to SEQ ID NO: 24242
  misc_feature (1)..(1233): Ceres Seq. ID no. 13564187

SEQ ID NO: 34979 - protein, 267 aa, Zea mays subsp. mays; identical to SEQ ID NO: 24243
  peptide (1)..(267): Ceres Seq. ID no. 13564188
  misc_feature (1)..(267): NCBI GI NO: 11385533 NR Description: glutathione S-transferase GST 41 [Zea mays]
  misc_feature (18)..(235): NCBI GI NO: 23978432 NR Description: glutathione S-transferase [Cucurbita maxima]
  misc_feature (12)..(235): NCBI GI NO: 11385523 NR Description: glutathione S-transferase GST 36 [Zea mays]
  misc_feature (20)..(235): NCBI GI NO: 11385497 NR Description: glutathione S-transferase GST 23 [Zea mays]
  misc_feature (18)..(235): NCBI GI NO: 15430731 NR Description: putative glutathione S-transferase OsGSTU17
  misc_feature (15)..(226): NCBI GI NO: 4468798 NR Description: GST7 protein [Zea mays]
  misc_feature (18)..(226): NCBI GI NO: 11385441 NR Description: glutathione S-transferase GST 13 [Glycine max]
  misc_feature (16)..(243): NCBI GI NO: 37536280 NR Description: putative glutathione S-transferase
  misc_feature (11)..(234): NCBI GI NO: 11177837 NR Description: putative glutathione S-transferase OsGSTU2
  misc_feature (12)..(234): NCBI GI NO: 37536338 NR Description: putative glutathione S-transferase

SEQ ID NO: 34980 - protein, 251 aa, Zea mays subsp. mays; identical to SEQ ID NO: 24244
  peptide (1)..(251): Ceres Seq. ID no. 13564189
  misc_feature (1)..(251): NCBI GI NO: 11385533 NR Description: glutathione S-transferase GST 41 [Zea mays]
  misc_feature (2)..(219): NCBI GI NO: 23978432 NR Description: glutathione S-transferase [Cucurbita maxima]
  misc_feature (1)..(219): NCBI GI NO: 11385523 NR Description: glutathione S-transferase GST 36 [Zea mays]
  misc_feature (4)..(219): NCBI GI NO: 11385497 NR Description: glutathione S-transferase GST 23 [Zea mays]
  misc_feature (2)..(219): NCBI GI NO: 15430731 NR Description: putative glutathione S-transferase OsGSTU17
  misc_feature (1)..(210): NCBI GI NO: 4468798 NR Description: GST7 protein [Zea mays]
  misc_feature (2)..(210): NCBI GI NO: 11385441 NR Description: glutathione S-transferase GST 13 [Glycine max]
  misc_feature (1)..(227): NCBI GI NO: 37536280 NR Description: putative glutathione S-transferase
  misc_feature (1)..(218): NCBI GI NO: 11177837 NR Description: putative glutathione S-transferase OsGSTU2
  misc_feature (1)..(218): NCBI GI NO: 37536338 NR Description: putative glutathione S-transferase

SEQ ID NO: 34981 - DNA, 1479 bp, Zea mays subsp. mays
  misc_feature (1)..(1479): Ceres Seq. ID no. 12355763
actgccactgtacttgtgttgtgttgtgctgtgctgtgctgcgagaagaaggagaagcagaggaagagcaggtgctgagaagcctgccggcgcgcgttacgacaagcatatatgggggagatcaccaatgtcatggagtaccaggccatcgccaagcagaagcttccgaagatggcctacgactactacgcgtccggcgccgaggacgagtggacgctgcaggagaacagggaggccttctccaggatcttgttccgtccgcgcatactgatcgacgtgtccaagatcgacatgaccaccaccgtgctggggttcaagatctccatgcccatcatggtcgcccccactgctatgcagaagatggctcacccagatggggagaacgccactgcgcgcgcggcggctgcggcaggcaccataatgacactgtcgtcctgggcaacttcaagcgtcgaggaggttgcctcgaccgggccagggatccgcttcttccagctatacgtctacaaggacaggaaggtggtggagcagctggtgaggcgagctgaaagagctgggttcaaggccatcgcgctcaccgtcgacacgccgcgccttggccgcagggaagctgacatcaagaacagattcgtcctgccaccacacctgacgctcaagaacttcgaaggtctggacctcggcaaaatggaccaggctgctgattcagggctggcttcctatgtcgccggccaagtcgaccgcaccctgagctggaaagacgtcaagtagttgcagaccatcaccacgctgccgatcctcgtcaagggagtgctcaccgctgaagacacgaggcttgcggtggcgaacggcgcggcggggatcatcgtgtcgaaccacggcgcgcggcagctggactacgtgccggcgaccatcagcgcgctggaggaggtcgtgaaggccgcccggggccacctccccgtgttcgtcgacggtggcgtccgccgcggcaccgacgtcttcaaggcgctcgcgctcggcgccgccggcgtattcgtcgggaggccggtggtgttctccctggcggcggcgggcgaggccggcgtgtccaacgtcctgcgcatgctgcgggacgagttcgagctcaccatggcgctcagcggctgcacctccctcgccgaaatcacccgcaagcacatcatcaccgagtccgacaagctcagcgccatcccgtcgcgcttgtagatgaggcaaaatcaatcgcctgctacgccgccggtcgatcggggatagtcagctcgtgcatggatgcatgcatgcgtgctcgatgtcgatgacgatgatgataccatatataatctaggactgcgcatatatatattttgttccagaaatgatcgatcactgtactgtactgtaaaatcttatagattattacacgcatggtgtgcgctgcatcttcattagttgttaataatggcgcacacatggtgatctctctgc

SEQ ID NO: 34982 - protein, 218 aa, Zea mays subsp. mays
  peptide (1)..(218): Ceres Seq. ID no. 12355764
  misc_feature (14)..(218): Pfam Name: Pfam Description:  FMN-dependent dehydrogenase
  misc_feature (3)..(218): NCBI GI NO: 15231850 NR Description: glycolate oxidase, putative; protein id:At3g14420
  misc_feature (3)..(218): NCBI GI NO: 16226772 NR Description: AT3g14420/MOA2_2 [Arabidopsis thaliana]
  misc_feature (3)..(218): NCBI GI NO: 27549566 NR Description: glycolate oxidase [Zantedeschia aethiopica]
  misc_feature (3)..(218): NCBI GI NO: 15229497 NR Description: glycolate oxidase; protein id: At3g14415.1
  misc_feature (3)..(218): NCBI GI NO: 7431428 NR Description: (S)-2-hydroxy-acid oxidase (EC 1
  misc_feature (3)..(218): NCBI GI NO: 1773330 NR Description: glycolate oxidase [Mesembryanthemum crystallinum]
  misc_feature (3)..(218): NCBI GI NO: 121530 NR Description:
  misc_feature (3)..(218): NCBI GI NO: 2554675 NR Description: Three-Dimensional Structure Of Glycolate OxidaseWith Bound Active-Site Inhibitors
  misc_feature (3)..(218): NCBI GI NO: 228403 NR Description: glycolate oxidase
  misc_feature (3)..(218): NCBI GI NO: 999542 NR Description: Chain A, Glycolate Oxidase (E
MGEITNVMEYQAIAKQKLPKMAYDYYASGAEDEWTLQENREAFSRILFRPRILIDVSKIDMTTTVLGFKISMPIMVAPTAMQKMAHPDGENATARAAAAAGTIMTLSSWATSSVEEVASTGPGIRFFQLYVYKDRKVVEQLVRRAERAGFKAIALTVDTPRLGRREADIKNRFVLPPHLTLKNFEGLDLGKMDQAADSGLASYVAGQVDRTLSWKDVK

SEQ ID NO: 34983 - protein, 211 aa, Zea mays subsp. mays
  peptide (1)..(211): Ceres Seq. ID no. 12355765
  misc_feature (7)..(211): Pfam Name: Pfam Description:  FMN-dependent dehydrogenase
  misc_feature (1)..(211): NCBI GI NO: 15231850 NR Description: glycolate oxidase, putative; protein id:At3g14420
  misc_feature (1)..(211): NCBI GI NO: 16226772 NR Description: AT3g14420/MOA2_2 [Arabidopsis thaliana]
  misc_feature (1)..(211): NCBI GI NO: 27549566 NR Description: glycolate oxidase [Zantedeschia aethiopica]
  misc_feature (1)..(211): NCBI GI NO: 15229497 NR Description: glycolate oxidase; protein id: At3g14415.1
  misc_feature (1)..(211): NCBI GI NO: 7431428 NR Description: (S)-2-hydroxy-acid oxidase (EC 1
  misc_feature (1)..(211): NCBI GI NO: 1773330 NR Description: glycolate oxidase [Mesembryanthemum crystallinum]
  misc_feature (1)..(211): NCBI GI NO: 121530 NR Description:
  misc_feature (1)..(211): NCBI GI NO: 2554675 NR Description: Three-Dimensional Structure Of Glycolate OxidaseWith Bound Active-Site Inhibitors
  misc_feature (1)..(211): NCBI GI NO: 228403 NR Description: glycolate oxidase
  misc_feature (1)..(211): NCBI GI NO: 999542 NR Description: Chain A, Glycolate Oxidase (E
MEYQAIAKQKLPKMAYDYYASGAEDEWTLQENREAFSRILFRPRILIDVSKIDMTTTVLGFKISMPIMVAPTAMQKMAHPDGENATARAAAAAGTIMTLSSWATSSVEEVASTGPGIRFFQLYVYKDRKVVEQLVRRAERAGFKAIALTVDTPRLGRREADIKNRFVLPPHLTLKNFEGLDLGKMDQAADSGLASYVAGQVDRTLSWKDVK

SEQ ID NO: 34984 - protein, 198 aa, Zea mays subsp. mays
  peptide (1)..(198): Ceres Seq. ID no. 12355766
  misc_feature (1)..(198): Pfam Name: Pfam Description:  FMN-dependent dehydrogenase
  misc_feature (1)..(198): NCBI GI NO: 15231850 NR Description: glycolate oxidase, putative; protein id:At3g14420
  misc_feature (1)..(198): NCBI GI NO: 16226772 NR Description: AT3g14420/MOA2_2 [Arabidopsis thaliana]
  misc_feature (1)..(198): NCBI GI NO: 27549566 NR Description: glycolate oxidase [Zantedeschia aethiopica]
  misc_feature (1)..(198): NCBI GI NO: 15229497 NR Description: glycolate oxidase; protein id: At3g14415.1
  misc_feature (1)..(198): NCBI GI NO: 7431428 NR Description: (S)-2-hydroxy-acid oxidase (EC 1
  misc_feature (1)..(198): NCBI GI NO: 1773330 NR Description: glycolate oxidase [Mesembryanthemum crystallinum]
  misc_feature (1)..(198): NCBI GI NO: 121530 NR Description:
  misc_feature (1)..(198): NCBI GI NO: 2554675 NR Description: Three-Dimensional Structure Of Glycolate OxidaseWith Bound Active-Site Inhibitors
  misc_feature (1)..(198): NCBI GI NO: 228403 NR Description: glycolate oxidase
  misc_feature (1)..(198): NCBI GI NO: 999542 NR Description: Chain A, Glycolate Oxidase (E
MAYDYYASGAEDEWTLQENREAFSRILFRPRILIDVSKIDMTTTVLGFKISMPIMVAPTAMQKMAHPDGENATARAAAAAGTIMTLSSWATSSVEEVASTGPGIRFFQLYVYKDRKVVEQLVRRAERAGFKAIALTVDTPRLGRREADIKNRFVLPPHLTLKNFEGLDLGKMDQAADSGLASYVAGQVDRTLSWKDVK

SEQ ID NO: 34985 - DNA, 992 bp, Zea mays subsp. mays
  misc_feature (1)..(992): Ceres Seq. ID no. 12412778
aatccaaatccggctcctcctcctcctcctcctggcactggcagcgaagatccaaagatagcacaatcgcatctcacacgccgagctatttctacttgagagaatcccccttctcccacaaggagcgagtaatttgaggcagagaccgacagagatggcagcagttatggtgtctcgccaaggccgggagctgcagcggtacagcgcgagcacgggcgggcgcgtggtggtgggctgcgtcccgtaccgcgtgcgcgggggcgacggcgaggtggaggtcctggtgatcagctcgcagaagaagggccccgcggggggcgtgctgatccccaagggcgggtgggagctggacgagtccatggacgaggcggcccggcgcgaggccgcggaggaggccggcgtgctcggcgagacgggccccgcgctgggccgctggtgctaccgcagccgcagctacgacgccacgtacgagggcttcgtgctcccgctgcgcgtcaccgcggagctggaccggtggcccgagatggccgcgcgccgcagggagtgggtctccgccgccgaggccatcgcgcgctgcccccacccgtggatgcgcgaggcgctgcagcggttctccgacaccgtcgcggtcgcggcggagacgatgcacctcgcctccgccctctagctctaggcccggccggccgtcgatcgcttccctcttcccgccgcggtctcgtcggaccgcgggcggcctcgcgcgttttttcggccgccgcgcacggacgcggcgcgtgcggggctgccgccgcctgctctgctcgctggattggacggaacacgccatcattcagtcagacaaatctggacgtcgtcgagctgtggcaccaggacgcggcctgtacattgttcttgggggggtctcgttttgaaatacaaacttgtaaatgtcacggagtttaacgagatccactgtggtactctactagtatacaatacacgaagaagaaatg

SEQ ID NO: 34986 - protein, 170 aa, Zea mays subsp. mays
  peptide (1)..(170): Ceres Seq. ID no. 12412779
  misc_feature (23)..(153): Pfam Name: Pfam Description:  NUDIX domain
  misc_feature (1)..(153): NCBI GI NO: 22330598 NR Description: unknown protein; protein id: At1g73540
  misc_feature (1)..(153): NCBI GI NO: 25367539 NR Description: unknown protein [imported] - Arabidopsis thaliana
  misc_feature (1)..(160): NCBI GI NO: 15221055 NR Description: unknown protein; protein id: At1g18300.1
  misc_feature (1)..(150): NCBI GI NO: 18379275 NR Description: expressed protein; protein id: At2g01670
  misc_feature (5)..(150): NCBI GI NO: 21595695 NR Description: unknown [Arabidopsis thaliana]
  misc_feature (5)..(150): NCBI GI NO: 15223919 NR Description: hypothetical protein; protein id: At1g14860.1
  misc_feature (5)..(150): NCBI GI NO: 38175436 NR Description: MutT-like protein
  misc_feature (5)..(150): NCBI GI NO: 34900054 NR Description: MutT-like protein~contains ESTsAU085960
  misc_feature (5)..(150): NCBI GI NO: 18399682 NR Description: expressed protein; protein id: At3g12600.1
  misc_feature (1)..(85): NCBI GI NO: 38605803 NR Description: OSJNBb0014D23.5
MAAVMVSRQGRELQRYSASTGGRVVVGCVPYRVRGGDGEVEVLVISSQKKGPAGGVLIPKGGWELDESMDEAARREAAEEAGVLGETGPALGRWCYRSRSYDATYEGFVLPLRVTAELDRWPEMAARRREWVSAAEAIARCPHPWMREALQRFSDTVAVAAETMHLASAL

SEQ ID NO: 34987 - protein, 166 aa, Zea mays subsp. mays
  peptide (1)..(166): Ceres Seq. ID no. 12412780
  misc_feature (19)..(149): Pfam Name: Pfam Description:  NUDIX domain
  misc_feature (1)..(149): NCBI GI NO: 22330598 NR Description: unknown protein; protein id: At1g73540
  misc_feature (1)..(149): NCBI GI NO: 25367539 NR Description: unknown protein [imported] - Arabidopsis thaliana
  misc_feature (1)..(156): NCBI GI NO: 15221055 NR Description: unknown protein; protein id: At1g18300.1
  misc_feature (1)..(146): NCBI GI NO: 18379275 NR Description: expressed protein; protein id: At2g01670
  misc_feature (1)..(146): NCBI GI NO: 21595695 NR Description: unknown [Arabidopsis thaliana]
  misc_feature (1)..(146): NCBI GI NO: 15223919 NR Description: hypothetical protein; protein id: At1g14860.1
  misc_feature (1)..(146): NCBI GI NO: 38175436 NR Description: MutT-like protein
  misc_feature (1)..(146): NCBI GI NO: 34900054 NR Description: MutT-like protein~contains ESTsAU085960
  misc_feature (1)..(146): NCBI GI NO: 18399682 NR Description: expressed protein; protein id: At3g12600.1
  misc_feature (1)..(81): NCBI GI NO: 38605803 NR Description: OSJNBb0014D23.5
MVSRQGRELQRYSASTGGRVVVGCVPYRVRGGDGEVEVLVISSQKKGPAGGVLIPKGGWELDESMDEAARREAAEEAGVLGETGPALGRWCYRSRSYDATYEGFVLPLRVTAELDRWPEMAARRREWVSAAEAIARCPHPWMREALQRFSDTVAVAAETMHLASAL

SEQ ID NO: 34988 - protein, 102 aa, Zea mays subsp. mays
  peptide (1)..(102): Ceres Seq. ID no. 12412781
  misc_feature (1)..(85): Pfam Name: Pfam Description:  NUDIX domain
  misc_feature (1)..(85): NCBI GI NO: 22330598 NR Description: unknown protein; protein id: At1g73540
  misc_feature (1)..(85): NCBI GI NO: 25367539 NR Description: unknown protein [imported] - Arabidopsis thaliana
  misc_feature (1)..(92): NCBI GI NO: 15221055 NR Description: unknown protein; protein id: At1g18300.1
  misc_feature (1)..(82): NCBI GI NO: 18379275 NR Description: expressed protein; protein id: At2g01670
  misc_feature (1)..(82): NCBI GI NO: 21595695 NR Description: unknown [Arabidopsis thaliana]
  misc_feature (1)..(82): NCBI GI NO: 15223919 NR Description: hypothetical protein; protein id: At1g14860.1
  misc_feature (1)..(82): NCBI GI NO: 38175436 NR Description: MutT-like protein
  misc_feature (1)..(82): NCBI GI NO: 34900054 NR Description: MutT-like protein~contains ESTsAU085960
  misc_feature (1)..(82): NCBI GI NO: 18399682 NR Description: expressed protein; protein id: At3g12600.1
  misc_feature (1)..(17): NCBI GI NO: 38605803 NR Description: OSJNBb0014D23.5
MDEAARREAAEEAGVLGETGPALGRWCYRSRSYDATYEGFVLPLRVTAELDRWPEMAARRREWVSAAEAIARCPHPWMREALQRFSDTVAVAAETMHLASAL

SEQ ID NO: 34989 - DNA, 1648 bp, Zea mays subsp. mays
  misc_feature (1)..(1648): Ceres Seq. ID no. 12355441
  misc_feature (1604)..(1604): n is a, c, t, g, unknown, or other
  misc_feature (1606)..(1606): n is a, c, t, g, unknown, or other
  misc_feature (1392)..(1392): n is a, c, t, g, unknown, or other
  misc_feature (1605)..(1605): n is a, c, t, g, unknown, or other
  misc_feature (1435)..(1435): n is a, c, t, g, unknown, or other
  misc_feature (1431)..(1431): n is a, c, t, g, unknown, or other
  misc_feature (1607)..(1607): n is a, c, t, g, unknown, or other
  misc_feature (1608)..(1608): n is a, c, t, g, unknown, or other
acacagctagcaggccggcctgcgtatttcggcactgctagcacaatcacttcacagccatgccgcttgttctgctagtgctgctgctgctcttgtcctgttcttctccagttgccctgctagcagcagcgcatgaacatgacgagtacacactcgtggcgaagagctcgctgaaacccaaagctacgtgcaccggatacagggtgtctccaccccagaacatcacgtgggttccattgaacgcccctcacgggccgtgctcgccattgccgggctcggcggcgccgtccttggccgcgctgctcctccacgaccagctccgcgtcgacggcatcgagaggaggctctctgacaatccccatgatagtaagttggttccggctggcggagaggatttccaaacgaacggcaatttacttcaagtcaactacggcaattcaggacagcctatgagctccgaggcccagcagagcggcgtggttaatgcgtcggctgccggcggcggaagcagatccaagctgcccggagtgatccagacggtggttctggactcggcgagcgacgtgccgtgggtgcagtgcgtgccgtgccccatcccgccgtgccacccccaggtggacagcttctacgacccgagcaggtctcccagctctgcccccttctcgtgcagctccccgacctgcacggctctcggcccctacgccaatggctgcgccaacaaccagtgccagtacctggtccgctaccccgacgggtcgtccacgtcgggggcctacatcgccgacctgctcaccttggacgccggcaacgccgtgtcgggcttcaagttcgggtgcagccacgccgagcagggcagcttcgacgcccgggcagccggcatcatggcgctcggcggcgggcctgagtcgctgctgtcccagaccgcgtcccgctacgggaacgccttctcctactgcatcccggccacggctagtgactccggcttcttcaccctcggcgtgcccaggcgagcctcctccaggtacgtcgtcacgcccatggtcaggttcaggcaggcggccacgttctacggcgtgctcctccgcaccatcaccgtcggcggccagcggctcggcgtggcccccgcggtgttcgccgcgggctcggtactagactcccgcacggccatcacgcgcctgccgccgacggcgtaccaggccctgcgctccgcgttcaggagcagcatgaccatgtaccgctccgccccacccaaggggtatctggacacgtgctacgacttcactggcgtcgtcaacatcaggctgcccaagatctccctggtgttcgaccggaacgccgtgctgccgctcgacccgtcgggcatcctcttcaacgactgcctcgccttcaccncgaatgccgacgatcgcatgccgggcgtcctaggcagcntgcngcagcagaccatcgaggtgctatacgacgtcggcggcggcgccgtgggattccgccaaggcgcgtgctaagagatccatgtgaaggagacaataagctatactatatatatatatatatactatactatctagtgctaatttgcttggcaaccgagaacaaataaatcnnnnncaagacatgtaaaaggacatttgaagtatgtcaagaaatt

SEQ ID NO: 34990 - protein, 481 aa, Zea mays subsp. mays
  peptide (1)..(481): Ceres Seq. ID no. 12355442
  misc_feature (81)..(481): Pfam Name: Pfam Description:  Eukaryotic aspartyl protease
  misc_feature (58)..(481): NCBI GI NO: 34912520 NR Description: chloroplast nucleoid DNA-binding protein cnd41-like
  misc_feature (6)..(481): NCBI GI NO: 7489168 NR Description: nucleoid DNA-binding protein cnd41
  misc_feature (6)..(481): NCBI GI NO: 24430421 NR Description: 41 kD chloroplast nucleoid DNA binding protein
  misc_feature (160)..(481): NCBI GI NO: 11358588 NR Description: nucleoid DNA-binding protein cnd41-like protein -Arabidopsis thaliana
  misc_feature (160)..(481): NCBI GI NO: 22326716 NR Description: nucleoid DNA-binding protein cnd41 - like protein
  misc_feature (160)..(481): NCBI GI NO: 15238250 NR Description: nucleoid DNA-binding protein cnd41 - like protein
  misc_feature (160)..(481): NCBI GI NO: 24417232 NR Description: unknown [Arabidopsis thaliana]
  misc_feature (159)..(481): NCBI GI NO: 15231010 NR Description: hypothetical protein, 5' partial
  misc_feature (159)..(481): NCBI GI NO: 28392860 NR Description: unknown protein [Arabidopsis thaliana]
  misc_feature (80)..(481): NCBI GI NO: 34895664 NR Description: nucleoid DNA-binding protein cnd41-like protein
  misc_feature (445)..(445): Xaa is any aa, unknown or other
  misc_feature (458)..(458): Xaa is any aa, unknown or other
  misc_feature (459)..(459): Xaa is any aa, unknown or other
MPLVLLVLLLLLSCSSPVALLAAAHEHDEYTLVAKSSLKPKATCTGYRVSPPQNITWVPLNAPHGPCSPLPGSAAPSLAALLLHDQLRVDGIERRLSDNPHDSKLVPAGGEDFQTNGNLLQVNYGNSGQPMSSEAQQSGVVNASAAGGGSRSKLPGVIQTVVLDSASDVPWVQCVPCPIPPCHPQVDSFYDPSRSPSSAPFSCSSPTCTALGPYANGCANNQCQYLVRYPDGSSTSGAYIADLLTLDAGNAVSGFKFGCSHAEQGSFDARAAGIMALGGGPESLLSQTASRYGNAFSYCIPATASDSGFFTLGVPRRASSRYVVTPMVRFRQAATFYGVLLRTITVGGQRLGVAPAVFAAGSVLDSRTAITRLPPTAYQALRSAFRSSMTMYRSAPPKGYLDTCYDFTGVVNIRLPKISLVFDRNAVLPLDPSGILFNDCLAFTXNADDRMPGVLGSXXQQTIEVLYDVGGGAVGFRQGAC

SEQ ID NO: 34991 - protein, 351 aa, Zea mays subsp. mays
  peptide (1)..(351): Ceres Seq. ID no. 12355443
  misc_feature (1)..(351): Pfam Name: Pfam Description:  Eukaryotic aspartyl protease
  misc_feature (1)..(351): NCBI GI NO: 34912520 NR Description: chloroplast nucleoid DNA-binding protein cnd41-like
  misc_feature (1)..(351): NCBI GI NO: 7489168 NR Description: nucleoid DNA-binding protein cnd41
  misc_feature (1)..(351): NCBI GI NO: 24430421 NR Description: 41 kD chloroplast nucleoid DNA binding protein
  misc_feature (30)..(351): NCBI GI NO: 11358588 NR Description: nucleoid DNA-binding protein cnd41-like protein -Arabidopsis thaliana
  misc_feature (30)..(351): NCBI GI NO: 22326716 NR Description: nucleoid DNA-binding protein cnd41 - like protein
  misc_feature (30)..(351): NCBI GI NO: 15238250 NR Description: nucleoid DNA-binding protein cnd41 - like protein
  misc_feature (30)..(351): NCBI GI NO: 24417232 NR Description: unknown [Arabidopsis thaliana]
  misc_feature (29)..(351): NCBI GI NO: 15231010 NR Description: hypothetical protein, 5' partial
  misc_feature (29)..(351): NCBI GI NO: 28392860 NR Description: unknown protein [Arabidopsis thaliana]
  misc_feature (1)..(351): NCBI GI NO: 34895664 NR Description: nucleoid DNA-binding protein cnd41-like protein
  misc_feature (315)..(315): Xaa is any aa, unknown or other
  misc_feature (328)..(328): Xaa is any aa, unknown or other
  misc_feature (329)..(329): Xaa is any aa, unknown or other
MSSEAQQSGVVNASAAGGGSRSKLPGVIQTVVLDSASDVPWVQCVPCPIPPCHPQVDSFYDPSRSPSSAPFSCSSPTCTALGPYANGCANNQCQYLVRYPDGSSTSGAYIADLLTLDAGNAVSGFKFGCSHAEQGSFDARAAGIMALGGGPESLLSQTASRYGNAFSYCIPATASDSGFFTLGVPRRASSRYVVTPMVRFRQAATFYGVLLRTITVGGQRLGVAPAVFAAGSVLDSRTAITRLPPTAYQALRSAFRSSMTMYRSAPPKGYLDTCYDFTGVVNIRLPKISLVFDRNAVLPLDPSGILFNDCLAFTXNADDRMPGVLGSXXQQTIEVLYDVGGGAVGFRQGAC

SEQ ID NO: 34992 - DNA, 1238 bp, Zea mays subsp. mays
  misc_feature (1)..(1238): Ceres Seq. ID no. 13498318
  misc_feature (1225)..(1225): n is a, c, t, g, unknown, or other
acgacacccaacggcagctgcagcacagcagaggaaggcaggaaggaagaagatatcagaccagtgtgaagccaagccagcgcgtctctctctctctctctctggtcgcttggtcggtccatcggaggatcagctcggcggtggccatggcaatggcgcagcaagcgagcctcccctgctcgactgccaccacatggagagagctcacgaacacgagctggagggacgacgactacaggcggatggtgatggcgtacctgatcgaggcggtgtacctgctggagctggagcggcaggagcgccgggacgcggcggcggtggcgcagcagtggtggaagccgttccacttccgcctggcgcacgagctggtggacgaccgcgacggctccgtgttcggcgccgtcttcgagcgcgaccaccacggcgccaggccggggccggggccgagcccgagcggcgcgcccagcgccgtcatcgcgttccggggcacgctgctgcgcgcgcccaccatccgccgcgacgtcgaggacgagctccgcctgctggcacgcaacagcctgcggggctccgccaggctggcgcgcgccgcgcaggcgctgcgcgccaccatcgaccgcttcggctccgagaacgtctgcgtctgcggccactccctgggcgccggcttcgcgcgccaggtcgtccggacgctcgtggcctcctcctcctcctcctcctcctcgccgcggcaaccgcgccagcaggccgccgccttcgccgccgcgacgctcgagtcccacctcttcaacgcgccctacctgtcgctgcccatgggcgtcaggagcgtggtcaggacggcggactgcctggtcaaggcgctccgctccggcgtcgccaccgtcggcaagtggcacggcaaggcgctccggaacgtggcctacgccagctgcgtcctcggatacaccaggctcgagagcaccaggaagttgtgaggatcgatcggatcgaatgcctccgccacctcgcgtcctcctcgatgctgcctctggcttcaacggttgaaccgtcctgccagtgccagccaaactgtatctatgctcgatcaccttgtagtaggaagtactcggaaattaattcaattctagcaggagacgaataaagcatctgaccggaggatgcaaggccttgcgtgcatatgctttgctttgcttttgtacaatctttttaaatgtgaattacagtagcnctaagttgatctc

SEQ ID NO: 34993 - protein, 378 aa, Zea mays subsp. mays
  peptide (1)..(378): Ceres Seq. ID no. 13498319
  misc_feature (65)..(314): NCBI GI NO: 23104902 NR Description: hypothetical protein [Azotobacter vinelandii]
RHPTAAAAQQRKAGRKKISDQCEAKPARLSLSLSGRLVGPSEDQLGGGHGNGAASEPPLLDCHHMERAHEHELEGRRLQADGDGVPDRGGVPAGAGAAGAPGRGGGGAAVVEAVPLPPGARAGGRPRRLRVRRRLRARPPRRQAGAGAEPERRAQRRHRVPGHAAARAHHPPRRRGRAPPAGTQQPAGLRQAGARRAGAARHHRPLRLRERLRLRPLPGRRLRAPGRPDARGLLLLLLLLAAATAPAGRRLRRRDARVPPLQRALPVAAHGRQERGQDGGLPGQGAPLRRRHRRQVARQGAPERGLRQLRPRIHQAREHQEVVRIDRIECLRHLASSSMLPLASTVEPSCQCQPNCIYARSPCSRKYSEINSILAGDE

SEQ ID NO: 34994 - protein, 322 aa, Zea mays subsp. mays
  peptide (1)..(322): Ceres Seq. ID no. 13498320
  misc_feature (70)..(322): NCBI GI NO: 34901136 NR Description: contains EST AU161031
  misc_feature (61)..(230): NCBI GI NO: 34910916 NR Description: OSJNBb0063G05.3
  misc_feature (52)..(230): NCBI GI NO: 15241306 NR Description: hypothetical protein [Arabidopsis thaliana]
  misc_feature (65)..(270): NCBI GI NO: 34909578 NR Description: P0046E05.21
  misc_feature (157)..(230): NCBI GI NO: 34904536 NR Description: B1066G12.13
  misc_feature (64)..(118): NCBI GI NO: 34904536 NR Description: B1066G12.13
  misc_feature (68)..(230): NCBI GI NO: 18396010 NR Description: lipase (class 3) family [Arabidopsis thaliana]
  misc_feature (68)..(299): NCBI GI NO: 10177082 NR Description: gene_id:MOP9
  misc_feature (68)..(299): NCBI GI NO: 30689345 NR Description: expressed protein [Arabidopsis thaliana]
  misc_feature (68)..(230): NCBI GI NO: 18413406 NR Description: lipase (class 3) family [Arabidopsis thaliana]
DTQRQLQHSRGRQEGRRYQTSVKPSQRVSLSLSLVAWSVHRRISSAVAMAMAQQASLPCSTATTWRELTNTSWRDDDYRRMVMAYLIEAVYLLELERQERRDAAAVAQQWWKPFHFRLAHELVDDRDGSVFGAVFERDHHGARPGPGPSPSGAPSAVIAFRGTLLRAPTIRRDVEDELRLLARNSLRGSARLARAAQALRATIDRFGSENVCVCGHSLGAGFARQVVRTLVASSSSSSSSPRQPRQQAAAFAAATLESHLFNAPYLSLPMGVRSVVRTADCLVKALRSGVATVGKWHGKALRNVAYASCVLGYTRLESTRKL

SEQ ID NO: 34995 - protein, 314 aa, Zea mays subsp. mays
  peptide (1)..(314): Ceres Seq. ID no. 13498321
  misc_feature (1)..(250): NCBI GI NO: 23104902 NR Description: hypothetical protein [Azotobacter vinelandii]
MERAHEHELEGRRLQADGDGVPDRGGVPAGAGAAGAPGRGGGGAAVVEAVPLPPGARAGGRPRRLRVRRRLRARPPRRQAGAGAEPERRAQRRHRVPGHAAARAHHPPRRRGRAPPAGTQQPAGLRQAGARRAGAARHHRPLRLRERLRLRPLPGRRLRAPGRPDARGLLLLLLLLAAATAPAGRRLRRRDARVPPLQRALPVAAHGRQERGQDGGLPGQGAPLRRRHRRQVARQGAPERGLRQLRPRIHQAREHQEVVRIDRIECLRHLASSSMLPLASTVEPSCQCQPNCIYARSPCSRKYSEINSILAGDE

SEQ ID NO: 34996 - protein, 274 aa, Zea mays subsp. mays
  peptide (1)..(274): Ceres Seq. ID no. 13498322
  misc_feature (22)..(274): NCBI GI NO: 34901136 NR Description: contains EST AU161031
  misc_feature (13)..(182): NCBI GI NO: 34910916 NR Description: OSJNBb0063G05.3
  misc_feature (4)..(182): NCBI GI NO: 15241306 NR Description: hypothetical protein [Arabidopsis thaliana]
  misc_feature (17)..(222): NCBI GI NO: 34909578 NR Description: P0046E05.21
  misc_feature (109)..(182): NCBI GI NO: 34904536 NR Description: B1066G12.13
  misc_feature (16)..(70): NCBI GI NO: 34904536 NR Description: B1066G12.13
  misc_feature (20)..(182): NCBI GI NO: 18396010 NR Description: lipase (class 3) family [Arabidopsis thaliana]
  misc_feature (20)..(251): NCBI GI NO: 10177082 NR Description: gene_id:MOP9
  misc_feature (20)..(251): NCBI GI NO: 30689345 NR Description: expressed protein [Arabidopsis thaliana]
  misc_feature (20)..(182): NCBI GI NO: 18413406 NR Description: lipase (class 3) family [Arabidopsis thaliana]
MAMAQQASLPCSTATTWRELTNTSWRDDDYRRMVMAYLIEAVYLLELERQERRDAAAVAQQWWKPFHFRLAHELVDDRDGSVFGAVFERDHHGARPGPGPSPSGAPSAVIAFRGTLLRAPTIRRDVEDELRLLARNSLRGSARLARAAQALRATIDRFGSENVCVCGHSLGAGFARQVVRTLVASSSSSSSSPRQPRQQAAAFAAATLESHLFNAPYLSLPMGVRSVVRTADCLVKALRSGVATVGKWHGKALRNVAYASCVLGYTRLESTRKL

SEQ ID NO: 34997 - DNA, 1422 bp, Zea mays subsp. mays
  misc_feature (1)..(1422): Ceres Seq. ID no. 12365071
atctttaccactagtcgccgtgccgtcccctccccttctctctctcctctctccccacgccacgcatcgcctcgtcggaacggaaggcggcagcgctgcgagcaagggagggagggagcggggatgaggatgctgtcgaaggcgtgctcgattgtggcctcctccctcccgcgctgctcctcctccgccgccgcccccacgatgagggggcagccgtccttgctgccaagcgtgcggaagcaatggcccgcgaagccactgctgtatggaatcggcaccctgttggtcatgccactgaggacactgtatggagtgggtcgtgtttttggcgcaggacggtttctctgcaacatgaccaacgtctcttcgtcgctgcaaattgagcttgtatcatgccttcgagataactatgcgtatatcctgcatgatgttgatactggaacagttggagtagtggatccttctgaggctatgcctattataaatgcattggaaaagagaaaccagaacttgacttatatactgaacacccatcatcactatgatcatactggtggaaacttggaattgaaggcaaaatatggtgcaaaggtaattggttctgagaaggataaggacagaatacctggcattgacatcacgcttaaggagggtgacacatggatgttcgctggccatcaagttcttgtactggaaactcctggacatacaacaggtcatgtgtgctattatttcgctggttctggagctatatttacaggtgacaccttgttcaatctatcatgcggaaagctttttgaagggactccacagcagatgtatgcctcactccagaaaattacagctctacccgatgatacaaaagtatactgtgggcatgaatataccttgagtaatgcaaagtttgccttgagtgtagaaccgggaaataaagcattgcaggaatatactgcaaatgcagctgagctgcgtaataagaatatacccacggtgccaacaacaattggaagggagaaggaatgcaatcctttcttgcggacctccaatccagaaattaagagaacactgtccgttccagatcatttcgatgaagatcgggtgcttggagttgtccgtcgagcaaaagataacttctgactaacaaaaggaaatgctcgtgacgtatgacccatatcttgttaaagttcagacagagaacctaagtcacaataaacataggaggaaatgaaggtatatatgtttgagctagattttgaaatgcttcggcaaaattatgtcgagtgtatgtagcttgggcagtgcagtgcttgtctatagcaaccaatgattcttttgaccactacaaataagcgtgttctgctatcatctactctctgtaaaaaaaacgccacgtagccgtttcatagtcgatcttcagttctt

SEQ ID NO: 34998 - protein, 378 aa, Zea mays subsp. mays
  peptide (1)..(378): Ceres Seq. ID no. 12365072
  misc_feature (135)..(293): Pfam Name: Pfam Description:  Metallo-beta-lactamase superfamily
  misc_feature (42)..(378): NCBI GI NO: 16209608 NR Description: glyoxalase II [Oryza sativa]
  misc_feature (42)..(378): NCBI GI NO: 21070362 NR Description: glyoxalase II [Pennisetum glaucum]
  misc_feature (44)..(378): NCBI GI NO: 28143946 NR Description: glyoxalase II [Brassica juncea]
  misc_feature (42)..(378): NCBI GI NO: 18390616 NR Description: glyoxalase II, putative
  misc_feature (42)..(378): NCBI GI NO: 30679573 NR Description: glyoxalase II, putative
  misc_feature (71)..(378): NCBI GI NO: 25406895 NR Description: hypothetical protein
  misc_feature (42)..(378): NCBI GI NO: 30684920 NR Description: glyoxalase II, putative
  misc_feature (42)..(378): NCBI GI NO: 15224661 NR Description: glyoxalase II, putative
  misc_feature (42)..(378): NCBI GI NO: 18406237 NR Description: glyoxalase II
  misc_feature (42)..(378): NCBI GI NO: 2570340 NR Description: glyoxalase II mitochondrial isozyme
IFTTSRRAVPSPSLSPLSPRHASPRRNGRRQRCEQGREGAGMRMLSKACSIVASSLPRCSSSAAAPTMRGQPSLLPSVRKQWPAKPLLYGIGTLLVMPLRTLYGVGRVFGAGRFLCNMTNVSSSLQIELVSCLRDNYAYILHDVDTGTVGVVDPSEAMPIINALEKRNQNLTYILNTHHHYDHTGGNLELKAKYGAKVIGSEKDKDRIPGIDITLKEGDTWMFAGHQVLVLETPGHTTGHVCYYFAGSGAIFTGDTLFNLSCGKLFEGTPQQMYASLQKITALPDDTKVYCGHEYTLSNAKFALSVEPGNKALQEYTANAAELRNKNIPTVPTTIGREKECNPFLRTSNPEIKRTLSVPDHFDEDRVLGVVRRAKDNF

SEQ ID NO: 34999 - protein, 337 aa, Zea mays subsp. mays
  peptide (1)..(337): Ceres Seq. ID no. 12365073
  misc_feature (94)..(252): Pfam Name: Pfam Description:  Metallo-beta-lactamase superfamily
  misc_feature (1)..(337): NCBI GI NO: 16209608 NR Description: glyoxalase II [Oryza sativa]
  misc_feature (1)..(337): NCBI GI NO: 21070362 NR Description: glyoxalase II [Pennisetum glaucum]
  misc_feature (3)..(337): NCBI GI NO: 28143946 NR Description: glyoxalase II [Brassica juncea]
  misc_feature (1)..(337): NCBI GI NO: 18390616 NR Description: glyoxalase II, putative
  misc_feature (1)..(337): NCBI GI NO: 30679573 NR Description: glyoxalase II, putative
  misc_feature (30)..(337): NCBI GI NO: 25406895 NR Description: hypothetical protein
  misc_feature (1)..(337): NCBI GI NO: 30684920 NR Description: glyoxalase II, putative
  misc_feature (1)..(337): NCBI GI NO: 15224661 NR Description: glyoxalase II, putative
  misc_feature (1)..(337): NCBI GI NO: 18406237 NR Description: glyoxalase II
  misc_feature (1)..(337): NCBI GI NO: 2570340 NR Description: glyoxalase II mitochondrial isozyme
MRMLSKACSIVASSLPRCSSSAAAPTMRGQPSLLPSVRKQWPAKPLLYGIGTLLVMPLRTLYGVGRVFGAGRFLCNMTNVSSSLQIELVSCLRDNYAYILHDVDTGTVGVVDPSEAMPIINALEKRNQNLTYILNTHHHYDHTGGNLELKAKYGAKVIGSEKDKDRIPGIDITLKEGDTWMFAGHQVLVLETPGHTTGHVCYYFAGSGAIFTGDTLFNLSCGKLFEGTPQQMYASLQKITALPDDTKVYCGHEYTLSNAKFALSVEPGNKALQEYTANAAELRNKNIPTVPTTIGREKECNPFLRTSNPEIKRTLSVPDHFDEDRVLGVVRRAKDNF

SEQ ID NO: 35000 - protein, 335 aa, Zea mays subsp. mays
  peptide (1)..(335): Ceres Seq. ID no. 12365074
  misc_feature (92)..(250): Pfam Name: Pfam Description:  Metallo-beta-lactamase superfamily
  misc_feature (1)..(335): NCBI GI NO: 16209608 NR Description: glyoxalase II [Oryza sativa]
  misc_feature (1)..(335): NCBI GI NO: 21070362 NR Description: glyoxalase II [Pennisetum glaucum]
  misc_feature (1)..(335): NCBI GI NO: 28143946 NR Description: glyoxalase II [Brassica juncea]
  misc_feature (1)..(335): NCBI GI NO: 18390616 NR Description: glyoxalase II, putative
  misc_feature (1)..(335): NCBI GI NO: 30679573 NR Description: glyoxalase II, putative
  misc_feature (28)..(335): NCBI GI NO: 25406895 NR Description: hypothetical protein
  misc_feature (1)..(335): NCBI GI NO: 30684920 NR Description: glyoxalase II, putative
  misc_feature (1)..(335): NCBI GI NO: 15224661 NR Description: glyoxalase II, putative
  misc_feature (1)..(335): NCBI GI NO: 18406237 NR Description: glyoxalase II
  misc_feature (1)..(335): NCBI GI NO: 2570340 NR Description: glyoxalase II mitochondrial isozyme
MLSKACSIVASSLPRCSSSAAAPTMRGQPSLLPSVRKQWPAKPLLYGIGTLLVMPLRTLYGVGRVFGAGRFLCNMTNVSSSLQIELVSCLRDNYAYILHDVDTGTVGVVDPSEAMPIINALEKRNQNLTYILNTHHHYDHTGGNLELKAKYGAKVIGSEKDKDRIPGIDITLKEGDTWMFAGHQVLVLETPGHTTGHVCYYFAGSGAIFTGDTLFNLSCGKLFEGTPQQMYASLQKITALPDDTKVYCGHEYTLSNAKFALSVEPGNKALQEYTANAAELRNKNIPTVPTTIGREKECNPFLRTSNPEIKRTLSVPDHFDEDRVLGVVRRAKDNF

SEQ ID NO: 35001 - DNA, 980 bp, Zea mays subsp. mays
  misc_feature (1)..(980): Ceres Seq. ID no. 12378326
aaaaaatagccttatagccacatcccggccagccgcagcaagtgcccagaaggccagaaccagaaccaggtagcccgtgcaacctcatatcatcccctgccacgcacctccgtccgccgcgccatggaatcgaggaggagggccgtgcccaccgtgacggcggttgcggtggcgacgctgctgctgctgctgatgtcgtcgggcgtgggcggcgacttcgcggcggaccgggcggagtgctcggagcagctggcgggggctggcgacgtgcctgacgtacgtgcaggagcaggcgacggcgacggcgccgacgcccgactgctgcgcgggcctgaaggcggtgctgcagagcagccgcaagtgcctgtgcgtgctggtcaaggaccgggacgaccccaacctaggcctcaagctcaacgtcgacaaggcgctcggcctccccgccgtctgccacgcgcccgccaacatctccgactgccccaggctgctggacctgccggccggctccaaggacgcgcaggtgttcgagcagtacgcgaagcagcaggcggcggcggcggcgcagggcggcggcgcacccaccagtggacgcagcagcgcggcggcgagcacgaccgcgggcgcgcagaagagcggagcctcagccgccggtcggtggttgggagtggggagggtcggtggtgctggtggcggcgcacgcgcggtggcgccgctcgccgtgcctttcctgctcctgctcgggtagataataataataactttacgcgcgcggccaacggccggagtcccggcggtttggttggcgccgcgcgttgccgacttgtgtgcttcgggtgcgtgcgtgtgtggtggggtacttttcacactatattggaaaaagaagctattatatatctttgactgaaaaaaagtgtcgttgtataattatctttttttcgtgtccgtgtatgcaacccctcctctcatagacccatagcgcc

SEQ ID NO: 35002 - protein, 258 aa, Zea mays subsp. mays
  peptide (1)..(258): Ceres Seq. ID no. 12378327
  misc_feature (1)..(62): NCBI GI NO: 34394084 NR Description: lipid transfer protein-like
MESRRRAVPTVTAVAVATLLLLLMSSGVGGDFAADRAECSEQLAGAGDVPDVRAGAGDGDGADARLLRGPEGGAAEQPQVPVRAGQGPGRPQPRPQAQRRQGARPPRRLPRARQHLRLPQAAGPAGRLQGRAGVRAVREAAGGGGGAGRRRTHQWTQQRGGEHDRGRAEERSLSRRSVVGSGEGRWCWWRRTRGGAARRAFPAPARVDNNNNFTRAANGRSPGGLVGAARCRLVCFGCVRVWWGTFHTILEKEAIIYL

SEQ ID NO: 35003 - protein, 235 aa, Zea mays subsp. mays
  peptide (1)..(235): Ceres Seq. ID no. 12378328
  misc_feature (1)..(39): NCBI GI NO: 34394084 NR Description: lipid transfer protein-like
MSSGVGGDFAADRAECSEQLAGAGDVPDVRAGAGDGDGADARLLRGPEGGAAEQPQVPVRAGQGPGRPQPRPQAQRRQGARPPRRLPRARQHLRLPQAAGPAGRLQGRAGVRAVREAAGGGGGAGRRRTHQWTQQRGGEHDRGRAEERSLSRRSVVGSGEGRWCWWRRTRGGAARRAFPAPARVDNNNNFTRAANGRSPGGLVGAARCRLVCFGCVRVWWGTFHTILEKEAIIYL

SEQ ID NO: 35004 - DNA, 1156 bp, Zea mays subsp. mays
  misc_feature (1)..(1156): Ceres Seq. ID no. 12355771
acgaaaacaagcacagagagagagagaaccccagcgggcaaacgcctccctccccctgcctccaggccccagatccggccatccgggtagctccagaccttctccaatggcggtcaaggtctacgtcgtgttttactccacctacgggcacgttgccaagcttgctgaggagatgaagaaaggcgccgcttcagttgaaggcgtggaggtcaaagtatggcaggtcagtgtctgtcagcaacggtgcaatcttcgagttagctagaaccaatgtgttgtgtgagtctggaatggtcaccgccaaattcccatcggtttcactttcacacgcgaaggtcccggagattctgtccgaggaggtgctcggcaagatgggcgcgccacccaagaccgacgcgccggtcatcaccccgcaggagctggcggaggccgacggcgtcctcttcgggttccccacgcggttcggcatgatggcggcgcagatgaaggccttcttcgacgcgaccggcgggctgtggcgcgagcagagcctggccggcaagcccgccggcctcttcttcagcaccggctcccagggtggcggccaggagaccacgccgtgagcagccgtctcctctccttttttcacaacatgtttccttccccttgcagcaccaaccgatcgaatcgcagaagcagtgggtaacgtttcccccttggcgtggcggccaggctgacggcggtgacgcagctgacgcaccacgggatggtgttcgtgcctgtggggtacacgttcggcgccaagatattcgacatggagagcgtgcacggcggcagcccgtacggcgcgggcacgttcgccggggacgggtcgcggtggccgacggaactggagctggagcacgccttccaccagggcaagtacttcgccggcatcgccaagaggctcaagggcggctccgcctgatatcgctcgcaccctcctatacgtatacataattattatagggaacatatctggtgcatatataaatttagtgtacatggtgcatatattaaatcagcatcactcattttagatataatgtctctagttgttggtatattttgctaagaacaccctccgacgtggtgaagtatagcggtggaaaatattatttataaattgcaatgatcg

SEQ ID NO: 35005 - protein, 103 aa, Zea mays subsp. mays
  peptide (1)..(103): Ceres Seq. ID no. 12355772
  misc_feature (15)..(103): NCBI GI NO: 34910128 NR Description: putative 1,4-benzoquinone reductase
  misc_feature (15)..(103): NCBI GI NO: 38636776 NR Description: putative quinone-oxidoreductase QR2
  misc_feature (15)..(103): NCBI GI NO: 21068664 NR Description: putative quinone oxidoreductase [Cicer arietinum]
  misc_feature (15)..(103): NCBI GI NO: 5031275 NR Description: unknown [Prunus armeniaca]
  misc_feature (15)..(103): NCBI GI NO: 15239652 NR Description: quinone reductase, putative; protein id:At5g54500
  misc_feature (15)..(103): NCBI GI NO: 30687535 NR Description: quinone reductase family [Arabidopsis thaliana]
  misc_feature (15)..(103): NCBI GI NO: 12484052 NR Description: quinone-oxidoreductase QR2
  misc_feature (15)..(103): NCBI GI NO: 7445353 NR Description: hypothetical protein M4I22
  misc_feature (15)..(103): NCBI GI NO: 2564066 NR Description: LEDI-3 protein [Lithospermum erythrorhizon]
  misc_feature (15)..(103): NCBI GI NO: 37724581 NR Description: putative quinone reductase [Vitis vinifera]
MVTAKFPSVSLSHAKVPEILSEEVLGKMGAPPKTDAPVITPQELAEADGVLFGFPTRFGMMAAQMKAFFDATGGLWREQSLAGKPAGLFFSTGSQGGGQETTP

SEQ ID NO: 35006 - protein, 87 aa, Zea mays subsp. mays
  peptide (1)..(87): Ceres Seq. ID no. 12355773
  misc_feature (36)..(75): NCBI GI NO: 34910128 NR Description: putative 1,4-benzoquinone reductase
  misc_feature (36)..(75): NCBI GI NO: 38636776 NR Description: putative quinone-oxidoreductase QR2
  misc_feature (39)..(75): NCBI GI NO: 21068664 NR Description: putative quinone oxidoreductase [Cicer arietinum]
  misc_feature (36)..(76): NCBI GI NO: 5031275 NR Description: unknown [Prunus armeniaca]
  misc_feature (36)..(75): NCBI GI NO: 15239652 NR Description: quinone reductase, putative; protein id:At5g54500
  misc_feature (36)..(75): NCBI GI NO: 30687535 NR Description: quinone reductase family [Arabidopsis thaliana]
  misc_feature (36)..(75): NCBI GI NO: 12484052 NR Description: quinone-oxidoreductase QR2
  misc_feature (36)..(75): NCBI GI NO: 7445353 NR Description: hypothetical protein M4I22
  misc_feature (36)..(76): NCBI GI NO: 2564066 NR Description: LEDI-3 protein [Lithospermum erythrorhizon]
  misc_feature (34)..(75): NCBI GI NO: 15234512 NR Description: quinone reductase family; protein id: At4g36750
RKQAQREREPQRANASLPLPPGPRSGHPGSSRPSPMAVKVYVVFYSTYGHVAKLAEEMKKGAASVEGVEVKVWQVSVCQQRCNLRVS

SEQ ID NO: 35007 - protein, 76 aa, Zea mays subsp. mays
  peptide (1)..(76): Ceres Seq. ID no. 12355774
  misc_feature (1)..(76): NCBI GI NO: 34910128 NR Description: putative 1,4-benzoquinone reductase
  misc_feature (1)..(76): NCBI GI NO: 38636776 NR Description: putative quinone-oxidoreductase QR2
  misc_feature (1)..(76): NCBI GI NO: 21068664 NR Description: putative quinone oxidoreductase [Cicer arietinum]
  misc_feature (1)..(76): NCBI GI NO: 5031275 NR Description: unknown [Prunus armeniaca]
  misc_feature (1)..(76): NCBI GI NO: 15239652 NR Description: quinone reductase, putative; protein id:At5g54500
  misc_feature (1)..(76): NCBI GI NO: 30687535 NR Description: quinone reductase family [Arabidopsis thaliana]
  misc_feature (1)..(76): NCBI GI NO: 12484052 NR Description: quinone-oxidoreductase QR2
  misc_feature (1)..(76): NCBI GI NO: 7445353 NR Description: hypothetical protein M4I22
  misc_feature (1)..(76): NCBI GI NO: 2564066 NR Description: LEDI-3 protein [Lithospermum erythrorhizon]
  misc_feature (1)..(76): NCBI GI NO: 37724581 NR Description: putative quinone reductase [Vitis vinifera]
MGAPPKTDAPVITPQELAEADGVLFGFPTRFGMMAAQMKAFFDATGGLWREQSLAGKPAGLFFSTGSQGGGQETTP

SEQ ID NO: 35008 - DNA, 1647 bp, Zea mays subsp. mays
  misc_feature (1)..(1647): Ceres Seq. ID no. 12411310
aaaaacacctgtggcagcggccgcgctgcttgcctcgccttgctctcggttcgtggggcatggcggcttcgccggcttgtgctccggggctcatctccggccccaccctccctcccctgcccgttgccttccgctgctactgggcccaaaagccctcctccgcgtcgacctcctccaggcgcccgtgccgcaggcggttcgttcccgttgcagctgcctccacccgcacctcctctgcggctgctcggggcctcgacgccgacgacttccgccacccgctcgacaagcagaacactcttctgctgagagcaattccagggctcaacgacgtgggcaaagctttgctaggacccgtctcggagcaagttatggtactccagaacattggaacatcagttctcgtctccccgaaccagcttccagatctccaccaactgctggttgaggctgcgaagctcttgaacaccgaagctcctgacttgtacataaggcagaatcctgttccaaatgcctacaccttagcaatcaacggcaaaaaaccattcattgtcgttcacacaagccttgtggagctgcttactccaagggaattgcaggctgttttggctcatgagctgggtcacctcaagtgcgatcatggtgtttggctcacttttgccaatatactcacaatgggagcatacactgtccctggttttggcatggttgctggcttcctggaagagcagctatacagatggctacgagctgcagagctgacttgtgacagggcagctcttcttgtggtgcaagatccgaaggtagtcatctctgttctgatgaaattggccggaggatgcccatctcttgccgacaagctaaatgtggatgccttcctggagcaagctcgttcgtacgacaaggctgcatcgaacccagttgggtggtacatccggaatgcacaaaccagagagctttcacaccctttgcctgtgatgcgagccagagagatcgatgagtggtcaagaagccaggagtacaaaaccgtaatgcaaaaaatgcttaagatggggctgaacagagtatagttagtgatgacacatacgaagaggtctgtacacggaatccatcatgtttctttgcaaggatttagctttagatcatgggcctgtttggttcagcttttttctaaccagcttttctgaaaatctggctgtggggagaatctgagtatcattacgattacatatgaaggaagataaagttgttcatagggctcaggatctagaaagtgacagattcctactattacaacgactgaaccgattatgtgtttatgttgattttggatggtttttgtcctcaacgaattttatagaagttggctgaaaagctgagcgtttggcagtctgcagcagcttttggtggtcagaagctaccagaagccgaaacaaacaggccccatgactgtcctttcctgtatatctgatcatgaatttgtgattttctcctgggtggctgggcaccgttttttttcaggactgtagagtctgtatatggagaatgtatgtatatggaagggaatgtctgtatatggagaaggctggtgtttctgaaaaaaaaacagatacaaacatagacatactgtatatatttgcagttgaattt

SEQ ID NO: 35009 - protein, 354 aa, Zea mays subsp. mays
  peptide (1)..(354): Ceres Seq. ID no. 12411311
  misc_feature (21)..(352): NCBI GI NO: 34905986 NR Description: P0518C01.3
  misc_feature (82)..(345): NCBI GI NO: 18405231 NR Description: expressed protein; protein id: At3g27110
  misc_feature (82)..(345): NCBI GI NO: 21553677 NR Description: unknown [Arabidopsis thaliana]
  misc_feature (83)..(344): NCBI GI NO: 17227669 NR Description: hypothetical protein [Nostoc sp. PCC 7120]
  misc_feature (83)..(344): NCBI GI NO: 16330161 NR Description: hypothetical protein [Synechocystis sp. PCC 6803]
  misc_feature (79)..(346): NCBI GI NO: 22298181 NR Description: ORF_ID:tll0639~hypothetical protein
  misc_feature (83)..(343): NCBI GI NO: 37523123 NR Description: hypothetical protein glr3554
  misc_feature (125)..(348): NCBI GI NO: 23042718 NR Description: hypothetical protein
  misc_feature (83)..(243): NCBI GI NO: 23124774 NR Description: hypothetical protein [Nostoc punctiforme]
  misc_feature (82)..(343): NCBI GI NO: 23017259 NR Description: hypothetical protein [Thermobifida fusca]
KHLWQRPRCLPRLALGSWGMAASPACAPGLISGPTLPPLPVAFRCYWAQKPSSASTSSRRPCRRRFVPVAAASTRTSSAAARGLDADDFRHPLDKQNTLLLRAIPGLNDVGKALLGPVSEQVMVLQNIGTSVLVSPNQLPDLHQLLVEAAKLLNTEAPDLYIRQNPVPNAYTLAINGKKPFIVVHTSLVELLTPRELQAVLAHELGHLKCDHGVWLTFANILTMGAYTVPGFGMVAGFLEEQLYRWLRAAELTCDRAALLVVQDPKVVISVLMKLAGGCPSLADKLNVDAFLEQARSYDKAASNPVGWYIRNAQTRELSHPLPVMRAREIDEWSRSQEYKTVMQKMLKMGLNRV

SEQ ID NO: 35010 - protein, 335 aa, Zea mays subsp. mays
  peptide (1)..(335): Ceres Seq. ID no. 12411312
  misc_feature (2)..(333): NCBI GI NO: 34905986 NR Description: P0518C01.3
  misc_feature (63)..(326): NCBI GI NO: 18405231 NR Description: expressed protein; protein id: At3g27110
  misc_feature (63)..(326): NCBI GI NO: 21553677 NR Description: unknown [Arabidopsis thaliana]
  misc_feature (64)..(325): NCBI GI NO: 17227669 NR Description: hypothetical protein [Nostoc sp. PCC 7120]
  misc_feature (64)..(325): NCBI GI NO: 16330161 NR Description: hypothetical protein [Synechocystis sp. PCC 6803]
  misc_feature (60)..(327): NCBI GI NO: 22298181 NR Description: ORF_ID:tll0639~hypothetical protein
  misc_feature (64)..(324): NCBI GI NO: 37523123 NR Description: hypothetical protein glr3554
  misc_feature (106)..(329): NCBI GI NO: 23042718 NR Description: hypothetical protein
  misc_feature (64)..(224): NCBI GI NO: 23124774 NR Description: hypothetical protein [Nostoc punctiforme]
  misc_feature (63)..(324): NCBI GI NO: 23017259 NR Description: hypothetical protein [Thermobifida fusca]
MAASPACAPGLISGPTLPPLPVAFRCYWAQKPSSASTSSRRPCRRRFVPVAAASTRTSSAAARGLDADDFRHPLDKQNTLLLRAIPGLNDVGKALLGPVSEQVMVLQNIGTSVLVSPNQLPDLHQLLVEAAKLLNTEAPDLYIRQNPVPNAYTLAINGKKPFIVVHTSLVELLTPRELQAVLAHELGHLKCDHGVWLTFANILTMGAYTVPGFGMVAGFLEEQLYRWLRAAELTCDRAALLVVQDPKVVISVLMKLAGGCPSLADKLNVDAFLEQARSYDKAASNPVGWYIRNAQTRELSHPLPVMRAREIDEWSRSQEYKTVMQKMLKMGLNRV

SEQ ID NO: 35011 - protein, 232 aa, Zea mays subsp. mays
  peptide (1)..(232): Ceres Seq. ID no. 12411313
  misc_feature (1)..(230): NCBI GI NO: 34905986 NR Description: P0518C01.3
  misc_feature (1)..(223): NCBI GI NO: 18405231 NR Description: expressed protein; protein id: At3g27110
  misc_feature (1)..(223): NCBI GI NO: 21553677 NR Description: unknown [Arabidopsis thaliana]
  misc_feature (1)..(222): NCBI GI NO: 17227669 NR Description: hypothetical protein [Nostoc sp. PCC 7120]
  misc_feature (1)..(222): NCBI GI NO: 16330161 NR Description: hypothetical protein [Synechocystis sp. PCC 6803]
  misc_feature (1)..(224): NCBI GI NO: 22298181 NR Description: ORF_ID:tll0639~hypothetical protein
  misc_feature (1)..(221): NCBI GI NO: 37523123 NR Description: hypothetical protein glr3554
  misc_feature (3)..(226): NCBI GI NO: 23042718 NR Description: hypothetical protein
  misc_feature (1)..(121): NCBI GI NO: 23124774 NR Description: hypothetical protein [Nostoc punctiforme]
  misc_feature (1)..(221): NCBI GI NO: 23017259 NR Description: hypothetical protein [Thermobifida fusca]
MVLQNIGTSVLVSPNQLPDLHQLLVEAAKLLNTEAPDLYIRQNPVPNAYTLAINGKKPFIVVHTSLVELLTPRELQAVLAHELGHLKCDHGVWLTFANILTMGAYTVPGFGMVAGFLEEQLYRWLRAAELTCDRAALLVVQDPKVVISVLMKLAGGCPSLADKLNVDAFLEQARSYDKAASNPVGWYIRNAQTRELSHPLPVMRAREIDEWSRSQEYKTVMQKMLKMGLNRV

SEQ ID NO: 35012 - DNA, 1306 bp, Zea mays subsp. mays
  misc_feature (1)..(1306): Ceres Seq. ID no. 12405880
acccaaccccaccttcattgattgattacagcccgttcatccttccttcccccgtcgaatcccaccttccttcccccgcccgttaagcagccgagtcagcagcaatggcggccgtgctgaggagagccgtggcgcagtgcttcgcgtcgtcgtcgtcgtcgtcgccggcgacgttcgggctccggcggttcctgcaggagcagccggcgttccgccccgccgtgccgcccgaccgcttcatgcccctggccgaccggatccgggacctcggggtcggcgtcgcattcccgcggatcaacctcgacggcctcgtgccgcccgcgccggcgccggcgccggccaagcgggagccggacgcggcgctgcccgcggcgagcctcacggtggaggaggcgcgcaaggtgctgcgcgccacacagatggaggcggcccgcgcgcggattcgggagtccggcgccggcgccgtgccgtacgccgacttcctgcgcctctgctgcgacgccgccggcccggacgcgggcccctccgtcgcgcgcgcgctcgacgagtccggatccgtcatcgtgctcggaaagaccgtcttcctcaggcccgacatggtcgtgaaggcaatcgagaacgcgatccccgtgcggcacgccgccgccgccgccgccgcggagatcgaccccgcgagggaggaggagctgagggccatggaggcggagaaggcggagatcgaccgcgcggcggcggcgcgggtgcggcgggagctgtggtgcgggctgacgtacctggtgatccagacggccgggttcatgcggctcaccttctgggagctgtcgtgggacgtgatggagcccatctgcttctacgtcacgtccatgtacttcatggccggctacgccttcttcctccgcaccaagaaggagccgtcgttcgaaggcttcttcgagagccggttcgcggccaagcagaagcgcgtgatgcgcgcccggggcttcgacctccgcaggtacgaggagctccggagagcctgcggcgtggcggcgccgccgctccaggcccggaccccctgcgcgagccgggcgcggcgcgggagagcggccattgccactcctactgccattgccattgatcttggcctcgctcggttcattcctttctttttttctttgttgttcatgcccatttggtggggatgatgattcgtgtatccatctgatgcgcgcgcggatgcaaaaaaaaaagaagcatactgaattgaggtttaaacttggaaccagggcgtccaaatgatgcataagccatgtccgactgttcgtcc

SEQ ID NO: 35013 - protein, 359 aa, Zea mays subsp. mays
  peptide (1)..(359): Ceres Seq. ID no. 12405881
  misc_feature (129)..(307): Pfam Name: Pfam Description:  Protein of unknown function, DUF607
  misc_feature (1)..(318): NCBI GI NO: 37535778 NR Description: unknown protein
  misc_feature (8)..(309): NCBI GI NO: 20330769 NR Description: Hypothetical protein
  misc_feature (27)..(303): NCBI GI NO: 15240047 NR Description: putative protein; protein id: At5g66650
  misc_feature (91)..(303): NCBI GI NO: 15224063 NR Description: hypothetical protein; protein id: At2g23790.1
  misc_feature (91)..(303): NCBI GI NO: 24496456 NR Description: hypothetical protein [Arabidopsis thaliana]
  misc_feature (27)..(303): NCBI GI NO: 14596231 NR Description: Unknown protein [Arabidopsis thaliana]
  misc_feature (48)..(303): NCBI GI NO: 15234535 NR Description: putative protein; protein id: At4g36820.1
  misc_feature (77)..(301): NCBI GI NO: 15239011 NR Description: unknown protein; protein id: At5g42610.1
  misc_feature (70)..(305): NCBI GI NO: 34909244 NR Description: B1148D12.10
  misc_feature (92)..(303): NCBI GI NO: 18391039 NR Description: Expressed protein; protein id: At1g09575
MAAVLRRAVAQCFASSSSSSPATFGLRRFLQEQPAFRPAVPPDRFMPLADRIRDLGVGVAFPRINLDGLVPPAPAPAPAKREPDAALPAASLTVEEARKVLRATQMEAARARIRESGAGAVPYADFLRLCCDAAGPDAGPSVARALDESGSVIVLGKTVFLRPDMVVKAIENAIPVRHAAAAAAAEIDPAREEELRAMEAEKAEIDRAAAARVRRELWCGLTYLVIQTAGFMRLTFWELSWDVMEPICFYVTSMYFMAGYAFFLRTKKEPSFEGFFESRFAAKQKRVMRARGFDLRRYEELRRACGVAAPPLQARTPCASRARRGRAAIATPTAIAIDLGLARFIPFFFSLLFMPIWWG

SEQ ID NO: 35014 - protein, 314 aa, Zea mays subsp. mays
  peptide (1)..(314): Ceres Seq. ID no. 12405882
  misc_feature (84)..(262): Pfam Name: Pfam Description:  Protein of unknown function, DUF607
  misc_feature (1)..(273): NCBI GI NO: 37535778 NR Description: unknown protein
  misc_feature (1)..(264): NCBI GI NO: 20330769 NR Description: Hypothetical protein
  misc_feature (1)..(258): NCBI GI NO: 15240047 NR Description: putative protein; protein id: At5g66650
  misc_feature (46)..(258): NCBI GI NO: 15224063 NR Description: hypothetical protein; protein id: At2g23790.1
  misc_feature (46)..(258): NCBI GI NO: 24496456 NR Description: hypothetical protein [Arabidopsis thaliana]
  misc_feature (1)..(258): NCBI GI NO: 14596231 NR Description: Unknown protein [Arabidopsis thaliana]
  misc_feature (3)..(258): NCBI GI NO: 15234535 NR Description: putative protein; protein id: At4g36820.1
  misc_feature (32)..(256): NCBI GI NO: 15239011 NR Description: unknown protein; protein id: At5g42610.1
  misc_feature (25)..(260): NCBI GI NO: 34909244 NR Description: B1148D12.10
  misc_feature (47)..(258): NCBI GI NO: 18391039 NR Description: Expressed protein; protein id: At1g09575
MPLADRIRDLGVGVAFPRINLDGLVPPAPAPAPAKREPDAALPAASLTVEEARKVLRATQMEAARARIRESGAGAVPYADFLRLCCDAAGPDAGPSVARALDESGSVIVLGKTVFLRPDMVVKAIENAIPVRHAAAAAAAEIDPAREEELRAMEAEKAEIDRAAAARVRRELWCGLTYLVIQTAGFMRLTFWELSWDVMEPICFYVTSMYFMAGYAFFLRTKKEPSFEGFFESRFAAKQKRVMRARGFDLRRYEELRRACGVAAPPLQARTPCASRARRGRAAIATPTAIAIDLGLARFIPFFFSLLFMPIWWG

SEQ ID NO: 35015 - protein, 254 aa, Zea mays subsp. mays
  peptide (1)..(254): Ceres Seq. ID no. 12405883
  misc_feature (24)..(202): Pfam Name: Pfam Description:  Protein of unknown function, DUF607
  misc_feature (1)..(213): NCBI GI NO: 37535778 NR Description: unknown protein
  misc_feature (1)..(204): NCBI GI NO: 20330769 NR Description: Hypothetical protein
  misc_feature (1)..(198): NCBI GI NO: 15240047 NR Description: putative protein; protein id: At5g66650
  misc_feature (1)..(198): NCBI GI NO: 15224063 NR Description: hypothetical protein; protein id: At2g23790.1
  misc_feature (1)..(198): NCBI GI NO: 24496456 NR Description: hypothetical protein [Arabidopsis thaliana]
  misc_feature (1)..(198): NCBI GI NO: 14596231 NR Description: Unknown protein [Arabidopsis thaliana]
  misc_feature (1)..(198): NCBI GI NO: 15234535 NR Description: putative protein; protein id: At4g36820.1
  misc_feature (1)..(196): NCBI GI NO: 15239011 NR Description: unknown protein; protein id: At5g42610.1
  misc_feature (1)..(200): NCBI GI NO: 34909244 NR Description: B1148D12.10
  misc_feature (1)..(198): NCBI GI NO: 18391039 NR Description: Expressed protein; protein id: At1g09575
MEAARARIRESGAGAVPYADFLRLCCDAAGPDAGPSVARALDESGSVIVLGKTVFLRPDMVVKAIENAIPVRHAAAAAAAEIDPAREEELRAMEAEKAEIDRAAAARVRRELWCGLTYLVIQTAGFMRLTFWELSWDVMEPICFYVTSMYFMAGYAFFLRTKKEPSFEGFFESRFAAKQKRVMRARGFDLRRYEELRRACGVAAPPLQARTPCASRARRGRAAIATPTAIAIDLGLARFIPFFFSLLFMPIWWG

SEQ ID NO: 35016 - DNA, 1482 bp, Zea mays subsp. mays
  misc_feature (1)..(1482): Ceres Seq. ID no. 12366791
cagtaggtggaccattctgtcgtgctcacccaatgccaatggagtcggttgcggtcgtggcggtgccgttcccggcgcagggccaccttaacgcgctgctgcacctgtcgctgcagctggcggcgcgcggggtacccgtacactacgcggcgcccatggagcacgtccgccaggcccggtcgcgcgttcaaggctggggcgacgacaccctctgccgcgtacacttccacgagctctccgtctccgcgtacgcctccccgccgccagaccctgccgccgaatcggccttcccctcgcacctcgtgcccatgtgggaggccttcaccaccgacgcgcccgccccgctcgcggcgctcctcggcgggatctccgcctcctgccgccgcttcgtcgtcctgtacgacatcgccaacgggttcgccgccgaagaggccgcgcggctgcccaacggcgaggggttcgggctggtgtgcaccgcggtgtcgtgcatcgtcgggcggacggacgccggcagccggctcgtgcgtgagcgcgggctcgacttcttccccgtcaactcctttgtgacggaggagtttctggctaccgtcggcaagcgggcgagatgggcgcagtccataccgtgcagcgtcggcatcctcgccaacacctgccgcgcgctcgagggtgagttcatcgatattttcgcgcagcagcttgccgccgccggcaagaacctctttgtcgtcggccccttgaacccactactgctgccggacgcgaggtcgcccaagcatggaattagcaaggagcgccacgagtgcctggactggctcgacctgcagccgccggcatcggtggtctacgtgtcgttgggttctacgtcgtcgctgcgagacgagcaagtcgaggagctcgcatctgcgctgcgcgacagcaagcagcggttcatctgggtgctgcgcgacgccgaccgggccaacatattcgcggaccacggcgagagcccccggcacgccaagttcctgcccgagttcgctgaacacacccaggacagggggctggtgatcaccgggtgggcgccgcagctggagatcctggcgcacggcgccacggcggcgttcctgagccactgcggctggaactcgatcatggagagcatgggacacgggaagcccatcctcgcctggcccatgcactccgaccagccatgggacgctgagctcgtatgcaagcaccacaaggcgggcatcctgatccgcccgatggagaagcaaagggaggtgatttcggcagcggccatacaggaggcaatcgagaagatgatggtctctgatgaaggctacaagatccaacagcgcgcaatggcgctgggccaagctatccgtgcgtcagcagcagtaggcggtgggtcagagaacaaggacctggataagttcattgcccacatctcaaggtgatttggggatttctggttggtttgggaaatgtcaagcatatttc

SEQ ID NO: 35017 - protein, 478 aa, Zea mays subsp. mays
  peptide (1)..(478): Ceres Seq. ID no. 12366792
  misc_feature (12)..(478): NCBI GI NO: 38345403 NR Description: OSJNBa0017B10.9
  misc_feature (12)..(478): NCBI GI NO: 38345407 NR Description: OSJNBa0017B10.13
  misc_feature (13)..(478): NCBI GI NO: 14091010 NR Description: cis-zeatin O-glucosyltransferase [Zea mays]
  misc_feature (13)..(478): NCBI GI NO: 18568243 NR Description: putative cis-zeatin O-glucosyltransferase
  misc_feature (13)..(478): NCBI GI NO: 19743738 NR Description: cis-zeatin O-glucosyltransferase 2 [Zea mays]
  misc_feature (13)..(478): NCBI GI NO: 38345594 NR Description: OSJNBb0012E24.12
  misc_feature (13)..(478): NCBI GI NO: 38345593 NR Description: OSJNBb0012E24.11
  misc_feature (15)..(478): NCBI GI NO: 34899110 NR Description: putative cis-zeatin O-glucosyltransferase
  misc_feature (13)..(383): NCBI GI NO: 38345592 NR Description: OSJNBb0012E24.10
  misc_feature (16)..(478): NCBI GI NO: 20067056 NR Description: putative glucosyltransferase [Phaseolus lunatus]
VGGPFCRAHPMPMESVAVVAVPFPAQGHLNALLHLSLQLAARGVPVHYAAPMEHVRQARSRVQGWGDDTLCRVHFHELSVSAYASPPPDPAAESAFPSHLVPMWEAFTTDAPAPLAALLGGISASCRRFVVLYDIANGFAAEEAARLPNGEGFGLVCTAVSCIVGRTDAGSRLVRERGLDFFPVNSFVTEEFLATVGKRARWAQSIPCSVGILANTCRALEGEFIDIFAQQLAAAGKNLFVVGPLNPLLLPDARSPKHGISKERHECLDWLDLQPPASVVYVSLGSTSSLRDEQVEELASALRDSKQRFIWVLRDADRANIFADHGESPRHAKFLPEFAEHTQDRGLVITGWAPQLEILAHGATAAFLSHCGWNSIMESMGHGKPILAWPMHSDQPWDAELVCKHHKAGILIRPMEKQREVISAAAIQEAIEKMMVSDEGYKIQQRAMALGQAIRASAAVGGGSENKDLDKFIAHISR

SEQ ID NO: 35018 - protein, 468 aa, Zea mays subsp. mays
  peptide (1)..(468): Ceres Seq. ID no. 12366793
  misc_feature (2)..(468): NCBI GI NO: 38345403 NR Description: OSJNBa0017B10.9
  misc_feature (2)..(468): NCBI GI NO: 38345407 NR Description: OSJNBa0017B10.13
  misc_feature (3)..(468): NCBI GI NO: 14091010 NR Description: cis-zeatin O-glucosyltransferase [Zea mays]
  misc_feature (3)..(468): NCBI GI NO: 18568243 NR Description: putative cis-zeatin O-glucosyltransferase
  misc_feature (3)..(468): NCBI GI NO: 19743738 NR Description: cis-zeatin O-glucosyltransferase 2 [Zea mays]
  misc_feature (3)..(468): NCBI GI NO: 38345594 NR Description: OSJNBb0012E24.12
  misc_feature (3)..(468): NCBI GI NO: 38345593 NR Description: OSJNBb0012E24.11
  misc_feature (5)..(468): NCBI GI NO: 34899110 NR Description: putative cis-zeatin O-glucosyltransferase
  misc_feature (3)..(373): NCBI GI NO: 38345592 NR Description: OSJNBb0012E24.10
  misc_feature (6)..(468): NCBI GI NO: 20067056 NR Description: putative glucosyltransferase [Phaseolus lunatus]
MPMESVAVVAVPFPAQGHLNALLHLSLQLAARGVPVHYAAPMEHVRQARSRVQGWGDDTLCRVHFHELSVSAYASPPPDPAAESAFPSHLVPMWEAFTTDAPAPLAALLGGISASCRRFVVLYDIANGFAAEEAARLPNGEGFGLVCTAVSCIVGRTDAGSRLVRERGLDFFPVNSFVTEEFLATVGKRARWAQSIPCSVGILANTCRALEGEFIDIFAQQLAAAGKNLFVVGPLNPLLLPDARSPKHGISKERHECLDWLDLQPPASVVYVSLGSTSSLRDEQVEELASALRDSKQRFIWVLRDADRANIFADHGESPRHAKFLPEFAEHTQDRGLVITGWAPQLEILAHGATAAFLSHCGWNSIMESMGHGKPILAWPMHSDQPWDAELVCKHHKAGILIRPMEKQREVISAAAIQEAIEKMMVSDEGYKIQQRAMALGQAIRASAAVGGGSENKDLDKFIAHISR

SEQ ID NO: 35019 - protein, 466 aa, Zea mays subsp. mays
  peptide (1)..(466): Ceres Seq. ID no. 12366794
  misc_feature (1)..(466): NCBI GI NO: 38345403 NR Description: OSJNBa0017B10.9
  misc_feature (1)..(466): NCBI GI NO: 38345407 NR Description: OSJNBa0017B10.13
  misc_feature (1)..(466): NCBI GI NO: 14091010 NR Description: cis-zeatin O-glucosyltransferase [Zea mays]
  misc_feature (1)..(466): NCBI GI NO: 18568243 NR Description: putative cis-zeatin O-glucosyltransferase
  misc_feature (1)..(466): NCBI GI NO: 19743738 NR Description: cis-zeatin O-glucosyltransferase 2 [Zea mays]
  misc_feature (1)..(466): NCBI GI NO: 38345594 NR Description: OSJNBb0012E24.12
  misc_feature (1)..(466): NCBI GI NO: 38345593 NR Description: OSJNBb0012E24.11
  misc_feature (3)..(466): NCBI GI NO: 34899110 NR Description: putative cis-zeatin O-glucosyltransferase
  misc_feature (1)..(371): NCBI GI NO: 38345592 NR Description: OSJNBb0012E24.10
  misc_feature (4)..(466): NCBI GI NO: 20067056 NR Description: putative glucosyltransferase [Phaseolus lunatus]
MESVAVVAVPFPAQGHLNALLHLSLQLAARGVPVHYAAPMEHVRQARSRVQGWGDDTLCRVHFHELSVSAYASPPPDPAAESAFPSHLVPMWEAFTTDAPAPLAALLGGISASCRRFVVLYDIANGFAAEEAARLPNGEGFGLVCTAVSCIVGRTDAGSRLVRERGLDFFPVNSFVTEEFLATVGKRARWAQSIPCSVGILANTCRALEGEFIDIFAQQLAAAGKNLFVVGPLNPLLLPDARSPKHGISKERHECLDWLDLQPPASVVYVSLGSTSSLRDEQVEELASALRDSKQRFIWVLRDADRANIFADHGESPRHAKFLPEFAEHTQDRGLVITGWAPQLEILAHGATAAFLSHCGWNSIMESMGHGKPILAWPMHSDQPWDAELVCKHHKAGILIRPMEKQREVISAAAIQEAIEKMMVSDEGYKIQQRAMALGQAIRASAAVGGGSENKDLDKFIAHISR

SEQ ID NO: 35020 - DNA, 1299 bp, Zea mays subsp. mays
  misc_feature (1)..(1299): Ceres Seq. ID no. 12407378
  misc_feature (829)..(829): n is a, c, t, g, unknown, or other
  misc_feature (258)..(258): n is a, c, t, g, unknown, or other
  misc_feature (392)..(392): n is a, c, t, g, unknown, or other
  misc_feature (852)..(852): n is a, c, t, g, unknown, or other
gcacgagaccattacctagaacatcctaatcgaaaaccccattgtttccatccgcaccggagggcggtcccgatacaagcaacggcaacgcctcccctctcctccacctccccacctatattgattctgattcatccacccagcaggcagcagctacagcaagatggtgcacccgatcgcggaggccgacgagcggagccccttcggccgcctgacgccggacgagttctacgcgcgccacggcgtgacccactccgnctcgtccttcgtcaacccgcgggggctccgcatcttcacccagcgctgggtgcccagtggggacgcccccgtcctgggcgccgtcgccgtcgtgcacggcttcaccggagagtctagctggacaatccagctcnccgccgtccacctcgccgccgcgggcttcgccgtcgccgcgctcgaccaccagggccacggcttctccgagggcctccagggccacctccccgacatcaaccccgtgctcgacgactgcgacgccgccttcgcgcccttccgcgccgactacccgccgccgctcccctgcttcctctacggggagtcgctcggcggcgccatcgcgctgctgctccacctgcggaacagggacctgtggcgggacggggccgtgctcaacggcgccatgtgcggggtcagcccgaggttcaagccgccgtggccgctcgagcacctgctcgccgcagccgccgccgtcgtccccacctggcgcgtcgccttcacgcggggcaacatccccgagcgctccttcaaggtggactggaagcgggcgctcgcgctcgcctccccgcgccgnaccacggcgccgcccagggcggncacggcgctcgagctcctccgcgtctgccgcgagctgcagcggcgattcgaggaggtgcagctgccgctcctcgtcgtgcacggcgccgaggacaccgtctgcgacccggcctgcgtcgaggagctctgcaggcgcgccgggagcaaggacaagacgcttcgcatctacccagggatgtggcaccagattgtcggcgagcccgaggagaacgtggagaaggtgttcgacgatatcatagactggctcaaggcacgcgccaccgctacagccgcgggcgcgcaccacggcgagcagtagtttgggcacgcctcctgcgtgcgtgcgtgccatggccaggcttgccttcaaccgcgcgtggtccattcaccatcccagattctatcctaggttccttccagctatattcgagtacggatccagcaataaacttgtgctgtctgctgatt

SEQ ID NO: 35021 - protein, 328 aa, Zea mays subsp. mays
  peptide (1)..(328): Ceres Seq. ID no. 12407379
  misc_feature (86)..(304): Pfam Name: Pfam Description:  alpha/beta hydrolase fold
  misc_feature (1)..(328): NCBI GI NO: 34894634 NR Description: P0028G04.16
  misc_feature (2)..(326): NCBI GI NO: 15239709 NR Description: phospholipase - like protein; protein id:At5g19290
  misc_feature (2)..(316): NCBI GI NO: 15242179 NR Description: lysophospholipase -like protein
  misc_feature (18)..(323): NCBI GI NO: 34899776 NR Description: putative lysophospholipase isolog
  misc_feature (14)..(315): NCBI GI NO: 15220284 NR Description: lysophospholipase isolog; protein id: At1g11090.1
  misc_feature (34)..(322): NCBI GI NO: 7487948 NR Description: lysophospholipase homolog F12L6
  misc_feature (34)..(322): NCBI GI NO: 30687883 NR Description: esterase/lipase/thioesterase family
  misc_feature (34)..(316): NCBI GI NO: 7487947 NR Description: lysophospholipase homolog F12L6
  misc_feature (37)..(316): NCBI GI NO: 34894592 NR Description: phospholipase-like protein
  misc_feature (37)..(315): NCBI GI NO: 15223941 NR Description: lysophospholipase isolog, putative
  misc_feature (32)..(32): Xaa is any aa, unknown or other
  misc_feature (77)..(77): Xaa is any aa, unknown or other
  misc_feature (222)..(222): Xaa is any aa, unknown or other
  misc_feature (230)..(230): Xaa is any aa, unknown or other
MVHPIAEADERSPFGRLTPDEFYARHGVTHSXSSFVNPRGLRIFTQRWVPSGDAPVLGAVAVVHGFTGESSWTIQLXAVHLAAAGFAVAALDHQGHGFSEGLQGHLPDINPVLDDCDAAFAPFRADYPPPLPCFLYGESLGGAIALLLHLRNRDLWRDGAVLNGAMCGVSPRFKPPWPLEHLLAAAAAVVPTWRVAFTRGNIPERSFKVDWKRALALASPRXTTAPPRAXTALELLRVCRELQRRFEEVQLPLLVVHGAEDTVCDPACVEELCRRAGSKDKTLRIYPGMWHQIVGEPEENVEKVFDDIIDWLKARATATAAGAHHGEQ

SEQ ID NO: 35022 - DNA, 1614 bp, Zea mays subsp. mays
  misc_feature (1)..(1614): Ceres Seq. ID no. 12368767
acggatggttcccaggctcccagcacagaatccacctccgccgtcaccaccgagcaacgcgcgccggcgcccttctatttcttccagcccctgctccgccgccgccgctctcctccccgcacccccgccctgtttcgccatcggcccatcgcggcacctgcccgtgccacctgaggctgggaactccaaagaggaacagcgtccatggaggctggaggcgcaggaagtggtttgaatggggcggtgcaggcaaaggggactggggctgatggtggctctgccaaaccgctgccgccttgctgcgtcaaggccagagccgccgcgccggagtccgaggccaggtgccacgccaccgtcgtttcaggatggttcactgaaccgcgatcgcgctgtggcaaagccagcaaagttcagtattacaataacccgatgtggccaggagaggccaattctttgaaagtggagaagatcttgtaccaggggaaatcgccataccaagaagtcttagtcttcgagtcgtcgacctatggtaaagtccttgtgcttgatggtattgttcagttgactgacaaggatgaatgtgcataccaggaaatgattactcacctgccactttgctcaattccatcccctaaaaaagttttggttattggtggtggtgatggaggtgtacttcgagaggtatccaggcatagttcagtggagtccattgacatatgtgagattgatcagctggttattgatgtgtgcaaagatttcttcccacacttgtctgttggatttcaagatcctcgtgttcaacttcatgtcggcgatgctgtggagttcttgagaaatgctcctgaggggacatatgatgctatcattgttgattcgtcagatccaatagggcctgctcaggaacttgtagagaagcctttttttgatacgattgctagagctttgaggcctggaggcgttctttgtaatcaagctgagagtatgtggttacatacacatttggttcaggatatgctttcaatttgccgtgaaactttcaagggttctgtacgctatgcatggacaagtgtcccaacatacccgagtggggtgattggatttttactatgtgccaaagaaggtccattggtgaactttctgactcctataaatccaattgaaaagctggaaggagctacaaaagctggaagggagatcagattttataactcagagatgcatagggcagcatttgttctcccgacctttgcaaggagagagctagaagcatattgcgtttccactgaaacagagcaagcggaggaaacaccggcggcaccactgaagttgactcttgcatccaggagtgaaattttcgctacatcctagctagaccaggactcgcgatgtaccacaagatatcaagaaaccattccttccttcctggtgccgtacctccagtatcgccattggttcatagtcttactatcacatgctatgagacgcataatgaggcatcatgtcagtaattcagtatccaaacaatgagatgagattggcatgctaagaaaggacgagctgatattacaatgtactcccttcaccatgtcagtaatttattgtccaaacaattag

SEQ ID NO: 35023 - protein, 387 aa, Zea mays subsp. mays
  peptide (1)..(387): Ceres Seq. ID no. 12368768
  misc_feature (54)..(311): Pfam Name: Pfam Description:  Spermine/spermidine synthase
  misc_feature (1)..(383): NCBI GI NO: 33354149 NR Description: aminopropyl transferase
  misc_feature (1)..(359): NCBI GI NO: 18423473 NR Description: spermidine synthase; protein id: At5g53120
  misc_feature (1)..(359): NCBI GI NO: 15983394 NR Description: AT5g53120/MFH8_5 [Arabidopsis thaliana]
  misc_feature (18)..(359): NCBI GI NO: 21592832 NR Description: spermidine synthase [Arabidopsis thaliana]
  misc_feature (17)..(353): NCBI GI NO: 33150481 NR Description: putative spermine synthase
  misc_feature (1)..(359): NCBI GI NO: 9757993 NR Description: spermidine synthase [Arabidopsis thaliana]
  misc_feature (74)..(355): NCBI GI NO: 6094330 NR Description: Spermidine synthase 2
  misc_feature (38)..(351): NCBI GI NO: 12229998 NR Description: Spermidine synthase 1
  misc_feature (74)..(355): NCBI GI NO: 6094327 NR Description: Spermidine synthase 1
  misc_feature (74)..(355): NCBI GI NO: 6094335 NR Description: Spermidine synthase
MEAGGAGSGLNGAVQAKGTGADGGSAKPLPPCCVKARAAAPESEARCHATVVSGWFTEPRSRCGKASKVQYYNNPMWPGEANSLKVEKILYQGKSPYQEVLVFESSTYGKVLVLDGIVQLTDKDECAYQEMITHLPLCSIPSPKKVLVIGGGDGGVLREVSRHSSVESIDICEIDQLVIDVCKDFFPHLSVGFQDPRVQLHVGDAVEFLRNAPEGTYDAIIVDSSDPIGPAQELVEKPFFDTIARALRPGGVLCNQAESMWLHTHLVQDMLSICRETFKGSVRYAWTSVPTYPSGVIGFLLCAKEGPLVNFLTPINPIEKLEGATKAGREIRFYNSEMHRAAFVLPTFARRELEAYCVSTETEQAEETPAAPLKLTLASRSEIFATS

SEQ ID NO: 35024 - protein, 312 aa, Zea mays subsp. mays
  peptide (1)..(312): Ceres Seq. ID no. 12368769
  misc_feature (1)..(236): Pfam Name: Pfam Description:  Spermine/spermidine synthase
  misc_feature (1)..(308): NCBI GI NO: 33354149 NR Description: aminopropyl transferase
  misc_feature (1)..(284): NCBI GI NO: 18423473 NR Description: spermidine synthase; protein id: At5g53120
  misc_feature (1)..(284): NCBI GI NO: 15983394 NR Description: AT5g53120/MFH8_5 [Arabidopsis thaliana]
  misc_feature (1)..(284): NCBI GI NO: 21592832 NR Description: spermidine synthase [Arabidopsis thaliana]
  misc_feature (1)..(278): NCBI GI NO: 33150481 NR Description: putative spermine synthase
  misc_feature (1)..(284): NCBI GI NO: 9757993 NR Description: spermidine synthase [Arabidopsis thaliana]
  misc_feature (1)..(280): NCBI GI NO: 6094330 NR Description: Spermidine synthase 2
  misc_feature (1)..(276): NCBI GI NO: 12229998 NR Description: Spermidine synthase 1
  misc_feature (1)..(280): NCBI GI NO: 6094327 NR Description: Spermidine synthase 1
  misc_feature (1)..(280): NCBI GI NO: 6094335 NR Description: Spermidine synthase
MWPGEANSLKVEKILYQGKSPYQEVLVFESSTYGKVLVLDGIVQLTDKDECAYQEMITHLPLCSIPSPKKVLVIGGGDGGVLREVSRHSSVESIDICEIDQLVIDVCKDFFPHLSVGFQDPRVQLHVGDAVEFLRNAPEGTYDAIIVDSSDPIGPAQELVEKPFFDTIARALRPGGVLCNQAESMWLHTHLVQDMLSICRETFKGSVRYAWTSVPTYPSGVIGFLLCAKEGPLVNFLTPINPIEKLEGATKAGREIRFYNSEMHRAAFVLPTFARRELEAYCVSTETEQAEETPAAPLKLTLASRSEIFATS

SEQ ID NO: 35025 - protein, 257 aa, Zea mays subsp. mays
  peptide (1)..(257): Ceres Seq. ID no. 12368770
  misc_feature (1)..(181): Pfam Name: Pfam Description:  Spermine/spermidine synthase
  misc_feature (1)..(253): NCBI GI NO: 33354149 NR Description: aminopropyl transferase
  misc_feature (1)..(229): NCBI GI NO: 18423473 NR Description: spermidine synthase; protein id: At5g53120
  misc_feature (1)..(229): NCBI GI NO: 15983394 NR Description: AT5g53120/MFH8_5 [Arabidopsis thaliana]
  misc_feature (1)..(229): NCBI GI NO: 21592832 NR Description: spermidine synthase [Arabidopsis thaliana]
  misc_feature (1)..(223): NCBI GI NO: 33150481 NR Description: putative spermine synthase
  misc_feature (1)..(229): NCBI GI NO: 9757993 NR Description: spermidine synthase [Arabidopsis thaliana]
  misc_feature (1)..(225): NCBI GI NO: 6094330 NR Description: Spermidine synthase 2
  misc_feature (1)..(221): NCBI GI NO: 12229998 NR Description: Spermidine synthase 1
  misc_feature (1)..(225): NCBI GI NO: 6094327 NR Description: Spermidine synthase 1
  misc_feature (1)..(225): NCBI GI NO: 6094335 NR Description: Spermidine synthase
MITHLPLCSIPSPKKVLVIGGGDGGVLREVSRHSSVESIDICEIDQLVIDVCKDFFPHLSVGFQDPRVQLHVGDAVEFLRNAPEGTYDAIIVDSSDPIGPAQELVEKPFFDTIARALRPGGVLCNQAESMWLHTHLVQDMLSICRETFKGSVRYAWTSVPTYPSGVIGFLLCAKEGPLVNFLTPINPIEKLEGATKAGREIRFYNSEMHRAAFVLPTFARRELEAYCVSTETEQAEETPAAPLKLTLASRSEIFATS

SEQ ID NO: 35026 - DNA, 1364 bp, Zea mays subsp. mays
  misc_feature (1)..(1364): Ceres Seq. ID no. 12351866
gtgtctctcgcgtcgcgcccggccgtcgcctcccctccctccctgcaccgaccgatccctcccctgatcccctcttcacatcctaccacctctttaaagctacccagctacctgcctgcctcgcctcaacctcgccggcggccgcagccgcatagaccggaagagaaaggaagcagagatcggaggcaggcgaagatggggcgcggcaaggtgcagctgaagcggatagagaacaagataaaccggcaggtgaccttctccaagcgccggaacgggctgctgaagaaggcgcacgagatctccgtcctctgcgacgccgaggtcgccgtcatcgtcttctcccccaagggcaagctctacgagtacgcctccgactcccgcatggacaaaattctagaacgttatgagcgatattcctatgctgaaaaggctcttatttcagctgaatctgaaagtgagggaaattggtgccacgaatacaggaaactgaaggccaaaattgagaccatacaaagatgccacaagcacctgatgggagaggatctagagtctttgaatccaaaagagctccaacaactagagcagcagctggagagctcactgaagcacatcagatcaagaaagagccaccttatggccgagtcaatttctgagctacagaagaaggagaggtcactgcaggaggagaacaagattctacagaaggaactttcagagaggcagaaggcggtcgctagccggcagcagcagcagcagcaggtgcagtgggaccagcagacacaggtccaggtccagacaagctcatcgtcttcttccttcatgatgaggcaggatcagcagggactgccacctccacaaaacatctgcttcccgccgttgagcatcggagagagaggcgaagaggtggctgcggcggcgcagcagcagctgcctcctccggggcaggcgcaaccacagctccgcatcgcaggtctgccgccatggatgctgagccacctcaatgcataaggagggcgagcaaatggcgtgcgaagtgattgattgctcaccgttgattgaacgctagcctaagttcatggcggcagcaaactaagctaaaactattgttatgtttgcaaggaagggtagggtaacccgctgtgtaatctttgtccagctagcatgtaccaactgagatgcatgcatgcttattattgtccaattacccgtgaatctagcggtgcttttggtgagaggccggccggacgggtgcagtttacttcaaatatggtttgtgattttgtgtaaatagtattaactaggagtcctatggtaagtaaattaattaatgggaggatgcatgaataaaacctctcttgtgctgc

SEQ ID NO: 35027 - protein, 335 aa, Zea mays subsp. mays
  peptide (1)..(335): Ceres Seq. ID no. 12351867
  misc_feature (140)..(239): Pfam Name: Pfam Description:  K-box region
  misc_feature (66)..(335): NCBI GI NO: 12002141 NR Description: MADS box protein 3 [Zea mays]
  misc_feature (66)..(335): NCBI GI NO: 7446509 NR Description: MADS box protein - maize
  misc_feature (66)..(335): NCBI GI NO: 5295984 NR Description: MADS box-like protein
  misc_feature (66)..(335): NCBI GI NO: 6606072 NR Description: MADS15 protein [Oryza sativa]
  misc_feature (66)..(335): NCBI GI NO: 28630955 NR Description: MADS2 [Lolium perenne]
  misc_feature (66)..(335): NCBI GI NO: 33146447 NR Description: MADS box-like protein
  misc_feature (70)..(254): NCBI GI NO: 7489647 NR Description: MADS box protein - sorghum (fragment)
  misc_feature (66)..(335): NCBI GI NO: 4204234 NR Description: MADS-box protein 2 [Lolium temulentum]
  misc_feature (66)..(335): NCBI GI NO: 9367313 NR Description: MADS-box protein 8
  misc_feature (66)..(335): NCBI GI NO: 15824795 NR Description: MADS-box protein FDRMADS3 [Oryza sativa]
VSLASRPAVASPPSLHRPIPPLIPSSHPTTSLKLPSYLPASPQPRRRPQPHRPEEKGSRDRRQAKMGRGKVQLKRIENKINRQVTFSKRRNGLLKKAHEISVLCDAEVAVIVFSPKGKLYEYASDSRMDKILERYERYSYAEKALISAESESEGNWCHEYRKLKAKIETIQRCHKHLMGEDLESLNPKELQQLEQQLESSLKHIRSRKSHLMAESISELQKKERSLQEENKILQKELSERQKAVASRQQQQQQVQWDQQTQVQVQTSSSSSSFMMRQDQQGLPPPQNICFPPLSIGERGEEVAAAAQQQLPPPGQAQPQLRIAGLPPWMLSHLNA

SEQ ID NO: 35028 - protein, 270 aa, Zea mays subsp. mays
  peptide (1)..(270): Ceres Seq. ID no. 12351868
  misc_feature (75)..(174): Pfam Name: Pfam Description:  K-box region
  misc_feature (1)..(270): NCBI GI NO: 12002141 NR Description: MADS box protein 3 [Zea mays]
  misc_feature (1)..(270): NCBI GI NO: 7446509 NR Description: MADS box protein - maize
  misc_feature (1)..(270): NCBI GI NO: 5295984 NR Description: MADS box-like protein
  misc_feature (1)..(270): NCBI GI NO: 6606072 NR Description: MADS15 protein [Oryza sativa]
  misc_feature (1)..(270): NCBI GI NO: 28630955 NR Description: MADS2 [Lolium perenne]
  misc_feature (1)..(270): NCBI GI NO: 33146447 NR Description: MADS box-like protein
  misc_feature (5)..(189): NCBI GI NO: 7489647 NR Description: MADS box protein - sorghum (fragment)
  misc_feature (1)..(270): NCBI GI NO: 4204234 NR Description: MADS-box protein 2 [Lolium temulentum]
  misc_feature (1)..(270): NCBI GI NO: 9367313 NR Description: MADS-box protein 8
  misc_feature (1)..(270): NCBI GI NO: 15824795 NR Description: MADS-box protein FDRMADS3 [Oryza sativa]
MGRGKVQLKRIENKINRQVTFSKRRNGLLKKAHEISVLCDAEVAVIVFSPKGKLYEYASDSRMDKILERYERYSYAEKALISAESESEGNWCHEYRKLKAKIETIQRCHKHLMGEDLESLNPKELQQLEQQLESSLKHIRSRKSHLMAESISELQKKERSLQEENKILQKELSERQKAVASRQQQQQQVQWDQQTQVQVQTSSSSSSFMMRQDQQGLPPPQNICFPPLSIGERGEEVAAAAQQQLPPPGQAQPQLRIAGLPPWMLSHLNA

SEQ ID NO: 35029 - protein, 208 aa, Zea mays subsp. mays
  peptide (1)..(208): Ceres Seq. ID no. 12351869
  misc_feature (13)..(112): Pfam Name: Pfam Description:  K-box region
  misc_feature (1)..(208): NCBI GI NO: 12002141 NR Description: MADS box protein 3 [Zea mays]
  misc_feature (1)..(208): NCBI GI NO: 7446509 NR Description: MADS box protein - maize
  misc_feature (1)..(208): NCBI GI NO: 5295984 NR Description: MADS box-like protein
  misc_feature (1)..(208): NCBI GI NO: 6606072 NR Description: MADS15 protein [Oryza sativa]
  misc_feature (1)..(208): NCBI GI NO: 28630955 NR Description: MADS2 [Lolium perenne]
  misc_feature (1)..(208): NCBI GI NO: 33146447 NR Description: MADS box-like protein
  misc_feature (1)..(127): NCBI GI NO: 7489647 NR Description: MADS box protein - sorghum (fragment)
  misc_feature (1)..(208): NCBI GI NO: 4204234 NR Description: MADS-box protein 2 [Lolium temulentum]
  misc_feature (1)..(208): NCBI GI NO: 9367313 NR Description: MADS-box protein 8
  misc_feature (1)..(208): NCBI GI NO: 15824795 NR Description: MADS-box protein FDRMADS3 [Oryza sativa]
MDKILERYERYSYAEKALISAESESEGNWCHEYRKLKAKIETIQRCHKHLMGEDLESLNPKELQQLEQQLESSLKHIRSRKSHLMAESISELQKKERSLQEENKILQKELSERQKAVASRQQQQQQVQWDQQTQVQVQTSSSSSSFMMRQDQQGLPPPQNICFPPLSIGERGEEVAAAAQQQLPPPGQAQPQLRIAGLPPWMLSHLNA

SEQ ID NO: 35030 - DNA, 1697 bp, Zea mays subsp. mays
  misc_feature (1)..(1697): Ceres Seq. ID no. 12341336
acaaaccgagcggcggccgccgcctcccttttcgtctctgactttttctacaagctcattcttcctcccccgatctcgggagcagccgaagcatgtcctggcggtggactctcgcgcgccgcgtcgccacgctggccgcgatcggtggcggcggtgcccaggcgcagaggctcctgtccacctcgtcagccggcggtggcactggcctcctgggtcggcactacatacccctcgcctcccagattcggagcaaggtagttggttgcagaggagctgctcttgtgagctccagatggttgcatgaggcccaataccaggttcgccaggacggggcttccagggctcaggaacagcaagatccatttgaattagtcgccgatgagctatcacttcttgcaaataggttacgatccatggtggctgctgaggtccccaaactggcatcagcagctgagtactttttcaaggtgggagcagagggaaaaagattccgacctacggttttgttgctcatggcatcagctctgaaatttcctttgtcagagtcaacagaaggaagagttctcagtatattggcagataaactccgcacaaggcaacagaacattgctgagataactgaaatgattcatgtcgcaagccttctgcatgatgatgttcttgatgatgctgatactaggcgtggtgtcagttcattgaatctcatcatggggaacaagctttctgtgctggctggtgatttccttctgtctagagcatgtgtggcccttgcagcacttgggaacacagaggtggtttctctaatggcaactgctgtagaacatctagttactggtgaaactatgcagatctcaacaagcagagagcaacggcgaagcatggagtactacctgcagaagacatactacaaaacggcatcattgatatcaaatagttgcaaggctgttgctattcttgcagggcacacaactgaggtctcggtgcttgcatatgaatatggtcgaaacctgggtctagccttccagttaattgatgatgttcttgatttcaccggcacctctgcatcccttgggaagggttcattgtctgatattcgccacggaattattactgccccgatgctatatgcgatggaggaattcccacaactgcaagaagttgttgaccggggttttgataatcctgcaaatgttgaaattgcccttgactatctccagaagagccgtgggattgaaaagacaaaagagcttgcacgagaacatgctgatcgtgcagtcaaggctatagaatctctacctgatagcgacgacgaggatgttctgacttcaaggcgtgctcttattgatatcacagaaagagtcatcacacggacaaaataggaaggtgttcggcgtccataaggtgaatggagagctgaacctcgcctttggcctagtgtttcacttggattttcttttttgtatacttcggttcattgcattcttttcgcagccaaaaccccaagttttgtgtatcattgctgaaatttaggattaagaaatggccctgcatttctgggaagcttctagaggttttggctgcatgtggcaacaaaatatatgtcaccgattgcaatggcaccagatatcgtgtagccatataagtgtgggagcattgtacccaatatacactcccgtaaagactaagatagtactacc

SEQ ID NO: 35031 - protein, 428 aa, Zea mays subsp. mays
  peptide (1)..(428): Ceres Seq. ID no. 12341337
  misc_feature (115)..(388): Pfam Name: Pfam Description:  Polyprenyl synthetase
  misc_feature (54)..(428): NCBI GI NO: 12055493 NR Description: geranyl diphosphat synthase [Quercus robur]
  misc_feature (54)..(428): NCBI GI NO: 27261729 NR Description: geranylgeranyl diphosphate synthase
  misc_feature (58)..(428): NCBI GI NO: 20260214 NR Description: putative trans-prenyltransferase
  misc_feature (58)..(428): NCBI GI NO: 11322965 NR Description: geranyl diphosphate synthase
  misc_feature (108)..(428): NCBI GI NO: 11322972 NR Description: geranyl diphosphate synthase [Citrus sinensis]
  misc_feature (108)..(428): NCBI GI NO: 30686146 NR Description: geranyl diphosphate synthase
  misc_feature (141)..(428): NCBI GI NO: 25314274 NR Description: probable trans-prenyltransferase
  misc_feature (158)..(428): NCBI GI NO: 32421275 NR Description: hypothetical protein [Neurospora crassa]
  misc_feature (89)..(144): NCBI GI NO: 32421275 NR Description: hypothetical protein [Neurospora crassa]
  misc_feature (135)..(428): NCBI GI NO: 40744019 NR Description: hypothetical protein AN2767.2
MSWRWTLARRVATLAAIGGGGAQAQRLLSTSSAGGGTGLLGRHYIPLASQIRSKVVGCRGAALVSSRWLHEAQYQVRQDGASRAQEQQDPFELVADELSLLANRLRSMVAAEVPKLASAAEYFFKVGAEGKRFRPTVLLLMASALKFPLSESTEGRVLSILADKLRTRQQNIAEITEMIHVASLLHDDVLDDADTRRGVSSLNLIMGNKLSVLAGDFLLSRACVALAALGNTEVVSLMATAVEHLVTGETMQISTSREQRRSMEYYLQKTYYKTASLISNSCKAVAILAGHTTEVSVLAYEYGRNLGLAFQLIDDVLDFTGTSASLGKGSLSDIRHGIITAPMLYAMEEFPQLQEVVDRGFDNPANVEIALDYLQKSRGIEKTKELAREHADRAVKAIESLPDSDDEDVLTSRRALIDITERVITRTK

SEQ ID NO: 35032 - protein, 321 aa, Zea mays subsp. mays
  peptide (1)..(321): Ceres Seq. ID no. 12341338
  misc_feature (8)..(281): Pfam Name: Pfam Description:  Polyprenyl synthetase
  misc_feature (1)..(321): NCBI GI NO: 12055493 NR Description: geranyl diphosphat synthase [Quercus robur]
  misc_feature (1)..(321): NCBI GI NO: 27261729 NR Description: geranylgeranyl diphosphate synthase
  misc_feature (1)..(321): NCBI GI NO: 20260214 NR Description: putative trans-prenyltransferase
  misc_feature (1)..(321): NCBI GI NO: 11322965 NR Description: geranyl diphosphate synthase
  misc_feature (1)..(321): NCBI GI NO: 11322972 NR Description: geranyl diphosphate synthase [Citrus sinensis]
  misc_feature (1)..(321): NCBI GI NO: 30686146 NR Description: geranyl diphosphate synthase
  misc_feature (34)..(321): NCBI GI NO: 25314274 NR Description: probable trans-prenyltransferase
  misc_feature (51)..(321): NCBI GI NO: 32421275 NR Description: hypothetical protein [Neurospora crassa]
  misc_feature (1)..(37): NCBI GI NO: 32421275 NR Description: hypothetical protein [Neurospora crassa]
  misc_feature (28)..(321): NCBI GI NO: 40744019 NR Description: hypothetical protein AN2767.2
MVAAEVPKLASAAEYFFKVGAEGKRFRPTVLLLMASALKFPLSESTEGRVLSILADKLRTRQQNIAEITEMIHVASLLHDDVLDDADTRRGVSSLNLIMGNKLSVLAGDFLLSRACVALAALGNTEVVSLMATAVEHLVTGETMQISTSREQRRSMEYYLQKTYYKTASLISNSCKAVAILAGHTTEVSVLAYEYGRNLGLAFQLIDDVLDFTGTSASLGKGSLSDIRHGIITAPMLYAMEEFPQLQEVVDRGFDNPANVEIALDYLQKSRGIEKTKELAREHADRAVKAIESLPDSDDEDVLTSRRALIDITERVITRTK

SEQ ID NO: 35033 - protein, 288 aa, Zea mays subsp. mays
  peptide (1)..(288): Ceres Seq. ID no. 12341339
  misc_feature (1)..(248): Pfam Name: Pfam Description:  Polyprenyl synthetase
  misc_feature (1)..(288): NCBI GI NO: 12055493 NR Description: geranyl diphosphat synthase [Quercus robur]
  misc_feature (1)..(288): NCBI GI NO: 27261729 NR Description: geranylgeranyl diphosphate synthase
  misc_feature (1)..(288): NCBI GI NO: 20260214 NR Description: putative trans-prenyltransferase
  misc_feature (1)..(288): NCBI GI NO: 11322965 NR Description: geranyl diphosphate synthase
  misc_feature (1)..(288): NCBI GI NO: 11322972 NR Description: geranyl diphosphate synthase [Citrus sinensis]
  misc_feature (1)..(288): NCBI GI NO: 30686146 NR Description: geranyl diphosphate synthase
  misc_feature (1)..(288): NCBI GI NO: 25314274 NR Description: probable trans-prenyltransferase
  misc_feature (18)..(288): NCBI GI NO: 32421275 NR Description: hypothetical protein [Neurospora crassa]
  misc_feature (1)..(288): NCBI GI NO: 40744019 NR Description: hypothetical protein AN2767.2
  misc_feature (1)..(19): NCBI GI NO: 40744019 NR Description: hypothetical protein AN2767.2
MASALKFPLSESTEGRVLSILADKLRTRQQNIAEITEMIHVASLLHDDVLDDADTRRGVSSLNLIMGNKLSVLAGDFLLSRACVALAALGNTEVVSLMATAVEHLVTGETMQISTSREQRRSMEYYLQKTYYKTASLISNSCKAVAILAGHTTEVSVLAYEYGRNLGLAFQLIDDVLDFTGTSASLGKGSLSDIRHGIITAPMLYAMEEFPQLQEVVDRGFDNPANVEIALDYLQKSRGIEKTKELAREHADRAVKAIESLPDSDDEDVLTSRRALIDITERVITRTK

SEQ ID NO: 35034 - DNA, 1511 bp, Zea mays subsp. mays
  misc_feature (1)..(1511): Ceres Seq. ID no. 12365082
gcacgagaccattacctagaacatcctaatcgaaaagagcaaaggccaaagaacacggagaggctaaggctatccacacccacacagagtctaatcaagcttacagcccagaagcgtcacagacatggggaacgcagcagttgcaatcatatcttcagtctcggcaactgcgacggtagtagtaatgatcgccctcatcagaaggtgccgcgtcgtgaggaagaagataaagaagaaaatcgtaaagaaagtcttggaggagatcgagcggaagaaccgcgtgggggcagcctgcgacgccttggaagacgtggtgatcgagatcgttcccgtggagaagttcctcaacgagatcctgaacgagaagccgatgcgtttcagctccgagcagctggcggcctgcaccaagaactactcgtcggagctggggtccggcggctacggcgtggtctacaagggtgagctgcccaacggcctgctggtggccgtgaaggtgctcaaggtgtccatgaacaagaaggtgcaggaggcgttcatggcggagatcggcaccatcgggcggacgtaccacgtgcacctcgtccgcctctacggcttctgcttcgacgcggacaccaaggcgctggtgtacgagttcctggagaaggggtcgctcgagaagtacctctactgtgacgagggcagcacggccacgcggctggagtgggcaacgctgcacggcatcgccgtcggcacggcgaaggggatcaggtacctgcacgaggagtgccagcagcggatcgtgcactacgacatcaagccggccaacatcctgctcacggccgactacaccccgaaggtggccgacttcgggctggcacggctgggcgagcgcgagaacacgcacatgtcactgaccggcggcggccgtgggacgcccgggtacgcggcgccggagctgtggatggcgctgccggcttcggagaagtgcgacgtgtacagctttggaatggtgttgttcgagatcctagggcggcgccggaactacgacccctgccagggcgagagcaaggagtggttcccgagatgggtctgggagaggtacgcgcagggtgagatcgaggacgtcgtggcctgcgacgggatcgttggagacgcggacagagagaaggcggagatgatgtgcaaggtggcgctgtggtgcgtgcagttccagccgtcggcgcgaccgacgatgagcagcgtggtgcggatgctggagggggagatggccatcgtcccgcccgtgaaccccttccactacgtcatggaaagcagcagtgcctcgactagctcggggttgtggagcggcacataccagagcagcagagacaccactgccagagaaagtgagctgtcggctagcccagctgccaagtcgactgacgccatgattgaagatgttgagcgggcttatgcgtcagtgttggcgaaacagagcttgtagtcttgtacacattaattattgagtaaaatgcatccgcgacggtggg

SEQ ID NO: 35035 - protein, 446 aa, Zea mays subsp. mays
  peptide (1)..(446): Ceres Seq. ID no. 12365083
  misc_feature (3)..(431): NCBI GI NO: 39545728 NR Description: OSJNBa0071I13.6
  misc_feature (21)..(431): NCBI GI NO: 38343972 NR Description: OSJNBb0022F16.11
  misc_feature (1)..(415): NCBI GI NO: 38343974 NR Description: OSJNBb0022F16.13
  misc_feature (2)..(413): NCBI GI NO: 38343973 NR Description: OSJNBb0022F16.12
  misc_feature (5)..(419): NCBI GI NO: 34393334 NR Description: S-receptor kinase PK3 precursor-like protein
  misc_feature (62)..(325): NCBI GI NO: 33146505 NR Description: receptor-like kinase TAK33-like protein
  misc_feature (340)..(418): NCBI GI NO: 33146505 NR Description: receptor-like kinase TAK33-like protein
  misc_feature (71)..(415): NCBI GI NO: 7434406 NR Description: S-receptor kinase homolog F10M6
  misc_feature (71)..(415): NCBI GI NO: 22329085 NR Description: S-receptor kinase -like protein
  misc_feature (74)..(438): NCBI GI NO: 28376708 NR Description: putative receptor-like protein kinase
MGNAAVAIISSVSATATVVVMIALIRRCRVVRKKIKKKIVKKVLEEIERKNRVGAACDALEDVVIEIVPVEKFLNEILNEKPMRFSSEQLAACTKNYSSELGSGGYGVVYKGELPNGLLVAVKVLKVSMNKKVQEAFMAEIGTIGRTYHVHLVRLYGFCFDADTKALVYEFLEKGSLEKYLYCDEGSTATRLEWATLHGIAVGTAKGIRYLHEECQQRIVHYDIKPANILLTADYTPKVADFGLARLGERENTHMSLTGGGRGTPGYAAPELWMALPASEKCDVYSFGMVLFEILGRRRNYDPCQGESKEWFPRWVWERYAQGEIEDVVACDGIVGDADREKAEMMCKVALWCVQFQPSARPTMSSVVRMLEGEMAIVPPVNPFHYVMESSSASTSSGLWSGTYQSSRDTTARESELSASPAAKSTDAMIEDVERAYASVLAKQSL

SEQ ID NO: 35036 - protein, 426 aa, Zea mays subsp. mays
  peptide (1)..(426): Ceres Seq. ID no. 12365084
  misc_feature (1)..(411): NCBI GI NO: 39545728 NR Description: OSJNBa0071I13.6
  misc_feature (1)..(411): NCBI GI NO: 38343972 NR Description: OSJNBb0022F16.11
  misc_feature (1)..(395): NCBI GI NO: 38343974 NR Description: OSJNBb0022F16.13
  misc_feature (1)..(393): NCBI GI NO: 38343973 NR Description: OSJNBb0022F16.12
  misc_feature (1)..(399): NCBI GI NO: 34393334 NR Description: S-receptor kinase PK3 precursor-like protein
  misc_feature (42)..(305): NCBI GI NO: 33146505 NR Description: receptor-like kinase TAK33-like protein
  misc_feature (320)..(398): NCBI GI NO: 33146505 NR Description: receptor-like kinase TAK33-like protein
  misc_feature (51)..(395): NCBI GI NO: 7434406 NR Description: S-receptor kinase homolog F10M6
  misc_feature (51)..(395): NCBI GI NO: 22329085 NR Description: S-receptor kinase -like protein
  misc_feature (54)..(418): NCBI GI NO: 28376708 NR Description: putative receptor-like protein kinase
MIALIRRCRVVRKKIKKKIVKKVLEEIERKNRVGAACDALEDVVIEIVPVEKFLNEILNEKPMRFSSEQLAACTKNYSSELGSGGYGVVYKGELPNGLLVAVKVLKVSMNKKVQEAFMAEIGTIGRTYHVHLVRLYGFCFDADTKALVYEFLEKGSLEKYLYCDEGSTATRLEWATLHGIAVGTAKGIRYLHEECQQRIVHYDIKPANILLTADYTPKVADFGLARLGERENTHMSLTGGGRGTPGYAAPELWMALPASEKCDVYSFGMVLFEILGRRRNYDPCQGESKEWFPRWVWERYAQGEIEDVVACDGIVGDADREKAEMMCKVALWCVQFQPSARPTMSSVVRMLEGEMAIVPPVNPFHYVMESSSASTSSGLWSGTYQSSRDTTARESELSASPAAKSTDAMIEDVERAYASVLAKQSL

SEQ ID NO: 35037 - protein, 364 aa, Zea mays subsp. mays
  peptide (1)..(364): Ceres Seq. ID no. 12365085
  misc_feature (1)..(349): NCBI GI NO: 39545728 NR Description: OSJNBa0071I13.6
  misc_feature (1)..(349): NCBI GI NO: 38343972 NR Description: OSJNBb0022F16.11
  misc_feature (1)..(333): NCBI GI NO: 38343974 NR Description: OSJNBb0022F16.13
  misc_feature (1)..(331): NCBI GI NO: 38343973 NR Description: OSJNBb0022F16.12
  misc_feature (1)..(337): NCBI GI NO: 34393334 NR Description: S-receptor kinase PK3 precursor-like protein
  misc_feature (1)..(243): NCBI GI NO: 33146505 NR Description: receptor-like kinase TAK33-like protein
  misc_feature (258)..(336): NCBI GI NO: 33146505 NR Description: receptor-like kinase TAK33-like protein
  misc_feature (1)..(333): NCBI GI NO: 7434406 NR Description: S-receptor kinase homolog F10M6
  misc_feature (1)..(333): NCBI GI NO: 22329085 NR Description: S-receptor kinase -like protein
  misc_feature (1)..(356): NCBI GI NO: 28376708 NR Description: putative receptor-like protein kinase
MRFSSEQLAACTKNYSSELGSGGYGVVYKGELPNGLLVAVKVLKVSMNKKVQEAFMAEIGTIGRTYHVHLVRLYGFCFDADTKALVYEFLEKGSLEKYLYCDEGSTATRLEWATLHGIAVGTAKGIRYLHEECQQRIVHYDIKPANILLTADYTPKVADFGLARLGERENTHMSLTGGGRGTPGYAAPELWMALPASEKCDVYSFGMVLFEILGRRRNYDPCQGESKEWFPRWVWERYAQGEIEDVVACDGIVGDADREKAEMMCKVALWCVQFQPSARPTMSSVVRMLEGEMAIVPPVNPFHYVMESSSASTSSGLWSGTYQSSRDTTARESELSASPAAKSTDAMIEDVERAYASVLAKQSL

SEQ ID NO: 35038 - DNA, 717 bp, Zea mays subsp. mays
  misc_feature (1)..(717): Ceres Seq. ID no. 12342442
ctcctcccatcccgtgcagccggcctcaccgccggcgacgggacgcggagacccgggctgccggtaccgtcagccgtgctccttcctctcttcgtcgcccccgccaaaaccttcatctgccggggctgcaccggcggcgcggggacaacaaaagctcgagatccggtgactgatctcttcgttcctcggttcactttgatattccaacaaaggtcacattgctagactcccagattggttcctaacaatgagggcacatgaacgagctgccagtttggctcttgcctgtctgagcttggctccacttctggttaacgtaaacccaaatgtgaatgtggtattgacagcatgccttactgtctatgtgggttgctaccgatctgtgaagccaactccaccttctgagaccatgtccaaggagcatgctatgcggttccctttagttggaagcgctatgcttttatcactgttccttctattcaagtttctctcaaaagatttggtcaacgctgtgctcactgcctactttttcattctaggcattgttgctctctccgcaacactgcttccttctataaaacgttttcttccaaaagagtggaatgataatctcatcgtctggcgggctccattcttccactcactctcggtggagttcacaaagtcccagattgttgcctcaatacctggatttttcttttgcttgtggtatgcgtc

SEQ ID NO: 35039 - protein, 156 aa, Zea mays subsp. mays
  peptide (1)..(156): Ceres Seq. ID no. 12342443
  misc_feature (47)..(155): Pfam Name: Pfam Description:  Signal peptide peptidase
  misc_feature (1)..(155): NCBI GI NO: 18395487 NR Description: expressed protein; protein id: At2g03120
  misc_feature (1)..(155): NCBI GI NO: 21593273 NR Description: unknown [Arabidopsis thaliana]
  misc_feature (29)..(115): NCBI GI NO: 34784510 NR Description: Unknown (protein for MGC:66829) [Mus musculus]
  misc_feature (29)..(115): NCBI GI NO: 26332969 NR Description: unnamed protein product [Mus musculus]
  misc_feature (29)..(115): NCBI GI NO: 14286280 NR Description: Similar to histocompatibility 13 [Homo sapiens]
  misc_feature (29)..(115): NCBI GI NO: 22761270 NR Description: unnamed protein product [Homo sapiens]
  misc_feature (29)..(115): NCBI GI NO: 18034682 NR Description: histocompatibility 13 [Mus musculus]
  misc_feature (29)..(115): NCBI GI NO: 23308607 NR Description: histocompatibility
  misc_feature (29)..(115): NCBI GI NO: 26389558 NR Description: unnamed protein product [Mus musculus]
  misc_feature (29)..(115): NCBI GI NO: 25992191 NR Description: putative presenilin-like aspartyl protease
MRAHERAASLALACLSLAPLLVNVNPNVNVVLTACLTVYVGCYRSVKPTPPSETMSKEHAMRFPLVGSAMLLSLFLLFKFLSKDLVNAVLTAYFFILGIVALSATLLPSIKRFLPKEWNDNLIVWRAPFFHSLSVEFTKSQIVASIPGFFFCLWYA

SEQ ID NO: 35040 - protein, 102 aa, Zea mays subsp. mays
  peptide (1)..(102): Ceres Seq. ID no. 12342444
  misc_feature (1)..(101): Pfam Name: Pfam Description:  Signal peptide peptidase
  misc_feature (1)..(101): NCBI GI NO: 18395487 NR Description: expressed protein; protein id: At2g03120
  misc_feature (1)..(101): NCBI GI NO: 21593273 NR Description: unknown [Arabidopsis thaliana]
  misc_feature (1)..(61): NCBI GI NO: 34784510 NR Description: Unknown (protein for MGC:66829) [Mus musculus]
  misc_feature (1)..(61): NCBI GI NO: 26332969 NR Description: unnamed protein product [Mus musculus]
  misc_feature (1)..(61): NCBI GI NO: 14286280 NR Description: Similar to histocompatibility 13 [Homo sapiens]
  misc_feature (1)..(61): NCBI GI NO: 18034682 NR Description: histocompatibility 13 [Mus musculus]
  misc_feature (1)..(61): NCBI GI NO: 23308607 NR Description: histocompatibility
  misc_feature (1)..(61): NCBI GI NO: 26389558 NR Description: unnamed protein product [Mus musculus]
  misc_feature (1)..(61): NCBI GI NO: 25992191 NR Description: putative presenilin-like aspartyl protease
  misc_feature (1)..(61): NCBI GI NO: 22761270 NR Description: unnamed protein product [Homo sapiens]
MSKEHAMRFPLVGSAMLLSLFLLFKFLSKDLVNAVLTAYFFILGIVALSATLLPSIKRFLPKEWNDNLIVWRAPFFHSLSVEFTKSQIVASIPGFFFCLWYA

SEQ ID NO: 35041 - protein, 96 aa, Zea mays subsp. mays
  peptide (1)..(96): Ceres Seq. ID no. 12342445
  misc_feature (1)..(95): Pfam Name: Pfam Description:  Signal peptide peptidase
  misc_feature (1)..(95): NCBI GI NO: 18395487 NR Description: expressed protein; protein id: At2g03120
  misc_feature (1)..(95): NCBI GI NO: 21593273 NR Description: unknown [Arabidopsis thaliana]
  misc_feature (1)..(55): NCBI GI NO: 34784510 NR Description: Unknown (protein for MGC:66829) [Mus musculus]
  misc_feature (1)..(55): NCBI GI NO: 26332969 NR Description: unnamed protein product [Mus musculus]
  misc_feature (1)..(55): NCBI GI NO: 14286280 NR Description: Similar to histocompatibility 13 [Homo sapiens]
  misc_feature (1)..(55): NCBI GI NO: 18034682 NR Description: histocompatibility 13 [Mus musculus]
  misc_feature (1)..(55): NCBI GI NO: 22761270 NR Description: unnamed protein product [Homo sapiens]
  misc_feature (1)..(55): NCBI GI NO: 25992191 NR Description: putative presenilin-like aspartyl protease
  misc_feature (1)..(55): NCBI GI NO: 26389558 NR Description: unnamed protein product [Mus musculus]
  misc_feature (1)..(55): NCBI GI NO: 23308607 NR Description: histocompatibility
MRFPLVGSAMLLSLFLLFKFLSKDLVNAVLTAYFFILGIVALSATLLPSIKRFLPKEWNDNLIVWRAPFFHSLSVEFTKSQIVASIPGFFFCLWYA

SEQ ID NO: 35042 - DNA, 1277 bp, Zea mays subsp. mays
  misc_feature (1)..(1277): Ceres Seq. ID no. 12411307
ggtttgactattttgcccccgccgcgtgagttgccaaacgattcccgagtcttctgacactccttgccgccgccgccgcctgtcgccgacggcgatagatttggggatggatttgggctcgtgctacctcggtgggaacgccgacgcggtggagttctgcccgcaccgccacgttcctccacgtgctggccgccgccacctacacgctgcaggagcaggagcgcgaccgggcgggcagcatatccctcttctcagttgacgttgcctcggaggacgcgtcccggaggctccagctgctgcatactgtggagaccgccggcatcttcgatatgaagtggagccccaagtcgccgctgctcgcgcaggccgacgcccacggccgcatcgcgctccggcgcttggagcaggaggacggctcggacacaggcatcctcctcacagatgtctctgctgaagatatttcttcttcaatgtgcttatatgtggactggaaccaaactgcggagtctctgtctgttggattatcagatggctcactgtctctggtttcagtgagagaggaccggctggagatatcagaacagtggactgcacatcagttcgaagtctggacatgctattttgatcgtacaagtccacacttgctgtacagtggatcagatgactgttgtttcagttgctgggacttgagagaaagcccaccaaacattgtttttcaaaacaaaaaatctcataagatgggtgtctgttgtattacacagaatccgttggaggggaacatgctacttactgggagttatgatgaatttctcagagtttgggacatgagatttatggcaaaacctgtcaatgaaaagttgataaatctaggaggtggtgtgtggaggatgaagtatcatcctagtattgcagatgttgtattggctgcgtgcatgcacaatgggtttgccattgtaaaagtaggttctggggatgctacggtaatggaaacatattgcaagcatgagtccttagcatacggtgcagattggcagaaaagtgaagaggtggagcaaaatggaaattcttcagttgttgctacttgttcgttttatgatcgcctcctccgcgtgtggcaaccagagaacctagctgagctttaaagacttaaagcttttttgaattgaattcaagcatgactaggccatgaatctatttcctgaatgaaccagtataatttcattcaggtagttctttgaacttatgcttacatattcaagacttcaaagtcatgcatg

SEQ ID NO: 35043 - protein, 270 aa, Zea mays subsp. mays
  peptide (1)..(270): Ceres Seq. ID no. 12411308
  misc_feature (1)..(264): NCBI GI NO: 15242588 NR Description: unknown protein; protein id: At5g63010.1
  misc_feature (1)..(193): NCBI GI NO: 26450621 NR Description: unknown protein [Arabidopsis thaliana]
  misc_feature (1)..(261): NCBI GI NO: 18858115 NR Description: CG3184-PA [Drosophila melanogaster]
  misc_feature (1)..(234): NCBI GI NO: 34853114 NR Description: similar to RIKEN cDNA 2810443J12
  misc_feature (243)..(265): NCBI GI NO: 34853114 NR Description: similar to RIKEN cDNA 2810443J12
  misc_feature (1)..(234): NCBI GI NO: 24308452 NR Description: hypothetical protein BC017335 [Homo sapiens]
  misc_feature (1)..(234): NCBI GI NO: 21313066 NR Description: RIKEN cDNA 2810443J12 [Mus musculus]
  misc_feature (1)..(263): NCBI GI NO: 19075894 NR Description: hypothetical protein [Schizosaccharomyces pombe]
  misc_feature (66)..(234): NCBI GI NO: 26352908 NR Description: unnamed protein product [Mus musculus]
  misc_feature (36)..(262): NCBI GI NO: 23612162 NR Description: hypothetical protein, conserved
MKWSPKSPLLAQADAHGRIALRRLEQEDGSDTGILLTDVSAEDISSSMCLYVDWNQTAESLSVGLSDGSLSLVSVREDRLEISEQWTAHQFEVWTCYFDRTSPHLLYSGSDDCCFSCWDLRESPPNIVFQNKKSHKMGVCCITQNPLEGNMLLTGSYDEFLRVWDMRFMAKPVNEKLINLGGGVWRMKYHPSIADVVLAACMHNGFAIVKVGSGDATVMETYCKHESLAYGADWQKSEEVEQNGNSSVVATCSFYDRLLRVWQPENLAEL

SEQ ID NO: 35044 - protein, 223 aa, Zea mays subsp. mays
  peptide (1)..(223): Ceres Seq. ID no. 12411309
  misc_feature (1)..(217): NCBI GI NO: 15242588 NR Description: unknown protein; protein id: At5g63010.1
  misc_feature (1)..(146): NCBI GI NO: 26450621 NR Description: unknown protein [Arabidopsis thaliana]
  misc_feature (1)..(214): NCBI GI NO: 18858115 NR Description: CG3184-PA [Drosophila melanogaster]
  misc_feature (1)..(187): NCBI GI NO: 34853114 NR Description: similar to RIKEN cDNA 2810443J12
  misc_feature (196)..(218): NCBI GI NO: 34853114 NR Description: similar to RIKEN cDNA 2810443J12
  misc_feature (1)..(187): NCBI GI NO: 24308452 NR Description: hypothetical protein BC017335 [Homo sapiens]
  misc_feature (1)..(187): NCBI GI NO: 21313066 NR Description: RIKEN cDNA 2810443J12 [Mus musculus]
  misc_feature (1)..(216): NCBI GI NO: 19075894 NR Description: hypothetical protein [Schizosaccharomyces pombe]
  misc_feature (19)..(187): NCBI GI NO: 26352908 NR Description: unnamed protein product [Mus musculus]
  misc_feature (1)..(215): NCBI GI NO: 23612162 NR Description: hypothetical protein, conserved
MCLYVDWNQTAESLSVGLSDGSLSLVSVREDRLEISEQWTAHQFEVWTCYFDRTSPHLLYSGSDDCCFSCWDLRESPPNIVFQNKKSHKMGVCCITQNPLEGNMLLTGSYDEFLRVWDMRFMAKPVNEKLINLGGGVWRMKYHPSIADVVLAACMHNGFAIVKVGSGDATVMETYCKHESLAYGADWQKSEEVEQNGNSSVVATCSFYDRLLRVWQPENLAEL

SEQ ID NO: 35045 - DNA, 1659 bp, Zea mays subsp. mays
  misc_feature (1)..(1659): Ceres Seq. ID no. 12374238
tccggcagcgaagctcccccctccctgcctccttccccggcgccccgctcttcctccttccgctccggcgatgggcactggccgccgcggcggcggcggcggcggcgtgttccaccgcctcctcgccctctcgtcgctgctgctcctcgcttccggcgaggtcgtcttcgaggagcgcttcgaagatggttgggagactcggtgggtggaatccgactggaaaaggagtgaagggaaagcaggaaggttcaagcacacagcggggagatactctgcagatcctgatgacaaaggaatacaaacaacaatagatgccagacattttgctatctcagccaagttcccggaattcagtaacaagaaccggacgcttgtggtccagtactccattaagtttgagcaggatattgaatgtggcggtggctatattaagcttatgtccggttatgtcaaccagaaaaaatttagtggggacactccgtacagcttgatgtttggaccagatatatgtggtactcaaacaaagaagctccatcttatactctcttaccaggggcagaactatcccatcaaaaaagatctagaatgtgagacggacaagttaacacacgtgtatactttcattcttaggcctgatgcatcttatagcctgcttgttgataaccgtgaaagagaatctgggagcatgtacactgattgggatattctccctcctcgtaaaattaaggatgttcacgccaaaaggcctaaggattgggatgacagagaatatattgaagatcctgatgaagttaagccagagggctatgattctatcccaaaacagattcctgatccgaaggacaaaaagcctgacacatgggatgaagatgaggatggaatatggaagcccagaatggtatcaaatccagcatacaagggaccttggaaacgcaagagaattaaaaatcctaactacaagggtaaatggaagaccccatggatcgataatccagagtttgaggatgatccagatctttatgtgctgaagcctttgaagtatattggaattgaagtttggcaggtaaaagctggttcagttttcgacaacattctgatttgtgatgaccctgagtatgcaagaaaggttgttgaggaaacttggggtgcaaatagggaggctgaaaaggaagcttttgaagaagctgaaaaggagaggaaagctagggaggatagggaaggtcaaaaggcaaaggacgatggtggccggcatcgaatacacaggcgtcataaaaaaacactacagagatcactgggacgactaccatgatgagctataaaagtccccaaatattgcattcctcaaaagcataagctggaagttgcttcggacattgtgggtgcttttcaataataataattgattcgcctggtcagaacaacctgaagtgtttcttgctatgcgccaacaaattattgaactacaggatttgatatgtaatggacaaccgaagatctgcagggcattccagcgaaaacttggctctggtactgaaatagaggggacgagagactgtagtttgtgtctgtacaacggtgccggccatgtgctagctttgtaatctcaaaacattgtctttgcatgaataatgtaagttacccaaaaattactgcataccg

SEQ ID NO: 35046 - protein, 435 aa, Zea mays subsp. mays
  peptide (1)..(435): Ceres Seq. ID no. 12374239
  misc_feature (54)..(366): Pfam Name: Pfam Description:  Calreticulin family
  misc_feature (37)..(424): NCBI GI NO: 18390896 NR Description: calreticulin, putative; protein id: At1g08450
  misc_feature (37)..(424): NCBI GI NO: 27311777 NR Description: calreticulin, putative [Arabidopsis thaliana]
  misc_feature (37)..(424): NCBI GI NO: 12643531 NR Description: Calreticulin 3 precursor
  misc_feature (41)..(412): NCBI GI NO: 11131745 NR Description: Calreticulin precursor
  misc_feature (40)..(413): NCBI GI NO: 9858814 NR Description: calreticulin [Pinus taeda]
  misc_feature (37)..(412): NCBI GI NO: 11131631 NR Description: Calreticulin precursor
  misc_feature (41)..(412): NCBI GI NO: 12643243 NR Description: CALRETICULIN 2 PRECURSOR
  misc_feature (24)..(412): NCBI GI NO: 11131769 NR Description: Calreticulin precursor
  misc_feature (51)..(413): NCBI GI NO: 11131949 NR Description: Calreticulin precursor
  misc_feature (98)..(312): NCBI GI NO: 6664320 NR Description: T27G7.13 [Arabidopsis thaliana]
PAAKLPPPCLLPRRPALPPSAPAMGTGRRGGGGGGVFHRLLALSSLLLLASGEVVFEERFEDGWETRWVESDWKRSEGKAGRFKHTAGRYSADPDDKGIQTTIDARHFAISAKFPEFSNKNRTLVVQYSIKFEQDIECGGGYIKLMSGYVNQKKFSGDTPYSLMFGPDICGTQTKKLHLILSYQGQNYPIKKDLECETDKLTHVYTFILRPDASYSLLVDNRERESGSMYTDWDILPPRKIKDVHAKRPKDWDDREYIEDPDEVKPEGYDSIPKQIPDPKDKKPDTWDEDEDGIWKPRMVSNPAYKGPWKRKRIKNPNYKGKWKTPWIDNPEFEDDPDLYVLKPLKYIGIEVWQVKAGSVFDNILICDDPEYARKVVEETWGANREAEKEAFEEAEKERKAREDREGQKAKDDGGRHRIHRRHKKTLQRSLGRLP

SEQ ID NO: 35047 - protein, 412 aa, Zea mays subsp. mays
  peptide (1)..(412): Ceres Seq. ID no. 12374240
  misc_feature (31)..(343): Pfam Name: Pfam Description:  Calreticulin family
  misc_feature (14)..(401): NCBI GI NO: 18390896 NR Description: calreticulin, putative; protein id: At1g08450
  misc_feature (14)..(401): NCBI GI NO: 27311777 NR Description: calreticulin, putative [Arabidopsis thaliana]
  misc_feature (14)..(401): NCBI GI NO: 12643531 NR Description: Calreticulin 3 precursor
  misc_feature (18)..(389): NCBI GI NO: 11131745 NR Description: Calreticulin precursor
  misc_feature (17)..(390): NCBI GI NO: 9858814 NR Description: calreticulin [Pinus taeda]
  misc_feature (14)..(389): NCBI GI NO: 11131631 NR Description: Calreticulin precursor
  misc_feature (18)..(389): NCBI GI NO: 12643243 NR Description: CALRETICULIN 2 PRECURSOR
  misc_feature (1)..(389): NCBI GI NO: 11131769 NR Description: Calreticulin precursor
  misc_feature (28)..(390): NCBI GI NO: 11131949 NR Description: Calreticulin precursor
  misc_feature (75)..(289): NCBI GI NO: 6664320 NR Description: T27G7.13 [Arabidopsis thaliana]
MGTGRRGGGGGGVFHRLLALSSLLLLASGEVVFEERFEDGWETRWVESDWKRSEGKAGRFKHTAGRYSADPDDKGIQTTIDARHFAISAKFPEFSNKNRTLVVQYSIKFEQDIECGGGYIKLMSGYVNQKKFSGDTPYSLMFGPDICGTQTKKLHLILSYQGQNYPIKKDLECETDKLTHVYTFILRPDASYSLLVDNRERESGSMYTDWDILPPRKIKDVHAKRPKDWDDREYIEDPDEVKPEGYDSIPKQIPDPKDKKPDTWDEDEDGIWKPRMVSNPAYKGPWKRKRIKNPNYKGKWKTPWIDNPEFEDDPDLYVLKPLKYIGIEVWQVKAGSVFDNILICDDPEYARKVVEETWGANREAEKEAFEEAEKERKAREDREGQKAKDDGGRHRIHRRHKKTLQRSLGRLP

SEQ ID NO: 35048 - protein, 290 aa, Zea mays subsp. mays
  peptide (1)..(290): Ceres Seq. ID no. 12374241
  misc_feature (1)..(221): Pfam Name: Pfam Description:  Calreticulin family
  misc_feature (1)..(279): NCBI GI NO: 18390896 NR Description: calreticulin, putative; protein id: At1g08450
  misc_feature (1)..(279): NCBI GI NO: 27311777 NR Description: calreticulin, putative [Arabidopsis thaliana]
  misc_feature (1)..(279): NCBI GI NO: 12643531 NR Description: Calreticulin 3 precursor
  misc_feature (1)..(267): NCBI GI NO: 11131745 NR Description: Calreticulin precursor
  misc_feature (1)..(268): NCBI GI NO: 9858814 NR Description: calreticulin [Pinus taeda]
  misc_feature (1)..(267): NCBI GI NO: 11131631 NR Description: Calreticulin precursor
  misc_feature (1)..(267): NCBI GI NO: 12643243 NR Description: CALRETICULIN 2 PRECURSOR
  misc_feature (1)..(267): NCBI GI NO: 11131769 NR Description: Calreticulin precursor
  misc_feature (1)..(268): NCBI GI NO: 11131949 NR Description: Calreticulin precursor
  misc_feature (1)..(167): NCBI GI NO: 6664320 NR Description: T27G7.13 [Arabidopsis thaliana]
MSGYVNQKKFSGDTPYSLMFGPDICGTQTKKLHLILSYQGQNYPIKKDLECETDKLTHVYTFILRPDASYSLLVDNRERESGSMYTDWDILPPRKIKDVHAKRPKDWDDREYIEDPDEVKPEGYDSIPKQIPDPKDKKPDTWDEDEDGIWKPRMVSNPAYKGPWKRKRIKNPNYKGKWKTPWIDNPEFEDDPDLYVLKPLKYIGIEVWQVKAGSVFDNILICDDPEYARKVVEETWGANREAEKEAFEEAEKERKAREDREGQKAKDDGGRHRIHRRHKKTLQRSLGRLP

SEQ ID NO: 35049 - DNA, 1616 bp, Zea mays subsp. mays
  misc_feature (1)..(1616): Ceres Seq. ID no. 12351870
aaacacagtcaccaccacctacacccccgttgtctcctctccttccattgccacagtcggccttctccgtggaagccggcgggccgccgcctcctttgtccctgtcgtcgtgctcttccgtaccgccattccctagcactgtccacgggcgagatctcgcgtgtacctcgtttccctcggcgggtggatcagtgacggcttggtcgagatggacgatgtggttgatgacatcatctgtggaacggatgcggcggttgccgtcgaggatggggccagtgggacgcccgcaatgcctagcttagggtgccagggtgaggaagagcataggaagggcaatgaggacaactcaggtgagagcgaggtgattaacccggccagcaagaggctggcggggaggccacctcgcccctggaaggcaggaagcctcgcctttccaaggggaatcaaagccatgtacctaaggctgtcaaatctaagagtccaaggagtggagatgaaaatcagacaaggagaaaagctcccaactcttcttttcctaaggcacccattgtccaggagtcccatggtgactctggtgtcggcagtaataaagctggcaagaatgagtctcactcatccccaattgatgcagcattgcccgatgagtccaaggagaaaaggaaaactcaaaagccaccagcacagctctcttccatcaaaagagatgaagaacagtcaaatggtgagagtgcaaagcctcgcaaagttggaagcacgccatcatatggtttcaccttcaagtgtgatgagagatctgaaaaaagacgagagttctattcgaagcttgaggagaagattcatgcaagagagttagaaataagcaatttgcaagccaagtcaaaggaaactgaagaagcagaactcaaaatgctgagaaagagtttgaatttcaaggcaacaccaatgccaagcttttataaggaaccaacccctgccaaggttgaattgaaaaagatccccccaaccagagctaaatcaccaaagcttggtcggtctaaaaacaagtccatatcagagactgaagaaaatactactacggaccaacctgcccgtctgagccttgacgaaaaggtttctcaaaacggtgtgaaaaaaccaaccccgtcgagttcagcaaagaagccccagagaaagtcactccccaggctgccatctgaagaaacttgtccgcttgatgccacctcaaggcagctgaagaacaacaaactggatgaagttaatgctcaggagacaggatcagctacagggcaggtacaaggaagtgagacggaaacagattctgttcagagcgcaactcaagctggagctaaccctgatgaacagagtgtcgctcagtgaacagagtgtcgctcagtgaagatctcggtggccaagccaagtgatttgtgatggatggtgtgccttatctttgtgtgatgttgtgcttgtctactagagtgacttgtggcctgtatcatgctgtgttatactcctgtttttgttttcctgcgattgagcctgtatgttgcttatcaatctagatagcttttgttcataatctacagatatatccaaattgtcctaagtcatttgcagtt

SEQ ID NO: 35050 - protein, 214 aa, Zea mays subsp. mays
  peptide (1)..(214): Ceres Seq. ID no. 12351871
MDDVVDDIICGTDAAVAVEDGASGTPAMPSLGCQGEEEHRKGNEDNSGESEVINPASKRLAGRPPRPWKAGSLAFPRGIKAMYLRLSNLRVQGVEMKIRQGEKLPTLLFLRHPLSRSPMVTLVSAVIKLARMSLTHPQLMQHCPMSPRRKGKLKSHQHSSLPSKEMKNSQMVRVQSLAKLEARHHMVSPSSVMRDLKKDESSIRSLRRRFMQES

SEQ ID NO: 35051 - protein, 187 aa, Zea mays subsp. mays
  peptide (1)..(187): Ceres Seq. ID no. 12351872
MPSLGCQGEEEHRKGNEDNSGESEVINPASKRLAGRPPRPWKAGSLAFPRGIKAMYLRLSNLRVQGVEMKIRQGEKLPTLLFLRHPLSRSPMVTLVSAVIKLARMSLTHPQLMQHCPMSPRRKGKLKSHQHSSLPSKEMKNSQMVRVQSLAKLEARHHMVSPSSVMRDLKKDESSIRSLRRRFMQES

SEQ ID NO: 35052 - protein, 156 aa, Zea mays subsp. mays
  peptide (1)..(156): Ceres Seq. ID no. 12351873
  misc_feature (1)..(99): NCBI GI NO: 18417986 NR Description: putative protein; protein id: At4g32330
  misc_feature (1)..(156): NCBI GI NO: 15224733 NR Description: unknown protein; protein id: At2g25480.1
  misc_feature (1)..(140): NCBI GI NO: 18403980 NR Description: expressed protein; protein id: At2g35880
  misc_feature (1)..(140): NCBI GI NO: 25408425 NR Description: hypothetical protein At2g35880
  misc_feature (1)..(29): NCBI GI NO: 7485356 NR Description: hypothetical protein F10M6
  misc_feature (1)..(29): NCBI GI NO: 7486636 NR Description: hypothetical protein F8B4
  misc_feature (1)..(84): NCBI GI NO: 34897180 NR Description: unknown protein
  misc_feature (1)..(46): NCBI GI NO: 9294199 NR Description: gb|AAF04893
  misc_feature (1)..(46): NCBI GI NO: 15228950 NR Description: unknown protein; protein id: At3g23090.1
  misc_feature (1)..(59): NCBI GI NO: 18396961 NR Description: expressed protein; protein id: At3g04630
MLRKSLNFKATPMPSFYKEPTPAKVELKKIPPTRAKSPKLGRSKNKSISETEENTTTDQPARLSLDEKVSQNGVKKPTPSSSAKKPQRKSLPRLPSEETCPLDATSRQLKNNKLDEVNAQETGSATGQVQGSETETDSVQSATQAGANPDEQSVAQ

SEQ ID NO: 35053 - DNA, 1534 bp, Zea mays subsp. mays
  misc_feature (1)..(1534): Ceres Seq. ID no. 12435123
caatattgctgcttcagaacatgaaataactgggcctaacaccctctctactgacttcctcagctacgtggaatctgaagttttaagacttgaacagcttaaagcgagcaagatgaaagacctcgttcttaaaaagaagacagaactggaagatcataggagacgtgctcatttgattggtgaggaaggttatgcagccgaatttagcgatgaggctattgaggcaggagctgtcgatcctgcgctggtgctggaacaaattgaggctcacattgccacagtgaaagaggaagcttttagccgtaaggatattcttgagaaggttgaaagatggctgaatgcatgtgaggaggaagcttggctggaagattataacaaagacgacaatcgttataatgccgggaggggggcccacttgacactcaaaagggctgagaaagctcgtattttggttaacaagatcccaggactggtagatgttttgaccacaaaaattgtagcttgggagacagaaagaggaaaggagttcacatatgatggtgtccgcctgcggtcaatgcttgaagactacataatcattcgccaggagaaagagctagagaagaagaggcaaagggatcagaagaagatccaggatcaactcaaagcctgagcaggaagcgctgtatggatcaaaaccaagtccatctaagactcaaagcacgaagaaggtgcctagacaatccatgggtggtgcgaaccgaagactgtctcttggtggagccacaacgcaagcccccaaaacagatataatgcactccaagacagctcgtgctgcgaagaaggctgaagatttgggcgctttatctcctagtagcagaggcttggacattgccggtcttcccatcaagaaactatctttcaacgcaagcactctgcgagaggcagaaacaccacgcaagccttttgcccagatcatgccaggaaacaatgtctcgtcgatgcctgcgcggcccatctccaacgacacagaggaagagaacaaaacccccaaaacatttgcagggctcaatccaaaaacgccggtgacagtgacggctcctatgcagttggcggtgacaccagctgtggccaacaaggtcatagccactcctgcaacccttttccaggagaaggcagagtcgccagcgctgcctggggaccatcgagtactcgttcgaagagaggcgactcgccgtttacctggccaggcaagtggcattttttgttcattcaccttctcccagttgcgctaatacccagctattacttagttgaaagctgagctgactgcgatttctcggcagaggccaatgttacctgttggtcgatactcgatagtagtgggcctcggtcttactttgcactactattcattcatagccatattgctactagccagtaaagggagtttttagtcttgagagcttgtggtctgcatcgtaagttgtatagctttatacggtgcatcgtcgatgacctgttattgttattatatggtttattactgttatcc

SEQ ID NO: 35054 - protein, 216 aa, Zea mays subsp. mays
  peptide (1)..(216): Ceres Seq. ID no. 12435124
  misc_feature (1)..(216): Pfam Name: MAP65/ASE1 family Pfam Description: Microtubule associated protein
  misc_feature (1)..(216): NCBI GI NO: 15242132 NR Description: putative protein; protein id: At5g51600.1
  misc_feature (1)..(214): NCBI GI NO: 15232967 NR Description: putative protein; protein id: At3g60840.1
  misc_feature (1)..(214): NCBI GI NO: 15241762 NR Description: cytokinesis regulating protein - like
  misc_feature (1)..(214): NCBI GI NO: 11558252 NR Description: microtubule-associated protein MAP65-1a
  misc_feature (1)..(216): NCBI GI NO: 28200790 NR Description: 65kD microtubule associated protein
  misc_feature (1)..(213): NCBI GI NO: 15240485 NR Description: putative protein; protein id: At5g55230.1
  misc_feature (2)..(214): NCBI GI NO: 25410943 NR Description: hypothetical protein At2g01910
  misc_feature (2)..(214): NCBI GI NO: 30677965 NR Description: microtubule associated protein (MAP65/ASE1) family
  misc_feature (2)..(214): NCBI GI NO: 21539547 NR Description: unknown protein [Arabidopsis thaliana]
  misc_feature (1)..(214): NCBI GI NO: 11558256 NR Description: microtubule-associated protein MAP65-1c
NIAASEHEITGPNTLSTDFLSYVESEVLRLEQLKASKMKDLVLKKKTELEDHRRRAHLIGEEGYAAEFSDEAIEAGAVDPALVLEQIEAHIATVKEEAFSRKDILEKVERWLNACEEEAWLEDYNKDDNRYNAGRGAHLTLKRAEKARILVNKIPGLVDVLTTKIVAWETERGKEFTYDGVRLRSMLEDYIIIRQEKELEKKRQRDQKKIQDQLKA

SEQ ID NO: 35055 - protein, 182 aa, Zea mays subsp. mays
  peptide (1)..(182): Ceres Seq. ID no. 12435125
  misc_feature (1)..(77): Pfam Name: MAP65/ASE1 family Pfam Description: Microtubule associated protein
  misc_feature (1)..(144): NCBI GI NO: 15242132 NR Description: putative protein; protein id: At5g51600.1
MGGANRRLSLGGATTQAPKTDIMHSKTARAAKKAEDLGALSPSSRGLDIAGLPIKKLSFNASTLREAETPRKPFAQIMPGNNVSSMPARPISNDTEEENKTPKTFAGLNPKTPVTVTAPMQLAVTPAVANKVIATPATLFQEKAESPALPGDHRVLVRREATRRLPGQASGIFCSFTFSQLR

SEQ ID NO: 35056 - protein, 179 aa, Zea mays subsp. mays
  peptide (1)..(179): Ceres Seq. ID no. 12435126
  misc_feature (1)..(179): Pfam Name: MAP65/ASE1 family Pfam Description: Microtubule associated protein
  misc_feature (1)..(179): NCBI GI NO: 15242132 NR Description: putative protein; protein id: At5g51600.1
  misc_feature (1)..(177): NCBI GI NO: 15232967 NR Description: putative protein; protein id: At3g60840.1
  misc_feature (1)..(177): NCBI GI NO: 15241762 NR Description: cytokinesis regulating protein - like
  misc_feature (1)..(177): NCBI GI NO: 11558252 NR Description: microtubule-associated protein MAP65-1a
  misc_feature (1)..(179): NCBI GI NO: 28200790 NR Description: 65kD microtubule associated protein
  misc_feature (1)..(176): NCBI GI NO: 15240485 NR Description: putative protein; protein id: At5g55230.1
  misc_feature (1)..(177): NCBI GI NO: 25410943 NR Description: hypothetical protein At2g01910
  misc_feature (1)..(177): NCBI GI NO: 30677965 NR Description: microtubule associated protein (MAP65/ASE1) family
  misc_feature (1)..(177): NCBI GI NO: 21539547 NR Description: unknown protein [Arabidopsis thaliana]
  misc_feature (1)..(177): NCBI GI NO: 11558256 NR Description: microtubule-associated protein MAP65-1c
MKDLVLKKKTELEDHRRRAHLIGEEGYAAEFSDEAIEAGAVDPALVLEQIEAHIATVKEEAFSRKDILEKVERWLNACEEEAWLEDYNKDDNRYNAGRGAHLTLKRAEKARILVNKIPGLVDVLTTKIVAWETERGKEFTYDGVRLRSMLEDYIIIRQEKELEKKRQRDQKKIQDQLKA

SEQ ID NO: 35057 - DNA, 945 bp, Zea mays subsp. mays
  misc_feature (1)..(945): Ceres Seq. ID no. 13577751
aattttgcttccggctgccgctcttctccgccgccgccccgatccccttcctccccaagcccttcaactatccactcccgcgtccccggagaagcggcgagatgtacggcatcctgacctccccctgccctcgagccccgcttctccgcgctctcccgagcccatccgcccgcgcattccccagaacactagccttccccgcgaggcccctcccccgcggtctccgcctgacccctccgcacgcmgmmgcggaggcatyggcggcagcacggcgttgggcgggcttctggcgtcgccgctctcgactctggaggccgccctgcggggcctcaacctcgcgccccttcgcgcccccgtggcggcggcgatgtcggcggccgtgcggtggctgggagtgtaccgggaggtgctgctcgtcggcgtgctgctctcctggttccccaacatcccctgggaccgccagcccttctcggccctgcgcgacctctgcgaccccttcctcgccctgtgccgtgaggtcatgccccccgtgttcgggcgcaagctcgacctcagcccgcttgttgcattcatggctattgacatcatcatcatgatcctgcgcccgcagccacgcatgtgatgactccctgcagcagtgggtttggacgatgttggttggtatgttaggctctgactgcaggaacaaggatctaaggctgttttcggtcatcagatggcaaagaaaggtgctgtgccgctcacctctatcagtacacaagtgcggtggttggatggattagttttgcgatcttagcatagctgttatggagggtgtaatgcaatataaatgatttcgatgtggcttcattcccaaaacttcctttttctcgtgtcctgtggttgttgtagtaatatgtgttggctacgtttacgtattggtaatcccagttttggtcagtgccc

SEQ ID NO: 35058 - protein, 206 aa, Zea mays subsp. mays
  peptide (1)..(206): Ceres Seq. ID no. 15222656
  misc_feature (119)..(200): Pfam Name: Pfam Description:  YGGT family
  misc_feature (52)..(206): NCBI GI NO: 34393226 NR Description: unknown protein
  misc_feature (97)..(200): NCBI GI NO: 15234345 NR Description: expressed protein [Arabidopsis thaliana]
  misc_feature (97)..(200): NCBI GI NO: 21592772 NR Description: unknown [Arabidopsis thaliana]
  misc_feature (105)..(193): NCBI GI NO: 18397948 NR Description: expressed protein [Arabidopsis thaliana]
  misc_feature (105)..(193): NCBI GI NO: 21617923 NR Description: unknown [Arabidopsis thaliana]
  misc_feature (129)..(200): NCBI GI NO: 22298077 NR Description: ORF_ID:tsr0534~hypothetical protein
  misc_feature (119)..(196): NCBI GI NO: 37523109 NR Description: hypothetical protein [Gloeobacter violaceus]
  misc_feature (123)..(206): NCBI GI NO: 17229553 NR Description: hypothetical protein [Nostoc sp. PCC 7120]
  misc_feature (124)..(200): NCBI GI NO: 11467623 NR Description: hypothetical chloroplast RF19 [Guillardia theta]
  misc_feature (123)..(203): NCBI GI NO: 11465587 NR Description: unknown [Cyanidium caldarium]
  misc_feature (82)..(82): Xaa is any aa, unknown or other
  misc_feature (83)..(83): Xaa is any aa, unknown or other
  misc_feature (86)..(86): Xaa is any aa, unknown or other
ILLPAAALLRRRPDPLPPQALQLSTPASPEKRRDVRHPDLPLPSSPASPRSPEPIRPRIPQNTSLPREAPPPRSPPDPSARXXGGXGGSTALGGLLASPLSTLEAALRGLNLAPLRAPVAAAMSAAVRWLGVYREVLLVGVLLSWFPNIPWDRQPFSALRDLCDPFLALCREVMPPVFGRKLDLSPLVAFMAIDIIIMILRPQPRM

SEQ ID NO: 35059 - protein, 197 aa, Zea mays subsp. mays
  peptide (1)..(197): Ceres Seq. ID no. 15222657
  misc_feature (123)..(182): Pfam Name: Pfam Description:  Keratin, high sulfur B2 protein
  misc_feature (81)..(81): Xaa is any aa, unknown or other
  misc_feature (82)..(82): Xaa is any aa, unknown or other
  misc_feature (86)..(86): Xaa is any aa, unknown or other
FCFRLPLFSAAAPIPFLPKPFNYPLPRPRRSGEMYGILTSPCPRAPLLRALPSPSARAFPRTLAFPARPLPRGLRLTPPHXXAEAXAAARRWAGFWRRRSRLWRPPCGASTSRPFAPPWRRRCRRPCGGWECTGRCCSSACCSPGSPTSPGTASPSRPCATSATPSSPCAVRSCPPCSGASSTSARLLHSWLLTSSS

SEQ ID NO: 35060 - protein, 164 aa, Zea mays subsp. mays
  peptide (1)..(164): Ceres Seq. ID no. 15222658
  misc_feature (90)..(149): Pfam Name: Pfam Description:  Keratin, high sulfur B2 protein
  misc_feature (48)..(48): Xaa is any aa, unknown or other
  misc_feature (49)..(49): Xaa is any aa, unknown or other
  misc_feature (53)..(53): Xaa is any aa, unknown or other
MYGILTSPCPRAPLLRALPSPSARAFPRTLAFPARPLPRGLRLTPPHXXAEAXAAARRWAGFWRRRSRLWRPPCGASTSRPFAPPWRRRCRRPCGGWECTGRCCSSACCSPGSPTSPGTASPSRPCATSATPSSPCAVRSCPPCSGASSTSARLLHSWLLTSSS

SEQ ID NO: 35061 - DNA, 1270 bp, Zea mays subsp. mays
  misc_feature (1)..(1270): Ceres Seq. ID no. 13496142
tagaacatcctaatcgaaaatccacctttcccgcaccttgttgcacataaaaattcccacgccccgcacccaacgacctccgcgtccgcccccaaaacccccgcaaaccctagccgccgccagctaggcaaggaatggccgccctcctgcggctcgccgcagcccgatccgccctccccaggcgcgccctcgccccacaccggaggctcgcggcggcggcggcggccgcgatggaggagtggtggtccgactgggagcaggacggcgaggaggaggcgcgcgcctcggcgccggccgccggccttgaccccgccggcgggggccccgggggcgtgcagtgggtcgtcatgggccgccctggcccgcagaagcacgcccacgccgcgcgcctctccgaggtgctcgccgtgccctacatctccatgggcgcgctcctcaggcaggagctcaacccctcctcgcaactctacaggaagattgcaaactctgtgaatgaagggaggcttgtgccggaggacatcatatttgggttgctgacgaagcggcttgaggacggatacaacaagggtgaaaatgggttcattcttgatgggattccacgcacccgtatgcaagctgagattcttgacgagattgtggatgttgatttggttcttaatttcaagtgtgctgatggctgtttcatgaagaagcaatcgagaggcaacatctgcgcccactgtggacagctctttgacgtcagcaattcagcatctacgaactgtagccccagcctcgggagctatacatggcattctcaggcagaacctgctggtgttttaggcctcgaagcctcaaggatggagaggatgcgcacatatgctgagcagaccaagcagctggaagattactacaagaagcagaggaaaattgtggaactgaagacatctgctcgcccggtggagacatggcaggggctcgtagccgccctgcacctccagcatctggactcgcccccgacaccgcacaaactcaccgcgtaaatatcattattaattttgctacctccgagtagagagtctaaaggatcagaattccgatcctgcctgcagcatatctaatatccctatgtttgtgggttctggctcgagagagtcagtcggctgtcttttgttttgttttgttattgttatagataaaggtaagcgattttgcagacacgcttattgtatggttgtaaccgagagttgtggacttgccttggcttgcgagtgtactcgcttatatgctc

SEQ ID NO: 35062 - protein, 295 aa, Zea mays subsp. mays
  peptide (1)..(295): Ceres Seq. ID no. 13496143
  misc_feature (7)..(180): NCBI GI NO: 6091724 NR Description: putative adenylate kinase [Arabidopsis thaliana]
  misc_feature (7)..(180): NCBI GI NO: 30678433 NR Description: adenylate kinase -related [Arabidopsis thaliana]
  misc_feature (1)..(290): NCBI GI NO: 29427816 NR Description: Adenylate kinase, chloroplast precursor
  misc_feature (23)..(281): NCBI GI NO: 15228109 NR Description: adenylate kinase -related [Arabidopsis thaliana]
  misc_feature (23)..(282): NCBI GI NO: 30687836 NR Description: adenylate kinase -related [Arabidopsis thaliana]
  misc_feature (115)..(282): NCBI GI NO: 6063552 NR Description: ESTs AU065232
  misc_feature (1)..(120): NCBI GI NO: 6063552 NR Description: ESTs AU065232
  misc_feature (70)..(279): NCBI GI NO: 11498284 NR Description: adenylate kinase (adk)
  misc_feature (70)..(283): NCBI GI NO: 23112485 NR Description: hypothetical protein
  misc_feature (61)..(254): NCBI GI NO: 9664584 NR Description: adenylate kinase
MAALLRLAAARSALPRRALAPHRRLAAAAAAAMEEWWSDWEQDGEEEARASAPAAGLDPAGGGPGGVQWVVMGRPGPQKHAHAARLSEVLAVPYISMGALLRQELNPSSQLYRKIANSVNEGRLVPEDIIFGLLTKRLEDGYNKGENGFILDGIPRTRMQAEILDEIVDVDLVLNFKCADGCFMKKQSRGNICAHCGQLFDVSNSASTNCSPSLGSYTWHSQAEPAGVLGLEASRMERMRTYAEQTKQLEDYYKKQRKIVELKTSARPVETWQGLVAALHLQHLDSPPTPHKLTA

SEQ ID NO: 35063 - protein, 263 aa, Zea mays subsp. mays
  peptide (1)..(263): Ceres Seq. ID no. 13496144
  misc_feature (1)..(148): NCBI GI NO: 6091724 NR Description: putative adenylate kinase [Arabidopsis thaliana]
  misc_feature (1)..(148): NCBI GI NO: 30678433 NR Description: adenylate kinase -related [Arabidopsis thaliana]
  misc_feature (1)..(258): NCBI GI NO: 29427816 NR Description: Adenylate kinase, chloroplast precursor
  misc_feature (1)..(249): NCBI GI NO: 15228109 NR Description: adenylate kinase -related [Arabidopsis thaliana]
  misc_feature (1)..(250): NCBI GI NO: 30687836 NR Description: adenylate kinase -related [Arabidopsis thaliana]
  misc_feature (83)..(250): NCBI GI NO: 6063552 NR Description: ESTs AU065232
  misc_feature (1)..(88): NCBI GI NO: 6063552 NR Description: ESTs AU065232
  misc_feature (38)..(247): NCBI GI NO: 11498284 NR Description: adenylate kinase (adk)
  misc_feature (38)..(251): NCBI GI NO: 23112485 NR Description: hypothetical protein
  misc_feature (29)..(222): NCBI GI NO: 9664584 NR Description: adenylate kinase
MEEWWSDWEQDGEEEARASAPAAGLDPAGGGPGGVQWVVMGRPGPQKHAHAARLSEVLAVPYISMGALLRQELNPSSQLYRKIANSVNEGRLVPEDIIFGLLTKRLEDGYNKGENGFILDGIPRTRMQAEILDEIVDVDLVLNFKCADGCFMKKQSRGNICAHCGQLFDVSNSASTNCSPSLGSYTWHSQAEPAGVLGLEASRMERMRTYAEQTKQLEDYYKKQRKIVELKTSARPVETWQGLVAALHLQHLDSPPTPHKLTA

SEQ ID NO: 35064 - protein, 224 aa, Zea mays subsp. mays
  peptide (1)..(224): Ceres Seq. ID no. 13496145
  misc_feature (1)..(109): NCBI GI NO: 6091724 NR Description: putative adenylate kinase [Arabidopsis thaliana]
  misc_feature (1)..(109): NCBI GI NO: 30678433 NR Description: adenylate kinase -related [Arabidopsis thaliana]
  misc_feature (1)..(219): NCBI GI NO: 29427816 NR Description: Adenylate kinase, chloroplast precursor
  misc_feature (1)..(210): NCBI GI NO: 15228109 NR Description: adenylate kinase -related [Arabidopsis thaliana]
  misc_feature (1)..(211): NCBI GI NO: 30687836 NR Description: adenylate kinase -related [Arabidopsis thaliana]
  misc_feature (44)..(211): NCBI GI NO: 6063552 NR Description: ESTs AU065232
  misc_feature (1)..(49): NCBI GI NO: 6063552 NR Description: ESTs AU065232
  misc_feature (1)..(208): NCBI GI NO: 11498284 NR Description: adenylate kinase (adk)
  misc_feature (1)..(212): NCBI GI NO: 23112485 NR Description: hypothetical protein
  misc_feature (1)..(183): NCBI GI NO: 9664584 NR Description: adenylate kinase
MGRPGPQKHAHAARLSEVLAVPYISMGALLRQELNPSSQLYRKIANSVNEGRLVPEDIIFGLLTKRLEDGYNKGENGFILDGIPRTRMQAEILDEIVDVDLVLNFKCADGCFMKKQSRGNICAHCGQLFDVSNSASTNCSPSLGSYTWHSQAEPAGVLGLEASRMERMRTYAEQTKQLEDYYKKQRKIVELKTSARPVETWQGLVAALHLQHLDSPPTPHKLTA

SEQ ID NO: 35065 - DNA, 1906 bp, Zea mays subsp. mays; identical to SEQ ID NO: 23574
  misc_feature (1)..(1906): Ceres Seq. ID no. 13498491

SEQ ID NO: 35066 - protein, 224 aa, Zea mays subsp. mays; identical to SEQ ID NO: 23575
  peptide (1)..(224): Ceres Seq. ID no. 13498492
  misc_feature (64)..(217): Pfam Name: Pfam Description:  TCP-1/cpn60 chaperonin family
  misc_feature (25)..(217): NCBI GI NO: 1587206 NR Description: T complex protein
  misc_feature (25)..(217): NCBI GI NO: 730919 NR Description: T-COMPLEX PROTEIN 1, EPSILON SUBUNIT
  misc_feature (25)..(217): NCBI GI NO: 1729864 NR Description: T-COMPLEX PROTEIN 1, EPSILON SUBUNIT
  misc_feature (25)..(217): NCBI GI NO: 15221770 NR Description: T-complex protein 1, epsilon subunit/chaperonin
  misc_feature (27)..(217): NCBI GI NO: 27924333 NR Description: Similar to chaperonin containing TCP1, subunit 5
  misc_feature (27)..(217): NCBI GI NO: 603955 NR Description: KIAA0098 protein [Homo sapiens]
  misc_feature (27)..(217): NCBI GI NO: 12804225 NR Description: Unknown (protein for IMAGE:3543711) [Homo sapiens]
  misc_feature (27)..(217): NCBI GI NO: 24307939 NR Description: chaperonin containing TCP1, subunit 5 (epsilon)
  misc_feature (27)..(217): NCBI GI NO: 6683670 NR Description: CCT
  misc_feature (27)..(217): NCBI GI NO: 6671702 NR Description: chaperonin subunit 5 (epsilon) [Mus musculus]

SEQ ID NO: 35067 - protein, 200 aa, Zea mays subsp. mays; identical to SEQ ID NO: 23576
  peptide (1)..(200): Ceres Seq. ID no. 13498493
  misc_feature (40)..(193): Pfam Name: Pfam Description:  TCP-1/cpn60 chaperonin family
  misc_feature (1)..(193): NCBI GI NO: 1587206 NR Description: T complex protein
  misc_feature (1)..(193): NCBI GI NO: 730919 NR Description: T-COMPLEX PROTEIN 1, EPSILON SUBUNIT
  misc_feature (1)..(193): NCBI GI NO: 1729864 NR Description: T-COMPLEX PROTEIN 1, EPSILON SUBUNIT
  misc_feature (1)..(193): NCBI GI NO: 15221770 NR Description: T-complex protein 1, epsilon subunit/chaperonin
  misc_feature (3)..(193): NCBI GI NO: 27924333 NR Description: Similar to chaperonin containing TCP1, subunit 5
  misc_feature (3)..(193): NCBI GI NO: 603955 NR Description: KIAA0098 protein [Homo sapiens]
  misc_feature (3)..(193): NCBI GI NO: 24307939 NR Description: chaperonin containing TCP1, subunit 5 (epsilon)
  misc_feature (3)..(193): NCBI GI NO: 12804225 NR Description: Unknown (protein for IMAGE:3543711) [Homo sapiens]
  misc_feature (3)..(193): NCBI GI NO: 6683670 NR Description: CCT
  misc_feature (3)..(193): NCBI GI NO: 6671702 NR Description: chaperonin subunit 5 (epsilon) [Mus musculus]

SEQ ID NO: 35068 - protein, 148 aa, Zea mays subsp. mays; identical to SEQ ID NO: 23577
  peptide (1)..(148): Ceres Seq. ID no. 13498494
  misc_feature (1)..(141): Pfam Name: Pfam Description:  TCP-1/cpn60 chaperonin family
  misc_feature (1)..(141): NCBI GI NO: 1587206 NR Description: T complex protein
  misc_feature (1)..(141): NCBI GI NO: 730919 NR Description: T-COMPLEX PROTEIN 1, EPSILON SUBUNIT
  misc_feature (1)..(141): NCBI GI NO: 1729864 NR Description: T-COMPLEX PROTEIN 1, EPSILON SUBUNIT
  misc_feature (1)..(141): NCBI GI NO: 15221770 NR Description: T-complex protein 1, epsilon subunit/chaperonin
  misc_feature (1)..(141): NCBI GI NO: 27924333 NR Description: Similar to chaperonin containing TCP1, subunit 5
  misc_feature (1)..(141): NCBI GI NO: 603955 NR Description: KIAA0098 protein [Homo sapiens]
  misc_feature (1)..(141): NCBI GI NO: 24307939 NR Description: chaperonin containing TCP1, subunit 5 (epsilon)
  misc_feature (1)..(141): NCBI GI NO: 12804225 NR Description: Unknown (protein for IMAGE:3543711) [Homo sapiens]
  misc_feature (1)..(141): NCBI GI NO: 6683670 NR Description: CCT
  misc_feature (1)..(141): NCBI GI NO: 6671702 NR Description: chaperonin subunit 5 (epsilon) [Mus musculus]

SEQ ID NO: 35069 - DNA, 1704 bp, Zea mays subsp. mays
  misc_feature (1)..(1704): Ceres Seq. ID no. 13492801
acaaattagatgggcattcacatcagatcgagtgttttgattactttagtggtggtgattttgataagctatatatagtcaccggctctcaagataaaactgccaagatctgggactgcgagaatgcgggctgtgtccagacactggaaggacatgcaggtcccgttagagctgtctgttaccatcagaatctctcgttattaattacagggtgctctgacggatcaattcatctatggaactccactaccttcaggcttgagcataaactgaactttgctgacttcggattactgagttctgtagcttgtttgaaaggatcgaaaaggattgcaatcagaagcagggaaggattagcacttgtagacatagacatagaggacaagaaggatagcgatgtggagagcatcacgactactgcttccatgaacgacacaggtccaattacagaagagaacggagtggcagcagaccatatctctgatgaccacctggcgcagggcgtagtatatgtacatacagagattataggcaaagtcaattcagcatgcaccatagacgtccatccgacaaagccatggatggtcatcactcaagctaacaagtttgttcatgtttgggactaccatacaaaggtagtggaatggacgattcagattaagggagcgaaagttagttcagctaaatttatagccagccaggattggattgtggcgggtactacccgtggattcctccacgtgtacgattgcgaatcgaggaaggaaatacgccgtctttgtgaacacccgaaatctatcacgtcattggctgttgacgatgatgcccttgagctggtgctgtcagcgtccatcgatggcaagattttgatctggagctactggcactactatcacgcacgtagacgtagtacctggcatttggaaaaaacatttgacgcgggaagccagtgtctgaagcaagtcgcgtttattgctccaagtgtccatcgcagcagcagcactatcatcgctactgctcgagacggaacagtaaagatttgggatcccgatcgttctgacggatgccgtgagttcacattggctgcggattcaggtcagattgttgaatgtttcgattggtttagtcgtggtactgatatatacttggtcaccggttctcgagacaacactgccaagatctgggacatagaggatgggagttgtgtccgaacactggaaggacacgcagatcatgttaccgttgtctgttaccatccggatctttcaatgctcattacaggttcaagggacggctcgattcgtctgtggaactccactaccttcaggtttgagcatgagctgaactttgacctcgggtctctgagttctttagcttgtatcaagggatcaacaaggattgcaatcggatatgaaagaggtctagtactggcagacatttgcactcaggaacatagagcatgatctataaagcggcataataccttgagagcgacagaataaaatctaaacattgataaagcggcaaaaatccctggcaaacatttgctgatgcgatgggattgcatccaaacatttttcttggtaagctaatagactgcaataagtttttccatggacttgggaggtgtcgatctgcggatatgcttttgtatggtttaaacatatcatcggatagaaatttatactactatattaaaaattt

SEQ ID NO: 35070 - protein, 486 aa, Zea mays subsp. mays
  peptide (1)..(486): Ceres Seq. ID no. 13492802
  misc_feature (184)..(479): NCBI GI NO: 15218215 NR Description: coatomer protein complex, subunit beta 2
  misc_feature (184)..(479): NCBI GI NO: 9294445 NR Description: coatomer protein complex, beta prime
  misc_feature (184)..(479): NCBI GI NO: 30683862 NR Description: coatomer protein complex, subunit beta 2
  misc_feature (184)..(479): NCBI GI NO: 30683865 NR Description: coatomer protein complex, subunit beta 2
  misc_feature (184)..(479): NCBI GI NO: 12324597 NR Description: putative coatomer protein complex, subunit beta 2
  misc_feature (184)..(479): NCBI GI NO: 30699476 NR Description: coatomer protein complex, subunit beta 2
  misc_feature (171)..(483): NCBI GI NO: 3287963 NR Description: PROBABLE COATOMER BETA' SUBUNIT
  misc_feature (171)..(483): NCBI GI NO: 39586361 NR Description: Hypothetical protein CBG21666
  misc_feature (184)..(483): NCBI GI NO: 486784 NR Description: Golgi-associated particle 102K chain - human
  misc_feature (184)..(483): NCBI GI NO: 4758032 NR Description: coatomer protein complex, subunit beta 2
KLDGHSHQIECFDYFSGGDFDKLYIVTGSQDKTAKIWDCENAGCVQTLEGHAGPVRAVCYHQNLSLLITGCSDGSIHLWNSTTFRLEHKLNFADFGLLSSVACLKGSKRIAIRSREGLALVDIDIEDKKDSDVESITTTASMNDTGPITEENGVAADHISDDHLAQGVVYVHTEIIGKVNSACTIDVHPTKPWMVITQANKFVHVWDYHTKVVEWTIQIKGAKVSSAKFIASQDWIVAGTTRGFLHVYDCESRKEIRRLCEHPKSITSLAVDDDALELVLSASIDGKILIWSYWHYYHARRRSTWHLEKTFDAGSQCLKQVAFIAPSVHRSSSTIIATARDGTVKIWDPDRSDGCREFTLAADSGQIVECFDWFSRGTDIYLVTGSRDNTAKIWDIEDGSCVRTLEGHADHVTVVCYHPDLSMLITGSRDGSIRLWNSTTFRFEHELNFDLGSLSSLACIKGSTRIAIGYERGLVLADICTQEHRA

SEQ ID NO: 35071 - protein, 345 aa, Zea mays subsp. mays
  peptide (1)..(345): Ceres Seq. ID no. 13492803
  misc_feature (43)..(338): NCBI GI NO: 15218215 NR Description: coatomer protein complex, subunit beta 2
  misc_feature (43)..(338): NCBI GI NO: 9294445 NR Description: coatomer protein complex, beta prime
  misc_feature (43)..(338): NCBI GI NO: 30683862 NR Description: coatomer protein complex, subunit beta 2
  misc_feature (43)..(338): NCBI GI NO: 30683865 NR Description: coatomer protein complex, subunit beta 2
  misc_feature (43)..(338): NCBI GI NO: 12324597 NR Description: putative coatomer protein complex, subunit beta 2
  misc_feature (43)..(338): NCBI GI NO: 30699476 NR Description: coatomer protein complex, subunit beta 2
  misc_feature (30)..(342): NCBI GI NO: 3287963 NR Description: PROBABLE COATOMER BETA' SUBUNIT
  misc_feature (30)..(342): NCBI GI NO: 39586361 NR Description: Hypothetical protein CBG21666
  misc_feature (43)..(342): NCBI GI NO: 486784 NR Description: Golgi-associated particle 102K chain - human
  misc_feature (43)..(342): NCBI GI NO: 4758032 NR Description: coatomer protein complex, subunit beta 2
MNDTGPITEENGVAADHISDDHLAQGVVYVHTEIIGKVNSACTIDVHPTKPWMVITQANKFVHVWDYHTKVVEWTIQIKGAKVSSAKFIASQDWIVAGTTRGFLHVYDCESRKEIRRLCEHPKSITSLAVDDDALELVLSASIDGKILIWSYWHYYHARRRSTWHLEKTFDAGSQCLKQVAFIAPSVHRSSSTIIATARDGTVKIWDPDRSDGCREFTLAADSGQIVECFDWFSRGTDIYLVTGSRDNTAKIWDIEDGSCVRTLEGHADHVTVVCYHPDLSMLITGSRDGSIRLWNSTTFRFEHELNFDLGSLSSLACIKGSTRIAIGYERGLVLADICTQEHRA

SEQ ID NO: 35072 - protein, 293 aa, Zea mays subsp. mays
  peptide (1)..(293): Ceres Seq. ID no. 13492804
  misc_feature (1)..(286): NCBI GI NO: 15218215 NR Description: coatomer protein complex, subunit beta 2
  misc_feature (1)..(286): NCBI GI NO: 9294445 NR Description: coatomer protein complex, beta prime
  misc_feature (1)..(286): NCBI GI NO: 30683862 NR Description: coatomer protein complex, subunit beta 2
  misc_feature (1)..(286): NCBI GI NO: 30683865 NR Description: coatomer protein complex, subunit beta 2
  misc_feature (1)..(286): NCBI GI NO: 12324597 NR Description: putative coatomer protein complex, subunit beta 2
  misc_feature (1)..(286): NCBI GI NO: 30699476 NR Description: coatomer protein complex, subunit beta 2
  misc_feature (1)..(290): NCBI GI NO: 3287963 NR Description: PROBABLE COATOMER BETA' SUBUNIT
  misc_feature (1)..(290): NCBI GI NO: 39586361 NR Description: Hypothetical protein CBG21666
  misc_feature (1)..(290): NCBI GI NO: 486784 NR Description: Golgi-associated particle 102K chain - human
  misc_feature (1)..(290): NCBI GI NO: 27805865 NR Description: coatomer protein complex, subunit beta 2
MVITQANKFVHVWDYHTKVVEWTIQIKGAKVSSAKFIASQDWIVAGTTRGFLHVYDCESRKEIRRLCEHPKSITSLAVDDDALELVLSASIDGKILIWSYWHYYHARRRSTWHLEKTFDAGSQCLKQVAFIAPSVHRSSSTIIATARDGTVKIWDPDRSDGCREFTLAADSGQIVECFDWFSRGTDIYLVTGSRDNTAKIWDIEDGSCVRTLEGHADHVTVVCYHPDLSMLITGSRDGSIRLWNSTTFRFEHELNFDLGSLSSLACIKGSTRIAIGYERGLVLADICTQEHRA

SEQ ID NO: 35073 - DNA, 1097 bp, Zea mays subsp. mays; identical to SEQ ID NO: 25504
  misc_feature (1)..(1097): Ceres Seq. ID no. 13494437

SEQ ID NO: 35074 - protein, 225 aa, Zea mays subsp. mays; identical to SEQ ID NO: 25505
  peptide (1)..(225): Ceres Seq. ID no. 13494438
  misc_feature (70)..(141): Pfam Name: Pfam Description:  linker histone H1 and H5 family
  misc_feature (1)..(225): NCBI GI NO: 6006363 NR Description: ESTs AU078183
  misc_feature (26)..(220): NCBI GI NO: 7439658 NR Description: histone H1, stress-inducible - tomato
  misc_feature (27)..(220): NCBI GI NO: 23506611 NR Description: histone H1D [Nicotiana tabacum]
  misc_feature (22)..(220): NCBI GI NO: 7595978 NR Description: histone H1 variant [Lycopersicon chilense]
  misc_feature (21)..(220): NCBI GI NO: 27529850 NR Description: stress-inducible H1 histone-like protein
  misc_feature (27)..(220): NCBI GI NO: 729668 NR Description: Histone H1
  misc_feature (27)..(220): NCBI GI NO: 5726575 NR Description: histone H1C [Nicotiana tabacum]
  misc_feature (77)..(215): NCBI GI NO: 7489483 NR Description: histone H1 homolog - rice
  misc_feature (1)..(225): NCBI GI NO: 2623960 NR Description: histone H1 [Apium graveolens]
  misc_feature (15)..(225): NCBI GI NO: 13540391 NR Description: histone H1 [Pisum sativum]

SEQ ID NO: 35075 - protein, 149 aa, Zea mays subsp. mays; identical to SEQ ID NO: 25506
  peptide (1)..(149): Ceres Seq. ID no. 13494439
  misc_feature (1)..(65): Pfam Name: Pfam Description:  linker histone H1 and H5 family
  misc_feature (1)..(149): NCBI GI NO: 6006363 NR Description: ESTs AU078183
  misc_feature (1)..(144): NCBI GI NO: 7439658 NR Description: histone H1, stress-inducible - tomato
  misc_feature (1)..(144): NCBI GI NO: 23506611 NR Description: histone H1D [Nicotiana tabacum]
  misc_feature (1)..(144): NCBI GI NO: 7595978 NR Description: histone H1 variant [Lycopersicon chilense]
  misc_feature (1)..(144): NCBI GI NO: 27529850 NR Description: stress-inducible H1 histone-like protein
  misc_feature (1)..(144): NCBI GI NO: 729668 NR Description: Histone H1
  misc_feature (1)..(144): NCBI GI NO: 5726575 NR Description: histone H1C [Nicotiana tabacum]
  misc_feature (1)..(139): NCBI GI NO: 7489483 NR Description: histone H1 homolog - rice
  misc_feature (1)..(149): NCBI GI NO: 2623960 NR Description: histone H1 [Apium graveolens]
  misc_feature (1)..(149): NCBI GI NO: 13540391 NR Description: histone H1 [Pisum sativum]

SEQ ID NO: 35076 - protein, 125 aa, Zea mays subsp. mays; identical to SEQ ID NO: 25507
  peptide (1)..(125): Ceres Seq. ID no. 13494440
  misc_feature (1)..(125): NCBI GI NO: 6006363 NR Description: ESTs AU078183
  misc_feature (1)..(120): NCBI GI NO: 7439658 NR Description: histone H1, stress-inducible - tomato
  misc_feature (1)..(120): NCBI GI NO: 23506611 NR Description: histone H1D [Nicotiana tabacum]
  misc_feature (1)..(120): NCBI GI NO: 7595978 NR Description: histone H1 variant [Lycopersicon chilense]
  misc_feature (1)..(120): NCBI GI NO: 27529850 NR Description: stress-inducible H1 histone-like protein
  misc_feature (1)..(120): NCBI GI NO: 729668 NR Description: Histone H1
  misc_feature (1)..(120): NCBI GI NO: 5726575 NR Description: histone H1C [Nicotiana tabacum]
  misc_feature (1)..(115): NCBI GI NO: 7489483 NR Description: histone H1 homolog - rice
  misc_feature (1)..(125): NCBI GI NO: 2623960 NR Description: histone H1 [Apium graveolens]
  misc_feature (1)..(125): NCBI GI NO: 13540391 NR Description: histone H1 [Pisum sativum]

SEQ ID NO: 35077 - DNA, 2056 bp, Zea mays subsp. mays
  misc_feature (1)..(2056): Ceres Seq. ID no. 12367419
accctcccacactccaccacccgcgccgccgcctcctactccgccccggcccctctgatccggaccgagcgccggccatggcgctcgccttcgacgagttcgggcgccccttcattatcctgcgggagcaggagaagaagacgcgccttcgggggcttgacgcgcagaaggccaacatcgcctcggccaaggccgtcgcgcggatcctccgcacgtcgctgggacccaagggcatggacaagatgctccagtcccccgacggcgacgtcatcatcacaaatgatggagcgaccatcctggagcagatggatgttgacaaccagatagcaaagctgatggtggagctgtcccgtagtcaagactatgaaatcggggatggtaccaccggggtggtagtcatggcaggggctcttctcgagcaggctgagaagcttctggagcgtggtattcaccccattagggtggctgaaggctatgagatggcgtcaaaggtagcttttgaccacctagaacatatatccgaaaagtttgagttcagtgcagacaacattgaacccctggtccagacctgcatgacaactctatcctcaaagattgttaaccgttgcaagcgggcgttggcagagattgctgtcaaagcagtacttgcggttgcagatttggagaggaaggatgttaacttggatctaattaaagtagaaggcaaggttggtgggaagctggaggacactgaacttgtatatggaattattgttgacaaagatatgagccatccacaaatgccaaagagaattgaggatgctaagattgccatcttgacatgcccatttgagcctccgaagccaaagacaaagcataaggttgacattgacactgtcgagaaattccagacactgcgtgagcaagagcagaaatactttgatgaaatggttcagaagtgcaaggatgctggtgcaaccctggttatttgccagtggggttttgatgatgaagccaatcatttattgatgcatagaaatctgccagcagtgagatgggttggtggtgttgaattggaactgattgccattgctacaggagggcggattgttccgagattccaagagttgagtcctgaaaagcttggaaaggctggattagtcagagagaaatcattcggaacaacaaaggaccggatgctttacattgagaagtgtgccaattctagagctgtaaccattttcatccgtgggggaaacaaaatgatgattgaggagaccaagcgcagtcttcatgatgctctttgcgtagcaaggaatctgatccggaataactcgattgtgtacggtggcggctcagccgagatatcttgctcaattgctgttgaaactgctgcagatcggcacccgggagttgagcagtatgctatcaggtcattcgctgatgcattagatgctgttccactagcgttggccgaaaacagtggtttgtcaccaattgataccttaactgcggtaaaagctcaacaagtcaaggagagcaacccccactgtggcatagactgcaacgacgttggcaccaccgacatgaaagaacagaacgtcttcgagaccctgattggcaagcagcaacagatcttgcttgccacccaggtggtgaagatgatcctgaagatcgacgatgtcatctcaccgtccgagtactgacggaaagaaggaacggatggctatgctggatatgcgtaggcggcattgctgatgtgttttgattggtgtacctccttgtccaggcttgctgcctaccactcactccctgtgtgacgttttgctgaaattggtttgtactgtgcacgataatatctggaaatagactctagacagtccttagttatctttttattatataaaaaaagtcagcgccttctcgttagggttgagatgtttgcagtattgatgcttttgtagtgtttttatagctcagcttaagctgtcatttttgtttgatgatttgcaatagttggacgccctcatgaacaaaatgcaatggttcatcttttggttcacatggacaaaatgtc

SEQ ID NO: 35078 - protein, 560 aa, Zea mays subsp. mays
  peptide (1)..(560): Ceres Seq. ID no. 12367420
  misc_feature (65)..(559): Pfam Name: Pfam Description:  TCP-1/cpn60 chaperonin family
  misc_feature (26)..(560): NCBI GI NO: 1587206 NR Description: T complex protein
  misc_feature (26)..(560): NCBI GI NO: 730919 NR Description: T-COMPLEX PROTEIN 1, EPSILON SUBUNIT
  misc_feature (26)..(560): NCBI GI NO: 1729864 NR Description: T-COMPLEX PROTEIN 1, EPSILON SUBUNIT
  misc_feature (26)..(560): NCBI GI NO: 15221770 NR Description: T-complex chaperonin protein , epsilon subunit
  misc_feature (28)..(559): NCBI GI NO: 27924333 NR Description: Similar to chaperonin containing TCP1, subunit 5
  misc_feature (28)..(559): NCBI GI NO: 603955 NR Description: KIAA0098 protein [Homo sapiens]
  misc_feature (28)..(559): NCBI GI NO: 12804225 NR Description: Unknown (protein for IMAGE:3543711) [Homo sapiens]
  misc_feature (28)..(559): NCBI GI NO: 24307939 NR Description: chaperonin containing TCP1, subunit 5 (epsilon)
  misc_feature (28)..(559): NCBI GI NO: 6683670 NR Description: CCT
  misc_feature (28)..(559): NCBI GI NO: 6671702 NR Description: chaperonin subunit 5 (epsilon) [Mus musculus]
PPTLHHPRRRLLLRPGPSDPDRAPAMALAFDEFGRPFIILREQEKKTRLRGLDAQKANIASAKAVARILRTSLGPKGMDKMLQSPDGDVIITNDGATILEQMDVDNQIAKLMVELSRSQDYEIGDGTTGVVVMAGALLEQAEKLLERGIHPIRVAEGYEMASKVAFDHLEHISEKFEFSADNIEPLVQTCMTTLSSKIVNRCKRALAEIAVKAVLAVADLERKDVNLDLIKVEGKVGGKLEDTELVYGIIVDKDMSHPQMPKRIEDAKIAILTCPFEPPKPKTKHKVDIDTVEKFQTLREQEQKYFDEMVQKCKDAGATLVICQWGFDDEANHLLMHRNLPAVRWVGGVELELIAIATGGRIVPRFQELSPEKLGKAGLVREKSFGTTKDRMLYIEKCANSRAVTIFIRGGNKMMIEETKRSLHDALCVARNLIRNNSIVYGGGSAEISCSIAVETAADRHPGVEQYAIRSFADALDAVPLALAENSGLSPIDTLTAVKAQQVKESNPHCGIDCNDVGTTDMKEQNVFETLIGKQQQILLATQVVKMILKIDDVISPSEY

SEQ ID NO: 35079 - protein, 535 aa, Zea mays subsp. mays
  peptide (1)..(535): Ceres Seq. ID no. 12367421
  misc_feature (40)..(534): Pfam Name: Pfam Description:  TCP-1/cpn60 chaperonin family
  misc_feature (1)..(535): NCBI GI NO: 1587206 NR Description: T complex protein
  misc_feature (1)..(535): NCBI GI NO: 730919 NR Description: T-COMPLEX PROTEIN 1, EPSILON SUBUNIT
  misc_feature (1)..(535): NCBI GI NO: 1729864 NR Description: T-COMPLEX PROTEIN 1, EPSILON SUBUNIT
  misc_feature (1)..(535): NCBI GI NO: 15221770 NR Description: T-complex chaperonin protein , epsilon subunit
  misc_feature (3)..(534): NCBI GI NO: 27924333 NR Description: Similar to chaperonin containing TCP1, subunit 5
  misc_feature (3)..(534): NCBI GI NO: 603955 NR Description: KIAA0098 protein [Homo sapiens]
  misc_feature (3)..(534): NCBI GI NO: 12804225 NR Description: Unknown (protein for IMAGE:3543711) [Homo sapiens]
  misc_feature (3)..(534): NCBI GI NO: 24307939 NR Description: chaperonin containing TCP1, subunit 5 (epsilon)
  misc_feature (3)..(534): NCBI GI NO: 6683670 NR Description: CCT
  misc_feature (3)..(534): NCBI GI NO: 6671702 NR Description: chaperonin subunit 5 (epsilon) [Mus musculus]
MALAFDEFGRPFIILREQEKKTRLRGLDAQKANIASAKAVARILRTSLGPKGMDKMLQSPDGDVIITNDGATILEQMDVDNQIAKLMVELSRSQDYEIGDGTTGVVVMAGALLEQAEKLLERGIHPIRVAEGYEMASKVAFDHLEHISEKFEFSADNIEPLVQTCMTTLSSKIVNRCKRALAEIAVKAVLAVADLERKDVNLDLIKVEGKVGGKLEDTELVYGIIVDKDMSHPQMPKRIEDAKIAILTCPFEPPKPKTKHKVDIDTVEKFQTLREQEQKYFDEMVQKCKDAGATLVICQWGFDDEANHLLMHRNLPAVRWVGGVELELIAIATGGRIVPRFQELSPEKLGKAGLVREKSFGTTKDRMLYIEKCANSRAVTIFIRGGNKMMIEETKRSLHDALCVARNLIRNNSIVYGGGSAEISCSIAVETAADRHPGVEQYAIRSFADALDAVPLALAENSGLSPIDTLTAVKAQQVKESNPHCGIDCNDVGTTDMKEQNVFETLIGKQQQILLATQVVKMILKIDDVISPSEY

SEQ ID NO: 35080 - protein, 483 aa, Zea mays subsp. mays
  peptide (1)..(483): Ceres Seq. ID no. 12367422
  misc_feature (1)..(482): Pfam Name: Pfam Description:  TCP-1/cpn60 chaperonin family
  misc_feature (1)..(483): NCBI GI NO: 1587206 NR Description: T complex protein
  misc_feature (1)..(483): NCBI GI NO: 730919 NR Description: T-COMPLEX PROTEIN 1, EPSILON SUBUNIT
  misc_feature (1)..(483): NCBI GI NO: 1729864 NR Description: T-COMPLEX PROTEIN 1, EPSILON SUBUNIT
  misc_feature (1)..(483): NCBI GI NO: 15221770 NR Description: T-complex chaperonin protein , epsilon subunit
  misc_feature (1)..(482): NCBI GI NO: 27924333 NR Description: Similar to chaperonin containing TCP1, subunit 5
  misc_feature (1)..(482): NCBI GI NO: 603955 NR Description: KIAA0098 protein [Homo sapiens]
  misc_feature (1)..(482): NCBI GI NO: 24307939 NR Description: chaperonin containing TCP1, subunit 5 (epsilon)
  misc_feature (1)..(482): NCBI GI NO: 12804225 NR Description: Unknown (protein for IMAGE:3543711) [Homo sapiens]
  misc_feature (1)..(482): NCBI GI NO: 6683670 NR Description: CCT
  misc_feature (1)..(482): NCBI GI NO: 6671702 NR Description: chaperonin subunit 5 (epsilon) [Mus musculus]
MDKMLQSPDGDVIITNDGATILEQMDVDNQIAKLMVELSRSQDYEIGDGTTGVVVMAGALLEQAEKLLERGIHPIRVAEGYEMASKVAFDHLEHISEKFEFSADNIEPLVQTCMTTLSSKIVNRCKRALAEIAVKAVLAVADLERKDVNLDLIKVEGKVGGKLEDTELVYGIIVDKDMSHPQMPKRIEDAKIAILTCPFEPPKPKTKHKVDIDTVEKFQTLREQEQKYFDEMVQKCKDAGATLVICQWGFDDEANHLLMHRNLPAVRWVGGVELELIAIATGGRIVPRFQELSPEKLGKAGLVREKSFGTTKDRMLYIEKCANSRAVTIFIRGGNKMMIEETKRSLHDALCVARNLIRNNSIVYGGGSAEISCSIAVETAADRHPGVEQYAIRSFADALDAVPLALAENSGLSPIDTLTAVKAQQVKESNPHCGIDCNDVGTTDMKEQNVFETLIGKQQQILLATQVVKMILKIDDVISPSEY

SEQ ID NO: 35081 - DNA, 1439 bp, Zea mays subsp. mays
  misc_feature (1)..(1439): Ceres Seq. ID no. 12355841
agttccacggttccacccccgccggccacactcgtctctctcacgagccacagcccacaggctagctctctagccagtccagtccacgcagcgcagggatggcgtcgttcgccgtggcaacggccccgtcgctagcggccccggcagccaagaggaggcccgccgccggcgtcacgtacgtggagtgcatgaaagcctacagcggcctcaaggggctcaacaaggtgaccatgctcggggtgcgcaagaccgccgactactccttcgccaaggtcgtggcatcgctcagcctcgcgggcaggaagcggcgcggaggagcgttcggcgcccagatgaggttttacgcttacacagtggtgacggttgcaccacgtgagcgagcgcagcgaagccaacacaactgccggcggacaagtgtccccatagacgagatccatggcggagcgccggaagagcgtctcctccgtgctgtttgcttcggcgcgcgccgggaggggataatggcagcagtgagctcggtctctattctgcccctcgcgtcgctgaggcctcttccgttgaggcgtgctgctaggaatgtgttggagggaggagggagaagggcttcgagtcccctgctcctcgcgaggtatgggctgtggcgcggacgcccggctgctgctgtgggcggcgaagcagagttggccctcgaagatgcggatgccgcgatgagggtggccgccgacgacgacagcatcacggccacggtggtgtccgtgctgctcacacttgcgttcgtcggcctctccatcctcaccctcggggtgatctacctgtcggtgcaggacttcttgcagaagagggaaaaggagaagtttgagaaggaggaggccgaaaagcagaaagaggaggcgaggaagaagagggctaagtcgaggcagaagagaagaaattattgatctcaggatgaactacccccaccaatatgctgtaacactgaactccattgccggctccattgcccggggttgtgctcacgccatcagttttggagtctcttggatgctgtaacactgaactccattgccggctccattgcccggggttgtgctcacgccatcagttttggagtccggaggagggaggaaaagcagggtagccagaatctctattggcgtcgcctgtttcattgtgttcatgatgatcctttcagtaataggcctttttaggaagtaaaggaaacgtttgtgctctggtttctgcaagaggtttgcacataaacaattttttattgctgtctaggctccaacctttggttgataaacactcacaataagtaacgaaggaataagaataaatgatgagagatataagaatatgaaaatgaataaatgatgtgacaggttgttgtagagcagcatgatctaagtgaatgcataactctactcttatattatatc

SEQ ID NO: 35082 - protein, 279 aa, Zea mays subsp. mays
  peptide (1)..(279): Ceres Seq. ID no. 12355842
  misc_feature (1)..(78): NCBI GI NO: 31415934 NR Description: unknown protein
  misc_feature (140)..(236): NCBI GI NO: 34902104 NR Description: hypothetical protein
  misc_feature (221)..(279): NCBI GI NO: 34902104 NR Description: hypothetical protein
  misc_feature (180)..(279): NCBI GI NO: 15227050 NR Description: unknown protein; protein id: At2g29180.1
MASFAVATAPSLAAPAAKRRPAAGVTYVECMKAYSGLKGLNKVTMLGVRKTADYSFAKVVASLSLAGRKRRGGAFGAQMRFYAYTVVTVAPRERAQRSQHNCRRTSVPIDEIHGGAPEERLLRAVCFGARREGIMAAVSSVSILPLASLRPLPLRRAARNVLEGGGRRASSPLLLARYGLWRGRPAAAVGGEAELALEDADAAMRVAADDDSITATVVSVLLTLAFVGLSILTLGVIYLSVQDFLQKREKEKFEKEEAEKQKEEARKKRAKSRQKRRNY

SEQ ID NO: 35083 - protein, 249 aa, Zea mays subsp. mays
  peptide (1)..(249): Ceres Seq. ID no. 12355843
  misc_feature (1)..(48): NCBI GI NO: 31415934 NR Description: unknown protein
  misc_feature (110)..(206): NCBI GI NO: 34902104 NR Description: hypothetical protein
  misc_feature (191)..(249): NCBI GI NO: 34902104 NR Description: hypothetical protein
  misc_feature (150)..(249): NCBI GI NO: 15227050 NR Description: unknown protein; protein id: At2g29180.1
MKAYSGLKGLNKVTMLGVRKTADYSFAKVVASLSLAGRKRRGGAFGAQMRFYAYTVVTVAPRERAQRSQHNCRRTSVPIDEIHGGAPEERLLRAVCFGARREGIMAAVSSVSILPLASLRPLPLRRAARNVLEGGGRRASSPLLLARYGLWRGRPAAAVGGEAELALEDADAAMRVAADDDSITATVVSVLLTLAFVGLSILTLGVIYLSVQDFLQKREKEKFEKEEAEKQKEEARKKRAKSRQKRRNY

SEQ ID NO: 35084 - protein, 235 aa, Zea mays subsp. mays
  peptide (1)..(235): Ceres Seq. ID no. 12355844
  misc_feature (1)..(34): NCBI GI NO: 31415934 NR Description: unknown protein
  misc_feature (96)..(192): NCBI GI NO: 34902104 NR Description: hypothetical protein
  misc_feature (177)..(235): NCBI GI NO: 34902104 NR Description: hypothetical protein
  misc_feature (136)..(235): NCBI GI NO: 15227050 NR Description: unknown protein; protein id: At2g29180.1
MLGVRKTADYSFAKVVASLSLAGRKRRGGAFGAQMRFYAYTVVTVAPRERAQRSQHNCRRTSVPIDEIHGGAPEERLLRAVCFGARREGIMAAVSSVSILPLASLRPLPLRRAARNVLEGGGRRASSPLLLARYGLWRGRPAAAVGGEAELALEDADAAMRVAADDDSITATVVSVLLTLAFVGLSILTLGVIYLSVQDFLQKREKEKFEKEEAEKQKEEARKKRAKSRQKRRNY

SEQ ID NO: 35085 - DNA, 1472 bp, Zea mays subsp. mays
  misc_feature (1)..(1472): Ceres Seq. ID no. 12554648
aggatgaatcggaagagagaatcctaccaaacctagctaccaactcgatcgtcgtcatcacgctcgaccgcacaactgcaccgaggggggaggagacctaaaaactactacatcttttagctacacatctagctaaagatcgagaggggtaaataaggacgagcgggcgcgagctagaagagcagctgcaggtactaccatcatcgtcgtcgtcgtcgccaggatgaccgttgtcgacgccgtctcctccaccgatgccggcgccgccgccgccacggtaccggcggggaacgggcagaccgtgtgcgtcaccggcgcggccgggtacatcgcctcgtggttagtgaagctgctgctcgagaagggatacactgtgaagggcaccgtgaggaacccagatgacccgaagaacgcgcacctcaaggcgctggacggcgccgccgagcggctgatcctctgcaaggccgatctgctggactacgacgccatctgccgcgccgtgcagggctgccagggcgtcttccacaccgcctcccccgtcaccgacgacccggagcaaatggtggagccggcggtgcgcggcaccgagtacgtgatcaacgcggcggcggaggccggcacggtgcggcgggtggtgttcacgtcgtccatcggcgccgtgaccatggaccccaagcgcgggcccgacgtcgtggtcgacgagtcgtgctggagcgacctcgagttctgcgagaaaaccaggaactggtactgctacggcaaggcggtggcggagcaggcggcgtgggagacggcccggcggcggggcgtggacctggtggtggtgaaccccgtgctggtggtgggccccctgctgcaggcgacggtgaacgccagcatcgcgcacatcctcaagtacctggacggctcggcccgcaccttcgccaacgccgtgcaggcgtacgtggacgtgcgcgacgtggccgacgcgcacctccgcgtcttcgagagcccccgcgcgtccggccgccacctctgcgccgagcgcgtcctccaccgcgaggacgtcgtccgcatcctcgccaagctattccccgagtaccccgtcccagccaggtgctccgacgaggtgaatccgcgaaagcagccgtacaagttctccaaccagaagctccgggacctggggctgcagttccggccggtcagccagtcgctttacgacacggtgaagaacctccaggagaagggacacctgccggtgctcggagagcggacgacgacggaggccgccgacaaggatgcccccacggccgagatgcagcagggagggatcgccatccgtgcctgagagggcgatgccacacatgaacacaaagcaatgttcatactgctgccctgcacctgcaccttcccctgctgtgtaaacaggcctgtgtttgttctggctgatagtgatgtaccctaagacttgtaacgtcatgttcgttcttgtg

SEQ ID NO: 35086 - protein, 367 aa, Zea mays subsp. mays
  peptide (1)..(367): Ceres Seq. ID no. 12554649
  misc_feature (27)..(255): Pfam Name: Pfam Description:  NAD dependent epimerase/dehydratase family
  misc_feature (1)..(367): NCBI GI NO: 7431410 NR Description: cinnamoyl CoA reductase - maize
  misc_feature (1)..(367): NCBI GI NO: 3242328 NR Description: cinnamoyl-CoA reductase [Zea mays]
  misc_feature (1)..(367): NCBI GI NO: 3341511 NR Description: cinnamoyl-CoA reductase [Saccharum officinarum]
  misc_feature (1)..(367): NCBI GI NO: 17978549 NR Description: cinnamoyl-CoA reductase [Lolium perenne]
  misc_feature (1)..(356): NCBI GI NO: 25140432 NR Description: cinnamoyl CoA reductase [Hordeum vulgare]
  misc_feature (10)..(339): NCBI GI NO: 9964087 NR Description: cinnamoyl CoA reductase [Lolium perenne]
  misc_feature (21)..(339): NCBI GI NO: 9998901 NR Description: cinnamoyl-CoA reductase
  misc_feature (21)..(339): NCBI GI NO: 2960364 NR Description: cinnamoyl CoA reductase
  misc_feature (22)..(339): NCBI GI NO: 7431407 NR Description: cinnamoyl-CoA reductase (EC 1
  misc_feature (21)..(339): NCBI GI NO: 7239228 NR Description: cinnamoyl CoA reductase; CCR [Populus tremuloides]
MTVVDAVSSTDAGAAAATVPAGNGQTVCVTGAAGYIASWLVKLLLEKGYTVKGTVRNPDDPKNAHLKALDGAAERLILCKADLLDYDAICRAVQGCQGVFHTASPVTDDPEQMVEPAVRGTEYVINAAAEAGTVRRVVFTSSIGAVTMDPKRGPDVVVDESCWSDLEFCEKTRNWYCYGKAVAEQAAWETARRRGVDLVVVNPVLVVGPLLQATVNASIAHILKYLDGSARTFANAVQAYVDVRDVADAHLRVFESPRASGRHLCAERVLHREDVVRILAKLFPEYPVPARCSDEVNPRKQPYKFSNQKLRDLGLQFRPVSQSLYDTVKNLQEKGHLPVLGERTTTEAADKDAPTAEMQQGGIAIRA

SEQ ID NO: 35087 - protein, 255 aa, Zea mays subsp. mays
  peptide (1)..(255): Ceres Seq. ID no. 12554650
  misc_feature (1)..(143): Pfam Name: Pfam Description:  NAD dependent epimerase/dehydratase family
  misc_feature (1)..(255): NCBI GI NO: 7431410 NR Description: cinnamoyl CoA reductase - maize
  misc_feature (1)..(255): NCBI GI NO: 3242328 NR Description: cinnamoyl-CoA reductase [Zea mays]
  misc_feature (1)..(255): NCBI GI NO: 3341511 NR Description: cinnamoyl-CoA reductase [Saccharum officinarum]
  misc_feature (1)..(255): NCBI GI NO: 17978549 NR Description: cinnamoyl-CoA reductase [Lolium perenne]
  misc_feature (1)..(244): NCBI GI NO: 25140432 NR Description: cinnamoyl CoA reductase [Hordeum vulgare]
  misc_feature (1)..(227): NCBI GI NO: 9964087 NR Description: cinnamoyl CoA reductase [Lolium perenne]
  misc_feature (1)..(227): NCBI GI NO: 9998901 NR Description: cinnamoyl-CoA reductase
  misc_feature (1)..(227): NCBI GI NO: 2960364 NR Description: cinnamoyl CoA reductase
  misc_feature (1)..(227): NCBI GI NO: 7431407 NR Description: cinnamoyl-CoA reductase (EC 1
  misc_feature (1)..(227): NCBI GI NO: 7239228 NR Description: cinnamoyl CoA reductase; CCR [Populus tremuloides]
MVEPAVRGTEYVINAAAEAGTVRRVVFTSSIGAVTMDPKRGPDVVVDESCWSDLEFCEKTRNWYCYGKAVAEQAAWETARRRGVDLVVVNPVLVVGPLLQATVNASIAHILKYLDGSARTFANAVQAYVDVRDVADAHLRVFESPRASGRHLCAERVLHREDVVRILAKLFPEYPVPARCSDEVNPRKQPYKFSNQKLRDLGLQFRPVSQSLYDTVKNLQEKGHLPVLGERTTTEAADKDAPTAEMQQGGIAIRA

SEQ ID NO: 35088 - protein, 220 aa, Zea mays subsp. mays
  peptide (1)..(220): Ceres Seq. ID no. 12554651
  misc_feature (1)..(108): Pfam Name: Pfam Description:  NAD dependent epimerase/dehydratase family
  misc_feature (1)..(220): NCBI GI NO: 7431410 NR Description: cinnamoyl CoA reductase - maize
  misc_feature (1)..(220): NCBI GI NO: 3242328 NR Description: cinnamoyl-CoA reductase [Zea mays]
  misc_feature (1)..(220): NCBI GI NO: 3341511 NR Description: cinnamoyl-CoA reductase [Saccharum officinarum]
  misc_feature (1)..(220): NCBI GI NO: 17978549 NR Description: cinnamoyl-CoA reductase [Lolium perenne]
  misc_feature (1)..(209): NCBI GI NO: 25140432 NR Description: cinnamoyl CoA reductase [Hordeum vulgare]
  misc_feature (1)..(192): NCBI GI NO: 9964087 NR Description: cinnamoyl CoA reductase [Lolium perenne]
  misc_feature (1)..(192): NCBI GI NO: 9998901 NR Description: cinnamoyl-CoA reductase
  misc_feature (1)..(192): NCBI GI NO: 2960364 NR Description: cinnamoyl CoA reductase
  misc_feature (1)..(192): NCBI GI NO: 7431407 NR Description: cinnamoyl-CoA reductase (EC 1
  misc_feature (1)..(192): NCBI GI NO: 7239228 NR Description: cinnamoyl CoA reductase; CCR [Populus tremuloides]
MDPKRGPDVVVDESCWSDLEFCEKTRNWYCYGKAVAEQAAWETARRRGVDLVVVNPVLVVGPLLQATVNASIAHILKYLDGSARTFANAVQAYVDVRDVADAHLRVFESPRASGRHLCAERVLHREDVVRILAKLFPEYPVPARCSDEVNPRKQPYKFSNQKLRDLGLQFRPVSQSLYDTVKNLQEKGHLPVLGERTTTEAADKDAPTAEMQQGGIAIRA

SEQ ID NO: 35089 - DNA, 1411 bp, Zea mays subsp. mays
  misc_feature (1)..(1411): Ceres Seq. ID no. 12411284
agacgctccagaatccaaatacctttccatcgattcttggcatcgcccttctctctaaaccccaactcctcgactcgagcaatccctaggtctccgcgcgaggcggtggcggctgtgaggggattttgattgatttggctcgagatggcggaggacaaggtgcggcggatcttcgtcggcgggttgtcctggaagaccacggagcgcacgctcgagcgcaccttcggtcagtacggcaaggtcatcgaggcacaggttgtagtgaaaaaggaaacaggccgctcgaggggatttggatttgtcacattctcagaacctcgggctgtggatgctgccatttgtggaatgcataatgcggaactggatggccgtaatattactgtgaacaaagctaaacctaggattgctgactatggctatggtggtggtggtggtggttactcgtctggtgctagaggtggatatcgtagtggcggtgatgtagttccagcagtgagtgatgaatgtttcaaatgcggcctttctggacattgggctcgtcaatgcccttattcagatggcagtggtagaactggaagatattctcccgcttcaaggtatggtggtggcactgggagacatggtgaccgctttggaggatcagatcgttttgctcgctatgatgatgaccgatatgatggtggccgctatgtagacagcagggatacttattatggtgctgggcgagatcgttatgctaacgatcgccatccgccagcaacagacctctattctggtgacaggtacagtggtgcagatcgttacgcgtccagtggctttgccgggcgagatcgttatgctaacgatcgccatccgccagcaacagaccgctattctggtgacaggtacagtggtgcacgtcgttccgcgtccagtggctttgccagagaaaggagctatgagagagatggaggcaggtccactggaacttactaccgtgatgttccgaggggcactggtggctatggcagaggtggttcacgtggcggtagcggcggcggcggcgggcctgctcgctttggtgggagttaccgagataggcctgctccgtatgaccgtcctagcaggggcggggcagctcgtgcttatgatgatcgttactgaagaatgtttccttgaagtagaacagagatgttggtgtattttagttttgcatcagtatttgcacttgccagcttgatccttcaattctatgctattcagcagcgcagtttgttttagtggtctctgaagacaatggttcagtatgtcagttactatcagtatgttggtaccataatctgtaggcagtgatcctggtccatttgacatgtttgtgtaattgcttggagtctgcactaaataatgaactaatcgcagcatgtgatctttg

SEQ ID NO: 35090 - protein, 332 aa, Zea mays subsp. mays
  peptide (1)..(332): Ceres Seq. ID no. 12411285
  misc_feature (10)..(80): Pfam Name: a.k.a. RRM, RBD, or RNP domain Pfam Description: RNA recognition motif.
  misc_feature (1)..(312): NCBI GI NO: 33146923 NR Description: glycine-rich RNA-binding protein-like
  misc_feature (1)..(301): NCBI GI NO: 15237666 NR Description: glycine-rich RNA-binding protein
  misc_feature (141)..(332): NCBI GI NO: 33146923 NR Description: glycine-rich RNA-binding protein-like
  misc_feature (8)..(278): NCBI GI NO: 18406831 NR Description: glycine-rich RNA-binding protein
  misc_feature (1)..(204): NCBI GI NO: 40714682 NR Description: putative RNA binding protein
  misc_feature (1)..(245): NCBI GI NO: 15231557 NR Description: glycine-rich RNA-binding protein
  misc_feature (8)..(177): NCBI GI NO: 12659074 NR Description: RNA-binding protein [Triticum aestivum]
  misc_feature (8)..(175): NCBI GI NO: 20152613 NR Description: putative glycine rich protein [Rumex obtusifolius]
  misc_feature (1)..(166): NCBI GI NO: 15226605 NR Description: glycine-rich RNA binding protein AtGRP7
  misc_feature (1)..(216): NCBI GI NO: 2129944 NR Description: RNA-binding protein RZ-1 - wood tobacco
MAEDKVRRIFVGGLSWKTTERTLERTFGQYGKVIEAQVVVKKETGRSRGFGFVTFSEPRAVDAAICGMHNAELDGRNITVNKAKPRIADYGYGGGGGGYSSGARGGYRSGGDVVPAVSDECFKCGLSGHWARQCPYSDGSGRTGRYSPASRYGGGTGRHGDRFGGSDRFARYDDDRYDGGRYVDSRDTYYGAGRDRYANDRHPPATDLYSGDRYSGADRYASSGFAGRDRYANDRHPPATDRYSGDRYSGARRSASSGFARERSYERDGGRSTGTYYRDVPRGTGGYGRGGSRGGSGGGGGPARFGGSYRDRPAPYDRPSRGGAARAYDDRY

SEQ ID NO: 35091 - protein, 265 aa, Zea mays subsp. mays
  peptide (1)..(265): Ceres Seq. ID no. 12411286
  misc_feature (137)..(228): Pfam Name: Pfam Description:  Dehydrin
  misc_feature (1)..(245): NCBI GI NO: 33146923 NR Description: glycine-rich RNA-binding protein-like
  misc_feature (1)..(234): NCBI GI NO: 15237666 NR Description: glycine-rich RNA-binding protein
  misc_feature (74)..(265): NCBI GI NO: 33146923 NR Description: glycine-rich RNA-binding protein-like
  misc_feature (1)..(211): NCBI GI NO: 18406831 NR Description: glycine-rich RNA-binding protein
  misc_feature (1)..(137): NCBI GI NO: 40714682 NR Description: putative RNA binding protein
  misc_feature (1)..(178): NCBI GI NO: 15231557 NR Description: glycine-rich RNA-binding protein
  misc_feature (1)..(110): NCBI GI NO: 12659074 NR Description: RNA-binding protein [Triticum aestivum]
  misc_feature (1)..(108): NCBI GI NO: 20152613 NR Description: putative glycine rich protein [Rumex obtusifolius]
  misc_feature (1)..(99): NCBI GI NO: 15226605 NR Description: glycine-rich RNA binding protein AtGRP7
  misc_feature (1)..(149): NCBI GI NO: 2129944 NR Description: RNA-binding protein RZ-1 - wood tobacco
MHNAELDGRNITVNKAKPRIADYGYGGGGGGYSSGARGGYRSGGDVVPAVSDECFKCGLSGHWARQCPYSDGSGRTGRYSPASRYGGGTGRHGDRFGGSDRFARYDDDRYDGGRYVDSRDTYYGAGRDRYANDRHPPATDLYSGDRYSGADRYASSGFAGRDRYANDRHPPATDRYSGDRYSGARRSASSGFARERSYERDGGRSTGTYYRDVPRGTGGYGRGGSRGGSGGGGGPARFGGSYRDRPAPYDRPSRGGAARAYDDRY

SEQ ID NO: 35092 - protein, 168 aa, Zea mays subsp. mays
  peptide (1)..(168): Ceres Seq. ID no. 12411287
MVLGEIVMLTIAIRQQQTSILVTGTVVQIVTRPVALPGEIVMLTIAIRQQQTAILVTGTVVHVVPRPVALPEKGAMREMEAGPLELTTVMFRGALVAMAEVVHVAVAAAAAGLLALVGVTEIGLLRMTVLAGAGQLVLMMIVTEECFLEVEQRCWCILVLHQYLHLPA

SEQ ID NO: 35093 - DNA, 1274 bp, Zea mays subsp. mays
  misc_feature (1)..(1274): Ceres Seq. ID no. 12411280
acgccttaaaaacgagatccctggggtcaccactggtcaactgcgtcactgcgccgaatcactagaaaccccaacaaacggaatttcacacatccagcgagcaataccgcaccgcaggtaagatcaaagaggaggcgatggctggcggcgggcaggcggcgatttcgttcatgacgcggatggcgaaggtggcggcggggttgggcgtggcggcgtccgcagcctccacgtccttctacacggtggacggcggagagcgcgccgtcatcttcgatcgcgtccgcggcgtgctcccgcgtacgatgtcagagggcacccatttgctggtccccatccttcagaagcccttcattttcgacatccgcactcgccctcacagcttctcctccacctccggcaccaaggacctccagatggtcagcctcacgctccgcgttctgtcgcgacccgacgtcgaacacctcccggacatcttcacctccctcggcctcgagtacgacgagaaggtcctcccatccatcggcaacgaggtgctcaaggccgtcgtcgcgcagttcaacgccgaccagctcctcaccgagcgtccccacgtctccgcgctcgtccgcgaatcgctcaccaagcgcgcccgcgagttcaacatcgtcctcgacgacgtcgccatcacccacctagcctacgggcaggagttcgcgcaggccgtcgagaagaagcaggttgcgcagcaggaggccgagcgctccaggttcctcgtcgcgcgcgctgagcaggagaggcgcgctgctatcgtccgcgccgagggggagagcgagtccgcgcgccttatctccgaggccacgaccactgcgggcaacggcctgatcgagctcaggaggatcgaggcggccaaggagatcgcaagcgttctgtcgcgcacgcccaacgtctcctacatccccgccggcgacaatggccagatgctgctcgggcttaacgccgcccggtgaatggatcgtctttttccgcgcttcagaatgtcaggacgagatgaaactgttcttggtggggaggagggaaagtttgtttctgtagagcttctagaagtgttgctaagagtctgttttttattaatgaaatggctgggaagtctgtttgtgctcaatagagtgtttcttctgtgaaataaaactggtctatgagatggtgtggcgagctctttgctttgctttgctctctgcaattcagttgtatcccatacatgctgtctttatctctgaaataaaacttttcgagcg

SEQ ID NO: 35094 - protein, 282 aa, Zea mays subsp. mays
  peptide (1)..(282): Ceres Seq. ID no. 12411281
  misc_feature (1)..(282): NCBI GI NO: 7716460 NR Description: prohibitin [Zea mays]
  misc_feature (4)..(280): NCBI GI NO: 7716458 NR Description: prohibitin [Zea mays]
  misc_feature (4)..(281): NCBI GI NO: 38567717 NR Description: B1358B12.15
  misc_feature (3)..(282): NCBI GI NO: 7489185 NR Description: prohibitin - common tobacco
  misc_feature (3)..(279): NCBI GI NO: 15237488 NR Description: prohibitin (gb|AAC49691
  misc_feature (3)..(282): NCBI GI NO: 21592895 NR Description: prohibitin, putative [Arabidopsis thaliana]
  misc_feature (3)..(282): NCBI GI NO: 15232129 NR Description: prohibitin, putative; protein id: At3g27280
  misc_feature (3)..(282): NCBI GI NO: 27765032 NR Description: At3g27280 [Arabidopsis thaliana]
  misc_feature (8)..(280): NCBI GI NO: 40746306 NR Description: conserved hypothetical protein
  misc_feature (9)..(282): NCBI GI NO: 32421789 NR Description: hypothetical protein [Neurospora crassa]
MAGGGQAAISFMTRMAKVAAGLGVAASAASTSFYTVDGGERAVIFDRVRGVLPRTMSEGTHLLVPILQKPFIFDIRTRPHSFSSTSGTKDLQMVSLTLRVLSRPDVEHLPDIFTSLGLEYDEKVLPSIGNEVLKAVVAQFNADQLLTERPHVSALVRESLTKRAREFNIVLDDVAITHLAYGQEFAQAVEKKQVAQQEAERSRFLVARAEQERRAAIVRAEGESESARLISEATTTAGNGLIELRRIEAAKEIASVLSRTPNVSYIPAGDNGQMLLGLNAAR

SEQ ID NO: 35095 - protein, 271 aa, Zea mays subsp. mays
  peptide (1)..(271): Ceres Seq. ID no. 12411282
  misc_feature (1)..(271): NCBI GI NO: 7716460 NR Description: prohibitin [Zea mays]
  misc_feature (1)..(269): NCBI GI NO: 7716458 NR Description: prohibitin [Zea mays]
  misc_feature (1)..(270): NCBI GI NO: 38567717 NR Description: B1358B12.15
  misc_feature (1)..(271): NCBI GI NO: 7489185 NR Description: prohibitin - common tobacco
  misc_feature (1)..(268): NCBI GI NO: 15237488 NR Description: prohibitin (gb|AAC49691
  misc_feature (1)..(271): NCBI GI NO: 21592895 NR Description: prohibitin, putative [Arabidopsis thaliana]
  misc_feature (1)..(271): NCBI GI NO: 15232129 NR Description: prohibitin, putative; protein id: At3g27280
  misc_feature (1)..(271): NCBI GI NO: 27765032 NR Description: At3g27280 [Arabidopsis thaliana]
  misc_feature (1)..(269): NCBI GI NO: 40746306 NR Description: conserved hypothetical protein
  misc_feature (1)..(271): NCBI GI NO: 32421789 NR Description: hypothetical protein [Neurospora crassa]
MTRMAKVAAGLGVAASAASTSFYTVDGGERAVIFDRVRGVLPRTMSEGTHLLVPILQKPFIFDIRTRPHSFSSTSGTKDLQMVSLTLRVLSRPDVEHLPDIFTSLGLEYDEKVLPSIGNEVLKAVVAQFNADQLLTERPHVSALVRESLTKRAREFNIVLDDVAITHLAYGQEFAQAVEKKQVAQQEAERSRFLVARAEQERRAAIVRAEGESESARLISEATTTAGNGLIELRRIEAAKEIASVLSRTPNVSYIPAGDNGQMLLGLNAAR

SEQ ID NO: 35096 - protein, 268 aa, Zea mays subsp. mays
  peptide (1)..(268): Ceres Seq. ID no. 12411283
  misc_feature (1)..(268): NCBI GI NO: 7716460 NR Description: prohibitin [Zea mays]
  misc_feature (1)..(266): NCBI GI NO: 7716458 NR Description: prohibitin [Zea mays]
  misc_feature (1)..(267): NCBI GI NO: 38567717 NR Description: B1358B12.15
  misc_feature (1)..(268): NCBI GI NO: 7489185 NR Description: prohibitin - common tobacco
  misc_feature (1)..(265): NCBI GI NO: 15237488 NR Description: prohibitin (gb|AAC49691
  misc_feature (1)..(268): NCBI GI NO: 21592895 NR Description: prohibitin, putative [Arabidopsis thaliana]
  misc_feature (1)..(268): NCBI GI NO: 15232129 NR Description: prohibitin, putative; protein id: At3g27280
  misc_feature (1)..(268): NCBI GI NO: 27765032 NR Description: At3g27280 [Arabidopsis thaliana]
  misc_feature (1)..(266): NCBI GI NO: 40746306 NR Description: conserved hypothetical protein
  misc_feature (1)..(268): NCBI GI NO: 32421789 NR Description: hypothetical protein [Neurospora crassa]
MAKVAAGLGVAASAASTSFYTVDGGERAVIFDRVRGVLPRTMSEGTHLLVPILQKPFIFDIRTRPHSFSSTSGTKDLQMVSLTLRVLSRPDVEHLPDIFTSLGLEYDEKVLPSIGNEVLKAVVAQFNADQLLTERPHVSALVRESLTKRAREFNIVLDDVAITHLAYGQEFAQAVEKKQVAQQEAERSRFLVARAEQERRAAIVRAEGESESARLISEATTTAGNGLIELRRIEAAKEIASVLSRTPNVSYIPAGDNGQMLLGLNAAR

SEQ ID NO: 35097 - DNA, 1558 bp, Zea mays subsp. mays
  misc_feature (1)..(1558): Ceres Seq. ID no. 12405255
aaccaaagccgccaccgttgccgtagccgtgttcttggactctgttacgtgctgccattttgccaaggctagccccctcctcctcttcttcctcttcttcttttcgcgacgatcagagaagaagatgacgatcaccattgaacagccccagctcgatgcggtggcggagaggaaagtccccggcggaggcgaccccgcggagctggtgctcgacgccggcttcgtcgtgccggacgccaacgccttcggcaataccttcaggaactacgacgcggagtcggagcggaagcagacggtagaggagttctaccgggtgaaccacgtgaggcagacgcacgagttcgtggcgcggatgcgggcggagtacgggcggctggacaagacggagatgggcatctgggagtgcatcgagctgctgaacgagttcatcgacgacagcgacccggacctggacatgccccagatcgagcacctgctgcagaccgccgaggccatccgcaaggactaccccgacgaggactggctccacctcaccggactcatccacgacctgggcaaggtgctgctgcacccaagcttcggggagctccctcagtgggctgtcgtcggtgacaccttccccgtcggctgcgcatacgacgagtgcaacgtccacttcaagtacttcaaggagaaccccgactaccacaacccgaagctcaacaccaagttgggggtctactcggagggctgcggcctcgacaaggtgctcatgtcatggggccacgacgactacatgtacctggtggccaaggagaacaagtgcacccttccttccgcggggctgttcatcatcagataccactcgttctacccactgcacaagcatggagcctacacgcacctgatggacgatgaggacaaggagaacctcaagtggctgcatgtgttcaacaagtatgacctgtacagcaagagcaacagcaggatcgacgtggaggaggtgaagccctactacatgtccctaatcgacaagtacttcccggccaagctaagatggtgagaaggggcggcctggcctggacctggatgatagatggaaccccaaggccccaccaagagctgtcgttccaagtgtccatgtaccatatacatatctctactactctataagactctattgtagaccatccgtgcaccgcggttctgccactctctgttccgcccaccaccggtcgtatgacaggtgggtcccatgtgtcagtccatcacgcttccgtccgaccgtcatccagatttccgtgatacagccgtctccacgacgagattggcgacgtcctccctgcgcccgcagcccccccccccccccggctgccgcacgcatgcccctgcttcactcacgcccggctcctccctcttcgctcgactccccacacggtcgtcggtcgtcgctcctccttgagtagaactagtatatagactacgaatacagtatgtgtgccatgtacggtcattttttacagagttgagaagagtacccatgccgtttcgaataaaagttgcctgcgtttgttccttc

SEQ ID NO: 35098 - protein, 346 aa, Zea mays subsp. mays
  peptide (1)..(346): Ceres Seq. ID no. 12405256
  misc_feature (90)..(346): Pfam Name: DUF706 Pfam Description: Family of unknown function
  misc_feature (42)..(346): NCBI GI NO: 30683840 NR Description: expressed protein [Arabidopsis thaliana]
  misc_feature (42)..(346): NCBI GI NO: 26451656 NR Description: unknown protein [Arabidopsis thaliana]
  misc_feature (42)..(338): NCBI GI NO: 7262695 NR Description: Strong similarity to an unknown protein fromArabidopsis thaliana gb|AL049171
  misc_feature (42)..(346): NCBI GI NO: 30687167 NR Description: expressed protein [Arabidopsis thaliana]
  misc_feature (52)..(346): NCBI GI NO: 7487428 NR Description: hypothetical protein T25K17
  misc_feature (42)..(346): NCBI GI NO: 18399158 NR Description: expressed protein; protein id: At2g19800
  misc_feature (42)..(346): NCBI GI NO: 21554393 NR Description: unknown [Arabidopsis thaliana]
  misc_feature (71)..(346): NCBI GI NO: 21536858 NR Description: unknown [Arabidopsis thaliana]
  misc_feature (71)..(346): NCBI GI NO: 15241891 NR Description: putative protein; protein id: At5g56640
  misc_feature (105)..(346): NCBI GI NO: 13877657 NR Description: Unknown protein [Arabidopsis thaliana]
TKAATVAVAVFLDSVTCCHFAKASPLLLFFLFFFSRRSEKKMTITIEQPQLDAVAERKVPGGGDPAELVLDAGFVVPDANAFGNTFRNYDAESERKQTVEEFYRVNHVRQTHEFVARMRAEYGRLDKTEMGIWECIELLNEFIDDSDPDLDMPQIEHLLQTAEAIRKDYPDEDWLHLTGLIHDLGKVLLHPSFGELPQWAVVGDTFPVGCAYDECNVHFKYFKENPDYHNPKLNTKLGVYSEGCGLDKVLMSWGHDDYMYLVAKENKCTLPSAGLFIIRYHSFYPLHKHGAYTHLMDDEDKENLKWLHVFNKYDLYSKSNSRIDVEEVKPYYMSLIDKYFPAKLRW

SEQ ID NO: 35099 - protein, 305 aa, Zea mays subsp. mays
  peptide (1)..(305): Ceres Seq. ID no. 12405257
  misc_feature (49)..(305): Pfam Name: DUF706 Pfam Description: Family of unknown function
  misc_feature (1)..(305): NCBI GI NO: 30683840 NR Description: expressed protein [Arabidopsis thaliana]
  misc_feature (1)..(305): NCBI GI NO: 26451656 NR Description: unknown protein [Arabidopsis thaliana]
  misc_feature (1)..(297): NCBI GI NO: 7262695 NR Description: Strong similarity to an unknown protein fromArabidopsis thaliana gb|AL049171
  misc_feature (1)..(305): NCBI GI NO: 30687167 NR Description: expressed protein [Arabidopsis thaliana]
  misc_feature (11)..(305): NCBI GI NO: 7487428 NR Description: hypothetical protein T25K17
  misc_feature (1)..(305): NCBI GI NO: 18399158 NR Description: expressed protein; protein id: At2g19800
  misc_feature (1)..(305): NCBI GI NO: 21554393 NR Description: unknown [Arabidopsis thaliana]
  misc_feature (30)..(305): NCBI GI NO: 21536858 NR Description: unknown [Arabidopsis thaliana]
  misc_feature (30)..(305): NCBI GI NO: 15241891 NR Description: putative protein; protein id: At5g56640
  misc_feature (64)..(305): NCBI GI NO: 13877657 NR Description: Unknown protein [Arabidopsis thaliana]
MTITIEQPQLDAVAERKVPGGGDPAELVLDAGFVVPDANAFGNTFRNYDAESERKQTVEEFYRVNHVRQTHEFVARMRAEYGRLDKTEMGIWECIELLNEFIDDSDPDLDMPQIEHLLQTAEAIRKDYPDEDWLHLTGLIHDLGKVLLHPSFGELPQWAVVGDTFPVGCAYDECNVHFKYFKENPDYHNPKLNTKLGVYSEGCGLDKVLMSWGHDDYMYLVAKENKCTLPSAGLFIIRYHSFYPLHKHGAYTHLMDDEDKENLKWLHVFNKYDLYSKSNSRIDVEEVKPYYMSLIDKYFPAKLRW

SEQ ID NO: 35100 - protein, 229 aa, Zea mays subsp. mays
  peptide (1)..(229): Ceres Seq. ID no. 12405258
  misc_feature (1)..(229): Pfam Name: DUF706 Pfam Description: Family of unknown function
  misc_feature (1)..(229): NCBI GI NO: 30683840 NR Description: expressed protein [Arabidopsis thaliana]
  misc_feature (1)..(229): NCBI GI NO: 26451656 NR Description: unknown protein [Arabidopsis thaliana]
  misc_feature (1)..(221): NCBI GI NO: 7262695 NR Description: Strong similarity to an unknown protein fromArabidopsis thaliana gb|AL049171
  misc_feature (1)..(229): NCBI GI NO: 30687167 NR Description: expressed protein [Arabidopsis thaliana]
  misc_feature (1)..(229): NCBI GI NO: 7487428 NR Description: hypothetical protein T25K17
  misc_feature (1)..(229): NCBI GI NO: 18399158 NR Description: expressed protein; protein id: At2g19800
  misc_feature (1)..(229): NCBI GI NO: 21554393 NR Description: unknown [Arabidopsis thaliana]
  misc_feature (1)..(229): NCBI GI NO: 21536858 NR Description: unknown [Arabidopsis thaliana]
  misc_feature (1)..(229): NCBI GI NO: 15241891 NR Description: putative protein; protein id: At5g56640
  misc_feature (1)..(229): NCBI GI NO: 13877657 NR Description: Unknown protein [Arabidopsis thaliana]
MRAEYGRLDKTEMGIWECIELLNEFIDDSDPDLDMPQIEHLLQTAEAIRKDYPDEDWLHLTGLIHDLGKVLLHPSFGELPQWAVVGDTFPVGCAYDECNVHFKYFKENPDYHNPKLNTKLGVYSEGCGLDKVLMSWGHDDYMYLVAKENKCTLPSAGLFIIRYHSFYPLHKHGAYTHLMDDEDKENLKWLHVFNKYDLYSKSNSRIDVEEVKPYYMSLIDKYFPAKLRW

SEQ ID NO: 35101 - DNA, 1347 bp, Zea mays subsp. mays
  misc_feature (1)..(1347): Ceres Seq. ID no. 12405869
accaatacagcactggaccactatatatccccccgccccgcgctggggccggtccccagctagcgagcgccgccggtgccagtgcaacagaacacgcaccacacgggcgcagactgcagagacaacagatcgatcgtccaatggcgatcggcgggtcggaggccggcgggggaggcgcggggagcatgaggagcgtgctggtgacgggcggcgcggggttcatcggcacgcacacggtgctgcgcctgctggagcagggctacatcgtcaccgtcgtcgacaacttccacaactccgtccccgaggcgctcgaccgcgtccgcctcatcgccggccccgcgctctccacccgcctcgacttcatccgcggggacctgaggaacaccgatgacttggagaaggtgttcgctgccaggaggtacgacgccgtcatccacttcgctgggctgaaggccgtgggggagagcgtcgcgcacccggagatgtactacgagaacaacctcatcggcaccatcaacctctacaagagcatgaaggagcacggctgcaagaagctggttttctcgtcatccgccaccgtgtacggctggccggaggtgatcccatgcgtcgaggactccaagctgcaggccgccaacccatacggcaggaccaagcttatccttgaggatatggcgcgtgactaccaccgcgcggacacggagtggagcatcgtcctgctgcgctacttcaaccccatcggtgcgcacagctccggcgagatcggagaggaccccaaggggataccgaacaacctgctgccctacatccagcaggtcgccgtcggcaggctccccgagctcaacgtctacggccacgattaccccacccgggacggcaccgcgatcagggactacatacacgtcgtcgacctcgccgatgggcacatcgcagcgctcaagaagctcttcgactctcctgatataggttgtgtggcctacaatctgggtacagggcgcggcacatccgttctggagatggtggcggcgttcaagaaggcctccggcaaggagattcccaccaagttgtgccccaggagaccgggtgacgcgacggaggtttacgcgtccactgagaaggctgaaagagagcttgcatggagggcccaatatggaatcgaggagatgtgcagggaccaatggaactgggccaagaagaacccgtatggctactgcggcggtgcaaaaaaatagcgtaggttcgtcgcaatgaagaattgtcgatagtagttctcttctctacactaatcaatggaacatgtaataaacacggaccacctaatctctactagtttctatggtttccact

SEQ ID NO: 35102 - protein, 409 aa, Zea mays subsp. mays
  peptide (1)..(409): Ceres Seq. ID no. 12405870
  misc_feature (65)..(400): Pfam Name: Pfam Description:  NAD dependent epimerase/dehydratase family
  misc_feature (49)..(409): NCBI GI NO: 26106014 NR Description: putative UDP-glucose 4-epimerase
  misc_feature (61)..(405): NCBI GI NO: 11386762 NR Description: UDP-glucose 4-epimerase
  misc_feature (58)..(403): NCBI GI NO: 15222072 NR Description: uridine diphosphate glucose epimerase
  misc_feature (58)..(403): NCBI GI NO: 18407751 NR Description: uridine diphosphate glucose epimerase, putative
  misc_feature (58)..(403): NCBI GI NO: 25292327 NR Description: hypothetical protein F16M19.8
  misc_feature (58)..(403): NCBI GI NO: 2129759 NR Description: UDPglucose 4-epimerase (EC 5
  misc_feature (61)..(405): NCBI GI NO: 11386774 NR Description: UDP-glucose 4-epimerase GEPI42
  misc_feature (61)..(408): NCBI GI NO: 11386775 NR Description: UDP-glucose 4-epimerase GEPI48
  misc_feature (62)..(403): NCBI GI NO: 21715990 NR Description: UDP-glucose 4-epimerase
  misc_feature (63)..(403): NCBI GI NO: 15236663 NR Description: UDPglucose 4-epimerase - like protein
QYSTGPLYIPPPRAGAGPQLASAAGASATEHAPHGRRLQRQQIDRPMAIGGSEAGGGGAGSMRSVLVTGGAGFIGTHTVLRLLEQGYIVTVVDNFHNSVPEALDRVRLIAGPALSTRLDFIRGDLRNTDDLEKVFAARRYDAVIHFAGLKAVGESVAHPEMYYENNLIGTINLYKSMKEHGCKKLVFSSSATVYGWPEVIPCVEDSKLQAANPYGRTKLILEDMARDYHRADTEWSIVLLRYFNPIGAHSSGEIGEDPKGIPNNLLPYIQQVAVGRLPELNVYGHDYPTRDGTAIRDYIHVVDLADGHIAALKKLFDSPDIGCVAYNLGTGRGTSVLEMVAAFKKASGKEIPTKLCPRRPGDATEVYASTEKAERELAWRAQYGIEEMCRDQWNWAKKNPYGYCGGAKK

SEQ ID NO: 35103 - protein, 363 aa, Zea mays subsp. mays
  peptide (1)..(363): Ceres Seq. ID no. 12405871
  misc_feature (19)..(354): Pfam Name: Pfam Description:  NAD dependent epimerase/dehydratase family
  misc_feature (3)..(363): NCBI GI NO: 26106014 NR Description: putative UDP-glucose 4-epimerase
  misc_feature (15)..(359): NCBI GI NO: 11386762 NR Description: UDP-glucose 4-epimerase
  misc_feature (12)..(357): NCBI GI NO: 15222072 NR Description: uridine diphosphate glucose epimerase
  misc_feature (12)..(357): NCBI GI NO: 18407751 NR Description: uridine diphosphate glucose epimerase, putative
  misc_feature (12)..(357): NCBI GI NO: 25292327 NR Description: hypothetical protein F16M19.8
  misc_feature (12)..(357): NCBI GI NO: 2129759 NR Description: UDPglucose 4-epimerase (EC 5
  misc_feature (15)..(359): NCBI GI NO: 11386774 NR Description: UDP-glucose 4-epimerase GEPI42
  misc_feature (15)..(362): NCBI GI NO: 11386775 NR Description: UDP-glucose 4-epimerase GEPI48
  misc_feature (16)..(357): NCBI GI NO: 21715990 NR Description: UDP-glucose 4-epimerase
  misc_feature (17)..(357): NCBI GI NO: 15236663 NR Description: UDPglucose 4-epimerase - like protein
MAIGGSEAGGGGAGSMRSVLVTGGAGFIGTHTVLRLLEQGYIVTVVDNFHNSVPEALDRVRLIAGPALSTRLDFIRGDLRNTDDLEKVFAARRYDAVIHFAGLKAVGESVAHPEMYYENNLIGTINLYKSMKEHGCKKLVFSSSATVYGWPEVIPCVEDSKLQAANPYGRTKLILEDMARDYHRADTEWSIVLLRYFNPIGAHSSGEIGEDPKGIPNNLLPYIQQVAVGRLPELNVYGHDYPTRDGTAIRDYIHVVDLADGHIAALKKLFDSPDIGCVAYNLGTGRGTSVLEMVAAFKKASGKEIPTKLCPRRPGDATEVYASTEKAERELAWRAQYGIEEMCRDQWNWAKKNPYGYCGGAKK

SEQ ID NO: 35104 - protein, 348 aa, Zea mays subsp. mays
  peptide (1)..(348): Ceres Seq. ID no. 12405872
  misc_feature (4)..(339): Pfam Name: Pfam Description:  NAD dependent epimerase/dehydratase family
  misc_feature (1)..(348): NCBI GI NO: 26106014 NR Description: putative UDP-glucose 4-epimerase
  misc_feature (1)..(344): NCBI GI NO: 11386762 NR Description: UDP-glucose 4-epimerase
  misc_feature (1)..(342): NCBI GI NO: 15222072 NR Description: uridine diphosphate glucose epimerase
  misc_feature (1)..(342): NCBI GI NO: 18407751 NR Description: uridine diphosphate glucose epimerase, putative
  misc_feature (1)..(342): NCBI GI NO: 25292327 NR Description: hypothetical protein F16M19.8
  misc_feature (1)..(342): NCBI GI NO: 2129759 NR Description: UDPglucose 4-epimerase (EC 5
  misc_feature (1)..(344): NCBI GI NO: 11386774 NR Description: UDP-glucose 4-epimerase GEPI42
  misc_feature (1)..(347): NCBI GI NO: 11386775 NR Description: UDP-glucose 4-epimerase GEPI48
  misc_feature (1)..(342): NCBI GI NO: 21715990 NR Description: UDP-glucose 4-epimerase
  misc_feature (2)..(342): NCBI GI NO: 15236663 NR Description: UDPglucose 4-epimerase - like protein
MRSVLVTGGAGFIGTHTVLRLLEQGYIVTVVDNFHNSVPEALDRVRLIAGPALSTRLDFIRGDLRNTDDLEKVFAARRYDAVIHFAGLKAVGESVAHPEMYYENNLIGTINLYKSMKEHGCKKLVFSSSATVYGWPEVIPCVEDSKLQAANPYGRTKLILEDMARDYHRADTEWSIVLLRYFNPIGAHSSGEIGEDPKGIPNNLLPYIQQVAVGRLPELNVYGHDYPTRDGTAIRDYIHVVDLADGHIAALKKLFDSPDIGCVAYNLGTGRGTSVLEMVAAFKKASGKEIPTKLCPRRPGDATEVYASTEKAERELAWRAQYGIEEMCRDQWNWAKKNPYGYCGGAKK

SEQ ID NO: 35105 - DNA, 1763 bp, Zea mays subsp. mays
  misc_feature (1)..(1763): Ceres Seq. ID no. 12347809
actattgaagcagactccacccggcgcgtcctcgtctcgtctcgtctcgcacgcacccctcactttccttgtcaatcgactcgcgatcgaatccgccccgagtcgattccgccgcggaccgaccggttcacttcccttttctcccgagatctcgactctcgagcaagtatgggtgaggcgaaggacaacgaggtgtacgaggaggacctagtcgactatgaggaggaggtggagaatgtcattgatggcgcccccaccaacggctcctcagatgtcgtcaagaaggggtacgtagggatccacagctcggggttcagagacttcctgctcaagccagagcttcttcgcgccattcaggattgcgggtttgagcatccttctgaagtgcaacatgagtgcatccctcaagctattcttggaatggatgtcatctgtcaagcaaaatctggaatgggtaagactgcagtttttgtcctgtcaactcttcagcagattgatcctgttgctggccaagtagctgcacttgtgttgtgccacacaagagaattagcttaccagatttgccatgaatttgagaggtttagcaaatacctgcctgaattaagagtagctgttttctatggtggtgttcacataaaaaaccacaaggatctgctgaagaatgaatgcccccatattgtggttggcacgcctggaaggatactagctctagctagagataaggaccttcccttgaagaatgtgcggcatttcattcttgatgaatgtgacaagatgctcgaatcacttgacatgcgcagagatgtccaggagatcttcaaaatgactccgcatgataagcaagtgatgatgttttcagcaacactcagcaaggagattcgacctgtttgcaagaggttcatgcaagatcctatggaaatttatgttgatgatgaggctaaactgacccttcatggtctagttcagcactatatcaaattaagtgaggcagagaagaaccgaaagttgaacgatcttttagatgcactcgacttcaaccaagttgtgatatttgttaaaagtgttagtagagctgcagaactcaacaaattgctctgcgagtgcaatttcccctcaatctgtatacattctggaatgacacaggaagagaggttgacacggtacaagaacttcaaggaaggacacaagaggattcttgtggctactgatttggttggtaggggaatcgacattgaacgtgtcaacattgtcgtaaactatgatatgcctgattccgctgatacatacctgcatagggttggtcgggctggacgttttggtaccaagggacttgcaataacatttgtttcttcttcatctgattctgatgttctcaatcaagtgcaggagaggtttgaggttgacataaaggagctgcctgagcagattgacacgtcgacatacatgccatcttgatgatcgaggtgaaccagtgtttagtttgagctggaaaggagagcttgtttgaaatatacaccttagatcgctgttggacaaccttagcaccttgtttgaaagatgttccatttgtacttaaccagcagtctagtggattaagcagtaggcgtcgcaacagctgttacatgctacctaggattttatttgcaactctgtaatgttttctatgctccgactgctaattgttctgtttgagactgccctctgggtgcatgttttactagtaaattactcgcaccatgcccgagtcttcggagcatgtgttt

SEQ ID NO: 35106 - protein, 484 aa, Zea mays subsp. mays
  peptide (1)..(484): Ceres Seq. ID no. 12347810
  misc_feature (116)..(323): Pfam Name: Pfam Description:  DEAD/DEAH box helicase
  misc_feature (57)..(484): NCBI GI NO: 18416493 NR Description: DEAD/DEAH box RNA helicase, putative
  misc_feature (57)..(484): NCBI GI NO: 18416486 NR Description: DEAD/DEAH box RNA helicase, putative
  misc_feature (56)..(484): NCBI GI NO: 11358797 NR Description: RNA helicase RH15
  misc_feature (57)..(481): NCBI GI NO: 8953382 NR Description: DEAD BOX RNA helicase RH15 [Arabidopsis thaliana]
  misc_feature (57)..(481): NCBI GI NO: 8953379 NR Description: DEAD BOX RNA helicase RH15-like protein
  misc_feature (57)..(460): NCBI GI NO: 34913868 NR Description: putative DEAD BOX RNA helicase
  misc_feature (141)..(484): NCBI GI NO: 30683509 NR Description: DEAD/DEAH box helicase, putative
  misc_feature (62)..(482): NCBI GI NO: 4758112 NR Description: HLA-B associated transcript-1
  misc_feature (62)..(482): NCBI GI NO: 30585031 NR Description: Homo sapiens HLA-B associated transcript 1
  misc_feature (62)..(482): NCBI GI NO: 28278325 NR Description: Unknown (protein for MGC:55433) [Danio rerio]
TIEADSTRRVLVSSRLARTPHFPCQSTRDRIRPESIPPRTDRFTSLFSRDLDSRASMGEAKDNEVYEEDLVDYEEEVENVIDGAPTNGSSDVVKKGYVGIHSSGFRDFLLKPELLRAIQDCGFEHPSEVQHECIPQAILGMDVICQAKSGMGKTAVFVLSTLQQIDPVAGQVAALVLCHTRELAYQICHEFERFSKYLPELRVAVFYGGVHIKNHKDLLKNECPHIVVGTPGRILALARDKDLPLKNVRHFILDECDKMLESLDMRRDVQEIFKMTPHDKQVMMFSATLSKEIRPVCKRFMQDPMEIYVDDEAKLTLHGLVQHYIKLSEAEKNRKLNDLLDALDFNQVVIFVKSVSRAAELNKLLCECNFPSICIHSGMTQEERLTRYKNFKEGHKRILVATDLVGRGIDIERVNIVVNYDMPDSADTYLHRVGRAGRFGTKGLAITFVSSSSDSDVLNQVQERFEVDIKELPEQIDTSTYMPS

SEQ ID NO: 35107 - protein, 428 aa, Zea mays subsp. mays
  peptide (1)..(428): Ceres Seq. ID no. 12347811
  misc_feature (60)..(267): Pfam Name: Pfam Description:  DEAD/DEAH box helicase
  misc_feature (1)..(428): NCBI GI NO: 18416493 NR Description: DEAD/DEAH box RNA helicase, putative
  misc_feature (1)..(428): NCBI GI NO: 18416486 NR Description: DEAD/DEAH box RNA helicase, putative
  misc_feature (1)..(428): NCBI GI NO: 11358797 NR Description: RNA helicase RH15
  misc_feature (1)..(425): NCBI GI NO: 8953382 NR Description: DEAD BOX RNA helicase RH15 [Arabidopsis thaliana]
  misc_feature (1)..(425): NCBI GI NO: 8953379 NR Description: DEAD BOX RNA helicase RH15-like protein
  misc_feature (1)..(404): NCBI GI NO: 34913868 NR Description: putative DEAD BOX RNA helicase
  misc_feature (85)..(428): NCBI GI NO: 30683509 NR Description: DEAD/DEAH box helicase, putative
  misc_feature (6)..(426): NCBI GI NO: 4758112 NR Description: HLA-B associated transcript-1
  misc_feature (6)..(426): NCBI GI NO: 30585031 NR Description: Homo sapiens HLA-B associated transcript 1
  misc_feature (6)..(426): NCBI GI NO: 28278325 NR Description: Unknown (protein for MGC:55433) [Danio rerio]
MGEAKDNEVYEEDLVDYEEEVENVIDGAPTNGSSDVVKKGYVGIHSSGFRDFLLKPELLRAIQDCGFEHPSEVQHECIPQAILGMDVICQAKSGMGKTAVFVLSTLQQIDPVAGQVAALVLCHTRELAYQICHEFERFSKYLPELRVAVFYGGVHIKNHKDLLKNECPHIVVGTPGRILALARDKDLPLKNVRHFILDECDKMLESLDMRRDVQEIFKMTPHDKQVMMFSATLSKEIRPVCKRFMQDPMEIYVDDEAKLTLHGLVQHYIKLSEAEKNRKLNDLLDALDFNQVVIFVKSVSRAAELNKLLCECNFPSICIHSGMTQEERLTRYKNFKEGHKRILVATDLVGRGIDIERVNIVVNYDMPDSADTYLHRVGRAGRFGTKGLAITFVSSSSDSDVLNQVQERFEVDIKELPEQIDTSTYMPS

SEQ ID NO: 35108 - protein, 344 aa, Zea mays subsp. mays
  peptide (1)..(344): Ceres Seq. ID no. 12347812
  misc_feature (1)..(183): Pfam Name: Pfam Description:  DEAD/DEAH box helicase
  misc_feature (1)..(344): NCBI GI NO: 18416493 NR Description: DEAD/DEAH box RNA helicase, putative
  misc_feature (1)..(344): NCBI GI NO: 18416486 NR Description: DEAD/DEAH box RNA helicase, putative
  misc_feature (1)..(344): NCBI GI NO: 11358797 NR Description: RNA helicase RH15
  misc_feature (1)..(341): NCBI GI NO: 8953382 NR Description: DEAD BOX RNA helicase RH15 [Arabidopsis thaliana]
  misc_feature (1)..(341): NCBI GI NO: 8953379 NR Description: DEAD BOX RNA helicase RH15-like protein
  misc_feature (1)..(320): NCBI GI NO: 34913868 NR Description: putative DEAD BOX RNA helicase
  misc_feature (1)..(344): NCBI GI NO: 30683509 NR Description: DEAD/DEAH box helicase, putative
  misc_feature (1)..(342): NCBI GI NO: 4758112 NR Description: HLA-B associated transcript-1
  misc_feature (1)..(342): NCBI GI NO: 30585031 NR Description: Homo sapiens HLA-B associated transcript 1
  misc_feature (1)..(342): NCBI GI NO: 28278325 NR Description: Unknown (protein for MGC:55433) [Danio rerio]
MDVICQAKSGMGKTAVFVLSTLQQIDPVAGQVAALVLCHTRELAYQICHEFERFSKYLPELRVAVFYGGVHIKNHKDLLKNECPHIVVGTPGRILALARDKDLPLKNVRHFILDECDKMLESLDMRRDVQEIFKMTPHDKQVMMFSATLSKEIRPVCKRFMQDPMEIYVDDEAKLTLHGLVQHYIKLSEAEKNRKLNDLLDALDFNQVVIFVKSVSRAAELNKLLCECNFPSICIHSGMTQEERLTRYKNFKEGHKRILVATDLVGRGIDIERVNIVVNYDMPDSADTYLHRVGRAGRFGTKGLAITFVSSSSDSDVLNQVQERFEVDIKELPEQIDTSTYMPS

SEQ ID NO: 35109 - DNA, 1466 bp, Zea mays subsp. mays
  misc_feature (1)..(1466): Ceres Seq. ID no. 12411276
aaggaagacgcctctctagattggatcgaattccttcgtttctctcctcaccgaggacggcggagagagacgaggaggaaaggcccggcgcgacggagaagctgaatatctgatatgggtgaaaccatgggaaggagaacagtcagtggccttcttgtcaccaaaggaggctcaattcttgtcttcagggaggaaagcccacgccacaaggccaccgcatgttgtacccgcctctggtgcagcagtaagcttttcccgaacaaagacacgaatacacgcagggcatccagggaaacatcggctcttcagagatcacaagtgtctaggaaatccaactggatgtcccatcaaggaagtatttcttatgatcgaagcaccagtaggaatacagcaagtacttttggtgagactcacaacaaaccaagagaaaaagaaaatctcgggtgtgatctaccggctcggttgaaagaaaggatcaatacatccaggaaaagctcattgggtggactgggaagtcctaacaaatcatcaacaaacacatcaagcagtagccgatcggtttcaagatcagtatgtcggccagcatcgagaatgagaaaggatggaggaaggggcgcagaatctatgaggatgcatagagccagagatagtggtggtagctcttggggagatgtgttgacaagaaattctgaccaagattcttcacacaggtctctatctcgaaacgtgttgaggcataggagcagatctcagcaagggccaatatcatcattggaggataatttagatgattccagtgaatactggcattttgatacagatgacagtgaagaggttgaggatgactatgcctttaatgatcagcataggggaatgagaatggacattgataacatgtcttatgaggacctacttgcgcttggggagagaataggtactgtaagcactggtctttcagatgatgcgctttctgagtgtctgaagagaaacctctatgtgcccacaacttcaagcagcaatgaagatggtgacatcaaatgcatcatatgtctggaggagtactcttctggtgtggaggtggccaagatggcatgcgagcattactaccataccacttgtatccaacagtggcttcagcaaaagaactggtgcccgatttgtaaatgtgacgcttctgccattagctcatagtgttcttgacagtaacagaagtatcagttcattgtaatcaaataggattacacaagtttttttggttctagaacaaattattcacttcaatcctatactgctcttcaattcacactacacttgtcataggaagcaggaaaataagtcctagaagaaaggattttctcagttttgatgttgaagttgaagagtagatgatagtgttgccattctttacatacaaaagcgtcaaaaattcagcattaatagtgcagtttttgtttgccatcgttttc

SEQ ID NO: 35110 - protein, 358 aa, Zea mays subsp. mays
  peptide (1)..(358): Ceres Seq. ID no. 12411277
  misc_feature (309)..(349): Pfam Name: RING finger Pfam Description: Zinc finger, C3HC4 type
  misc_feature (5)..(355): NCBI GI NO: 40253261 NR Description: DNA binding zinc finger protein-like
  misc_feature (1)..(350): NCBI GI NO: 38344153 NR Description: OSJNBa0041A02.20
  misc_feature (44)..(355): NCBI GI NO: 30689641 NR Description: RING finger-related protein [Arabidopsis thaliana]
  misc_feature (245)..(353): NCBI GI NO: 10129643 NR Description: Pspzf zinc finger protein-like
  misc_feature (245)..(353): NCBI GI NO: 20466428 NR Description: Pspzf zinc finger protein-like
  misc_feature (245)..(353): NCBI GI NO: 22326712 NR Description: Pspzf zinc finger protein - like
  misc_feature (201)..(357): NCBI GI NO: 7486381 NR Description: hypothetical protein F3L17
  misc_feature (201)..(357): NCBI GI NO: 18417809 NR Description: putative protein; protein id: At4g31450
  misc_feature (85)..(350): NCBI GI NO: 4240031 NR Description: DNA binding zinc finger protein (Pspzf)
  misc_feature (198)..(354): NCBI GI NO: 34896014 NR Description: ESTs AU075348
MGETMGRRTVSGLLVTKGGSILVFREESPRHKATACCTRLWCSSKLFPNKDTNTRRASRETSALQRSQVSRKSNWMSHQGSISYDRSTSRNTASTFGETHNKPREKENLGCDLPARLKERINTSRKSSLGGLGSPNKSSTNTSSSSRSVSRSVCRPASRMRKDGGRGAESMRMHRARDSGGSSWGDVLTRNSDQDSSHRSLSRNVLRHRSRSQQGPISSLEDNLDDSSEYWHFDTDDSEEVEDDYAFNDQHRGMRMDIDNMSYEDLLALGERIGTVSTGLSDDALSECLKRNLYVPTTSSSNEDGDIKCIICLEEYSSGVEVAKMACEHYYHTTCIQQWLQQKNWCPICKCDASAISS

SEQ ID NO: 35111 - protein, 354 aa, Zea mays subsp. mays
  peptide (1)..(354): Ceres Seq. ID no. 12411278
  misc_feature (305)..(345): Pfam Name: RING finger Pfam Description: Zinc finger, C3HC4 type
  misc_feature (1)..(351): NCBI GI NO: 40253261 NR Description: DNA binding zinc finger protein-like
  misc_feature (1)..(346): NCBI GI NO: 38344153 NR Description: OSJNBa0041A02.20
  misc_feature (40)..(351): NCBI GI NO: 30689641 NR Description: RING finger-related protein [Arabidopsis thaliana]
  misc_feature (241)..(349): NCBI GI NO: 10129643 NR Description: Pspzf zinc finger protein-like
  misc_feature (241)..(349): NCBI GI NO: 20466428 NR Description: Pspzf zinc finger protein-like
  misc_feature (241)..(349): NCBI GI NO: 22326712 NR Description: Pspzf zinc finger protein - like
  misc_feature (197)..(353): NCBI GI NO: 7486381 NR Description: hypothetical protein F3L17
  misc_feature (197)..(353): NCBI GI NO: 18417809 NR Description: putative protein; protein id: At4g31450
  misc_feature (81)..(346): NCBI GI NO: 4240031 NR Description: DNA binding zinc finger protein (Pspzf)
  misc_feature (194)..(350): NCBI GI NO: 34896014 NR Description: ESTs AU075348
MGRRTVSGLLVTKGGSILVFREESPRHKATACCTRLWCSSKLFPNKDTNTRRASRETSALQRSQVSRKSNWMSHQGSISYDRSTSRNTASTFGETHNKPREKENLGCDLPARLKERINTSRKSSLGGLGSPNKSSTNTSSSSRSVSRSVCRPASRMRKDGGRGAESMRMHRARDSGGSSWGDVLTRNSDQDSSHRSLSRNVLRHRSRSQQGPISSLEDNLDDSSEYWHFDTDDSEEVEDDYAFNDQHRGMRMDIDNMSYEDLLALGERIGTVSTGLSDDALSECLKRNLYVPTTSSSNEDGDIKCIICLEEYSSGVEVAKMACEHYYHTTCIQQWLQQKNWCPICKCDASAISS

SEQ ID NO: 35112 - protein, 283 aa, Zea mays subsp. mays
  peptide (1)..(283): Ceres Seq. ID no. 12411279
  misc_feature (234)..(274): Pfam Name: RING finger Pfam Description: Zinc finger, C3HC4 type
  misc_feature (1)..(280): NCBI GI NO: 40253261 NR Description: DNA binding zinc finger protein-like
  misc_feature (1)..(275): NCBI GI NO: 38344153 NR Description: OSJNBa0041A02.20
  misc_feature (1)..(280): NCBI GI NO: 30689641 NR Description: RING finger-related protein [Arabidopsis thaliana]
  misc_feature (170)..(278): NCBI GI NO: 10129643 NR Description: Pspzf zinc finger protein-like
  misc_feature (170)..(278): NCBI GI NO: 20466428 NR Description: Pspzf zinc finger protein-like
  misc_feature (170)..(278): NCBI GI NO: 22326712 NR Description: Pspzf zinc finger protein - like
  misc_feature (126)..(282): NCBI GI NO: 7486381 NR Description: hypothetical protein F3L17
  misc_feature (126)..(282): NCBI GI NO: 18417809 NR Description: putative protein; protein id: At4g31450
  misc_feature (10)..(275): NCBI GI NO: 4240031 NR Description: DNA binding zinc finger protein (Pspzf)
  misc_feature (123)..(279): NCBI GI NO: 34896014 NR Description: ESTs AU075348
MSHQGSISYDRSTSRNTASTFGETHNKPREKENLGCDLPARLKERINTSRKSSLGGLGSPNKSSTNTSSSSRSVSRSVCRPASRMRKDGGRGAESMRMHRARDSGGSSWGDVLTRNSDQDSSHRSLSRNVLRHRSRSQQGPISSLEDNLDDSSEYWHFDTDDSEEVEDDYAFNDQHRGMRMDIDNMSYEDLLALGERIGTVSTGLSDDALSECLKRNLYVPTTSSSNEDGDIKCIICLEEYSSGVEVAKMACEHYYHTTCIQQWLQQKNWCPICKCDASAISS

SEQ ID NO: 35113 - DNA, 1339 bp, Zea mays subsp. mays
  misc_feature (1)..(1339): Ceres Seq. ID no. 12411272
aatagaagcgagcgagcgagcagcagtaggcagcggcgcgggcgaggagcagaccagcacccagcgccctcgtcggggggcggcacgtgcagcttcaccagccgccgcctttcccccgtctgcctctgcctctgcctctccccctaacccccttccatttctccaccccaccccgctcccgcttccgcttcctcgccacttagttcgttgccaccacgccgcggctgcgttcgcattgggggcacgcaatggagcagtacgagaaggtggagaagatcggggagggcacgtacggggtggtgtacaaggcgctggacaaggccaccaacgagacgatcgcgctcaagaagatccgcctcgagcaggaggacgagggcgtcccgtccaccgccatccgcgagatctctctcctcaaggagatgaaccacggcaacatcgtcagattacatgatgttgtccacagcgagaagcgcatataccttgtcttcgagtacctggatctggacctcaagaagttcatggactcctgcccggagtttgctaagaatcccactttgatcaagtcatacctctaccagatactccacggtgttgcgtactgccattctcatagagttcttcatcgagacttgaaacctcaaaacttattgatagatcggcgcactaatgcactgaagcttgcagactttggtttagccagggcatttggaattcctgtccgtacatttactcatgaggtagtgacattatggtacagagctccagaaattctgcttggagcgcggcagtattccacaccagttgatgtgtggtctgtgggctgtatctttgcggaaatggtgaaccaaaagccactattccctggcgattctgagatcgacgaactttttaagatattcaggatactaggtacaccgaatgagcagagttggccaggagtcagttgtttgcctgacttcaagacagctttccccaggtggcaagctcaggacctggcaacagtagtcccaaatcttgaccctgctgggttggaccttctctctaaaatgcttcgatacgagccaagcaaaagaatcacagcgaggcaagcacttgagcatgagtacttcaaggaccttgaagtggtacagtgacctgctaaatgtgcttgacgttgcattgacatttgtatgagctgagtcgctcattcctttttatgaacgcctgtactcttctcattctctccctgcatttttgtcattcagctggatatttcgaatctggtgtgttttgagatgtattaaagaacgtcaaatagattaccgccttggtctctgtccattgaaagtaaatatccgtc

SEQ ID NO: 35114 - protein, 294 aa, Zea mays subsp. mays
  peptide (1)..(294): Ceres Seq. ID no. 12411273
  misc_feature (4)..(287): Pfam Name: Pfam Description:  Protein kinase domain
  misc_feature (1)..(294): NCBI GI NO: 115923 NR Description: Cell division control protein 2 homolog (p34cdc2)
  misc_feature (1)..(294): NCBI GI NO: 100915 NR Description: protein kinase (EC 2
  misc_feature (1)..(294): NCBI GI NO: 100916 NR Description: protein kinase (EC 2
  misc_feature (1)..(294): NCBI GI NO: 231706 NR Description: CELL DIVISION CONTROL PROTEIN 2 HOMOLOG 1
  misc_feature (1)..(294): NCBI GI NO: 4096103 NR Description: p34cdc2 [Triticum aestivum]
  misc_feature (1)..(293): NCBI GI NO: 541800 NR Description: protein kinase (EC 2.7.1.37) cdc2 - Norway spruce
  misc_feature (1)..(293): NCBI GI NO: 25989351 NR Description: cyclin-dependent kinase [Helianthus tuberosus]
  misc_feature (1)..(293): NCBI GI NO: 17224978 NR Description: cyclin dependent kinase [Helianthus annuus]
  misc_feature (1)..(293): NCBI GI NO: 8671339 NR Description: cdc2Pnc [Pinus contorta]
  misc_feature (1)..(294): NCBI GI NO: 2956719 NR Description: cyclin dependent kinase 2
MEQYEKVEKIGEGTYGVVYKALDKATNETIALKKIRLEQEDEGVPSTAIREISLLKEMNHGNIVRLHDVVHSEKRIYLVFEYLDLDLKKFMDSCPEFAKNPTLIKSYLYQILHGVAYCHSHRVLHRDLKPQNLLIDRRTNALKLADFGLARAFGIPVRTFTHEVVTLWYRAPEILLGARQYSTPVDVWSVGCIFAEMVNQKPLFPGDSEIDELFKIFRILGTPNEQSWPGVSCLPDFKTAFPRWQAQDLATVVPNLDPAGLDLLSKMLRYEPSKRITARQALEHEYFKDLEVVQ

SEQ ID NO: 35115 - protein, 237 aa, Zea mays subsp. mays
  peptide (1)..(237): Ceres Seq. ID no. 12411274
  misc_feature (1)..(230): Pfam Name: Pfam Description:  Protein kinase domain
  misc_feature (1)..(237): NCBI GI NO: 115923 NR Description: Cell division control protein 2 homolog (p34cdc2)
  misc_feature (1)..(237): NCBI GI NO: 100915 NR Description: protein kinase (EC 2
  misc_feature (1)..(237): NCBI GI NO: 100916 NR Description: protein kinase (EC 2
  misc_feature (1)..(237): NCBI GI NO: 231706 NR Description: CELL DIVISION CONTROL PROTEIN 2 HOMOLOG 1
  misc_feature (1)..(237): NCBI GI NO: 4096103 NR Description: p34cdc2 [Triticum aestivum]
  misc_feature (1)..(236): NCBI GI NO: 541800 NR Description: protein kinase (EC 2.7.1.37) cdc2 - Norway spruce
  misc_feature (1)..(236): NCBI GI NO: 25989351 NR Description: cyclin-dependent kinase [Helianthus tuberosus]
  misc_feature (1)..(236): NCBI GI NO: 17224978 NR Description: cyclin dependent kinase [Helianthus annuus]
  misc_feature (1)..(236): NCBI GI NO: 8671339 NR Description: cdc2Pnc [Pinus contorta]
  misc_feature (1)..(237): NCBI GI NO: 2956719 NR Description: cyclin dependent kinase 2
MNHGNIVRLHDVVHSEKRIYLVFEYLDLDLKKFMDSCPEFAKNPTLIKSYLYQILHGVAYCHSHRVLHRDLKPQNLLIDRRTNALKLADFGLARAFGIPVRTFTHEVVTLWYRAPEILLGARQYSTPVDVWSVGCIFAEMVNQKPLFPGDSEIDELFKIFRILGTPNEQSWPGVSCLPDFKTAFPRWQAQDLATVVPNLDPAGLDLLSKMLRYEPSKRITARQALEHEYFKDLEVVQ

SEQ ID NO: 35116 - protein, 204 aa, Zea mays subsp. mays
  peptide (1)..(204): Ceres Seq. ID no. 12411275
  misc_feature (1)..(197): Pfam Name: Pfam Description:  Protein kinase domain
  misc_feature (1)..(204): NCBI GI NO: 115923 NR Description: Cell division control protein 2 homolog (p34cdc2)
  misc_feature (1)..(204): NCBI GI NO: 100915 NR Description: protein kinase (EC 2
  misc_feature (1)..(204): NCBI GI NO: 100916 NR Description: protein kinase (EC 2
  misc_feature (1)..(204): NCBI GI NO: 231706 NR Description: CELL DIVISION CONTROL PROTEIN 2 HOMOLOG 1
  misc_feature (1)..(204): NCBI GI NO: 4096103 NR Description: p34cdc2 [Triticum aestivum]
  misc_feature (1)..(203): NCBI GI NO: 541800 NR Description: protein kinase (EC 2.7.1.37) cdc2 - Norway spruce
  misc_feature (1)..(203): NCBI GI NO: 25989351 NR Description: cyclin-dependent kinase [Helianthus tuberosus]
  misc_feature (1)..(203): NCBI GI NO: 17224978 NR Description: cyclin dependent kinase [Helianthus annuus]
  misc_feature (1)..(203): NCBI GI NO: 8671339 NR Description: cdc2Pnc [Pinus contorta]
  misc_feature (1)..(204): NCBI GI NO: 2956719 NR Description: cyclin dependent kinase 2
MDSCPEFAKNPTLIKSYLYQILHGVAYCHSHRVLHRDLKPQNLLIDRRTNALKLADFGLARAFGIPVRTFTHEVVTLWYRAPEILLGARQYSTPVDVWSVGCIFAEMVNQKPLFPGDSEIDELFKIFRILGTPNEQSWPGVSCLPDFKTAFPRWQAQDLATVVPNLDPAGLDLLSKMLRYEPSKRITARQALEHEYFKDLEVVQ

SEQ ID NO: 35117 - DNA, 742 bp, Zea mays subsp. mays
  misc_feature (1)..(742): Ceres Seq. ID no. 13500480
taatcgaaaaactatatacgtatatagacgtggtcaggatgacgtcgtcctccgtcttcttcctcctgctcgcttgcttcgccacatgcgccggcgccgccacgttcacggtacgaaacaactgcgggttcacggtgtggccagcaggcatcccggtcggcggcggcacgcagctgaacccgggctcgacgtggactgtcaacgtgcaggccgggaccagcggaggcaggatctggggccgcaccggctgctccttcagcggcggccggggccgctgcgcgacgggcgactgcggaggcgcctactcctgcagcctgtccgggcagcccccggcgacgctggcggagttcaccatcggcggcggcggcaaccacgactactacgatatctcggtgatcgacggctacaacctgcccatggacttctcgtgcagcactggcgccgccctgcggtgcagggactccggctgccccgacgcgtaccaccagcccaatgaccctaagacccgttcgtgcaacggcaatagcaactaccaggtcgtcttctgcccctgatgaacatgcatgcagcttgccatgagcccatgcatgcatgagagcgtattaattgttcgtcaactcacatgcacgtacctactagtgaagttgataaataagacgatcgatatctgactcgtccaatgcagcatgtgtgtatggtgtgatccttatactttcctacatatatggaactttttaaaggg

SEQ ID NO: 35118 - protein, 183 aa, Zea mays subsp. mays
  peptide (1)..(183): Ceres Seq. ID no. 13500481
  misc_feature (39)..(183): Pfam Name: Pfam Description:  Thaumatin family
  misc_feature (14)..(183): NCBI GI NO: 1710786 NR Description: Thaumatin-like pathogenesis-related protein 4precursor
  misc_feature (14)..(183): NCBI GI NO: 1710785 NR Description: Thaumatin-like pathogenesis-related protein 3precursor
  misc_feature (14)..(183): NCBI GI NO: 1710783 NR Description: Thaumatin-like pathogenesis-related protein 1precursor
  misc_feature (14)..(183): NCBI GI NO: 1710784 NR Description: Thaumatin-like pathogenesis-related protein 2precursor
  misc_feature (14)..(183): NCBI GI NO: 444344 NR Description: thaumatin-like protein
  misc_feature (15)..(183): NCBI GI NO: 7442164 NR Description: pathogenesis related protein-5 - maize
  misc_feature (13)..(183): NCBI GI NO: 417525 NR Description: Pathogenesis-related protein 1A/1B precursor
  misc_feature (13)..(183): NCBI GI NO: 14334171 NR Description: thaumatin-like protein [Triticum aestivum]
  misc_feature (13)..(183): NCBI GI NO: 417526 NR Description: Pathogenesis-related protein 1C precursor
  misc_feature (13)..(183): NCBI GI NO: 135917 NR Description: Thaumatin-like protein PWIR2 precursor
IEKLYTYIDVVRMTSSSVFFLLLACFATCAGAATFTVRNNCGFTVWPAGIPVGGGTQLNPGSTWTVNVQAGTSGGRIWGRTGCSFSGGRGRCATGDCGGAYSCSLSGQPPATLAEFTIGGGGNHDYYDISVIDGYNLPMDFSCSTGAALRCRDSGCPDAYHQPNDPKTRSCNGNSNYQVVFCP

SEQ ID NO: 35119 - protein, 171 aa, Zea mays subsp. mays
  peptide (1)..(171): Ceres Seq. ID no. 13500482
  misc_feature (27)..(171): Pfam Name: Pfam Description:  Thaumatin family
  misc_feature (2)..(171): NCBI GI NO: 1710786 NR Description: Thaumatin-like pathogenesis-related protein 4precursor
  misc_feature (2)..(171): NCBI GI NO: 1710785 NR Description: Thaumatin-like pathogenesis-related protein 3precursor
  misc_feature (2)..(171): NCBI GI NO: 1710783 NR Description: Thaumatin-like pathogenesis-related protein 1precursor
  misc_feature (2)..(171): NCBI GI NO: 1710784 NR Description: Thaumatin-like pathogenesis-related protein 2precursor
  misc_feature (2)..(171): NCBI GI NO: 444344 NR Description: thaumatin-like protein
  misc_feature (3)..(171): NCBI GI NO: 7442164 NR Description: pathogenesis related protein-5 - maize
  misc_feature (1)..(171): NCBI GI NO: 417525 NR Description: Pathogenesis-related protein 1A/1B precursor
  misc_feature (1)..(171): NCBI GI NO: 14334171 NR Description: thaumatin-like protein [Triticum aestivum]
  misc_feature (1)..(171): NCBI GI NO: 417526 NR Description: Pathogenesis-related protein 1C precursor
  misc_feature (1)..(171): NCBI GI NO: 135917 NR Description: Thaumatin-like protein PWIR2 precursor
MTSSSVFFLLLACFATCAGAATFTVRNNCGFTVWPAGIPVGGGTQLNPGSTWTVNVQAGTSGGRIWGRTGCSFSGGRGRCATGDCGGAYSCSLSGQPPATLAEFTIGGGGNHDYYDISVIDGYNLPMDFSCSTGAALRCRDSGCPDAYHQPNDPKTRSCNGNSNYQVVFCP

SEQ ID NO: 35120 - protein, 164 aa, Zea mays subsp. mays
  peptide (1)..(164): Ceres Seq. ID no. 13500483
NRKTIYVYRRGQDDVVLRLLPPARLLRHMRRRRHVHGTKQLRVHGVASRHPGRRRHAAEPGLDVDCQRAGRDQRRQDLGPHRLLLQRRPGPLRDGRLRRRLLLQPVRAAPGDAGGVHHRRRRQPRLLRYLGDRRLQPAHGLLVQHWRRPAVQGLRLPRRVPPAQ

SEQ ID NO: 35121 - DNA, 1196 bp, Zea mays subsp. mays
  misc_feature (1)..(1196): Ceres Seq. ID no. 12367307
cccagtcgtgtcgccactcgccgccatccgctccgcaggtcacgtgaaaagcagtgcagggcgcaagggcaccgccgaggcagaaaagggcggataaactgcttgaactggaagcgaccctagtccaaaccaccgcaccgacaccgactccgagccccgccgcgccgcgctacctccgctcctctcttcgcccctgccggcgtcgaggccgaagcgaaggcgagcatgcatcacgaccccaaccccttcgacgagggcagcgccgaggacaaccccttctcaaatggaggagccggaggcggcaagcagcagtacggcttccggccgactgagcccgtcgggttcggcggcgctagcaggggcgacgccgtcgttgacgtcccgctcgagaccatgggggactctcggagcaaggtgaaggagctctcgtcgtgggaatcagatctgaagcggcgagaggcggatatcaagaggagggaagaggcgctgaagaatgctggcgtgccaatggaggagaagaactggccaccattcttccccatcatccaccatgatattgccaatgagataccagcaaatgtgcagaagttgcagtatcttgcatttgcaagctggcttggaattgtgctttgtttgtcctggaacttcgttgctgtcatagtctgctggatcaaggagggagattcaaagttgtttttccttgcaacaatctatgctttgcttggaattcctctgtcatatttgatatggtacaggccactctaccgtgcaatgaggactaacagtgctttcagttttggatggtttttcctgtgttacctgatccacattggtttttgcataattgctgccattgctccaccaattgtatttcatgggaaatcattaactggtattctggctgcgattgacactttctctgaacatgtgataattgggatcttttactttgtggggtttgcactgttttgtctggagacactgctgagcattggggttcttcagaaagtgtacatgtacttcagagggaacaagtgaagccagtcatgatggagagttacgtttgttgagaaaatttggagttacttgtggctacttgtagcacatgttcattcgatggttttgtgcatacctgtcagtacaccttgaatctataatttcttatgtcagttattggtgccgagaattgttttttt

SEQ ID NO: 35122 - protein, 270 aa, Zea mays subsp. mays
  peptide (1)..(270): Ceres Seq. ID no. 12367308
  misc_feature (96)..(270): Pfam Name: Pfam Description:  SCAMP family
  misc_feature (1)..(270): NCBI GI NO: 38347080 NR Description: OSJNBa0006A01.21
  misc_feature (2)..(270): NCBI GI NO: 15222550 NR Description: secretory carrier membrane protein, putative
  misc_feature (14)..(260): NCBI GI NO: 38567965 NR Description: OSJNBa0093F12.6
  misc_feature (3)..(269): NCBI GI NO: 15219893 NR Description: secretory carrier membrane protein
  misc_feature (3)..(268): NCBI GI NO: 3941289 NR Description: similarity to SCAMP37 [Pisum sativum]
  misc_feature (3)..(269): NCBI GI NO: 15226410 NR Description: putative secretory carrier-associated membraneprotein
  misc_feature (3)..(269): NCBI GI NO: 7109232 NR Description: secretory carrier membrane protein [Oryza sativa]
  misc_feature (3)..(269): NCBI GI NO: 15220305 NR Description: secretory carrier membrane protein, putative
  misc_feature (4)..(269): NCBI GI NO: 34899754 NR Description: putative secretory carrier membrane protein
  misc_feature (3)..(269): NCBI GI NO: 18379111 NR Description: expressed protein; protein id: At1g03550
MHHDPNPFDEGSAEDNPFSNGGAGGGKQQYGFRPTEPVGFGGASRGDAVVDVPLETMGDSRSKVKELSSWESDLKRREADIKRREEALKNAGVPMEEKNWPPFFPIIHHDIANEIPANVQKLQYLAFASWLGIVLCLSWNFVAVIVCWIKEGDSKLFFLATIYALLGIPLSYLIWYRPLYRAMRTNSAFSFGWFFLCYLIHIGFCIIAAIAPPIVFHGKSLTGILAAIDTFSEHVIIGIFYFVGFALFCLETLLSIGVLQKVYMYFRGNK

SEQ ID NO: 35123 - protein, 214 aa, Zea mays subsp. mays
  peptide (1)..(214): Ceres Seq. ID no. 12367309
  misc_feature (40)..(214): Pfam Name: Pfam Description:  SCAMP family
  misc_feature (1)..(214): NCBI GI NO: 38347080 NR Description: OSJNBa0006A01.21
  misc_feature (1)..(214): NCBI GI NO: 15222550 NR Description: secretory carrier membrane protein, putative
  misc_feature (1)..(204): NCBI GI NO: 38567965 NR Description: OSJNBa0093F12.6
  misc_feature (1)..(213): NCBI GI NO: 15219893 NR Description: secretory carrier membrane protein
  misc_feature (1)..(212): NCBI GI NO: 3941289 NR Description: similarity to SCAMP37 [Pisum sativum]
  misc_feature (1)..(213): NCBI GI NO: 15226410 NR Description: putative secretory carrier-associated membraneprotein
  misc_feature (1)..(213): NCBI GI NO: 7109232 NR Description: secretory carrier membrane protein [Oryza sativa]
  misc_feature (1)..(213): NCBI GI NO: 15220305 NR Description: secretory carrier membrane protein, putative
  misc_feature (1)..(213): NCBI GI NO: 34899754 NR Description: putative secretory carrier membrane protein
  misc_feature (1)..(213): NCBI GI NO: 18379111 NR Description: expressed protein; protein id: At1g03550
MGDSRSKVKELSSWESDLKRREADIKRREEALKNAGVPMEEKNWPPFFPIIHHDIANEIPANVQKLQYLAFASWLGIVLCLSWNFVAVIVCWIKEGDSKLFFLATIYALLGIPLSYLIWYRPLYRAMRTNSAFSFGWFFLCYLIHIGFCIIAAIAPPIVFHGKSLTGILAAIDTFSEHVIIGIFYFVGFALFCLETLLSIGVLQKVYMYFRGNK

SEQ ID NO: 35124 - protein, 176 aa, Zea mays subsp. mays
  peptide (1)..(176): Ceres Seq. ID no. 12367310
  misc_feature (2)..(176): Pfam Name: Pfam Description:  SCAMP family
  misc_feature (1)..(176): NCBI GI NO: 38347080 NR Description: OSJNBa0006A01.21
  misc_feature (1)..(176): NCBI GI NO: 15222550 NR Description: secretory carrier membrane protein, putative
  misc_feature (1)..(166): NCBI GI NO: 38567965 NR Description: OSJNBa0093F12.6
  misc_feature (1)..(175): NCBI GI NO: 15219893 NR Description: secretory carrier membrane protein
  misc_feature (1)..(174): NCBI GI NO: 3941289 NR Description: similarity to SCAMP37 [Pisum sativum]
  misc_feature (1)..(175): NCBI GI NO: 15226410 NR Description: putative secretory carrier-associated membraneprotein
  misc_feature (1)..(175): NCBI GI NO: 7109232 NR Description: secretory carrier membrane protein [Oryza sativa]
  misc_feature (1)..(175): NCBI GI NO: 15220305 NR Description: secretory carrier membrane protein, putative
  misc_feature (1)..(175): NCBI GI NO: 34899754 NR Description: putative secretory carrier membrane protein
  misc_feature (1)..(175): NCBI GI NO: 18379111 NR Description: expressed protein; protein id: At1g03550
MEEKNWPPFFPIIHHDIANEIPANVQKLQYLAFASWLGIVLCLSWNFVAVIVCWIKEGDSKLFFLATIYALLGIPLSYLIWYRPLYRAMRTNSAFSFGWFFLCYLIHIGFCIIAAIAPPIVFHGKSLTGILAAIDTFSEHVIIGIFYFVGFALFCLETLLSIGVLQKVYMYFRGNK

SEQ ID NO: 35125 - DNA, 1267 bp, Zea mays subsp. mays
  misc_feature (1)..(1267): Ceres Seq. ID no. 12407374
accaattccccaatttttttgtttccattccacaaaaccacaaccgcgcggttttctccctccccggctcccgcggcgcaagcgcagcccacccaagcgccatggccgccgccgcccccgacgccgacgcctacgatatcccgtgggtggagaagtaccgcccctcccgcgtcgctgacgtcgtcggaaactccgatgccgtcgcccgcctggaggtcattgcccgcgacggcaacatgcccaacctcatcctctccgggcctccggggaccgggaagacgacgagcatcctggcgctggcgcatgagctcctcgggcccagctatcgtgatgccgtgctggagctcaatgcctcagatgacaggggtttggatgtttgtgcggaacaagatcaagatgtttgcacagaagaaggtcaccctacagccagggcggcacaaaatcgtgatcttggatgaggctgacagcatgacatcaggagcacagcaagctctgcgaagaacaatggagatctattcaaacaccactagatttgcacttgcatgcaacacatcatcaaagataattgaacccattcaaagccgatgtgctatcgtcaggttctcaaggctctctgatcaagagatcctcggtcgcctcatgattgttgtggcagctgagaaggtgccttatgcgccagaggggctggaagctatcatatttactgctgatggtgacatgagacaagctttgaacaacttgcaagctacatttagtgggttccgctttattaatcaagaaaacgtgttcaaggtgtgcgatcaaccacatcccttacatgtcaagaacatggtgaaaaacgtgctcgatggaaagtttgatgagccatgctctgcactgaagcaactttatgatctgggatactctcctactgacattatcactactctcttccgtgttgtcaagaattatgacatggctgaatatctgaagctggaaatgctgaaggaaacaggatttgcacacatgagaatctgtgatggtgttggatcatttcttcagctttctggtctacttgccaagtttgcgcttgtgagggaaactgcaaaagcaccatgaactcgttgtattccagatgataatagcttgtgtcatgctgtgctatcatggtaacctagttcagttaatagtgctgtcatgcgtggcttaatgtctacagacgtgatgtatctctgtaagagtgctttctgaagaaacaactatcatgtttgcccagtgtggcagatct

SEQ ID NO: 35126 - protein, 365 aa, Zea mays subsp. mays
  peptide (1)..(365): Ceres Seq. ID no. 12407375
  misc_feature (127)..(253): Pfam Name: AAA Pfam Description: ATPase family associated with various cellular activities
  misc_feature (127)..(364): NCBI GI NO: 15991286 NR Description: replication factor C 40kDa subunit
  misc_feature (127)..(364): NCBI GI NO: 38344372 NR Description: OSJNBb0032E06.6
  misc_feature (127)..(365): NCBI GI NO: 15221697 NR Description: replication factor, putative; protein id:At1g63160
  misc_feature (127)..(365): NCBI GI NO: 1703053 NR Description: ACTIVATOR 1 40 KD SUBUNIT
  misc_feature (127)..(354): NCBI GI NO: 11177922 NR Description: replication factor C
  misc_feature (127)..(354): NCBI GI NO: 34871892 NR Description: replication factor C 2 (40kD) [Rattus norvegicus]
  misc_feature (127)..(354): NCBI GI NO: 539678 NR Description: replication factor C - human
  misc_feature (127)..(354): NCBI GI NO: 28950096 NR Description: probable REPLICATION FACTOR C (40 KDA SUBUNIT)
  misc_feature (127)..(356): NCBI GI NO: 19114033 NR Description: replication factor C, activator 1 subunit
  misc_feature (155)..(354): NCBI GI NO: 30584413 NR Description: Homo sapiens replication factor C
TNSPIFLFPFHKTTTARFSPSPAPAAQAQPTQAPWPPPPPTPTPTISRGWRSTAPPASLTSSETPMPSPAWRSLPATATCPTSSSPGLRGPGRRRASWRWRMSSSGPAIVMPCWSSMPQMTGVWMFVRNKIKMFAQKKVTLQPGRHKIVILDEADSMTSGAQQALRRTMEIYSNTTRFALACNTSSKIIEPIQSRCAIVRFSRLSDQEILGRLMIVVAAEKVPYAPEGLEAIIFTADGDMRQALNNLQATFSGFRFINQENVFKVCDQPHPLHVKNMVKNVLDGKFDEPCSALKQLYDLGYSPTDIITTLFRVVKNYDMAEYLKLEMLKETGFAHMRICDGVGSFLQLSGLLAKFALVRETAKAP

SEQ ID NO: 35127 - protein, 300 aa, Zea mays subsp. mays
  peptide (1)..(300): Ceres Seq. ID no. 12407376
  misc_feature (62)..(188): Pfam Name: AAA Pfam Description: ATPase family associated with various cellular activities
  misc_feature (62)..(299): NCBI GI NO: 15991286 NR Description: replication factor C 40kDa subunit
  misc_feature (62)..(299): NCBI GI NO: 38344372 NR Description: OSJNBb0032E06.6
  misc_feature (62)..(300): NCBI GI NO: 15221697 NR Description: replication factor, putative; protein id:At1g63160
  misc_feature (62)..(300): NCBI GI NO: 1703053 NR Description: ACTIVATOR 1 40 KD SUBUNIT
  misc_feature (62)..(289): NCBI GI NO: 11177922 NR Description: replication factor C
  misc_feature (62)..(289): NCBI GI NO: 34871892 NR Description: replication factor C 2 (40kD) [Rattus norvegicus]
  misc_feature (62)..(289): NCBI GI NO: 539678 NR Description: replication factor C - human
  misc_feature (62)..(289): NCBI GI NO: 28950096 NR Description: probable REPLICATION FACTOR C (40 KDA SUBUNIT)
  misc_feature (62)..(291): NCBI GI NO: 19114033 NR Description: replication factor C, activator 1 subunit
  misc_feature (90)..(289): NCBI GI NO: 30584413 NR Description: Homo sapiens replication factor C
MPSPAWRSLPATATCPTSSSPGLRGPGRRRASWRWRMSSSGPAIVMPCWSSMPQMTGVWMFVRNKIKMFAQKKVTLQPGRHKIVILDEADSMTSGAQQALRRTMEIYSNTTRFALACNTSSKIIEPIQSRCAIVRFSRLSDQEILGRLMIVVAAEKVPYAPEGLEAIIFTADGDMRQALNNLQATFSGFRFINQENVFKVCDQPHPLHVKNMVKNVLDGKFDEPCSALKQLYDLGYSPTDIITTLFRVVKNYDMAEYLKLEMLKETGFAHMRICDGVGSFLQLSGLLAKFALVRETAKAP

SEQ ID NO: 35128 - protein, 264 aa, Zea mays subsp. mays
  peptide (1)..(264): Ceres Seq. ID no. 12407377
  misc_feature (26)..(152): Pfam Name: AAA Pfam Description: ATPase family associated with various cellular activities
  misc_feature (26)..(263): NCBI GI NO: 15991286 NR Description: replication factor C 40kDa subunit
  misc_feature (26)..(263): NCBI GI NO: 38344372 NR Description: OSJNBb0032E06.6
  misc_feature (26)..(264): NCBI GI NO: 15221697 NR Description: replication factor, putative; protein id:At1g63160
  misc_feature (26)..(264): NCBI GI NO: 1703053 NR Description: ACTIVATOR 1 40 KD SUBUNIT
  misc_feature (26)..(253): NCBI GI NO: 11177922 NR Description: replication factor C
  misc_feature (26)..(253): NCBI GI NO: 34871892 NR Description: replication factor C 2 (40kD) [Rattus norvegicus]
  misc_feature (26)..(253): NCBI GI NO: 539678 NR Description: replication factor C - human
  misc_feature (26)..(253): NCBI GI NO: 28950096 NR Description: probable REPLICATION FACTOR C (40 KDA SUBUNIT)
  misc_feature (26)..(255): NCBI GI NO: 19114033 NR Description: replication factor C, activator 1 subunit
  misc_feature (54)..(253): NCBI GI NO: 30584413 NR Description: Homo sapiens replication factor C
MSSSGPAIVMPCWSSMPQMTGVWMFVRNKIKMFAQKKVTLQPGRHKIVILDEADSMTSGAQQALRRTMEIYSNTTRFALACNTSSKIIEPIQSRCAIVRFSRLSDQEILGRLMIVVAAEKVPYAPEGLEAIIFTADGDMRQALNNLQATFSGFRFINQENVFKVCDQPHPLHVKNMVKNVLDGKFDEPCSALKQLYDLGYSPTDIITTLFRVVKNYDMAEYLKLEMLKETGFAHMRICDGVGSFLQLSGLLAKFALVRETAKAP

SEQ ID NO: 35129 - DNA, 1549 bp, Zea mays subsp. mays
  misc_feature (1)..(1549): Ceres Seq. ID no. 12373460
tccctcgtcttctgccgcagacgcttcccgtgatcagaatccaagaaatggcgggtccaggtccagcgcgcaccgcgcggagcgttgctctcctgtgtttcctggtttcctgcgctgcgctcgtggacagccgtggcggagccagccggccgagccggcaggacctcgatgtcggcctcggcggcgggggcgtcggcatcggcatcggcatcggcggcggcagcccttcgtcgccttctccgacgccgccgtcgtcgcagccgcagccgtgcgacttcgagaacgagcggctgtacagggcgtacctcgtgatccagcagttccggagcacggtgacgtgcgacccgatgggcgtcacgcagagctggagcggcaccgacgtgtgcagctacaagggcttcttctgcgagcggccgcccaacgtgacggaccgggccatcgcgtccgtcgacttcaacggctacatgctgcaggcggggtccctgcggggcttcgtcgacagcctgccggacctggcgctgttccacgccaactccaacgacttcggcggcgccgtgcccgcgctgggcggcctgcagtacttctacgagctggacctgagcaacaacaagctcgcgcccgccgcgttcccggcggacgtgctgggcctcaccaacgccaccttcgtcgacatccgcttcaacagcttctacggcgagctccccgccggcgtcttctgcaagctcccgcgggtgcaggccatcttcgtcaacaacaaccgcttctccggcgccctccccgacaacatcgggcagtcgccggtgaactacctctctctggccaacaacaggttcacgggggagatacccaggtccatcgcccgcaacgccggcacgctcctcgaggtgctcttcctcaacaacagcctcagcggctgcctcccccacgagctcggcctcctggagaaggccacggtcatcgacgccggcgctaaccgcctcacgggcaccatcccggcgtcgttcgcgtgcctgcgcaaggtggagcagctcaacctggcgggcaacctcttgtacggcgaggtgcccgacgcgctctgccggctcgcgttcagcaacctcaagaacctcacgctctccgacaactacttcacgtcgctcgggtcctgctgctgggacctgatcaaggaagggaggctcaacgtcgaccgcaactgcatccagtgggcgcccaaccagcgctcgcacgaggactgcgccaagttcctccgccagcccaagtcatgcccggtcaacaactacgttccgtgccgcagcaaataccaaagctccagcgagccggccgacgacgcggcggcggagtacaggtaccggacctactcggcgctgcatccttgaggtggagtggagtggagggcacttcactgattgataaagcgcattgtccgtttcgtgtgagcgtgaaacgactggtcactcgcctgggcctggccctggcccgtttgtgctcggtgggttgtgttgatgtgttgtgtcactgtgtagaaatgttgaatgttccccttcgctcg

SEQ ID NO: 35130 - protein, 457 aa, Zea mays subsp. mays
  peptide (1)..(457): Ceres Seq. ID no. 12373461
  misc_feature (20)..(457): NCBI GI NO: 32490271 NR Description: OSJNBb0116K07.13
  misc_feature (92)..(437): NCBI GI NO: 30680322 NR Description: extensin-related protein [Arabidopsis thaliana]
  misc_feature (87)..(429): NCBI GI NO: 32488397 NR Description: OSJNBa0043A12.27
  misc_feature (74)..(457): NCBI GI NO: 15230349 NR Description: unknown protein; protein id: At3g19320.1
  misc_feature (75)..(457): NCBI GI NO: 15222811 NR Description: unknown protein; protein id: At1g49750.1
  misc_feature (92)..(421): NCBI GI NO: 15221178 NR Description: putative extensin; protein id: At1g12040
  misc_feature (30)..(421): NCBI GI NO: 15233499 NR Description: extensin-like protein; protein id: At4g29240
  misc_feature (92)..(418): NCBI GI NO: 15230120 NR Description: disease resistance protein, putative
  misc_feature (92)..(440): NCBI GI NO: 15235186 NR Description: extensin-like protein; protein id: At4g33970.1
  misc_feature (91)..(424): NCBI GI NO: 15235668 NR Description: extensin-like protein; protein id: At4g13340.1
PRLLPQTLPVIRIQEMAGPGPARTARSVALLCFLVSCAALVDSRGGASRPSRQDLDVGLGGGGVGIGIGIGGGSPSSPSPTPPSSQPQPCDFENERLYRAYLVIQQFRSTVTCDPMGVTQSWSGTDVCSYKGFFCERPPNVTDRAIASVDFNGYMLQAGSLRGFVDSLPDLALFHANSNDFGGAVPALGGLQYFYELDLSNNKLAPAAFPADVLGLTNATFVDIRFNSFYGELPAGVFCKLPRVQAIFVNNNRFSGALPDNIGQSPVNYLSLANNRFTGEIPRSIARNAGTLLEVLFLNNSLSGCLPHELGLLEKATVIDAGANRLTGTIPASFACLRKVEQLNLAGNLLYGEVPDALCRLAFSNLKNLTLSDNYFTSLGSCCWDLIKEGRLNVDRNCIQWAPNQRSHEDCAKFLRQPKSCPVNNYVPCRSKYQSSSEPADDAAAEYRYRTYSALHP

SEQ ID NO: 35131 - protein, 442 aa, Zea mays subsp. mays
  peptide (1)..(442): Ceres Seq. ID no. 12373462
  misc_feature (5)..(442): NCBI GI NO: 32490271 NR Description: OSJNBb0116K07.13
  misc_feature (77)..(422): NCBI GI NO: 30680322 NR Description: extensin-related protein [Arabidopsis thaliana]
  misc_feature (72)..(414): NCBI GI NO: 32488397 NR Description: OSJNBa0043A12.27
  misc_feature (59)..(442): NCBI GI NO: 15230349 NR Description: unknown protein; protein id: At3g19320.1
  misc_feature (60)..(442): NCBI GI NO: 15222811 NR Description: unknown protein; protein id: At1g49750.1
  misc_feature (77)..(406): NCBI GI NO: 15221178 NR Description: putative extensin; protein id: At1g12040
  misc_feature (15)..(406): NCBI GI NO: 15233499 NR Description: extensin-like protein; protein id: At4g29240
  misc_feature (77)..(403): NCBI GI NO: 15230120 NR Description: disease resistance protein, putative
  misc_feature (77)..(425): NCBI GI NO: 15235186 NR Description: extensin-like protein; protein id: At4g33970.1
  misc_feature (76)..(409): NCBI GI NO: 15235668 NR Description: extensin-like protein; protein id: At4g13340.1
MAGPGPARTARSVALLCFLVSCAALVDSRGGASRPSRQDLDVGLGGGGVGIGIGIGGGSPSSPSPTPPSSQPQPCDFENERLYRAYLVIQQFRSTVTCDPMGVTQSWSGTDVCSYKGFFCERPPNVTDRAIASVDFNGYMLQAGSLRGFVDSLPDLALFHANSNDFGGAVPALGGLQYFYELDLSNNKLAPAAFPADVLGLTNATFVDIRFNSFYGELPAGVFCKLPRVQAIFVNNNRFSGALPDNIGQSPVNYLSLANNRFTGEIPRSIARNAGTLLEVLFLNNSLSGCLPHELGLLEKATVIDAGANRLTGTIPASFACLRKVEQLNLAGNLLYGEVPDALCRLAFSNLKNLTLSDNYFTSLGSCCWDLIKEGRLNVDRNCIQWAPNQRSHEDCAKFLRQPKSCPVNNYVPCRSKYQSSSEPADDAAAEYRYRTYSALHP

SEQ ID NO: 35132 - protein, 342 aa, Zea mays subsp. mays
  peptide (1)..(342): Ceres Seq. ID no. 12373463
  misc_feature (1)..(342): NCBI GI NO: 32490271 NR Description: OSJNBb0116K07.13
  misc_feature (1)..(322): NCBI GI NO: 30680322 NR Description: extensin-related protein [Arabidopsis thaliana]
  misc_feature (1)..(314): NCBI GI NO: 32488397 NR Description: OSJNBa0043A12.27
  misc_feature (1)..(342): NCBI GI NO: 15230349 NR Description: unknown protein; protein id: At3g19320.1
  misc_feature (1)..(342): NCBI GI NO: 15222811 NR Description: unknown protein; protein id: At1g49750.1
  misc_feature (1)..(306): NCBI GI NO: 15221178 NR Description: putative extensin; protein id: At1g12040
  misc_feature (1)..(306): NCBI GI NO: 15233499 NR Description: extensin-like protein; protein id: At4g29240
  misc_feature (1)..(303): NCBI GI NO: 15230120 NR Description: disease resistance protein, putative
  misc_feature (1)..(325): NCBI GI NO: 15235186 NR Description: extensin-like protein; protein id: At4g33970.1
  misc_feature (1)..(309): NCBI GI NO: 15235668 NR Description: extensin-like protein; protein id: At4g13340.1
MGVTQSWSGTDVCSYKGFFCERPPNVTDRAIASVDFNGYMLQAGSLRGFVDSLPDLALFHANSNDFGGAVPALGGLQYFYELDLSNNKLAPAAFPADVLGLTNATFVDIRFNSFYGELPAGVFCKLPRVQAIFVNNNRFSGALPDNIGQSPVNYLSLANNRFTGEIPRSIARNAGTLLEVLFLNNSLSGCLPHELGLLEKATVIDAGANRLTGTIPASFACLRKVEQLNLAGNLLYGEVPDALCRLAFSNLKNLTLSDNYFTSLGSCCWDLIKEGRLNVDRNCIQWAPNQRSHEDCAKFLRQPKSCPVNNYVPCRSKYQSSSEPADDAAAEYRYRTYSALHP

SEQ ID NO: 35133 - DNA, 1143 bp, Zea mays subsp. mays
  misc_feature (1)..(1143): Ceres Seq. ID no. 12365155
aaaagaatcacctcctcaacctccagcccaacctccagcccgggatcgagagcaatggcgctcgccaaggccaaggagatcgttgcctccgctcccctcgtcgtcttcagcaaaacttcctgccctttctgcgtccgtgtgaagcagttgttcgagaagctcggagcaagcctacaaggccattggcaacgggtacaggctggccgacaacaagttcgccgacctgacgaacgaggagttcagggccaagatgctgggcttcggacggcctcgcagcggaggcggagccgggcactccacagcgccgagcaccgtggcttgtattggaagtggactgatgggtcgtcagggttattctgatctaccgaaaagcgtggactggcgagagaagggagctgtcgcgccggtgaagagccagggggactgtggctcttgctgggcgttctccgccgttgcggccatcgagggcatcaaccagatcaagaacgggaagctggtgtccctgtcggagcaggagctggtggactgcgacaccaaggccatcggctgcgccggcgggtacatgagctgggccttcgagttcgtcatgaagaaccgcggcctcaccaccgaacggaactacccgtatcaagggctgaacggcgcctgccagacgccgaagctgaaggagagcgcggtgagcatctccgggtacatgaacgtgacgcccagcagcgagccggacctcctgcgggccgccgcggcgcagccggtgtccgtggccgtggacgccggcagcttcgtgtggcagctctacggcggcggcgtcttcacgggaccctgcaccgccgagctgaaccacggcgtcacggtggtcgggtacggcgagacccagggggacacggacggcgacggtagcggcgtgcccgggaagaagtactggatcgtcaagaactcgtgggggcccgagtggggcgacgccggctacatcctcatgcaacgcgaagccagcgtcgcgtctggcctctgcggcatcgctatgctcccgagctacccggtcatgtgatccggcggctgccgccgtcgagacctacagctgcagctctaagaacaatcagtcattatgttggccatcttttgaacaaagggcgttcctctttcccc

SEQ ID NO: 35134 - protein, 264 aa, Zea mays subsp. mays
  peptide (1)..(264): Ceres Seq. ID no. 12365156
  misc_feature (38)..(263): Pfam Name: Pfam Description:  Papain family cysteine protease
  misc_feature (1)..(263): NCBI GI NO: 544129 NR Description: Vignain precursor
  misc_feature (1)..(263): NCBI GI NO: 1345573 NR Description: endopeptidase (EP-C1) [Phaseolus vulgaris]
  misc_feature (1)..(263): NCBI GI NO: 7435774 NR Description: cysteine proteinase (EC 3.4.22.-) - kidney bean
  misc_feature (1)..(263): NCBI GI NO: 445927 NR Description: Cys endopeptidase
  misc_feature (1)..(263): NCBI GI NO: 118158 NR Description: Vignain precursor
  misc_feature (1)..(262): NCBI GI NO: 24285904 NR Description: cysteine proteinase precursor [Ipomoea batatas]
  misc_feature (1)..(262): NCBI GI NO: 37780043 NR Description: cysteine protease 1 [Trifolium repens]
  misc_feature (1)..(262): NCBI GI NO: 37780049 NR Description: cysteine protease 10 [Trifolium repens]
  misc_feature (1)..(262): NCBI GI NO: 13491750 NR Description: cysteine protease [Ipomoea batatas]
  misc_feature (1)..(262): NCBI GI NO: 40806498 NR Description: putative cysteine protease 1 [Iris hollandica]
MLGFGRPRSGGGAGHSTAPSTVACIGSGLMGRQGYSDLPKSVDWREKGAVAPVKSQGDCGSCWAFSAVAAIEGINQIKNGKLVSLSEQELVDCDTKAIGCAGGYMSWAFEFVMKNRGLTTERNYPYQGLNGACQTPKLKESAVSISGYMNVTPSSEPDLLRAAAAQPVSVAVDAGSFVWQLYGGGVFTGPCTAELNHGVTVVGYGETQGDTDGDGSGVPGKKYWIVKNSWGPEWGDAGYILMQREASVASGLCGIAMLPSYPVM

SEQ ID NO: 35135 - protein, 235 aa, Zea mays subsp. mays
  peptide (1)..(235): Ceres Seq. ID no. 12365157
  misc_feature (9)..(234): Pfam Name: Pfam Description:  Papain family cysteine protease
  misc_feature (1)..(234): NCBI GI NO: 544129 NR Description: Vignain precursor
  misc_feature (1)..(234): NCBI GI NO: 1345573 NR Description: endopeptidase (EP-C1) [Phaseolus vulgaris]
  misc_feature (1)..(234): NCBI GI NO: 7435774 NR Description: cysteine proteinase (EC 3.4.22.-) - kidney bean
  misc_feature (1)..(234): NCBI GI NO: 445927 NR Description: Cys endopeptidase
  misc_feature (1)..(234): NCBI GI NO: 118158 NR Description: Vignain precursor
  misc_feature (1)..(233): NCBI GI NO: 24285904 NR Description: cysteine proteinase precursor [Ipomoea batatas]
  misc_feature (1)..(233): NCBI GI NO: 37780043 NR Description: cysteine protease 1 [Trifolium repens]
  misc_feature (1)..(233): NCBI GI NO: 37780049 NR Description: cysteine protease 10 [Trifolium repens]
  misc_feature (1)..(233): NCBI GI NO: 13491750 NR Description: cysteine protease [Ipomoea batatas]
  misc_feature (1)..(233): NCBI GI NO: 40806498 NR Description: putative cysteine protease 1 [Iris hollandica]
MGRQGYSDLPKSVDWREKGAVAPVKSQGDCGSCWAFSAVAAIEGINQIKNGKLVSLSEQELVDCDTKAIGCAGGYMSWAFEFVMKNRGLTTERNYPYQGLNGACQTPKLKESAVSISGYMNVTPSSEPDLLRAAAAQPVSVAVDAGSFVWQLYGGGVFTGPCTAELNHGVTVVGYGETQGDTDGDGSGVPGKKYWIVKNSWGPEWGDAGYILMQREASVASGLCGIAMLPSYPVM

SEQ ID NO: 35136 - protein, 160 aa, Zea mays subsp. mays
  peptide (1)..(160): Ceres Seq. ID no. 12365158
  misc_feature (1)..(159): Pfam Name: Pfam Description:  Papain family cysteine protease
  misc_feature (1)..(159): NCBI GI NO: 544129 NR Description: Vignain precursor
  misc_feature (1)..(159): NCBI GI NO: 1345573 NR Description: endopeptidase (EP-C1) [Phaseolus vulgaris]
  misc_feature (1)..(159): NCBI GI NO: 7435774 NR Description: cysteine proteinase (EC 3.4.22.-) - kidney bean
  misc_feature (1)..(159): NCBI GI NO: 445927 NR Description: Cys endopeptidase
  misc_feature (1)..(159): NCBI GI NO: 118158 NR Description: Vignain precursor
  misc_feature (1)..(158): NCBI GI NO: 24285904 NR Description: cysteine proteinase precursor [Ipomoea batatas]
  misc_feature (1)..(158): NCBI GI NO: 37780043 NR Description: cysteine protease 1 [Trifolium repens]
  misc_feature (1)..(158): NCBI GI NO: 37780049 NR Description: cysteine protease 10 [Trifolium repens]
  misc_feature (1)..(158): NCBI GI NO: 13491750 NR Description: cysteine protease [Ipomoea batatas]
  misc_feature (1)..(158): NCBI GI NO: 40806498 NR Description: putative cysteine protease 1 [Iris hollandica]
MSWAFEFVMKNRGLTTERNYPYQGLNGACQTPKLKESAVSISGYMNVTPSSEPDLLRAAAAQPVSVAVDAGSFVWQLYGGGVFTGPCTAELNHGVTVVGYGETQGDTDGDGSGVPGKKYWIVKNSWGPEWGDAGYILMQREASVASGLCGIAMLPSYPVM

SEQ ID NO: 35137 - DNA, 1562 bp, Zea mays subsp. mays
  misc_feature (1)..(1562): Ceres Seq. ID no. 12365090
aagcccagctgacaacaccggcctccgagaagcagcgcaggcgcagggcattccagaacgttcggcggcggcgaggcgacacgcccaccaccagtcagccgccccgccacagccatgcgcctccacgccggcgcacgcctcgcgctcctgctcgcccgccgctccctctcctcctccccccgtatcccgcgggtgcacacagggatacggagcgaggcgccctcccggagctctcccttctatccgccgagcagcgcccgcaggtccttccacgggaccaggccggtggcggcaagggactactacgatgtgctcggcgtcagcaagagcgccagccaggcggagatcaaaaaggcctattatgggcttgcaaagaagctccatccagacacaaataaaggtgatgcggatgcagaacgcaagtttcaagaggttcaacgagcttatgagactctaaaggatgaacaaaaaagatcattatatgatcaggttggccctgatcagtatgagaaaactgcttctggcggaggcggaactggcttcgagggtggttttggaaatccatttgaggatatttttggtggtggcggtggcggtggtggaatgaatgatttctttaggaacatttttggggatagggactttagaggacgagatgttaaggttgcactcgaactatcatttatggaagcagttcaagggtgcagcaaaacggtcaccttccaaacgtctgtaacatgtgaaatctgtggtggagccggtgtgcctcctggaaccacacctgaaacatgtctatcttgcaggggttcaggatttatattcatgcaaaccgggcccttcaggatgcaatcaacctgcacaaaatgtggtggttctgggaaaactgtgaaggaattctgcaaggcatgcagaggaaacaaagttgtgcctggaaggaaatcagtccgccttgacatactgcctggtttggataatgaggataccataaaggtggttcgatcaggtggagaagacccagatggccgtccaggtgatctttatgtgaccctcgaggttcgtgaggatcctgttttccgaagagagaaaggtgatattcatgttgatgctgtcctgaatgtgactcaggcaattttgggagggacagttcaagtcccaactctcagtggagacgttgttctaaaggtcaagcccggtactcaacctggtcagaaggtagttctgagaggaaaagggatcaagacaagaaactcaccgcactacggagatcaatatgtccatttcaatgtcaacatccccgaaaatttgacgtctagacagcgggagctgatcgaggaattcgcgaaggaggagcaaggcgaagacgagaaggacgccaaggcagcagctggagcatcggggggatagccggttttaggagccacagtagtgccttttagctggtatttataccgtgaccatagacctgtctcaaattcgcagcgaaaaaaatatatagataggtctttgtttcggattttgtagctggaataaatggataatacgtctagaactgattttctgcc

SEQ ID NO: 35138 - protein, 429 aa, Zea mays subsp. mays
  peptide (1)..(429): Ceres Seq. ID no. 12365091
  misc_feature (289)..(394): Pfam Name: Pfam Description:  DnaJ C terminal region
  misc_feature (50)..(427): NCBI GI NO: 18422864 NR Description: DnaJ protein-like; protein id: At5g48030
  misc_feature (50)..(427): NCBI GI NO: 21429604 NR Description: GFA2 [Arabidopsis thaliana]
  misc_feature (50)..(427): NCBI GI NO: 21553367 NR Description: DnaJ protein-like [Arabidopsis thaliana]
  misc_feature (50)..(427): NCBI GI NO: 10177754 NR Description: DnaJ protein-like [Arabidopsis thaliana]
  misc_feature (235)..(394): NCBI GI NO: 34897976 NR Description: DnaJ protein-like~contains EST AU181927(C61864)
  misc_feature (61)..(421): NCBI GI NO: 15675997 NR Description: dnaJ protein [Neisseria meningitidis MC58]
  misc_feature (58)..(428): NCBI GI NO: 15599954 NR Description: DnaJ protein [Pseudomonas aeruginosa PA01]
  misc_feature (58)..(415): NCBI GI NO: 34497100 NR Description: heat shock protein dnaJ; chaperone with DnaK
  misc_feature (58)..(415): NCBI GI NO: 15640872 NR Description: dnaJ protein [Vibrio cholerae]
  misc_feature (54)..(420): NCBI GI NO: 26451496 NR Description: putative AtJ1 [Arabidopsis thaliana]
MRLHAGARLALLLARRSLSSSPRIPRVHTGIRSEAPSRSSPFYPPSSARRSFHGTRPVAARDYYDVLGVSKSASQAEIKKAYYGLAKKLHPDTNKGDADAERKFQEVQRAYETLKDEQKRSLYDQVGPDQYEKTASGGGGTGFEGGFGNPFEDIFGGGGGGGGMNDFFRNIFGDRDFRGRDVKVALELSFMEAVQGCSKTVTFQTSVTCEICGGAGVPPGTTPETCLSCRGSGFIFMQTGPFRMQSTCTKCGGSGKTVKEFCKACRGNKVVPGRKSVRLDILPGLDNEDTIKVVRSGGEDPDGRPGDLYVTLEVREDPVFRREKGDIHVDAVLNVTQAILGGTVQVPTLSGDVVLKVKPGTQPGQKVVLRGKGIKTRNSPHYGDQYVHFNVNIPENLTSRQRELIEEFAKEEQGEDEKDAKAAAGASGG

SEQ ID NO: 35139 - protein, 266 aa, Zea mays subsp. mays
  peptide (1)..(266): Ceres Seq. ID no. 12365092
  misc_feature (126)..(231): Pfam Name: Pfam Description:  DnaJ C terminal region
  misc_feature (1)..(264): NCBI GI NO: 18422864 NR Description: DnaJ protein-like; protein id: At5g48030
  misc_feature (1)..(264): NCBI GI NO: 21429604 NR Description: GFA2 [Arabidopsis thaliana]
  misc_feature (1)..(264): NCBI GI NO: 21553367 NR Description: DnaJ protein-like [Arabidopsis thaliana]
  misc_feature (1)..(264): NCBI GI NO: 10177754 NR Description: DnaJ protein-like [Arabidopsis thaliana]
  misc_feature (72)..(231): NCBI GI NO: 34897976 NR Description: DnaJ protein-like~contains EST AU181927(C61864)
  misc_feature (1)..(258): NCBI GI NO: 15675997 NR Description: dnaJ protein [Neisseria meningitidis MC58]
  misc_feature (1)..(265): NCBI GI NO: 15599954 NR Description: DnaJ protein [Pseudomonas aeruginosa PA01]
  misc_feature (1)..(252): NCBI GI NO: 34497100 NR Description: heat shock protein dnaJ; chaperone with DnaK
  misc_feature (1)..(252): NCBI GI NO: 15640872 NR Description: dnaJ protein [Vibrio cholerae]
  misc_feature (1)..(257): NCBI GI NO: 26451496 NR Description: putative AtJ1 [Arabidopsis thaliana]
MNDFFRNIFGDRDFRGRDVKVALELSFMEAVQGCSKTVTFQTSVTCEICGGAGVPPGTTPETCLSCRGSGFIFMQTGPFRMQSTCTKCGGSGKTVKEFCKACRGNKVVPGRKSVRLDILPGLDNEDTIKVVRSGGEDPDGRPGDLYVTLEVREDPVFRREKGDIHVDAVLNVTQAILGGTVQVPTLSGDVVLKVKPGTQPGQKVVLRGKGIKTRNSPHYGDQYVHFNVNIPENLTSRQRELIEEFAKEEQGEDEKDAKAAAGASGG

SEQ ID NO: 35140 - protein, 239 aa, Zea mays subsp. mays
  peptide (1)..(239): Ceres Seq. ID no. 12365093
  misc_feature (99)..(204): Pfam Name: Pfam Description:  DnaJ C terminal region
  misc_feature (1)..(237): NCBI GI NO: 18422864 NR Description: DnaJ protein-like; protein id: At5g48030
  misc_feature (1)..(237): NCBI GI NO: 21429604 NR Description: GFA2 [Arabidopsis thaliana]
  misc_feature (1)..(237): NCBI GI NO: 21553367 NR Description: DnaJ protein-like [Arabidopsis thaliana]
  misc_feature (1)..(237): NCBI GI NO: 10177754 NR Description: DnaJ protein-like [Arabidopsis thaliana]
  misc_feature (45)..(204): NCBI GI NO: 34897976 NR Description: DnaJ protein-like~contains EST AU181927(C61864)
  misc_feature (1)..(231): NCBI GI NO: 15675997 NR Description: dnaJ protein [Neisseria meningitidis MC58]
  misc_feature (1)..(238): NCBI GI NO: 15599954 NR Description: DnaJ protein [Pseudomonas aeruginosa PA01]
  misc_feature (1)..(225): NCBI GI NO: 34497100 NR Description: heat shock protein dnaJ; chaperone with DnaK
  misc_feature (1)..(225): NCBI GI NO: 15640872 NR Description: dnaJ protein [Vibrio cholerae]
  misc_feature (1)..(230): NCBI GI NO: 26451496 NR Description: putative AtJ1 [Arabidopsis thaliana]
MEAVQGCSKTVTFQTSVTCEICGGAGVPPGTTPETCLSCRGSGFIFMQTGPFRMQSTCTKCGGSGKTVKEFCKACRGNKVVPGRKSVRLDILPGLDNEDTIKVVRSGGEDPDGRPGDLYVTLEVREDPVFRREKGDIHVDAVLNVTQAILGGTVQVPTLSGDVVLKVKPGTQPGQKVVLRGKGIKTRNSPHYGDQYVHFNVNIPENLTSRQRELIEEFAKEEQGEDEKDAKAAAGASGG

SEQ ID NO: 35141 - DNA, 1191 bp, Zea mays subsp. mays; identical to SEQ ID NO: 32751
  misc_feature (1)..(1191): Ceres Seq. ID no. 13634967

SEQ ID NO: 35142 - protein, 128 aa, Zea mays subsp. mays; identical to SEQ ID NO: 32752
  peptide (1)..(128): Ceres Seq. ID no. 13634968
  misc_feature (1)..(75): Pfam Name: Pfam Description:  K-box region
  misc_feature (1)..(128): NCBI GI NO: 1006768 NR Description: ZMM2 [Zea mays]
  misc_feature (1)..(128): NCBI GI NO: 2130078 NR Description: MADS-box protein 3 - rice
  misc_feature (1)..(128): NCBI GI NO: 34903684 NR Description: putative MADS-box protein
  misc_feature (1)..(128): NCBI GI NO: 19698536 NR Description: AGAMOUS-like protein 1 HvAG1
  misc_feature (1)..(128): NCBI GI NO: 29372746 NR Description: putative MADS-domain transcription factor
  misc_feature (1)..(128): NCBI GI NO: 7446524 NR Description: hypothetical protein - maize
  misc_feature (1)..(128): NCBI GI NO: 18650789 NR Description: MADS-box transcription factor
  misc_feature (1)..(125): NCBI GI NO: 19698538 NR Description: AGAMOUS-like protein 2 HvAG2
  misc_feature (1)..(119): NCBI GI NO: 24636577 NR Description: MADS box transcription factor [Triticum aestivum]
  misc_feature (1)..(127): NCBI GI NO: 3913007 NR Description: AGAMOUS protein (NAG1)

SEQ ID NO: 35143 - protein, 108 aa, Zea mays subsp. mays; identical to SEQ ID NO: 32753
  peptide (1)..(108): Ceres Seq. ID no. 13634969
  misc_feature (1)..(55): Pfam Name: Pfam Description:  K-box region
  misc_feature (1)..(108): NCBI GI NO: 1006768 NR Description: ZMM2 [Zea mays]
  misc_feature (1)..(108): NCBI GI NO: 2130078 NR Description: MADS-box protein 3 - rice
  misc_feature (1)..(108): NCBI GI NO: 34903684 NR Description: putative MADS-box protein
  misc_feature (1)..(108): NCBI GI NO: 19698536 NR Description: AGAMOUS-like protein 1 HvAG1
  misc_feature (1)..(108): NCBI GI NO: 29372746 NR Description: putative MADS-domain transcription factor
  misc_feature (1)..(108): NCBI GI NO: 7446524 NR Description: hypothetical protein - maize
  misc_feature (1)..(108): NCBI GI NO: 18650789 NR Description: MADS-box transcription factor
  misc_feature (1)..(105): NCBI GI NO: 19698538 NR Description: AGAMOUS-like protein 2 HvAG2
  misc_feature (1)..(99): NCBI GI NO: 24636577 NR Description: MADS box transcription factor [Triticum aestivum]
  misc_feature (1)..(107): NCBI GI NO: 3913007 NR Description: AGAMOUS protein (NAG1)

SEQ ID NO: 35144 - protein, 100 aa, Zea mays subsp. mays; identical to SEQ ID NO: 32754
  peptide (1)..(100): Ceres Seq. ID no. 13634970
  misc_feature (1)..(100): NCBI GI NO: 1006768 NR Description: ZMM2 [Zea mays]
  misc_feature (1)..(100): NCBI GI NO: 2130078 NR Description: MADS-box protein 3 - rice
  misc_feature (1)..(100): NCBI GI NO: 34903684 NR Description: putative MADS-box protein
  misc_feature (1)..(100): NCBI GI NO: 19698536 NR Description: AGAMOUS-like protein 1 HvAG1
  misc_feature (1)..(100): NCBI GI NO: 29372746 NR Description: putative MADS-domain transcription factor
  misc_feature (1)..(100): NCBI GI NO: 7446524 NR Description: hypothetical protein - maize
  misc_feature (1)..(100): NCBI GI NO: 18650789 NR Description: MADS-box transcription factor
  misc_feature (1)..(97): NCBI GI NO: 19698538 NR Description: AGAMOUS-like protein 2 HvAG2
  misc_feature (1)..(91): NCBI GI NO: 24636577 NR Description: MADS box transcription factor [Triticum aestivum]
  misc_feature (1)..(99): NCBI GI NO: 3913007 NR Description: AGAMOUS protein (NAG1)

SEQ ID NO: 35145 - DNA, 1273 bp, Zea mays subsp. mays
  misc_feature (1)..(1273): Ceres Seq. ID no. 12351874
atcgtccccgcctgcacctcgcgagcatccaaagctgtacttgcggcaagttctcgcaaaatcctactcccaccgccgactcgtacctccgctcccctcctccccaacccttccacgcttgcttctccgggagggaaggcacacgggaggtcgccccgccacccatcgcaaaagccacgcgccaccaaactcttttttccctcacccagtcgctttcgcgttcagcgcgagctgagccagccagtgggtcggtcgctggaggcggagccataaaggcgtcagcgacggcagcatgatgagcggcagatcgggcgggagggacgccgagggcgagtgggaggttcggcccggcgggatgctggtgcagcgcagggacggtgaggcggccggccccgtcatcaggatcagggtctcccacggcgccaacttccgcgaggtcgtcgtgccggcgcaggctaccttcggtgagttgaagaggatccttgttcagactactggcttggagcctgagaggcagaggctcttcttccgtgggaaggagaagagtgacagagagttcctgcacacggcaggtgttaaggatggagcaaagctgcttctgctcgagaagcctgcccctgccaacatagagcagaaggttgagcctgtgattatggatgaaagcatgatgaaggcatgtgcggctgttgctcgtgttagagttgaagttgataagctgtctgctaaggtgtgtgacttggagaagaatgtactaggagggagaaaggttgaggataaagaatttgttgtcttgacggagctgcttatgatgcagctgctgaaactcgatggcattgaagctgaaggagaagcaagggcacagaggaaggctgaggtgcgccgagttcagtcccttgtggagaccttggataagctgaaagcaagaaatgcaaaccccttcagcgatcataataaggctgtttcagtaacaacgcagtgggagacgtttgagaacggcatgggcagcttgagtgctccacctccccgtgtttcttcaacgcaagctaacactgactgggagcagttcgactaggctcagatgaagctgttgatgtatcatgaaatctgtgagatcggtatggacattcctttccgaggcagcgaggtgttgtgtatatgcaccacgtttgataacttttggcgtcccaagtgcctgtgattctgtgaatgttaccagatcgtgccactgccatactaccatgtgaattgcatcgctcattgagggtcatattcc

SEQ ID NO: 35146 - protein, 259 aa, Zea mays subsp. mays
  peptide (1)..(259): Ceres Seq. ID no. 12351875
  misc_feature (128)..(209): Pfam Name: Pfam Description:  BAG domain
  misc_feature (58)..(259): NCBI GI NO: 34907972 NR Description: P0446G04.18
  misc_feature (4)..(58): NCBI GI NO: 34907972 NR Description: P0446G04.18
  misc_feature (12)..(259): NCBI GI NO: 15231035 NR Description: putative protein; protein id: At3g51780
  misc_feature (12)..(259): NCBI GI NO: 19699283 NR Description: At3g51780/ORF3 [Arabidopsis thaliana]
  misc_feature (12)..(259): NCBI GI NO: 21554254 NR Description: unknown [Arabidopsis thaliana]
  misc_feature (1)..(213): NCBI GI NO: 25553557 NR Description: OSJNBa0038F22.4
  misc_feature (1)..(213): NCBI GI NO: 34898024 NR Description: ESTs AU082174
  misc_feature (1)..(213): NCBI GI NO: 15242267 NR Description: putative protein; protein id: At5g52060.1
  misc_feature (7)..(233): NCBI GI NO: 21537107 NR Description: unknown [Arabidopsis thaliana]
  misc_feature (1)..(233): NCBI GI NO: 6624711 NR Description: hypothetical protein
MMSGRSGGRDAEGEWEVRPGGMLVQRRDGEAAGPVIRIRVSHGANFREVVVPAQATFGELKRILVQTTGLEPERQRLFFRGKEKSDREFLHTAGVKDGAKLLLLEKPAPANIEQKVEPVIMDESMMKACAAVARVRVEVDKLSAKVCDLEKNVLGGRKVEDKEFVVLTELLMMQLLKLDGIEAEGEARAQRKAEVRRVQSLVETLDKLKARNANPFSDHNKAVSVTTQWETFENGMGSLSAPPPRVSSTQANTDWEQFD

SEQ ID NO: 35147 - protein, 258 aa, Zea mays subsp. mays
  peptide (1)..(258): Ceres Seq. ID no. 12351876
  misc_feature (127)..(208): Pfam Name: Pfam Description:  BAG domain
  misc_feature (57)..(258): NCBI GI NO: 34907972 NR Description: P0446G04.18
  misc_feature (3)..(57): NCBI GI NO: 34907972 NR Description: P0446G04.18
  misc_feature (11)..(258): NCBI GI NO: 15231035 NR Description: putative protein; protein id: At3g51780
  misc_feature (11)..(258): NCBI GI NO: 19699283 NR Description: At3g51780/ORF3 [Arabidopsis thaliana]
  misc_feature (11)..(258): NCBI GI NO: 21554254 NR Description: unknown [Arabidopsis thaliana]
  misc_feature (1)..(212): NCBI GI NO: 25553557 NR Description: OSJNBa0038F22.4
  misc_feature (1)..(212): NCBI GI NO: 34898024 NR Description: ESTs AU082174
  misc_feature (1)..(212): NCBI GI NO: 15242267 NR Description: putative protein; protein id: At5g52060.1
  misc_feature (6)..(232): NCBI GI NO: 21537107 NR Description: unknown [Arabidopsis thaliana]
  misc_feature (1)..(232): NCBI GI NO: 6624711 NR Description: hypothetical protein
MSGRSGGRDAEGEWEVRPGGMLVQRRDGEAAGPVIRIRVSHGANFREVVVPAQATFGELKRILVQTTGLEPERQRLFFRGKEKSDREFLHTAGVKDGAKLLLLEKPAPANIEQKVEPVIMDESMMKACAAVARVRVEVDKLSAKVCDLEKNVLGGRKVEDKEFVVLTELLMMQLLKLDGIEAEGEARAQRKAEVRRVQSLVETLDKLKARNANPFSDHNKAVSVTTQWETFENGMGSLSAPPPRVSSTQANTDWEQFD

SEQ ID NO: 35148 - protein, 238 aa, Zea mays subsp. mays
  peptide (1)..(238): Ceres Seq. ID no. 12351877
  misc_feature (107)..(188): Pfam Name: Pfam Description:  BAG domain
  misc_feature (37)..(238): NCBI GI NO: 34907972 NR Description: P0446G04.18
  misc_feature (1)..(37): NCBI GI NO: 34907972 NR Description: P0446G04.18
  misc_feature (1)..(238): NCBI GI NO: 15231035 NR Description: putative protein; protein id: At3g51780
  misc_feature (1)..(238): NCBI GI NO: 21554254 NR Description: unknown [Arabidopsis thaliana]
  misc_feature (1)..(238): NCBI GI NO: 19699283 NR Description: At3g51780/ORF3 [Arabidopsis thaliana]
  misc_feature (1)..(192): NCBI GI NO: 25553557 NR Description: OSJNBa0038F22.4
  misc_feature (1)..(192): NCBI GI NO: 34898024 NR Description: ESTs AU082174
  misc_feature (1)..(192): NCBI GI NO: 15242267 NR Description: putative protein; protein id: At5g52060.1
  misc_feature (1)..(212): NCBI GI NO: 21537107 NR Description: unknown [Arabidopsis thaliana]
  misc_feature (1)..(212): NCBI GI NO: 6624711 NR Description: hypothetical protein
MLVQRRDGEAAGPVIRIRVSHGANFREVVVPAQATFGELKRILVQTTGLEPERQRLFFRGKEKSDREFLHTAGVKDGAKLLLLEKPAPANIEQKVEPVIMDESMMKACAAVARVRVEVDKLSAKVCDLEKNVLGGRKVEDKEFVVLTELLMMQLLKLDGIEAEGEARAQRKAEVRRVQSLVETLDKLKARNANPFSDHNKAVSVTTQWETFENGMGSLSAPPPRVSSTQANTDWEQFD

SEQ ID NO: 35149 - DNA, 1526 bp, Zea mays subsp. mays
  misc_feature (1)..(1526): Ceres Seq. ID no. 12411257
aagagaccagggctgaactgctgaagctgagataggattgagaatcgctgccagtggaaagcggcactagcagcagggcagaagcaagaaccagcaagaaaggggagagagaaagcggaaggactttttctcggattggatccttcgcttttgggggaaggagaaggcccctctctgtcctctctccatccttgcggagggcgctagcaggcagcagcggaaggaggaagagatgttcccgcctggcctgatccaccaccgccctgacgcccccgttcccggcgatggggcgacgcgctccggccccggcgggccgagccttgtactgacggcggaccccaagcccaggctgcggtggacggccgacctccacgagcgtttcgtcgacgccgtggcccagctcggcggacccgagaaagcaacaccaaaaactatcttaaggacaatgggcgtcaagggtcttactctttttcacttgaagagccatcttcagaaatacagattagggaaacaatctggtaaggagggatcagagcaatctaaagatgcatcctatcttctagatgctcaaagtggaatgagcgtgtcccctagagttcctgcccaggatatgaaagaaagccaagaagttaaagaagcactgagagcgcagatggaagtccaaagaagactgcatgaacaagtggaggtccaaaagcgcgtgcagatcagaatggaagcgtttcagaagtacatcgacagtatcctggagagcgcgtgcaagatggtcaccgaacagttcgcttcaagtggcttcagcatctctgaccctgatctcccggagatatcccctggaggggtggtcatgtgtggcggccccacggacacgttgagctcgtcggtgttcaaccagctttccgtcagctccatcggctcgcacagtccaggaggcaaaccttccccttccccatcaggcatggaatgtccgccgctgctcctccacaagtcgcatgagctcaagcggaggtcctcttgaactgacaaatcggcgaagcctgagggcgcggtgatggctgtctttgctagtgttgtcggatatggtggtactggtggtgacaagggaaattggtggtccagtcttgtggtagctgactttctccaggtagcaagatattgctgtgtttgtttgatcagtcaaagcatcaaacagacagacctacgttcatgtgaactgcctcatgcatgtgctagattgaaaaaaaaagttatcatattttgtcatgagattatgattctactagctagcatccttagcacacttgagatgttgttgactcgtgtcctagtgtcctctgtgttgatccatgtatgcacagcgattcatgttgggagttgggactgggacatgttaacaccagatgtttcaagcttcgtactttgcctcagttgtccatgcatgcagcaggcatcccagtacttcacctgctgttgaacttgaagactagtgtattcagcttatgaaagattcatgctgagtttgtaccccc

SEQ ID NO: 35150 - protein, 260 aa, Zea mays subsp. mays
  peptide (1)..(260): Ceres Seq. ID no. 12411258
  misc_feature (39)..(90): Pfam Name: Pfam Description:  Myb-like DNA-binding domain
  misc_feature (1)..(259): NCBI GI NO: 29647444 NR Description: P0410E11.32
  misc_feature (10)..(226): NCBI GI NO: 18414049 NR Description: putative protein; protein id: At4g13640
  misc_feature (16)..(199): NCBI GI NO: 18404044 NR Description: transfactor, putative; protein id: At3g24120
  misc_feature (16)..(199): NCBI GI NO: 11994231 NR Description: contains similarity to transfactor~gene_id:MUJ8.2
  misc_feature (26)..(186): NCBI GI NO: 25406584 NR Description: hypothetical protein T8K14.15
  misc_feature (30)..(226): NCBI GI NO: 7485694 NR Description: hypothetical protein F18A5
  misc_feature (26)..(186): NCBI GI NO: 30699418 NR Description: transfactor -related [Arabidopsis thaliana]
  misc_feature (30)..(185): NCBI GI NO: 32470629 NR Description: putative phosphate starvation response regulator
  misc_feature (30)..(177): NCBI GI NO: 11994415 NR Description: contains similarity to transfactor~gene_id:MBK21
  misc_feature (23)..(198): NCBI GI NO: 6223653 NR Description: transfactor-like [Arabidopsis thaliana]
MFPPGLIHHRPDAPVPGDGATRSGPGGPSLVLTADPKPRLRWTADLHERFVDAVAQLGGPEKATPKTILRTMGVKGLTLFHLKSHLQKYRLGKQSGKEGSEQSKDASYLLDAQSGMSVSPRVPAQDMKESQEVKEALRAQMEVQRRLHEQVEVQKRVQIRMEAFQKYIDSILESACKMVTEQFASSGFSISDPDLPEISPGGVVMCGGPTDTLSSSVFNQLSVSSIGSHSPGGKPSPSPSGMECPPLLLHKSHELKRRSS

SEQ ID NO: 35151 - protein, 189 aa, Zea mays subsp. mays
  peptide (1)..(189): Ceres Seq. ID no. 12411259
  misc_feature (1)..(188): NCBI GI NO: 29647444 NR Description: P0410E11.32
  misc_feature (1)..(155): NCBI GI NO: 18414049 NR Description: putative protein; protein id: At4g13640
  misc_feature (1)..(128): NCBI GI NO: 18404044 NR Description: transfactor, putative; protein id: At3g24120
  misc_feature (1)..(128): NCBI GI NO: 11994231 NR Description: contains similarity to transfactor~gene_id:MUJ8.2
  misc_feature (1)..(115): NCBI GI NO: 25406584 NR Description: hypothetical protein T8K14.15
  misc_feature (1)..(155): NCBI GI NO: 7485694 NR Description: hypothetical protein F18A5
  misc_feature (1)..(115): NCBI GI NO: 30699418 NR Description: transfactor -related [Arabidopsis thaliana]
  misc_feature (1)..(114): NCBI GI NO: 32470629 NR Description: putative phosphate starvation response regulator
  misc_feature (1)..(106): NCBI GI NO: 11994415 NR Description: contains similarity to transfactor~gene_id:MBK21
  misc_feature (1)..(127): NCBI GI NO: 6223653 NR Description: transfactor-like [Arabidopsis thaliana]
MGVKGLTLFHLKSHLQKYRLGKQSGKEGSEQSKDASYLLDAQSGMSVSPRVPAQDMKESQEVKEALRAQMEVQRRLHEQVEVQKRVQIRMEAFQKYIDSILESACKMVTEQFASSGFSISDPDLPEISPGGVVMCGGPTDTLSSSVFNQLSVSSIGSHSPGGKPSPSPSGMECPPLLLHKSHELKRRSS

SEQ ID NO: 35152 - protein, 145 aa, Zea mays subsp. mays
  peptide (1)..(145): Ceres Seq. ID no. 12411260
  misc_feature (1)..(144): NCBI GI NO: 29647444 NR Description: P0410E11.32
  misc_feature (1)..(111): NCBI GI NO: 18414049 NR Description: putative protein; protein id: At4g13640
  misc_feature (1)..(84): NCBI GI NO: 18404044 NR Description: transfactor, putative; protein id: At3g24120
  misc_feature (1)..(84): NCBI GI NO: 11994231 NR Description: contains similarity to transfactor~gene_id:MUJ8.2
  misc_feature (1)..(71): NCBI GI NO: 25406584 NR Description: hypothetical protein T8K14.15
  misc_feature (1)..(111): NCBI GI NO: 7485694 NR Description: hypothetical protein F18A5
  misc_feature (1)..(71): NCBI GI NO: 30699418 NR Description: transfactor -related [Arabidopsis thaliana]
  misc_feature (1)..(70): NCBI GI NO: 32470629 NR Description: putative phosphate starvation response regulator
  misc_feature (1)..(62): NCBI GI NO: 11994415 NR Description: contains similarity to transfactor~gene_id:MBK21
  misc_feature (1)..(83): NCBI GI NO: 6223653 NR Description: transfactor-like [Arabidopsis thaliana]
MSVSPRVPAQDMKESQEVKEALRAQMEVQRRLHEQVEVQKRVQIRMEAFQKYIDSILESACKMVTEQFASSGFSISDPDLPEISPGGVVMCGGPTDTLSSSVFNQLSVSSIGSHSPGGKPSPSPSGMECPPLLLHKSHELKRRSS

SEQ ID NO: 35153 - DNA, 1328 bp, Zea mays subsp. mays
  misc_feature (1)..(1328): Ceres Seq. ID no. 12341356
accggatgacccagcgtgcctcgtgcgcgcctcccttgtctgcaaggcttggcggaagctcctctctagccgcatcttcctccgccgctaccgcagattccacggcgcgccgcccctgcttggcttcctctacaacatctacgacgaacgcccctgtgctcgattcgtcgtcgccgccgacgccgccaccacattccccttctctgcaccggcgttcgaccaattcgatttgtggttcattgagtgccgccacgggcgcgcgctgctacaaactttcgagcggcatgcgcccgcgcgcctcgtcgtctgggacctcatcacgggcgaccagcagcacataccaattcccgtgcccgggtacccttacttctgccgcaccgcagctgttctctgcgccgcggatggctgcgaccatcttgactgccacgggggccgatacctcgtcgtcgtcataggcgcctacgaagaagatactctcaggtgggcgagcgtttactcatcagagactggcgtatgggctacgtcatcctccattcaaattgatgcctacgtcgagcaaaggcccagcctccttgccggtgacgcgctctactttagcgcacaggaaggcaaaatgattgtcaaatacgacctcaatggacagagcctacatgtgatcaatgcgccggatatgtttgagccaacagagggcattgctgtgaccgtggaggacggtggtttgggactcgccggagtgaaggatggcaacctccacctttggtcatggcaggttggtcctggcggcattgcggaatgggtgcaaggcagaatcgtaaagttgaggacgctcttccctattcttaaaccgctggactcacttgatgtgattggcttccaagagggcacagataccattttcattagcatagatatggaggtcttcgcagtcatgctcagatcggagcaggtgaagaaggtaggcaagacgggctccaaatatgccatggcaccctatgtgagcttctacactccagatcttgcgaagggcagattgctatcaccatgaagatgcagtgatccatccattaacatggccgtggcactattgacttcttaaggagatgatgagttaaagtgtttttccagtttggacggttatggaaaaaaagcaagttaccatgttcattcagaaaagtttagtttcttacctgtgcagtttaagtaaggaactgtaagaacaggatatcatcgtcaaaatggctagtctattagttaggctgttcaagagattggttggttttattgtggccttttcgctattgttattttataagggatgccctgtgtcc

SEQ ID NO: 35154 - protein, 347 aa, Zea mays subsp. mays
  peptide (1)..(347): Ceres Seq. ID no. 12341357
  misc_feature (1)..(347): NCBI GI NO: 34915420 NR Description: contains EST C98814
  misc_feature (1)..(347): NCBI GI NO: 33146558 NR Description: unknown protein
  misc_feature (1)..(336): NCBI GI NO: 34915424 NR Description: hypothetical protein~similar to Oryza sativachromosome1
  misc_feature (1)..(243): NCBI GI NO: 34915428 NR Description: hypothetical protein~similar to Oryza sativachromosome1
  misc_feature (288)..(347): NCBI GI NO: 34915428 NR Description: hypothetical protein~similar to Oryza sativachromosome1
  misc_feature (1)..(346): NCBI GI NO: 34394503 NR Description: unknown protein
  misc_feature (1)..(337): NCBI GI NO: 34914028 NR Description: OJ1014_G12.29
  misc_feature (1)..(337): NCBI GI NO: 34394504 NR Description: unknown protein
  misc_feature (127)..(344): NCBI GI NO: 34394502 NR Description: hypothetical protein
  misc_feature (2)..(91): NCBI GI NO: 34394502 NR Description: hypothetical protein
PDDPACLVRASLVCKAWRKLLSSRIFLRRYRRFHGAPPLLGFLYNIYDERPCARFVVAADAATTFPFSAPAFDQFDLWFIECRHGRALLQTFERHAPARLVVWDLITGDQQHIPIPVPGYPYFCRTAAVLCAADGCDHLDCHGGRYLVVVIGAYEEDTLRWASVYSSETGVWATSSSIQIDAYVEQRPSLLAGDALYFSAQEGKMIVKYDLNGQSLHVINAPDMFEPTEGIAVTVEDGGLGLAGVKDGNLHLWSWQVGPGGIAEWVQGRIVKLRTLFPILKPLDSLDVIGFQEGTDTIFISIDMEVFAVMLRSEQVKKVGKTGSKYAMAPYVSFYTPDLAKGRLLSP

SEQ ID NO: 35155 - DNA, 1535 bp, Zea mays subsp. mays
  misc_feature (1)..(1535): Ceres Seq. ID no. 12351554
gatagaacacgacctggggggttcagatcggatcggaagcttccataagtttccatcgggcttcgccggtatggcgatccgcaaggggtcttcgtacgccgtcgcggcacttctcgcgctcgcctctgtcgccgccgttgcaggggaggtcttcttccaggagaagttcgaagatggctgggaaagtcggtgggtcaagtccgagtggaagaaggatgagaacatggctggtgaatggaaccacacctcgggaaaatggaatggagatgccgaggacaaaggtattcaaacctccgaggattacaggttctatgccatttcagccgaataccctgagttcagcaacaaggataagaccctggtgctgcagttctctgtgaagcacgagcagaagcttgactgcggtggtggctacgtcaagttgctgggtggtggtgatgtagaccagaagaaatttggtggagacacatcttacagcattatgtttggaccagatatctgtgggtacagcaccaagaaggttcacactatcctgaccaaggatggcaagaaccacttgatcaagaaggatgtgccttgtgagactgatcagttgactcatgtttacactttgatcatccgtcctgatgcaacatacagcattctcattgataatgaagataagcaaactggcagcatctacgagcactgggatattcttccccctaagaaaatcaaggacccagaggctaagaagcctgaggactgggatgacaaggagtacattcctgaccctgaggacaagaagccagagggctatgatgatattcccaaggaaattcctgaccctgatgctaagaagcctgaggactgggacgatgaggaagatggtgaatggactgcccctaccattcccaacccagaatacaagggaccatggaaacaaaagaaaatcaagaacccgaactaccagggtaaatggaaggcacctatgattgacaacccagattttaaggatgatccatacatttacgccttcgacagcttgaagtacattggcattgagctgtggcaggttaaaatcgggcactctgtttgacaacatcatcatcactgatgaccctgccttggccaagacttttgcagaggagacctggggcaagcacaaggaggcagaaaaggctgcttttgatgaggccgagaaaaaaaaggaagaagaggatgccgccaagggtggggatgatgaggatgatgacctagaggatgaggaagacgatgagaaggcagacgaggacaaggccgactctgatgccgaggatggcaaggattctgatgatgagaagcacgacgagctctagatggcgaggatgatgttgcggccgctggcctagatttatcagctctgccactatgaagttctttttttttcccgtgaccaccaagaatgtagaacactgctaataagcagatggacagtttgggtcgccgtagcgctttgtagtcatttttcccattaaagccgataacactgaacaaggaggaaggatcttttgccc

SEQ ID NO: 35156 - protein, 358 aa, Zea mays subsp. mays
  peptide (1)..(358): Ceres Seq. ID no. 12351555
  misc_feature (50)..(355): Pfam Name: Pfam Description:  Calreticulin family
  misc_feature (36)..(355): NCBI GI NO: 7441498 NR Description: calreticulin - barley (fragment)
  misc_feature (33)..(355): NCBI GI NO: 7441499 NR Description: calreticulin - barley (fragment)
  misc_feature (24)..(355): NCBI GI NO: 11131838 NR Description: Calreticulin precursor
  misc_feature (24)..(358): NCBI GI NO: 2119370 NR Description: calreticulin precursor - maize
  misc_feature (24)..(355): NCBI GI NO: 11131745 NR Description: Calreticulin precursor
  misc_feature (28)..(355): NCBI GI NO: 11131631 NR Description: Calreticulin precursor
  misc_feature (24)..(355): NCBI GI NO: 11131769 NR Description: Calreticulin precursor
  misc_feature (38)..(355): NCBI GI NO: 11131949 NR Description: Calreticulin precursor
  misc_feature (24)..(358): NCBI GI NO: 11131840 NR Description: Calreticulin precursor
  misc_feature (24)..(355): NCBI GI NO: 11131904 NR Description: Calreticulin precursor
IEHDLGGSDRIGSFHKFPSGFAGMAIRKGSSYAVAALLALASVAAVAGEVFFQEKFEDGWESRWVKSEWKKDENMAGEWNHTSGKWNGDAEDKGIQTSEDYRFYAISAEYPEFSNKDKTLVLQFSVKHEQKLDCGGGYVKLLGGGDVDQKKFGGDTSYSIMFGPDICGYSTKKVHTILTKDGKNHLIKKDVPCETDQLTHVYTLIIRPDATYSILIDNEDKQTGSIYEHWDILPPKKIKDPEAKKPEDWDDKEYIPDPEDKKPEGYDDIPKEIPDPDAKKPEDWDDEEDGEWTAPTIPNPEYKGPWKQKKIKNPNYQGKWKAPMIDNPDFKDDPYIYAFDSLKYIGIELWQVKIGHSV

SEQ ID NO: 35157 - protein, 335 aa, Zea mays subsp. mays
  peptide (1)..(335): Ceres Seq. ID no. 12351556
  misc_feature (27)..(332): Pfam Name: Pfam Description:  Calreticulin family
  misc_feature (13)..(332): NCBI GI NO: 7441498 NR Description: calreticulin - barley (fragment)
  misc_feature (10)..(332): NCBI GI NO: 7441499 NR Description: calreticulin - barley (fragment)
  misc_feature (1)..(332): NCBI GI NO: 11131838 NR Description: Calreticulin precursor
  misc_feature (1)..(335): NCBI GI NO: 2119370 NR Description: calreticulin precursor - maize
  misc_feature (1)..(332): NCBI GI NO: 11131745 NR Description: Calreticulin precursor
  misc_feature (5)..(332): NCBI GI NO: 11131631 NR Description: Calreticulin precursor
  misc_feature (1)..(332): NCBI GI NO: 11131769 NR Description: Calreticulin precursor
  misc_feature (15)..(332): NCBI GI NO: 11131949 NR Description: Calreticulin precursor
  misc_feature (1)..(335): NCBI GI NO: 11131840 NR Description: Calreticulin precursor
  misc_feature (1)..(332): NCBI GI NO: 11131904 NR Description: Calreticulin precursor
MAIRKGSSYAVAALLALASVAAVAGEVFFQEKFEDGWESRWVKSEWKKDENMAGEWNHTSGKWNGDAEDKGIQTSEDYRFYAISAEYPEFSNKDKTLVLQFSVKHEQKLDCGGGYVKLLGGGDVDQKKFGGDTSYSIMFGPDICGYSTKKVHTILTKDGKNHLIKKDVPCETDQLTHVYTLIIRPDATYSILIDNEDKQTGSIYEHWDILPPKKIKDPEAKKPEDWDDKEYIPDPEDKKPEGYDDIPKEIPDPDAKKPEDWDDEEDGEWTAPTIPNPEYKGPWKQKKIKNPNYQGKWKAPMIDNPDFKDDPYIYAFDSLKYIGIELWQVKIGHSV

SEQ ID NO: 35158 - protein, 284 aa, Zea mays subsp. mays
  peptide (1)..(284): Ceres Seq. ID no. 12351557
  misc_feature (1)..(281): Pfam Name: Pfam Description:  Calreticulin family
  misc_feature (1)..(281): NCBI GI NO: 7441498 NR Description: calreticulin - barley (fragment)
  misc_feature (1)..(281): NCBI GI NO: 7441499 NR Description: calreticulin - barley (fragment)
  misc_feature (1)..(281): NCBI GI NO: 11131838 NR Description: Calreticulin precursor
  misc_feature (1)..(284): NCBI GI NO: 2119370 NR Description: calreticulin precursor - maize
  misc_feature (1)..(281): NCBI GI NO: 11131745 NR Description: Calreticulin precursor
  misc_feature (1)..(281): NCBI GI NO: 11131631 NR Description: Calreticulin precursor
  misc_feature (1)..(281): NCBI GI NO: 11131769 NR Description: Calreticulin precursor
  misc_feature (1)..(281): NCBI GI NO: 11131949 NR Description: Calreticulin precursor
  misc_feature (1)..(284): NCBI GI NO: 11131840 NR Description: Calreticulin precursor
  misc_feature (1)..(281): NCBI GI NO: 11131904 NR Description: Calreticulin precursor
MAGEWNHTSGKWNGDAEDKGIQTSEDYRFYAISAEYPEFSNKDKTLVLQFSVKHEQKLDCGGGYVKLLGGGDVDQKKFGGDTSYSIMFGPDICGYSTKKVHTILTKDGKNHLIKKDVPCETDQLTHVYTLIIRPDATYSILIDNEDKQTGSIYEHWDILPPKKIKDPEAKKPEDWDDKEYIPDPEDKKPEGYDDIPKEIPDPDAKKPEDWDDEEDGEWTAPTIPNPEYKGPWKQKKIKNPNYQGKWKAPMIDNPDFKDDPYIYAFDSLKYIGIELWQVKIGHSV

SEQ ID NO: 35159 - DNA, 1399 bp, Zea mays subsp. mays
  misc_feature (1)..(1399): Ceres Seq. ID no. 12373457
actccgtcatttctatcagacgcaagcagcagtgacgccgcgctacccgaccaaaatccgccgccggtgcccagaactcgacgggaaaaccggggctttggtcgccggacgccggctgcctcgagatgctcgtgtgggcggccaccgcgtcaccacccagcactccatccgccgtgccatttgctcctccccaccgcgccgccgctccccgccctccaccgcctctctgccgctcgctcccggggctgctgtgcgcgggcctgatccctccgccgcgcgccgccgcttctgacggcgacgtcttctgggaggagccagacgacggctccgggagcgactacgaggacgacggcccggagcaaaggagggccttgcgtttcccatcttcctcgccgtcctacaggctcgaggcgtcggcgcagcaagaacaggacctccggagagagatcgagcttctcctaacgcctgaagaaaaggctactttggaccagcatgagacccctgacgtcactagaatatcatcacccaagtggcacccacttcatagctacgcgttggcactgcagatacccctcatggacaagcttctgaacagcggtgttgacatcaacttagttgatagagatggcttcacctctcttcacaaggctgtcatagggaaaaaagaggctgtcattagccatctcctaagaaaaggggcaaatccccatgttagagatagggatggagccacaccattacattatgctgttcaagctggtgccctgcaaaccgtgaagttactgattaagtacaaggttgatgtcaatgttgccgataatgatggatggacaccactccatttagccatacagagtaggaatagagatatagctaaggtcttgcttgtcaatggtgcggataagacaagaagaaccaaggatgggaggactgcgctggatctaagtctatgctttggaagggatttcaagtcatatgatcttgcaaagcttgtcaagcttattccagcaaacagaggtgcgtgatttcgctctgccatgaatctgagggaaagaaagtccaaaagttagccaatgcagcagcctcatacgacccatgcatagcttatgaagaagggtccaggagccgcgtgccgccgtgccagtcatcattcattttttttttcttgaccgccaactcaaacgatctgacagattgctctacaattgtgccgttagatttcagtgtccatggtctgtagcctgttcgacgtgactcgaaaaatgatgatgtacatgcaacagtcctccagctgttgtgttcagttgttttgttcaatatgggccagggccaccaaaacaagatctgaattgtaactgttattaaccttcagcatatgtgtacacattatcgttttggc

SEQ ID NO: 35160 - protein, 299 aa, Zea mays subsp. mays
  peptide (1)..(299): Ceres Seq. ID no. 12373458
  misc_feature (233)..(265): Pfam Name: Pfam Description:  Ankyrin repeat
  misc_feature (60)..(294): NCBI GI NO: 15242597 NR Description: ankyrin repeat protein EMB506
  misc_feature (111)..(291): NCBI GI NO: 22758264 NR Description: Putative ankyrin-repeat protein
  misc_feature (111)..(297): NCBI GI NO: 26450056 NR Description: unknown protein [Arabidopsis thaliana]
  misc_feature (111)..(297): NCBI GI NO: 30698188 NR Description: expressed protein [Arabidopsis thaliana]
  misc_feature (111)..(271): NCBI GI NO: 322461 NR Description: ankyrin-repeat protein - Arabidopsis thaliana
  misc_feature (154)..(291): NCBI GI NO: 28373666 NR Description: Chain A
  misc_feature (138)..(291): NCBI GI NO: 28274854 NR Description: ankyrin repeat protein E4_8 [synthetic construct]
  misc_feature (138)..(291): NCBI GI NO: 28274852 NR Description: ankyrin repeat protein E4_2 [synthetic construct]
  misc_feature (154)..(291): NCBI GI NO: 28274850 NR Description: ankyrin repeat protein E3_19 [synthetic construct]
  misc_feature (154)..(278): NCBI GI NO: 28274852 NR Description: ankyrin repeat protein E4_2 [synthetic construct]
MLVWAATASPPSTPSAVPFAPPHRAAAPRPPPPLCRSLPGLLCAGLIPPPRAAASDGDVFWEEPDDGSGSDYEDDGPEQRRALRFPSSSPSYRLEASAQQEQDLRREIELLLTPEEKATLDQHETPDVTRISSPKWHPLHSYALALQIPLMDKLLNSGVDINLVDRDGFTSLHKAVIGKKEAVISHLLRKGANPHVRDRDGATPLHYAVQAGALQTVKLLIKYKVDVNVADNDGWTPLHLAIQSRNRDIAKVLLVNGADKTRRTKDGRTALDLSLCFGRDFKSYDLAKLVKLIPANRGA

SEQ ID NO: 35161 - protein, 149 aa, Zea mays subsp. mays
  peptide (1)..(149): Ceres Seq. ID no. 12373459
  misc_feature (83)..(115): Pfam Name: Pfam Description:  Ankyrin repeat
  misc_feature (1)..(144): NCBI GI NO: 15242597 NR Description: ankyrin repeat protein EMB506
  misc_feature (1)..(141): NCBI GI NO: 22758264 NR Description: Putative ankyrin-repeat protein
  misc_feature (1)..(147): NCBI GI NO: 26450056 NR Description: unknown protein [Arabidopsis thaliana]
  misc_feature (1)..(147): NCBI GI NO: 30698188 NR Description: expressed protein [Arabidopsis thaliana]
  misc_feature (1)..(121): NCBI GI NO: 322461 NR Description: ankyrin-repeat protein - Arabidopsis thaliana
  misc_feature (4)..(141): NCBI GI NO: 28373666 NR Description: Chain A
  misc_feature (1)..(141): NCBI GI NO: 28274854 NR Description: ankyrin repeat protein E4_8 [synthetic construct]
  misc_feature (1)..(141): NCBI GI NO: 28274852 NR Description: ankyrin repeat protein E4_2 [synthetic construct]
  misc_feature (4)..(141): NCBI GI NO: 28274850 NR Description: ankyrin repeat protein E3_19 [synthetic construct]
  misc_feature (4)..(128): NCBI GI NO: 28274852 NR Description: ankyrin repeat protein E4_2 [synthetic construct]
MDKLLNSGVDINLVDRDGFTSLHKAVIGKKEAVISHLLRKGANPHVRDRDGATPLHYAVQAGALQTVKLLIKYKVDVNVADNDGWTPLHLAIQSRNRDIAKVLLVNGADKTRRTKDGRTALDLSLCFGRDFKSYDLAKLVKLIPANRGA

SEQ ID NO: 35162 - DNA, 1100 bp, Zea mays subsp. mays
  misc_feature (1)..(1100): Ceres Seq. ID no. 12351878
aatctacagatatgaaccaagttagataaggtactcgtacaccgaacatgttcgatagaatgctctagtgacagcgaaaaaaccaaacaacaaaaaccaacgaaatccctgccatttttataggagacgacggtgcggggaggcaagggaagggggcgacgaagaggaaagcgaagaaagcgtcatggggcttggccttggcgtgcgggcggcgcccttcacgtacgcggcgcacgcgctggccgtcgcggcggcggccatggtgttggtctgggccatctacttccgcggtgggctcgccatcgaggccaccaacaagaacctcatcttcaacgttcaccctgttcttatgcttatcggttatattatcatcggcggcgaagctataatggtatacagggtacttccaacatcgaaccacgggacaaataagctgatccatctagttctccacgggattgcacttgtccttggtgcggttggaatatatttcgccttcaaaaatcataatgagagtgggattgccaatctttacagtctgcactcttggattgggatagggacgattactttgtatggtattcagtggatagttggattcgttacattcttcttccctggtgctgcgccaaacgtgaagaagggtgttcttccttggcacatactctttgggctctttgtctacatcttagcactggctaatgcggaactcggctttcttgagaagctcactttcctcgagagctcgggtctcgacaaatacggcacagaggcattcttggtgaacttcacagcgttggttgtcgtgttgtttggtgcctctgttgtggtggctgctatagctccagttcgccttgaagaaccacagggttatgttccaattccagaaaactagtacaaatgaaatgtacatcatatgcagttgccaggattggctgttaccatatggagctaagctattcatctctctttattaaggagaagaagatgatggagttatcacgataagaagatagtgcatcgtcattgtgtgtgtatatgtatatacattccgtgatacttcaaaatttcagtatatgcgaaattgaatatactgcttc

SEQ ID NO: 35163 - protein, 236 aa, Zea mays subsp. mays
  peptide (1)..(236): Ceres Seq. ID no. 12351879
  misc_feature (1)..(236): NCBI GI NO: 38346996 NR Description: OSJNBb0039L24.15
  misc_feature (9)..(230): NCBI GI NO: 37535830 NR Description: putative cytochrome b-561
  misc_feature (3)..(220): NCBI GI NO: 7486819 NR Description: hypothetical protein M7J2
  misc_feature (3)..(220): NCBI GI NO: 18416576 NR Description: putative protein; protein id: At4g25570
  misc_feature (3)..(220): NCBI GI NO: 21553731 NR Description: cytochrome b561 [Arabidopsis thaliana]
  misc_feature (3)..(220): NCBI GI NO: 25407597 NR Description: hypothetical protein AT4g25570
  misc_feature (3)..(220): NCBI GI NO: 12597245 NR Description: cytochrome b561 [Arabidopsis thaliana]
  misc_feature (1)..(190): NCBI GI NO: 6822123 NR Description: putative cytochrome B 561
  misc_feature (16)..(217): NCBI GI NO: 38637027 NR Description: putative cytochrome b561
  misc_feature (11)..(222): NCBI GI NO: 15240965 NR Description: cytochrome b-561 (gb|AAD45585
MGLGLGVRAAPFTYAAHALAVAAAAMVLVWAIYFRGGLAIEATNKNLIFNVHPVLMLIGYIIIGGEAIMVYRVLPTSNHGTNKLIHLVLHGIALVLGAVGIYFAFKNHNESGIANLYSLHSWIGIGTITLYGIQWIVGFVTFFFPGAAPNVKKGVLPWHILFGLFVYILALANAELGFLEKLTFLESSGLDKYGTEAFLVNFTALVVVLFGASVVVAAIAPVRLEEPQGYVPIPEN

SEQ ID NO: 35164 - protein, 211 aa, Zea mays subsp. mays
  peptide (1)..(211): Ceres Seq. ID no. 12351880
  misc_feature (1)..(211): NCBI GI NO: 38346996 NR Description: OSJNBb0039L24.15
  misc_feature (1)..(205): NCBI GI NO: 37535830 NR Description: putative cytochrome b-561
  misc_feature (1)..(195): NCBI GI NO: 7486819 NR Description: hypothetical protein M7J2
  misc_feature (1)..(195): NCBI GI NO: 21553731 NR Description: cytochrome b561 [Arabidopsis thaliana]
  misc_feature (1)..(195): NCBI GI NO: 18416576 NR Description: putative protein; protein id: At4g25570
  misc_feature (1)..(195): NCBI GI NO: 25407597 NR Description: hypothetical protein AT4g25570
  misc_feature (1)..(195): NCBI GI NO: 12597245 NR Description: cytochrome b561 [Arabidopsis thaliana]
  misc_feature (1)..(165): NCBI GI NO: 6822123 NR Description: putative cytochrome B 561
  misc_feature (1)..(192): NCBI GI NO: 38637027 NR Description: putative cytochrome b561
  misc_feature (1)..(197): NCBI GI NO: 15240965 NR Description: cytochrome b-561 (gb|AAD45585
MVLVWAIYFRGGLAIEATNKNLIFNVHPVLMLIGYIIIGGEAIMVYRVLPTSNHGTNKLIHLVLHGIALVLGAVGIYFAFKNHNESGIANLYSLHSWIGIGTITLYGIQWIVGFVTFFFPGAAPNVKKGVLPWHILFGLFVYILALANAELGFLEKLTFLESSGLDKYGTEAFLVNFTALVVVLFGASVVVAAIAPVRLEEPQGYVPIPEN

SEQ ID NO: 35165 - protein, 181 aa, Zea mays subsp. mays
  peptide (1)..(181): Ceres Seq. ID no. 12351881
  misc_feature (1)..(181): NCBI GI NO: 38346996 NR Description: OSJNBb0039L24.15
  misc_feature (1)..(175): NCBI GI NO: 37535830 NR Description: putative cytochrome b-561
  misc_feature (1)..(165): NCBI GI NO: 7486819 NR Description: hypothetical protein M7J2
  misc_feature (1)..(165): NCBI GI NO: 18416576 NR Description: putative protein; protein id: At4g25570
  misc_feature (1)..(165): NCBI GI NO: 21553731 NR Description: cytochrome b561 [Arabidopsis thaliana]
  misc_feature (1)..(165): NCBI GI NO: 25407597 NR Description: hypothetical protein AT4g25570
  misc_feature (1)..(165): NCBI GI NO: 12597245 NR Description: cytochrome b561 [Arabidopsis thaliana]
  misc_feature (1)..(135): NCBI GI NO: 6822123 NR Description: putative cytochrome B 561
  misc_feature (1)..(162): NCBI GI NO: 38637027 NR Description: putative cytochrome b561
  misc_feature (1)..(167): NCBI GI NO: 15240965 NR Description: cytochrome b-561 (gb|AAD45585
MLIGYIIIGGEAIMVYRVLPTSNHGTNKLIHLVLHGIALVLGAVGIYFAFKNHNESGIANLYSLHSWIGIGTITLYGIQWIVGFVTFFFPGAAPNVKKGVLPWHILFGLFVYILALANAELGFLEKLTFLESSGLDKYGTEAFLVNFTALVVVLFGASVVVAAIAPVRLEEPQGYVPIPEN

SEQ ID NO: 35166 - DNA, 1211 bp, Zea mays subsp. mays
  misc_feature (1)..(1211): Ceres Seq. ID no. 12341358
aagggaaaacaaagagtgtgtgctgtgtgttatccatttcttctcctctctgctctgttcacttcgttctagtggggagcgccgccgctgcagttgccgccgccaccagagcagtccacctcggtctgatatggcgaccgggagtgcaagtgccatcgcgtccttctccgtggcggcggcagcggctgctgctctgcgcgtcaggcggccatgcgctcgcgcttgcgcttgggccccctcgcagcgaccgcagcaaggggcactcgtcagcctcaagccttgcgcctcactggcaccacaagctcctctgtggcgcgcggagtcggatgccgcggggggtggtgccggcgccggcgatgtcatgggcctcctcctccgggagcgcatagtcttcctcggcaacgagatcgaggacttcctcgcggacgccgtcgtcagccagctcctcctccttgacgccatcgacccggactctgacatccgcctcttcgtcaactcaccagggggatcccttagcgcaacaatggccatctatgatgtaatgcagcttgtgagggcagacgtgtccactattggaatgggcatagctggatcaacagcttctataatccttggtggtggcacgaagggcaagcgatttgccatgcccaacaccaggattatgatccatcagcctgtcggaggtgcaagcgggcaggccctagatgtagaggtccaagcgaaggagatattgaccaacaagaggaatgtcattcggatcgtatcaggcttcacaggccgcactcctgagcaggtagagaaagacattgacagagatcgttacatgggccctctcgaggctgtcgattatggactcattgatggcgtgatcgatggagacagtattatcccacttgagcctgtcccggagagggtgaagcctaagtacaactacgaagagctgtacaaggatccacagaagtttcttacaccagatgtcccagatgatgagatatactagtcgaaaagttgtattttgtgcgaatgttaagtctgttcttcagcaagcagatgtttttcgtcgcttgtagctgtcaaaccaaccatagcactagtagcttattgatcttgtttactgactggatggtgattcgagcaggcaactagaacctgttggttgtgtttctggtgttacattgtggtgttagaatggtccggctgtttcgttttgg

SEQ ID NO: 35167 - protein, 332 aa, Zea mays subsp. mays
  peptide (1)..(332): Ceres Seq. ID no. 12341359
  misc_feature (112)..(293): Pfam Name: Pfam Description:  Clp protease
  misc_feature (44)..(332): NCBI GI NO: 37537218 NR Description: putative Clp protease
  misc_feature (49)..(332): NCBI GI NO: 25453516 NR Description: ATP-dependent Clp proteinase (EC 3
  misc_feature (116)..(332): NCBI GI NO: 18422548 NR Description: ATP-dependent Clp protease proteolytic subunit
  misc_feature (116)..(332): NCBI GI NO: 4454056 NR Description: ClpP [Arabidopsis thaliana]
  misc_feature (116)..(332): NCBI GI NO: 21593305 NR Description: ATP-dependent Clp protease proteolytic subunit
  misc_feature (116)..(332): NCBI GI NO: 9758729 NR Description: ATP-dependent Clp protease-like protein
  misc_feature (109)..(291): NCBI GI NO: 33241265 NR Description: Protease subunit of ATP-dependent Clp protease
  misc_feature (109)..(302): NCBI GI NO: 23041314 NR Description: hypothetical protein
  misc_feature (109)..(290): NCBI GI NO: 3023500 NR Description: ATP-dependent Clp protease proteolytic subunit 2
  misc_feature (109)..(290): NCBI GI NO: 25019682 NR Description: ClpP2 [Synechococcus sp. PCC 7942]
RENKECVLCVIHFFSSLLCSLRSSGERRRCSCRRHQSSPPRSDMATGSASAIASFSVAAAAAAALRVRRPCARACAWAPSQRPQQGALVSLKPCASLAPQAPLWRAESDAAGGGAGAGDVMGLLLRERIVFLGNEIEDFLADAVVSQLLLLDAIDPDSDIRLFVNSPGGSLSATMAIYDVMQLVRADVSTIGMGIAGSTASIILGGGTKGKRFAMPNTRIMIHQPVGGASGQALDVEVQAKEILTNKRNVIRIVSGFTGRTPEQVEKDIDRDRYMGPLEAVDYGLIDGVIDGDSIIPLEPVPERVKPKYNYEELYKDPQKFLTPDVPDDEIY

SEQ ID NO: 35168 - protein, 289 aa, Zea mays subsp. mays
  peptide (1)..(289): Ceres Seq. ID no. 12341360
  misc_feature (69)..(250): Pfam Name: Pfam Description:  Clp protease
  misc_feature (1)..(289): NCBI GI NO: 37537218 NR Description: putative Clp protease
  misc_feature (6)..(289): NCBI GI NO: 25453516 NR Description: ATP-dependent Clp proteinase (EC 3
  misc_feature (73)..(289): NCBI GI NO: 18422548 NR Description: ATP-dependent Clp protease proteolytic subunit
  misc_feature (73)..(289): NCBI GI NO: 4454056 NR Description: ClpP [Arabidopsis thaliana]
  misc_feature (73)..(289): NCBI GI NO: 21593305 NR Description: ATP-dependent Clp protease proteolytic subunit
  misc_feature (73)..(289): NCBI GI NO: 9758729 NR Description: ATP-dependent Clp protease-like protein
  misc_feature (66)..(248): NCBI GI NO: 33241265 NR Description: Protease subunit of ATP-dependent Clp protease
  misc_feature (66)..(259): NCBI GI NO: 23041314 NR Description: hypothetical protein
  misc_feature (66)..(247): NCBI GI NO: 3023500 NR Description: ATP-dependent Clp protease proteolytic subunit 2
  misc_feature (66)..(247): NCBI GI NO: 25019682 NR Description: ClpP2 [Synechococcus sp. PCC 7942]
MATGSASAIASFSVAAAAAAALRVRRPCARACAWAPSQRPQQGALVSLKPCASLAPQAPLWRAESDAAGGGAGAGDVMGLLLRERIVFLGNEIEDFLADAVVSQLLLLDAIDPDSDIRLFVNSPGGSLSATMAIYDVMQLVRADVSTIGMGIAGSTASIILGGGTKGKRFAMPNTRIMIHQPVGGASGQALDVEVQAKEILTNKRNVIRIVSGFTGRTPEQVEKDIDRDRYMGPLEAVDYGLIDGVIDGDSIIPLEPVPERVKPKYNYEELYKDPQKFLTPDVPDDEIY

SEQ ID NO: 35169 - protein, 212 aa, Zea mays subsp. mays
  peptide (1)..(212): Ceres Seq. ID no. 12341361
  misc_feature (1)..(173): Pfam Name: Pfam Description:  Clp protease
  misc_feature (1)..(212): NCBI GI NO: 37537218 NR Description: putative Clp protease
  misc_feature (1)..(212): NCBI GI NO: 25453516 NR Description: ATP-dependent Clp proteinase (EC 3
  misc_feature (1)..(212): NCBI GI NO: 18422548 NR Description: ATP-dependent Clp protease proteolytic subunit
  misc_feature (1)..(212): NCBI GI NO: 4454056 NR Description: ClpP [Arabidopsis thaliana]
  misc_feature (1)..(212): NCBI GI NO: 21593305 NR Description: ATP-dependent Clp protease proteolytic subunit
  misc_feature (1)..(212): NCBI GI NO: 9758729 NR Description: ATP-dependent Clp protease-like protein
  misc_feature (1)..(171): NCBI GI NO: 33241265 NR Description: Protease subunit of ATP-dependent Clp protease
  misc_feature (1)..(182): NCBI GI NO: 23041314 NR Description: hypothetical protein
  misc_feature (1)..(170): NCBI GI NO: 3023500 NR Description: ATP-dependent Clp protease proteolytic subunit 2
  misc_feature (1)..(170): NCBI GI NO: 25019682 NR Description: ClpP2 [Synechococcus sp. PCC 7942]
MGLLLRERIVFLGNEIEDFLADAVVSQLLLLDAIDPDSDIRLFVNSPGGSLSATMAIYDVMQLVRADVSTIGMGIAGSTASIILGGGTKGKRFAMPNTRIMIHQPVGGASGQALDVEVQAKEILTNKRNVIRIVSGFTGRTPEQVEKDIDRDRYMGPLEAVDYGLIDGVIDGDSIIPLEPVPERVKPKYNYEELYKDPQKFLTPDVPDDEIY

SEQ ID NO: 35170 - DNA, 2021 bp, Zea mays subsp. mays
  misc_feature (1)..(2021): Ceres Seq. ID no. 12363212
aagtgacattcggtgtaaactcaaacatgtgttcagttcccacttgagcttcttggttgcaatggcactgccattcatggtatgaacaatagatcctggtttcagaagatgcatataccgagacatctacaagctcacctcctgcgcaagaatcctcttacttaccaccgtagtttcaaaaaagacatttcaagccccaactccgtcctggagccacatagtgaagagctccacaagatacatcttggtctttcctctggtgtggaggatgcaacaaaatgggagcatataaacataaagagcatagaaccagatggtgcctatgtgattgctagccaactaaatctcgttgaggaacagcaagggggcagctatgttgctagccttgagttggagcttcagcaggcacgggatagagtgagcaagctagaagctgaacggctttcagccaagaagcaactgaatcacttgttcaagaaacttgcagaggagaaagcagcttggcggaacagagagcacaagaaagttcaagccattcttgaagatatgaaggctgatctggagcatgagaaaaagaaccggaggcagttggagactattaacttcaagcttgttgatgagttgaaagaggtcaaaatggccgcgaagcagctattgcaagagtatgacaacgagcagaagacgcgggaactcacggatgaggtgtgcaacaagctagtgagggagatagaggaacacaagtcagagatcgaagccttgaagcaggattctgtcaaactacgcggcgacctggatgaggataggaaattgctacagatggctgaggtgtggcgtgaggagcgagtgcagatgaaacttgtcgatgccaagctcattcttgaggccaaacatgaacagttgagcaaactgcaggaggaggtggaggctttcatttcgactttcagctcttccaaaggagacagcacaattgttgaagccgcacacaacattgtacaggccattgggtcggccagagaccaagaggttgaattcacatatgagccaccaagagcatcagaagatatactggccatctttgaagagctacgcccaagtgaagagatggagaaaaaggaaaccgaaccatgcctaaagcaagaaatccaagaagctagcccaacagctgatatatttctggaaaatcgagccagattgttcccagatggaagccattctgatgagagcgataaggaagatggaagcagctgggagaccatgagccatgaagagatgcaaggctcaagccattcgccgtatgaaagtgaacattcagtcaacaagatctttgacagaatttcgtggaccagtggaaacgattctgagggtgagcaggccaacaaactgtgtgatgacttgagcagtgtgtacctgacggacatggaacagtccaagaagaaagagtccgccatatcaaagctgtggaagtcatctccactgaaaaactgtgaattccgtacaaaagatgttgcggatatgataaatgggagattatcaagtgcaagtcttccaaatggtgtgtactctactgccaaaggcttgaatctagatatgggggacagcacccctagcaccacgcaatggagctcaccggattcgatgaacagccagctcaaccggggtttcagaggttgcatggagatggttcagaggcagagcctgaaggcgaagctccttgaagctcggatggagagccagaagattcagctccgccatgtgctcaaccagaaaacttaagttagaacctcactgtgtcgaaataaaattccaagcattggatttattacatttcccttgtccattgtagtatgtagcttagtctcatgtgtttctgcttcatagaactatatagctagctatagccttgtaggctgacctggccatggttgatgcagctgtctaattgtggcagtacatttgacaggttatgtgcccgtctttatgtgtaatgtggcagtaaactgtaaaccagaagcattattcag

SEQ ID NO: 35171 - protein, 563 aa, Zea mays subsp. mays
  peptide (1)..(563): Ceres Seq. ID no. 12363213
  misc_feature (34)..(563): Pfam Name: Pfam Description:  Myosin tail
  misc_feature (11)..(563): NCBI GI NO: 40253811 NR Description: hypothetical protein
  misc_feature (1)..(562): NCBI GI NO: 38344183 NR Description: OSJNBa0053K19.22
  misc_feature (25)..(562): NCBI GI NO: 15231114 NR Description: unknown protein; protein id: At3g20350.1
  misc_feature (61)..(562): NCBI GI NO: 9294553 NR Description: gb|AAF00675
  misc_feature (25)..(485): NCBI GI NO: 15223613 NR Description: unknown protein; protein id: At1g50660.1
  misc_feature (132)..(305): NCBI GI NO: 29367527 NR Description: unknown [Oryza sativa (japonica cultivar-group)]
  misc_feature (97)..(286): NCBI GI NO: 15724288 NR Description: AT3g11590/F24K9_26 [Arabidopsis thaliana]
  misc_feature (97)..(284): NCBI GI NO: 18399293 NR Description: expressed protein; protein id: At3g11590
  misc_feature (97)..(302): NCBI GI NO: 38346645 NR Description: OSJNBa0072D21.15
  misc_feature (136)..(366): NCBI GI NO: 34394172 NR Description: hypothetical protein
MNNRSWFQKMHIPRHLQAHLLRKNPLTYHRSFKKDISSPNSVLEPHSEELHKIHLGLSSGVEDATKWEHINIKSIEPDGAYVIASQLNLVEEQQGGSYVASLELELQQARDRVSKLEAERLSAKKQLNHLFKKLAEEKAAWRNREHKKVQAILEDMKADLEHEKKNRRQLETINFKLVDELKEVKMAAKQLLQEYDNEQKTRELTDEVCNKLVREIEEHKSEIEALKQDSVKLRGDLDEDRKLLQMAEVWREERVQMKLVDAKLILEAKHEQLSKLQEEVEAFISTFSSSKGDSTIVEAAHNIVQAIGSARDQEVEFTYEPPRASEDILAIFEELRPSEEMEKKETEPCLKQEIQEASPTADIFLENRARLFPDGSHSDESDKEDGSSWETMSHEEMQGSSHSPYESEHSVNKIFDRISWTSGNDSEGEQANKLCDDLSSVYLTDMEQSKKKESAISKLWKSSPLKNCEFRTKDVADMINGRLSSASLPNGVYSTAKGLNLDMGDSTPSTTQWSSPDSMNSQLNRGFRGCMEMVQRQSLKAKLLEARMESQKIQLRHVLNQKT

SEQ ID NO: 35172 - protein, 554 aa, Zea mays subsp. mays
  peptide (1)..(554): Ceres Seq. ID no. 12363214
  misc_feature (25)..(554): Pfam Name: Pfam Description:  Myosin tail
  misc_feature (2)..(554): NCBI GI NO: 40253811 NR Description: hypothetical protein
  misc_feature (1)..(553): NCBI GI NO: 38344183 NR Description: OSJNBa0053K19.22
  misc_feature (16)..(553): NCBI GI NO: 15231114 NR Description: unknown protein; protein id: At3g20350.1
  misc_feature (52)..(553): NCBI GI NO: 9294553 NR Description: gb|AAF00675
  misc_feature (16)..(476): NCBI GI NO: 15223613 NR Description: unknown protein; protein id: At1g50660.1
  misc_feature (123)..(296): NCBI GI NO: 29367527 NR Description: unknown [Oryza sativa (japonica cultivar-group)]
  misc_feature (88)..(277): NCBI GI NO: 15724288 NR Description: AT3g11590/F24K9_26 [Arabidopsis thaliana]
  misc_feature (88)..(275): NCBI GI NO: 18399293 NR Description: expressed protein; protein id: At3g11590
  misc_feature (88)..(293): NCBI GI NO: 38346645 NR Description: OSJNBa0072D21.15
  misc_feature (127)..(357): NCBI GI NO: 34394172 NR Description: hypothetical protein
MHIPRHLQAHLLRKNPLTYHRSFKKDISSPNSVLEPHSEELHKIHLGLSSGVEDATKWEHINIKSIEPDGAYVIASQLNLVEEQQGGSYVASLELELQQARDRVSKLEAERLSAKKQLNHLFKKLAEEKAAWRNREHKKVQAILEDMKADLEHEKKNRRQLETINFKLVDELKEVKMAAKQLLQEYDNEQKTRELTDEVCNKLVREIEEHKSEIEALKQDSVKLRGDLDEDRKLLQMAEVWREERVQMKLVDAKLILEAKHEQLSKLQEEVEAFISTFSSSKGDSTIVEAAHNIVQAIGSARDQEVEFTYEPPRASEDILAIFEELRPSEEMEKKETEPCLKQEIQEASPTADIFLENRARLFPDGSHSDESDKEDGSSWETMSHEEMQGSSHSPYESEHSVNKIFDRISWTSGNDSEGEQANKLCDDLSSVYLTDMEQSKKKESAISKLWKSSPLKNCEFRTKDVADMINGRLSSASLPNGVYSTAKGLNLDMGDSTPSTTQWSSPDSMNSQLNRGFRGCMEMVQRQSLKAKLLEARMESQKIQLRHVLNQKT

SEQ ID NO: 35173 - protein, 408 aa, Zea mays subsp. mays
  peptide (1)..(408): Ceres Seq. ID no. 12363215
  misc_feature (1)..(408): Pfam Name: Pfam Description:  Myosin tail
  misc_feature (1)..(408): NCBI GI NO: 40253811 NR Description: hypothetical protein
  misc_feature (1)..(407): NCBI GI NO: 38344183 NR Description: OSJNBa0053K19.22
  misc_feature (1)..(407): NCBI GI NO: 15231114 NR Description: unknown protein; protein id: At3g20350.1
  misc_feature (1)..(407): NCBI GI NO: 9294553 NR Description: gb|AAF00675
  misc_feature (1)..(330): NCBI GI NO: 15223613 NR Description: unknown protein; protein id: At1g50660.1
  misc_feature (1)..(150): NCBI GI NO: 29367527 NR Description: unknown [Oryza sativa (japonica cultivar-group)]
  misc_feature (1)..(131): NCBI GI NO: 15724288 NR Description: AT3g11590/F24K9_26 [Arabidopsis thaliana]
  misc_feature (1)..(129): NCBI GI NO: 18399293 NR Description: expressed protein; protein id: At3g11590
  misc_feature (1)..(147): NCBI GI NO: 38346645 NR Description: OSJNBa0072D21.15
  misc_feature (1)..(211): NCBI GI NO: 34394172 NR Description: hypothetical protein
MKADLEHEKKNRRQLETINFKLVDELKEVKMAAKQLLQEYDNEQKTRELTDEVCNKLVREIEEHKSEIEALKQDSVKLRGDLDEDRKLLQMAEVWREERVQMKLVDAKLILEAKHEQLSKLQEEVEAFISTFSSSKGDSTIVEAAHNIVQAIGSARDQEVEFTYEPPRASEDILAIFEELRPSEEMEKKETEPCLKQEIQEASPTADIFLENRARLFPDGSHSDESDKEDGSSWETMSHEEMQGSSHSPYESEHSVNKIFDRISWTSGNDSEGEQANKLCDDLSSVYLTDMEQSKKKESAISKLWKSSPLKNCEFRTKDVADMINGRLSSASLPNGVYSTAKGLNLDMGDSTPSTTQWSSPDSMNSQLNRGFRGCMEMVQRQSLKAKLLEARMESQKIQLRHVLNQKT

SEQ ID NO: 35174 - DNA, 1655 bp, Zea mays subsp. mays
  misc_feature (1)..(1655): Ceres Seq. ID no. 12363163
gcacgagaccattacctagaacatcctaatcgaaaaatcctgatccgctcgctcccaaatcctactgccgtgcgcgtcccgctcctgcggctgcgccccccgcgaggagaaagccggttagccacagccccacacgcgcgcatcacgccacaaccacaccacacggcaccagcctcctccgtcgtcaccgcctcgggcctcggccgatcgatcgggtctggcggcggccacaagcgtcgctgtttaataaatagccctgagcggcctccccctgcccctcagttcagcctcggctggacatcgagtttgtaccgggaaacagcttggtagtataaccactgaagatggtcagtgggaggccgcatggtgaattggactcatggttcaagagcctcatggtgacctctagcagcgagagggggcaggctgggagtggtggtccagcgccaacattaacaggatggaaggaccttccgatggagctcctggtgcggataatatccacagttggagatgataggatggtcatcgtggcgtctggtgtttgcacaggctggcgtgacgcgctgggatggggggtcactaatctttcacttacatggtgcaaactgagcatgaataatttaatgatatctcttgcccacaagttcacgaagttgcaagttctcactctccggcaaaacaaacctcagcttgaagacagtgccgtagaggctgttgccaactactgccatgacctacgtgagttagacctcagcagaagcttcaggcttagtgaccgctccttgtatgcgctggcccatggatgcccacggcttacaagactgaacattagtggatgttccagtttcagcgacactgcgttgatttaccttacctgccgctgtaaaaacctcaagtgcctgaacttgtgtggatgcgtgaaggctgttactgacagagctttgcaggctattgctcagaactgtgggcagctgcagtctttgaacctaggctggtgtgatgatgttacagataagggagtgaccagcttagcgtcaggatgccctgatctcagagccgtagactcgtgcggttgtgttcttataacagatgagagtgtggttgctcttgccaacggatgtccgcacctgcgctcgctgggcctctacttctgccagaacatcacggaccgcgccatgtactccctcgcaaacagccgcgtgaagagcaagcgtgggaggtgggatgcagtgaaagacgggctcgcgaacctcaacatcagccagtgcaccgccctgacgcccccggcggtgcaggccgtctgcgactccttcccggcgctgcacacctgccccgagaggcactccctcatcatcagtggctgcctcagcctcacgtcagtccactgcgcctgcgccctccacccacaccgtgccgggagagccctgatggccaaccatgcgtactaataaacatgttggtggctttgcgctgatagttctcgcgaatggggacgcatgcctggggggtgatggcgtcgtccaggtgtagaggaagctccctgtgtacataaactcgaaacttggcggtgtgataaggcactgctgtggtaggactttgtgtgataatcatggagtggcgaatttctagagaatggcatgtactccagtgct

SEQ ID NO: 35175 - protein, 368 aa, Zea mays subsp. mays
  peptide (1)..(368): Ceres Seq. ID no. 12363164
  misc_feature (8)..(368): NCBI GI NO: 34907434 NR Description: P0018C10.44
  misc_feature (40)..(362): NCBI GI NO: 18394987 NR Description: F-box protein family; protein id: At1g21410
  misc_feature (40)..(362): NCBI GI NO: 21554029 NR Description: F-box protein AtFBL5 [Arabidopsis thaliana]
  misc_feature (37)..(357): NCBI GI NO: 18411319 NR Description: F-box protein family, AtFBL5; protein id:At1g77000
  misc_feature (229)..(357): NCBI GI NO: 26450797 NR Description: unknown protein [Arabidopsis thaliana]
  misc_feature (105)..(286): NCBI GI NO: 7512791 NR Description: hypothetical protein DKFZp564P0622
  misc_feature (76)..(285): NCBI GI NO: 12848653 NR Description: unnamed protein product [Mus musculus]
  misc_feature (84)..(349): NCBI GI NO: 37590914 NR Description: Unknown (protein for MGC:73374) [Danio rerio]
  misc_feature (76)..(285): NCBI GI NO: 38503178 NR Description: F-box/LRR-repeat protein 2-like
  misc_feature (76)..(285): NCBI GI NO: 27734755 NR Description: hypothetical protein MGC15482 [Homo sapiens]
MVSGRPHGELDSWFKSLMVTSSSERGQAGSGGPAPTLTGWKDLPMELLVRIISTVGDDRMVIVASGVCTGWRDALGWGVTNLSLTWCKLSMNNLMISLAHKFTKLQVLTLRQNKPQLEDSAVEAVANYCHDLRELDLSRSFRLSDRSLYALAHGCPRLTRLNISGCSSFSDTALIYLTCRCKNLKCLNLCGCVKAVTDRALQAIAQNCGQLQSLNLGWCDDVTDKGVTSLASGCPDLRAVDSCGCVLITDESVVALANGCPHLRSLGLYFCQNITDRAMYSLANSRVKSKRGRWDAVKDGLANLNISQCTALTPPAVQAVCDSFPALHTCPERHSLIISGCLSLTSVHCACALHPHRAGRALMANHAY

SEQ ID NO: 35176 - protein, 351 aa, Zea mays subsp. mays
  peptide (1)..(351): Ceres Seq. ID no. 12363165
  misc_feature (1)..(351): NCBI GI NO: 34907434 NR Description: P0018C10.44
  misc_feature (23)..(345): NCBI GI NO: 18394987 NR Description: F-box protein family; protein id: At1g21410
  misc_feature (23)..(345): NCBI GI NO: 21554029 NR Description: F-box protein AtFBL5 [Arabidopsis thaliana]
  misc_feature (20)..(340): NCBI GI NO: 18411319 NR Description: F-box protein family, AtFBL5; protein id:At1g77000
  misc_feature (212)..(340): NCBI GI NO: 26450797 NR Description: unknown protein [Arabidopsis thaliana]
  misc_feature (88)..(269): NCBI GI NO: 7512791 NR Description: hypothetical protein DKFZp564P0622
  misc_feature (59)..(268): NCBI GI NO: 12848653 NR Description: unnamed protein product [Mus musculus]
  misc_feature (67)..(332): NCBI GI NO: 37590914 NR Description: Unknown (protein for MGC:73374) [Danio rerio]
  misc_feature (59)..(268): NCBI GI NO: 38503178 NR Description: F-box/LRR-repeat protein 2-like
  misc_feature (59)..(268): NCBI GI NO: 27734755 NR Description: hypothetical protein MGC15482 [Homo sapiens]
MVTSSSERGQAGSGGPAPTLTGWKDLPMELLVRIISTVGDDRMVIVASGVCTGWRDALGWGVTNLSLTWCKLSMNNLMISLAHKFTKLQVLTLRQNKPQLEDSAVEAVANYCHDLRELDLSRSFRLSDRSLYALAHGCPRLTRLNISGCSSFSDTALIYLTCRCKNLKCLNLCGCVKAVTDRALQAIAQNCGQLQSLNLGWCDDVTDKGVTSLASGCPDLRAVDSCGCVLITDESVVALANGCPHLRSLGLYFCQNITDRAMYSLANSRVKSKRGRWDAVKDGLANLNISQCTALTPPAVQAVCDSFPALHTCPERHSLIISGCLSLTSVHCACALHPHRAGRALMANHAY

SEQ ID NO: 35177 - protein, 324 aa, Zea mays subsp. mays
  peptide (1)..(324): Ceres Seq. ID no. 12363166
  misc_feature (1)..(324): NCBI GI NO: 34907434 NR Description: P0018C10.44
  misc_feature (1)..(318): NCBI GI NO: 18394987 NR Description: F-box protein family; protein id: At1g21410
  misc_feature (1)..(318): NCBI GI NO: 21554029 NR Description: F-box protein AtFBL5 [Arabidopsis thaliana]
  misc_feature (1)..(313): NCBI GI NO: 18411319 NR Description: F-box protein family, AtFBL5; protein id:At1g77000
  misc_feature (185)..(313): NCBI GI NO: 26450797 NR Description: unknown protein [Arabidopsis thaliana]
  misc_feature (61)..(242): NCBI GI NO: 7512791 NR Description: hypothetical protein DKFZp564P0622
  misc_feature (32)..(241): NCBI GI NO: 12848653 NR Description: unnamed protein product [Mus musculus]
  misc_feature (40)..(305): NCBI GI NO: 37590914 NR Description: Unknown (protein for MGC:73374) [Danio rerio]
  misc_feature (32)..(241): NCBI GI NO: 38503178 NR Description: F-box/LRR-repeat protein 2-like
  misc_feature (32)..(241): NCBI GI NO: 27734755 NR Description: hypothetical protein MGC15482 [Homo sapiens]
MELLVRIISTVGDDRMVIVASGVCTGWRDALGWGVTNLSLTWCKLSMNNLMISLAHKFTKLQVLTLRQNKPQLEDSAVEAVANYCHDLRELDLSRSFRLSDRSLYALAHGCPRLTRLNISGCSSFSDTALIYLTCRCKNLKCLNLCGCVKAVTDRALQAIAQNCGQLQSLNLGWCDDVTDKGVTSLASGCPDLRAVDSCGCVLITDESVVALANGCPHLRSLGLYFCQNITDRAMYSLANSRVKSKRGRWDAVKDGLANLNISQCTALTPPAVQAVCDSFPALHTCPERHSLIISGCLSLTSVHCACALHPHRAGRALMANHAY

SEQ ID NO: 35178 - DNA, 1809 bp, Zea mays subsp. mays
  misc_feature (1)..(1809): Ceres Seq. ID no. 12342466
agtctcggcaatgatgctcctctgattctccccacccgtggctgcgcccatccgtctacaagtaccacctggccgcgcggttggttccaatttccagacggcagtccactggtttttgcttgcatatcctttgtttaggccagagttgagttgtgttccaacttccaagtcttgggttgcggaatcgccggcctcgctcaatcgatggaaaaccataatccattacattctcagattgctgaagtgaaaatggacatctcagcatcagcttctgttgcatcagggaacaaattctgcaagggtggtgcctgtgatttctctgattccagtaactcctcgaaagatgccaaggagagatccacgtccatgaggaagcttataatcgcagtgatcctttgcatcatattcatgacggtggaagtggtcgggggcatcaaagcaaacagtcttgccatcttaactgatgcggcgcaccttctttctgatgtggcagcatttgccatatcgttattctctctctgggctgctggatgggaagcaacaccgcagcagtcatatgggttcttccggattgagattcttggtgccttggtctccattcagctcatatggctacttgctggcatactggtatatgaggctattgtaaggctcattaacgagagtggcgatgtgcagggctccctcatgtttgctgtgtcggcgtttggactgtttgtcaacattataatggctgtattgctaggccatgaccacgggcacggccatggacacagccatggacatccacatgaccatggtcatggtgattcagacgatggccattctcaccatgaagaaccagaacagggccatgttcatcatcatgagcatagccatggaagttctattactgtcacaacacatcaccaccaccactcaggcactggacaacaccatgacgctgaggagccactgatcaagcacgaggccgactgtgagggcacccaatctgctgctaagaagcctcgacgcaatataaacgtacacagcgcttaccttcatgtgcttggggactccatccagagcatcggggtgatgatcggcggggctatcatctggtacaagcccgagtggaaaatcatcgatctgatctgcaccctcatcttctcggtggtcgtgctgttcaccacgatcaggatgctgcgcaacatcctcgaggtcctgatggagagcacgccccgtgagatcgacgccaccaggctggagagggggctctgcgagatggaaggcgtggttgccgtccacgagctgcatatctgggccatcacagtggggaaggtgctactggcttgccatgtgacggtcgccagggaagccgacgcagacgagatccttgacaaggtgattgggtacatcaagacggagtacaacatcagccatgtgaccattcaggtcgagcgtgaatagagggggagctgtcttttgggctgtcagggcataaatggcgtcacgccttcactggttatcttactctgtcggttaaaacttttttttggcacctgggaaggcatcaggcagccatcggagtcttgatgtgcttgcaagttcatctgtggttcaagctttgatggtcagtagtgttatctgttactactagtctattaggcgggggtaggcgtcaaccagtgtgtacgggtttgattttcggtcatgctgttaacagcattgcggttcgtcgaactggatatgtagtttagtacgctgtgtcatcacctcttgtgtaagggaacgcttcttttctgtggtatggaagatgtgaacttcgtg

SEQ ID NO: 35179 - protein, 414 aa, Zea mays subsp. mays
  peptide (1)..(414): Ceres Seq. ID no. 12342467
  misc_feature (58)..(413): Pfam Name: Pfam Description:  Cation efflux family
  misc_feature (1)..(414): NCBI GI NO: 30420736 NR Description: zinc transporter
  misc_feature (1)..(414): NCBI GI NO: 16550925 NR Description: zinc transporter [Eucalyptus grandis]
  misc_feature (1)..(413): NCBI GI NO: 15226441 NR Description: putative zinc transporter; protein id: At2g46800
  misc_feature (1)..(413): NCBI GI NO: 40287446 NR Description: heavy metal transporter MTP1 [Arabis shortii]
  misc_feature (1)..(413): NCBI GI NO: 40287442 NR Description: heavy metal transporter MTP1 [Thlaspi arvense]
  misc_feature (1)..(413): NCBI GI NO: 4206640 NR Description: zinc transporter ZAT [Arabidopsis thaliana]
  misc_feature (1)..(202): NCBI GI NO: 40287448 NR Description: heavy metal transporter MTP2 [Arabis shortii]
  misc_feature (216)..(413): NCBI GI NO: 40287448 NR Description: heavy metal transporter MTP2 [Arabis shortii]
  misc_feature (1)..(413): NCBI GI NO: 40287444 NR Description: heavy metal transporter MTP1
  misc_feature (9)..(413): NCBI GI NO: 14582253 NR Description: zinc transporter [Thlaspi caerulescens]
MENHNPLHSQIAEVKMDISASASVASGNKFCKGGACDFSDSSNSSKDAKERSTSMRKLIIAVILCIIFMTVEVVGGIKANSLAILTDAAHLLSDVAAFAISLFSLWAAGWEATPQQSYGFFRIEILGALVSIQLIWLLAGILVYEAIVRLINESGDVQGSLMFAVSAFGLFVNIIMAVLLGHDHGHGHGHSHGHPHDHGHGDSDDGHSHHEEPEQGHVHHHEHSHGSSITVTTHHHHHSGTGQHHDAEEPLIKHEADCEGTQSAAKKPRRNINVHSAYLHVLGDSIQSIGVMIGGAIIWYKPEWKIIDLICTLIFSVVVLFTTIRMLRNILEVLMESTPREIDATRLERGLCEMEGVVAVHELHIWAITVGKVLLACHVTVAREADADEILDKVIGYIKTEYNISHVTIQVERE

SEQ ID NO: 35180 - protein, 399 aa, Zea mays subsp. mays
  peptide (1)..(399): Ceres Seq. ID no. 12342468
  misc_feature (43)..(398): Pfam Name: Pfam Description:  Cation efflux family
  misc_feature (1)..(399): NCBI GI NO: 30420736 NR Description: zinc transporter
  misc_feature (1)..(399): NCBI GI NO: 16550925 NR Description: zinc transporter [Eucalyptus grandis]
  misc_feature (1)..(398): NCBI GI NO: 15226441 NR Description: putative zinc transporter; protein id: At2g46800
  misc_feature (1)..(398): NCBI GI NO: 40287446 NR Description: heavy metal transporter MTP1 [Arabis shortii]
  misc_feature (1)..(398): NCBI GI NO: 40287442 NR Description: heavy metal transporter MTP1 [Thlaspi arvense]
  misc_feature (1)..(398): NCBI GI NO: 4206640 NR Description: zinc transporter ZAT [Arabidopsis thaliana]
  misc_feature (1)..(187): NCBI GI NO: 40287448 NR Description: heavy metal transporter MTP2 [Arabis shortii]
  misc_feature (201)..(398): NCBI GI NO: 40287448 NR Description: heavy metal transporter MTP2 [Arabis shortii]
  misc_feature (1)..(398): NCBI GI NO: 40287444 NR Description: heavy metal transporter MTP1
  misc_feature (1)..(398): NCBI GI NO: 14582253 NR Description: zinc transporter [Thlaspi caerulescens]
MDISASASVASGNKFCKGGACDFSDSSNSSKDAKERSTSMRKLIIAVILCIIFMTVEVVGGIKANSLAILTDAAHLLSDVAAFAISLFSLWAAGWEATPQQSYGFFRIEILGALVSIQLIWLLAGILVYEAIVRLINESGDVQGSLMFAVSAFGLFVNIIMAVLLGHDHGHGHGHSHGHPHDHGHGDSDDGHSHHEEPEQGHVHHHEHSHGSSITVTTHHHHHSGTGQHHDAEEPLIKHEADCEGTQSAAKKPRRNINVHSAYLHVLGDSIQSIGVMIGGAIIWYKPEWKIIDLICTLIFSVVVLFTTIRMLRNILEVLMESTPREIDATRLERGLCEMEGVVAVHELHIWAITVGKVLLACHVTVAREADADEILDKVIGYIKTEYNISHVTIQVERE

SEQ ID NO: 35181 - protein, 360 aa, Zea mays subsp. mays
  peptide (1)..(360): Ceres Seq. ID no. 12342469
  misc_feature (4)..(359): Pfam Name: Pfam Description:  Cation efflux family
  misc_feature (1)..(360): NCBI GI NO: 30420736 NR Description: zinc transporter
  misc_feature (1)..(360): NCBI GI NO: 16550925 NR Description: zinc transporter [Eucalyptus grandis]
  misc_feature (1)..(359): NCBI GI NO: 15226441 NR Description: putative zinc transporter; protein id: At2g46800
  misc_feature (1)..(359): NCBI GI NO: 40287446 NR Description: heavy metal transporter MTP1 [Arabis shortii]
  misc_feature (1)..(359): NCBI GI NO: 40287442 NR Description: heavy metal transporter MTP1 [Thlaspi arvense]
  misc_feature (1)..(359): NCBI GI NO: 4206640 NR Description: zinc transporter ZAT [Arabidopsis thaliana]
  misc_feature (1)..(148): NCBI GI NO: 40287448 NR Description: heavy metal transporter MTP2 [Arabis shortii]
  misc_feature (162)..(359): NCBI GI NO: 40287448 NR Description: heavy metal transporter MTP2 [Arabis shortii]
  misc_feature (1)..(359): NCBI GI NO: 40287444 NR Description: heavy metal transporter MTP1
  misc_feature (1)..(359): NCBI GI NO: 14582253 NR Description: zinc transporter [Thlaspi caerulescens]
MRKLIIAVILCIIFMTVEVVGGIKANSLAILTDAAHLLSDVAAFAISLFSLWAAGWEATPQQSYGFFRIEILGALVSIQLIWLLAGILVYEAIVRLINESGDVQGSLMFAVSAFGLFVNIIMAVLLGHDHGHGHGHSHGHPHDHGHGDSDDGHSHHEEPEQGHVHHHEHSHGSSITVTTHHHHHSGTGQHHDAEEPLIKHEADCEGTQSAAKKPRRNINVHSAYLHVLGDSIQSIGVMIGGAIIWYKPEWKIIDLICTLIFSVVVLFTTIRMLRNILEVLMESTPREIDATRLERGLCEMEGVVAVHELHIWAITVGKVLLACHVTVAREADADEILDKVIGYIKTEYNISHVTIQVERE

SEQ ID NO: 35182 - DNA, 1493 bp, Zea mays subsp. mays
  misc_feature (1)..(1493): Ceres Seq. ID no. 12362028
tgaacatgaaaaaactgcatacttcagatgtggaatccgacaaccttaagaaggatccagaagaaacggattctgctttagagagctcaacagaagtcaacagccaaaaggaagcattggaagctgtgctgtttgagcgcaaaaatgaaatcgaaattctgaaaggtgcaatggcctcagctgctaagcaatttgacgttgaattggaacatcgtgatcttgaaattgataagtgcaagcatgaacttggagtactctcagagaagtatttgcatgataagtctactcttgaggatgagcttagaaagctccatggagtcatcaagaatatggaaggtgacctagaaaaaattcacaggagaaaatgcagctgcaagtctcggattaaagaacttgagcaggcagctcacagcttagaacgttcaacttccgagatagttaagctacaagaagtaataaggaatacacaagcggaattagaaaaggttacagaggataaaattgtgctcaaagaacgcgctaacgaatttgagcaacttttaagggcccttaaggtctcaggtacagaggttgcaaagctaccagaaactatcaagaacctggaagctcagctagaaagagccttagaagagaaatcaatacttcaagaccagatcaagcaggtggagcaggttatgtctgaatctttggagaaacattcacatgagcagtcctctcttgctgctgaccttttgaagttatctgaagcgaacacttcacttggaggcaaattatcctctgtggcggcagagcttgtgcaagtttatgctgataacgaagaagaatctcttgataatgagaagcaaatttctgtcctcaatcaagatattgccgatctgaggagaaagcttgaattgttatcatctgagaaagccgcagttgattatgagttggccaaactgctagctgatattacgactcgtgacgaaaagatgaagcgaatggatgaccacctaaatcagcttcagtttgagcatgccaagctgatggcagaatttgacaccgcacacaggtccttgtcagagctgtgtgcgcaggtttctgagctggaagaagaggtacagaagcagaagcttgtaatatccgagactgcagagggaaaacgagaggctatcaggcagctgtgcttctccattgaacactaccgcagcgggtatcagcagctgaggcagctgttgcaaggccacaggaggccgttggtgatggcaacctgataaagtgaacaatgctggtttgccaatgaactgcacagttgcttgtctctgggtctgttctgtttttagccttgttctttcacaacatgtgccgtgcagcatggtattaagaattttgtggtatgtgtgtagaatgcaatgggatgggatattcatgtcgttcatttacactcctgtcttttgttcttgttgcctactgttgaatgttatgatatgcttgaaccttcatctttttcagcc

SEQ ID NO: 35183 - protein, 416 aa, Zea mays subsp. mays
  peptide (1)..(416): Ceres Seq. ID no. 12362029
  misc_feature (10)..(380): Pfam Name: DUF869 Pfam Description: Plant protein of unknown function
  misc_feature (15)..(415): NCBI GI NO: 34896156 NR Description: P0701D05.33
  misc_feature (79)..(415): NCBI GI NO: 22002966 NR Description: putative CENP-E like kinetochore protein
  misc_feature (11)..(328): NCBI GI NO: 22002966 NR Description: putative CENP-E like kinetochore protein
  misc_feature (5)..(414): NCBI GI NO: 34860755 NR Description: similar to hypothetical protein
  misc_feature (2)..(416): NCBI GI NO: 15224515 NR Description: unknown protein; protein id: At2g30500.1
  misc_feature (2)..(416): NCBI GI NO: 28416683 NR Description: At2g30500 [Arabidopsis thaliana]
  misc_feature (11)..(410): NCBI GI NO: 15238455 NR Description: putative protein; protein id: At5g05180
  misc_feature (4)..(282): NCBI GI NO: 34860755 NR Description: similar to hypothetical protein
  misc_feature (4)..(405): NCBI GI NO: 15217624 NR Description: unknown protein; protein id: At1g64330.1
  misc_feature (8)..(404): NCBI GI NO: 86355 NR Description: myosin heavy chain, fast skeletal muscle, adult
NMKKLHTSDVESDNLKKDPEETDSALESSTEVNSQKEALEAVLFERKNEIEILKGAMASAAKQFDVELEHRDLEIDKCKHELGVLSEKYLHDKSTLEDELRKLHGVIKNMEGDLEKIHRRKCSCKSRIKELEQAAHSLERSTSEIVKLQEVIRNTQAELEKVTEDKIVLKERANEFEQLLRALKVSGTEVAKLPETIKNLEAQLERALEEKSILQDQIKQVEQVMSESLEKHSHEQSSLAADLLKLSEANTSLGGKLSSVAAELVQVYADNEEESLDNEKQISVLNQDIADLRRKLELLSSEKAAVDYELAKLLADITTRDEKMKRMDDHLNQLQFEHAKLMAEFDTAHRSLSELCAQVSELEEEVQKQKLVISETAEGKREAIRQLCFSIEHYRSGYQQLRQLLQGHRRPLVMAT

SEQ ID NO: 35184 - protein, 415 aa, Zea mays subsp. mays
  peptide (1)..(415): Ceres Seq. ID no. 12362030
  misc_feature (9)..(379): Pfam Name: DUF869 Pfam Description: Plant protein of unknown function
  misc_feature (14)..(414): NCBI GI NO: 34896156 NR Description: P0701D05.33
  misc_feature (78)..(414): NCBI GI NO: 22002966 NR Description: putative CENP-E like kinetochore protein
  misc_feature (10)..(327): NCBI GI NO: 22002966 NR Description: putative CENP-E like kinetochore protein
  misc_feature (4)..(413): NCBI GI NO: 34860755 NR Description: similar to hypothetical protein
  misc_feature (1)..(415): NCBI GI NO: 15224515 NR Description: unknown protein; protein id: At2g30500.1
  misc_feature (1)..(415): NCBI GI NO: 28416683 NR Description: At2g30500 [Arabidopsis thaliana]
  misc_feature (10)..(409): NCBI GI NO: 15238455 NR Description: putative protein; protein id: At5g05180
  misc_feature (3)..(281): NCBI GI NO: 34860755 NR Description: similar to hypothetical protein
  misc_feature (3)..(404): NCBI GI NO: 15217624 NR Description: unknown protein; protein id: At1g64330.1
  misc_feature (7)..(403): NCBI GI NO: 86355 NR Description: myosin heavy chain, fast skeletal muscle, adult
MKKLHTSDVESDNLKKDPEETDSALESSTEVNSQKEALEAVLFERKNEIEILKGAMASAAKQFDVELEHRDLEIDKCKHELGVLSEKYLHDKSTLEDELRKLHGVIKNMEGDLEKIHRRKCSCKSRIKELEQAAHSLERSTSEIVKLQEVIRNTQAELEKVTEDKIVLKERANEFEQLLRALKVSGTEVAKLPETIKNLEAQLERALEEKSILQDQIKQVEQVMSESLEKHSHEQSSLAADLLKLSEANTSLGGKLSSVAAELVQVYADNEEESLDNEKQISVLNQDIADLRRKLELLSSEKAAVDYELAKLLADITTRDEKMKRMDDHLNQLQFEHAKLMAEFDTAHRSLSELCAQVSELEEEVQKQKLVISETAEGKREAIRQLCFSIEHYRSGYQQLRQLLQGHRRPLVMAT

SEQ ID NO: 35185 - protein, 360 aa, Zea mays subsp. mays
  peptide (1)..(360): Ceres Seq. ID no. 12362031
  misc_feature (1)..(324): Pfam Name: DUF869 Pfam Description: Plant protein of unknown function
  misc_feature (1)..(359): NCBI GI NO: 34896156 NR Description: P0701D05.33
  misc_feature (23)..(359): NCBI GI NO: 22002966 NR Description: putative CENP-E like kinetochore protein
  misc_feature (1)..(272): NCBI GI NO: 22002966 NR Description: putative CENP-E like kinetochore protein
  misc_feature (1)..(358): NCBI GI NO: 34860755 NR Description: similar to hypothetical protein
  misc_feature (1)..(360): NCBI GI NO: 15224515 NR Description: unknown protein; protein id: At2g30500.1
  misc_feature (1)..(360): NCBI GI NO: 28416683 NR Description: At2g30500 [Arabidopsis thaliana]
  misc_feature (1)..(354): NCBI GI NO: 15238455 NR Description: putative protein; protein id: At5g05180
  misc_feature (1)..(226): NCBI GI NO: 34860755 NR Description: similar to hypothetical protein
  misc_feature (1)..(349): NCBI GI NO: 15217624 NR Description: unknown protein; protein id: At1g64330.1
  misc_feature (1)..(348): NCBI GI NO: 86355 NR Description: myosin heavy chain, fast skeletal muscle, adult
MASAAKQFDVELEHRDLEIDKCKHELGVLSEKYLHDKSTLEDELRKLHGVIKNMEGDLEKIHRRKCSCKSRIKELEQAAHSLERSTSEIVKLQEVIRNTQAELEKVTEDKIVLKERANEFEQLLRALKVSGTEVAKLPETIKNLEAQLERALEEKSILQDQIKQVEQVMSESLEKHSHEQSSLAADLLKLSEANTSLGGKLSSVAAELVQVYADNEEESLDNEKQISVLNQDIADLRRKLELLSSEKAAVDYELAKLLADITTRDEKMKRMDDHLNQLQFEHAKLMAEFDTAHRSLSELCAQVSELEEEVQKQKLVISETAEGKREAIRQLCFSIEHYRSGYQQLRQLLQGHRRPLVMAT

SEQ ID NO: 35186 - DNA, 1422 bp, Zea mays subsp. mays
  misc_feature (1)..(1422): Ceres Seq. ID no. 12405251
cggattaagcgataattaaggcaaagaatctccaagtttgcttcgttcttgcattgaaccatggagtctggacggctcatcttcaacgcgccgggctctggcgccgggcagatgctcttcctcgactgcggcgcaggcggcggtcccggcggcggcttgttccatcgaggcgggagaccgatgcttggccttgaagaagggcgcggcgtaaaacggcccttcttcacctcgcccgacgagctcctcgaggaagagtactacgacgagcagctgccggagaagaagcgccgcctcaccccagagcaggtgcttctgctggagaggagcttcgaggaggagaacaagctggagccggagcgcaagacggagctggcgcgcaagctgggcctgcagcctcgccaggtggccgtctggttccagaaccgccgcgcccggtggaagaccaagcagctcgagcgcgacttcgaccgcctcaaggcctccttcgacgctctccgagcggaccacgacgccctcctccaggacaacaaccgcctccgctcacaggttgtgtcgttgaccgagaagctgcaagagaaggaggatgcgacggagggcggcgccaccgctgacaccgccgcgccggcggtggacgtcgaggcttccctggccgacgacgtcgaggagccagcagagcctgcggcgacgttcgaggtgctgcaggaggtgaagtccgaggacaggctgagcaccggcagcggcgggagcgcggtggtggacgcggacgcgctgctgtacggcaggttcgccgcggcagttgatagcagcgtggagtcgtacttccccggcggcgaggaccactaccacgactgcgggacgatgggccccgtgaaccatggcgccggaggaggcatccagtcggacgacgacggcgccggcagcgacgaggggtgcagctactacgccgacgaagccgccgccgccgccgccgccgcgttcttcgccggacacgccacccaccaccacgcggacgaggacgaggacgccggccagatcagctggtggatgtggaactagacgttcgatcttcccacgccgatcgatcgaccgtcttcgaatcctgtgtcaacaagaagaaaaaagaatcgtgccgtgatttttctttgcgcaacgctgctgtaagcctgtaatggtgaatttctagctatggttatgccgttatgaaggaagaaagtgtatgcatgcatggtagggtaaagagtgggtaattaatatcgttgatcatcccagtcactcgtggtgttccagaagatcaatggagttgggggagaaataagtgcgcatagaggcaagtactactctttttatggcacagtgcctatgtcaaatcagggtgttattaccagttggttttttttaaaaaaaaatactgtactattacgc

SEQ ID NO: 35187 - protein, 331 aa, Zea mays subsp. mays
  peptide (1)..(331): Ceres Seq. ID no. 12405252
  misc_feature (74)..(128): Pfam Name: Pfam Description:  Homeobox domain
  misc_feature (1)..(331): NCBI GI NO: 37573050 NR Description: homeodomain leucine zipper protein
  misc_feature (1)..(331): NCBI GI NO: 5006855 NR Description: homeodomain leucine zipper protein [Oryza sativa]
  misc_feature (1)..(260): NCBI GI NO: 18034441 NR Description: homeodomain leucine zipper protein CPHB-5
  misc_feature (1)..(236): NCBI GI NO: 15232122 NR Description: homeobox-leucine zipper protein HAT5
  misc_feature (69)..(233): NCBI GI NO: 15148920 NR Description: homeodomain leucine zipper protein HDZ3
  misc_feature (70)..(169): NCBI GI NO: 166754 NR Description: homeobox protein
  misc_feature (36)..(236): NCBI GI NO: 15148918 NR Description: homeodomain leucine zipper protein HDZ2
  misc_feature (54)..(249): NCBI GI NO: 7446244 NR Description: homeotic protein - carrot
  misc_feature (52)..(205): NCBI GI NO: 6018089 NR Description: homeodomain-leucine zipper protein 57
  misc_feature (35)..(236): NCBI GI NO: 7415624 NR Description: homeobox protein PpHB6 [Physcomitrella patens]
MESGRLIFNAPGSGAGQMLFLDCGAGGGPGGGLFHRGGRPMLGLEEGRGVKRPFFTSPDELLEEEYYDEQLPEKKRRLTPEQVLLLERSFEEENKLEPERKTELARKLGLQPRQVAVWFQNRRARWKTKQLERDFDRLKASFDALRADHDALLQDNNRLRSQVVSLTEKLQEKEDATEGGATADTAAPAVDVEASLADDVEEPAEPAATFEVLQEVKSEDRLSTGSGGSAVVDADALLYGRFAAAVDSSVESYFPGGEDHYHDCGTMGPVNHGAGGGIQSDDDGAGSDEGCSYYADEAAAAAAAAFFAGHATHHHADEDEDAGQISWWMWN

SEQ ID NO: 35188 - protein, 314 aa, Zea mays subsp. mays
  peptide (1)..(314): Ceres Seq. ID no. 12405253
  misc_feature (57)..(111): Pfam Name: Pfam Description:  Homeobox domain
  misc_feature (1)..(314): NCBI GI NO: 37573050 NR Description: homeodomain leucine zipper protein
  misc_feature (1)..(314): NCBI GI NO: 5006855 NR Description: homeodomain leucine zipper protein [Oryza sativa]
  misc_feature (1)..(243): NCBI GI NO: 18034441 NR Description: homeodomain leucine zipper protein CPHB-5
  misc_feature (1)..(219): NCBI GI NO: 15232122 NR Description: homeobox-leucine zipper protein HAT5
  misc_feature (52)..(216): NCBI GI NO: 15148920 NR Description: homeodomain leucine zipper protein HDZ3
  misc_feature (53)..(152): NCBI GI NO: 166754 NR Description: homeobox protein
  misc_feature (19)..(219): NCBI GI NO: 15148918 NR Description: homeodomain leucine zipper protein HDZ2
  misc_feature (37)..(232): NCBI GI NO: 7446244 NR Description: homeotic protein - carrot
  misc_feature (35)..(188): NCBI GI NO: 6018089 NR Description: homeodomain-leucine zipper protein 57
  misc_feature (18)..(219): NCBI GI NO: 7415624 NR Description: homeobox protein PpHB6 [Physcomitrella patens]
MLFLDCGAGGGPGGGLFHRGGRPMLGLEEGRGVKRPFFTSPDELLEEEYYDEQLPEKKRRLTPEQVLLLERSFEEENKLEPERKTELARKLGLQPRQVAVWFQNRRARWKTKQLERDFDRLKASFDALRADHDALLQDNNRLRSQVVSLTEKLQEKEDATEGGATADTAAPAVDVEASLADDVEEPAEPAATFEVLQEVKSEDRLSTGSGGSAVVDADALLYGRFAAAVDSSVESYFPGGEDHYHDCGTMGPVNHGAGGGIQSDDDGAGSDEGCSYYADEAAAAAAAAFFAGHATHHHADEDEDAGQISWWMWN

SEQ ID NO: 35189 - protein, 291 aa, Zea mays subsp. mays
  peptide (1)..(291): Ceres Seq. ID no. 12405254
  misc_feature (34)..(88): Pfam Name: Pfam Description:  Homeobox domain
  misc_feature (1)..(291): NCBI GI NO: 37573050 NR Description: homeodomain leucine zipper protein
  misc_feature (1)..(291): NCBI GI NO: 5006855 NR Description: homeodomain leucine zipper protein [Oryza sativa]
  misc_feature (1)..(220): NCBI GI NO: 18034441 NR Description: homeodomain leucine zipper protein CPHB-5
  misc_feature (1)..(196): NCBI GI NO: 15232122 NR Description: homeobox-leucine zipper protein HAT5
  misc_feature (29)..(193): NCBI GI NO: 15148920 NR Description: homeodomain leucine zipper protein HDZ3
  misc_feature (30)..(129): NCBI GI NO: 166754 NR Description: homeobox protein
  misc_feature (1)..(196): NCBI GI NO: 15148918 NR Description: homeodomain leucine zipper protein HDZ2
  misc_feature (14)..(209): NCBI GI NO: 7446244 NR Description: homeotic protein - carrot
  misc_feature (12)..(165): NCBI GI NO: 6018089 NR Description: homeodomain-leucine zipper protein 57
  misc_feature (1)..(196): NCBI GI NO: 7415624 NR Description: homeobox protein PpHB6 [Physcomitrella patens]
MLGLEEGRGVKRPFFTSPDELLEEEYYDEQLPEKKRRLTPEQVLLLERSFEEENKLEPERKTELARKLGLQPRQVAVWFQNRRARWKTKQLERDFDRLKASFDALRADHDALLQDNNRLRSQVVSLTEKLQEKEDATEGGATADTAAPAVDVEASLADDVEEPAEPAATFEVLQEVKSEDRLSTGSGGSAVVDADALLYGRFAAAVDSSVESYFPGGEDHYHDCGTMGPVNHGAGGGIQSDDDGAGSDEGCSYYADEAAAAAAAAFFAGHATHHHADEDEDAGQISWWMWN

SEQ ID NO: 35190 - DNA, 707 bp, Zea mays subsp. mays; identical to SEQ ID NO: 31961
  misc_feature (1)..(707): Ceres Seq. ID no. 12441460

SEQ ID NO: 35191 - protein, 145 aa, Zea mays subsp. mays; identical to SEQ ID NO: 31962
  peptide (1)..(145): Ceres Seq. ID no. 12441461

SEQ ID NO: 35192 - protein, 140 aa, Zea mays subsp. mays; identical to SEQ ID NO: 31963
  peptide (1)..(140): Ceres Seq. ID no. 12441462

SEQ ID NO: 35193 - protein, 139 aa, Zea mays subsp. mays; identical to SEQ ID NO: 25716
  peptide (1)..(139): Ceres Seq. ID no. 12441463
  misc_feature (12)..(139): Pfam Name: Pfam Description:  Cofilin/tropomyosin-type actin-binding protein
  misc_feature (1)..(139): NCBI GI NO: 17366768 NR Description: Actin-depolymerizing factor 1 (ADF 1)
  misc_feature (1)..(139): NCBI GI NO: 30697300 NR Description: actin depolymerizing factor 4 - like protein
  misc_feature (1)..(139): NCBI GI NO: 4185511 NR Description: actin depolymerizing factor 4
  misc_feature (1)..(139): NCBI GI NO: 15231309 NR Description: actin depolymerizing factor 1
  misc_feature (1)..(139): NCBI GI NO: 38564721 NR Description: putative actin-depolymerizing factor 2
  misc_feature (1)..(138): NCBI GI NO: 17366765 NR Description: Actin-depolymerizing factor 2 (ADF 2)
  misc_feature (8)..(139): NCBI GI NO: 30697303 NR Description: actin depolymerizing factor 4 - like protein
  misc_feature (1)..(139): NCBI GI NO: 18408116 NR Description: actin depolymerizing factor 2
  misc_feature (1)..(138): NCBI GI NO: 231509 NR Description: Actin-depolymerizing factor (ADF)
  misc_feature (1)..(137): NCBI GI NO: 18411410 NR Description: putative actin-depolymerizing factor

SEQ ID NO: 35194 - DNA, 1421 bp, Zea mays subsp. mays
  misc_feature (1)..(1421): Ceres Seq. ID no. 12405865
atacaacgaggtagatcctcctccgtaaagcgaaagcaaaaaccaaccaaacaagctagctagagctagccaagccgcggcgtgcctccgctccggccggcccgcccctgtcagagcccccaccgccgctgccacctccgccagccgtcaccccaggcgttggatcggggccctctcgatccgcgcccggcgaatccagacggacccgcattggggttggggccccttcgatccggcgcttggtgggggtttggctgggagctccaggctgaggggacggggcggggggacctgatccttcattccgttcggatttcgcttttcccccgtggggtctcgactgccggagggggaggaggacatggatttggcgtcggtcaacgaggagctggccgagatcgacgggcagatcggcgatatcctccgcgtattgcaaaatgggttccagaagctggagaagatcaaggatgccaaccgccacagcaggcagcttgaagagcttactgataagatgcgagactgcaagagactcatcaaagacttcgagcgagttagcaaagctgaggctgagcatactgatccagcaacagcaaaaatgttgcatgacagaaagcagtcgatgatcaaagaattaaactcctacgttgctctaaagaaacagcaggcaagtgaaaacaagagaatcgatctttttgatgggccaagtgctgaagatggctttggtgaagaaaatgtcctgttagcatcaaatatgacaaaccagcagttaatggatcaaggcaatcaactaatggatgaaactgatcaagctattgcacgatctaagcagactgtccaagaaaccgtcaatgtgggcacagaaactgcagctgctctgaaagcacagacagaacaaatgagcagagttgttaatgagttggattccatccatttctccatcaaaaaggcatctcaattggtgaaagaaatcggtcgacaggttgcaactgatcgatgcatcatggccatgctttttctcattgttgctggagtcatagctataataattgttaagattgtgaacccacacaacaaggacattcgcgacatccctggcttggcaccacccgtcagcaggcggctgttgcgatagaggacaggtgaattgcatacctggtgtaaaaattgatgtggcgcggcgccttggcaagcccatctgtattctacgtcttgtaaaacgctgctccagtcatgtggtatattgctgtaaaacttctcatgggatccactcctactccttggctacacacagtgcgtatatgttcctcctagttcgccttcctgtttttgcaaaactaactctgaacggtgttctgttagaatcatgtgcacacatgatggttgagatgtgtctatgatgttcattgtgacgaacgattctt

SEQ ID NO: 35195 - protein, 256 aa, Zea mays subsp. mays
  peptide (1)..(256): Ceres Seq. ID no. 12405866
  misc_feature (78)..(210): Pfam Name: Pfam Description:  Vesicle transport v-SNARE protein
  misc_feature (1)..(255): NCBI GI NO: 18403771 NR Description: expressed protein; protein id: At2g35190
  misc_feature (1)..(255): NCBI GI NO: 27805643 NR Description: Novel plant SNARE 11 (AtNPSN11)
  misc_feature (1)..(246): NCBI GI NO: 25370780 NR Description: hypothetical protein At2g35190
  misc_feature (6)..(255): NCBI GI NO: 23237830 NR Description: contains ESTs C19491
  misc_feature (6)..(249): NCBI GI NO: 34896946 NR Description: putative vesicle soluble NSF attachment proteinreceptor
  misc_feature (6)..(255): NCBI GI NO: 18401508 NR Description: expressed protein; protein id: At3g17440
  misc_feature (6)..(255): NCBI GI NO: 22330102 NR Description: unknown protein; protein id: At1g48240
  misc_feature (6)..(255): NCBI GI NO: 21536876 NR Description: unknown [Arabidopsis thaliana]
  misc_feature (2)..(255): NCBI GI NO: 25370781 NR Description: F11A17.20 [imported] - Arabidopsis thaliana
  misc_feature (6)..(207): NCBI GI NO: 25370781 NR Description: F11A17.20 [imported] - Arabidopsis thaliana
MDLASVNEELAEIDGQIGDILRVLQNGFQKLEKIKDANRHSRQLEELTDKMRDCKRLIKDFERVSKAEAEHTDPATAKMLHDRKQSMIKELNSYVALKKQQASENKRIDLFDGPSAEDGFGEENVLLASNMTNQQLMDQGNQLMDETDQAIARSKQTVQETVNVGTETAAALKAQTEQMSRVVNELDSIHFSIKKASQLVKEIGRQVATDRCIMAMLFLIVAGVIAIIIVKIVNPHNKDIRDIPGLAPPVSRRLLR

SEQ ID NO: 35196 - protein, 206 aa, Zea mays subsp. mays
  peptide (1)..(206): Ceres Seq. ID no. 12405867
  misc_feature (28)..(160): Pfam Name: Pfam Description:  Vesicle transport v-SNARE protein
  misc_feature (1)..(205): NCBI GI NO: 18403771 NR Description: expressed protein; protein id: At2g35190
  misc_feature (1)..(205): NCBI GI NO: 27805643 NR Description: Novel plant SNARE 11 (AtNPSN11)
  misc_feature (1)..(196): NCBI GI NO: 25370780 NR Description: hypothetical protein At2g35190
  misc_feature (1)..(205): NCBI GI NO: 23237830 NR Description: contains ESTs C19491
  misc_feature (1)..(199): NCBI GI NO: 34896946 NR Description: putative vesicle soluble NSF attachment proteinreceptor
  misc_feature (1)..(205): NCBI GI NO: 18401508 NR Description: expressed protein; protein id: At3g17440
  misc_feature (1)..(205): NCBI GI NO: 22330102 NR Description: unknown protein; protein id: At1g48240
  misc_feature (1)..(205): NCBI GI NO: 21536876 NR Description: unknown [Arabidopsis thaliana]
  misc_feature (1)..(205): NCBI GI NO: 25370781 NR Description: F11A17.20 [imported] - Arabidopsis thaliana
  misc_feature (1)..(157): NCBI GI NO: 25370781 NR Description: F11A17.20 [imported] - Arabidopsis thaliana
MRDCKRLIKDFERVSKAEAEHTDPATAKMLHDRKQSMIKELNSYVALKKQQASENKRIDLFDGPSAEDGFGEENVLLASNMTNQQLMDQGNQLMDETDQAIARSKQTVQETVNVGTETAAALKAQTEQMSRVVNELDSIHFSIKKASQLVKEIGRQVATDRCIMAMLFLIVAGVIAIIIVKIVNPHNKDIRDIPGLAPPVSRRLLR

SEQ ID NO: 35197 - protein, 178 aa, Zea mays subsp. mays
  peptide (1)..(178): Ceres Seq. ID no. 12405868
  misc_feature (1)..(132): Pfam Name: Pfam Description:  Vesicle transport v-SNARE protein
  misc_feature (1)..(177): NCBI GI NO: 18403771 NR Description: expressed protein; protein id: At2g35190
  misc_feature (1)..(177): NCBI GI NO: 27805643 NR Description: Novel plant SNARE 11 (AtNPSN11)
  misc_feature (1)..(168): NCBI GI NO: 25370780 NR Description: hypothetical protein At2g35190
  misc_feature (1)..(177): NCBI GI NO: 23237830 NR Description: contains ESTs C19491
  misc_feature (1)..(171): NCBI GI NO: 34896946 NR Description: putative vesicle soluble NSF attachment proteinreceptor
  misc_feature (1)..(177): NCBI GI NO: 18401508 NR Description: expressed protein; protein id: At3g17440
  misc_feature (1)..(177): NCBI GI NO: 22330102 NR Description: unknown protein; protein id: At1g48240
  misc_feature (1)..(177): NCBI GI NO: 21536876 NR Description: unknown [Arabidopsis thaliana]
  misc_feature (1)..(177): NCBI GI NO: 25370781 NR Description: F11A17.20 [imported] - Arabidopsis thaliana
  misc_feature (1)..(129): NCBI GI NO: 25370781 NR Description: F11A17.20 [imported] - Arabidopsis thaliana
MLHDRKQSMIKELNSYVALKKQQASENKRIDLFDGPSAEDGFGEENVLLASNMTNQQLMDQGNQLMDETDQAIARSKQTVQETVNVGTETAAALKAQTEQMSRVVNELDSIHFSIKKASQLVKEIGRQVATDRCIMAMLFLIVAGVIAIIIVKIVNPHNKDIRDIPGLAPPVSRRLLR

SEQ ID NO: 35198 - DNA, 1576 bp, Zea mays subsp. mays
  misc_feature (1)..(1576): Ceres Seq. ID no. 12341390
atccgccgcttccgcttcgtcccaaatcccttttggcgggagacgagcagcaggctgcctccacttcccgcgcaaagcagtaaatcggagtaaccatggacggcggatcctccacaccggcgagccccccaccgacggtatccgcgtcggcggcgaatatggaggagtaccggaactggaagaagaacgcggcggtgctttacgacctcgtcatctcccacccgctcgagtggccatcgctcaccgtgcagtggctcccatcggagtcctcggcccgcagccaccggctcgtcgtgggtacgcacacctccgacgaggcccccaacaacctcatggtcttggacgcggtgctaccgctcccacctcgcctcgctgcagccgtcgctgcctcgggcggcgccgtcccgttcccatccgtatccgtctcgcgcgtggcgccacaccgtggcgaggtcaaccgcgcgcgctgcatgccgcagcgtccctatacggtggccaccaaaacgtgcgtcgacgaggtgcacgtgtaccatctcggcgatgacgacggcagcgggaagagcggcgccgaagttgtgctcaaggggcatgaggcggagggttatggcttgtcatggagcccgatgaaggaggggtggctgctgagcggctcgtatgataagaagatttgcttgtgggacatctcctctgggagtggcgctcctgttctggatgcacaacaggtgtttgtggctcatgaggatctcgttgaagatgttgcttggcacctgaaggatgaacatatatttggatctgttggggatgactgtaagttgatgatgtgggacttgcgtacaaacaaaccagaacaatctattcttgcacatcgaaaggaggtcaactctttgtcattcaatccattcaatgaatggatattggctacagcatctggagacacaactatcaacctatttgacatgcgaaaactatctagaagcttgcatacttttgacagtcatgaggcggaggtgtttcaggttgaatggaatccaaatttggctactgtattagcttcatctgccgcagacaagagagtgatgatatgggatattaataggattggcgatgagcagtcagaggaagacgcagacgacggaccaccggagctgctgttcgttcatggaggccacacagacaagatatcagagctgtcgtggaatcctagcgagaaatgggccattgccagcgtgtctgaagacaacatcctgcagatatgggagatggcagaaagcatatactgtgatgacctctccatgcaggttaactgactcgtgcctcgaagcataaagccagagtgggcatctataagaactctttaaatccgtgacatgcattaggctatctccagcagatctcctatcacatcctttatgttatcccctattttcaaacttctctctgcaaagagtcagttattgacttgagtaatcttgatagtctgaatctgattgagcctttaggcataaatgtaactttgaaattgtagggtcagggttgacttcttttccagtttggaacttactactccctgcagttc

SEQ ID NO: 35199 - protein, 403 aa, Zea mays subsp. mays
  peptide (1)..(403): Ceres Seq. ID no. 12341391
  misc_feature (157)..(195): Pfam Name: Pfam Description:  WD domain, G-beta repeat
  misc_feature (22)..(403): NCBI GI NO: 20977604 NR Description: nucleosome/chromatin assembly factor 104
  misc_feature (23)..(397): NCBI GI NO: 15236251 NR Description: WD-40 repeat protein (MSI3); protein id:At4g35050
  misc_feature (23)..(397): NCBI GI NO: 27754479 NR Description: putative WD-40 repeat protein (MSI3)
  misc_feature (23)..(397): NCBI GI NO: 2394233 NR Description: WD-40 repeat protein [Arabidopsis thaliana]
  misc_feature (23)..(397): NCBI GI NO: 15227294 NR Description: putative WD-40 repeat protein, MSI2
  misc_feature (23)..(397): NCBI GI NO: 21593624 NR Description: putative WD-40 repeat protein, MSI2
  misc_feature (20)..(396): NCBI GI NO: 39595121 NR Description: Hypothetical protein CBG03710
  misc_feature (20)..(394): NCBI GI NO: 17508127 NR Description: Synthetic multivulva protein LIN-53
  misc_feature (44)..(397): NCBI GI NO: 15237140 NR Description: WD-40 repeat protein MSI1
  misc_feature (45)..(403): NCBI GI NO: 6677681 NR Description: retinoblastoma binding protein 4 [Mus musculus]
MDGGSSTPASPPPTVSASAANMEEYRNWKKNAAVLYDLVISHPLEWPSLTVQWLPSESSARSHRLVVGTHTSDEAPNNLMVLDAVLPLPPRLAAAVAASGGAVPFPSVSVSRVAPHRGEVNRARCMPQRPYTVATKTCVDEVHVYHLGDDDGSGKSGAEVVLKGHEAEGYGLSWSPMKEGWLLSGSYDKKICLWDISSGSGAPVLDAQQVFVAHEDLVEDVAWHLKDEHIFGSVGDDCKLMMWDLRTNKPEQSILAHRKEVNSLSFNPFNEWILATASGDTTINLFDMRKLSRSLHTFDSHEAEVFQVEWNPNLATVLASSAADKRVMIWDINRIGDEQSEEDADDGPPELLFVHGGHTDKISELSWNPSEKWAIASVSEDNILQIWEMAESIYCDDLSMQVN

SEQ ID NO: 35200 - protein, 382 aa, Zea mays subsp. mays
  peptide (1)..(382): Ceres Seq. ID no. 12341392
  misc_feature (136)..(174): Pfam Name: Pfam Description:  WD domain, G-beta repeat
  misc_feature (1)..(382): NCBI GI NO: 20977604 NR Description: nucleosome/chromatin assembly factor 104
  misc_feature (2)..(376): NCBI GI NO: 15236251 NR Description: WD-40 repeat protein (MSI3); protein id:At4g35050
  misc_feature (2)..(376): NCBI GI NO: 27754479 NR Description: putative WD-40 repeat protein (MSI3)
  misc_feature (2)..(376): NCBI GI NO: 2394233 NR Description: WD-40 repeat protein [Arabidopsis thaliana]
  misc_feature (2)..(376): NCBI GI NO: 15227294 NR Description: putative WD-40 repeat protein, MSI2
  misc_feature (2)..(376): NCBI GI NO: 21593624 NR Description: putative WD-40 repeat protein, MSI2
  misc_feature (1)..(375): NCBI GI NO: 39595121 NR Description: Hypothetical protein CBG03710
  misc_feature (1)..(373): NCBI GI NO: 17508127 NR Description: Synthetic multivulva protein LIN-53
  misc_feature (23)..(376): NCBI GI NO: 15237140 NR Description: WD-40 repeat protein MSI1
  misc_feature (24)..(382): NCBI GI NO: 6677681 NR Description: retinoblastoma binding protein 4 [Mus musculus]
MEEYRNWKKNAAVLYDLVISHPLEWPSLTVQWLPSESSARSHRLVVGTHTSDEAPNNLMVLDAVLPLPPRLAAAVAASGGAVPFPSVSVSRVAPHRGEVNRARCMPQRPYTVATKTCVDEVHVYHLGDDDGSGKSGAEVVLKGHEAEGYGLSWSPMKEGWLLSGSYDKKICLWDISSGSGAPVLDAQQVFVAHEDLVEDVAWHLKDEHIFGSVGDDCKLMMWDLRTNKPEQSILAHRKEVNSLSFNPFNEWILATASGDTTINLFDMRKLSRSLHTFDSHEAEVFQVEWNPNLATVLASSAADKRVMIWDINRIGDEQSEEDADDGPPELLFVHGGHTDKISELSWNPSEKWAIASVSEDNILQIWEMAESIYCDDLSMQVN

SEQ ID NO: 35201 - protein, 324 aa, Zea mays subsp. mays
  peptide (1)..(324): Ceres Seq. ID no. 12341393
  misc_feature (78)..(116): Pfam Name: Pfam Description:  WD domain, G-beta repeat
  misc_feature (1)..(324): NCBI GI NO: 20977604 NR Description: nucleosome/chromatin assembly factor 104
  misc_feature (1)..(318): NCBI GI NO: 15236251 NR Description: WD-40 repeat protein (MSI3); protein id:At4g35050
  misc_feature (1)..(318): NCBI GI NO: 27754479 NR Description: putative WD-40 repeat protein (MSI3)
  misc_feature (1)..(318): NCBI GI NO: 2394233 NR Description: WD-40 repeat protein [Arabidopsis thaliana]
  misc_feature (1)..(318): NCBI GI NO: 15227294 NR Description: putative WD-40 repeat protein, MSI2
  misc_feature (1)..(318): NCBI GI NO: 21593624 NR Description: putative WD-40 repeat protein, MSI2
  misc_feature (1)..(317): NCBI GI NO: 39595121 NR Description: Hypothetical protein CBG03710
  misc_feature (1)..(315): NCBI GI NO: 17508127 NR Description: Synthetic multivulva protein LIN-53
  misc_feature (1)..(318): NCBI GI NO: 15237140 NR Description: WD-40 repeat protein MSI1
  misc_feature (1)..(324): NCBI GI NO: 6677681 NR Description: retinoblastoma binding protein 4 [Mus musculus]
MVLDAVLPLPPRLAAAVAASGGAVPFPSVSVSRVAPHRGEVNRARCMPQRPYTVATKTCVDEVHVYHLGDDDGSGKSGAEVVLKGHEAEGYGLSWSPMKEGWLLSGSYDKKICLWDISSGSGAPVLDAQQVFVAHEDLVEDVAWHLKDEHIFGSVGDDCKLMMWDLRTNKPEQSILAHRKEVNSLSFNPFNEWILATASGDTTINLFDMRKLSRSLHTFDSHEAEVFQVEWNPNLATVLASSAADKRVMIWDINRIGDEQSEEDADDGPPELLFVHGGHTDKISELSWNPSEKWAIASVSEDNILQIWEMAESIYCDDLSMQVN

SEQ ID NO: 35202 - DNA, 1671 bp, Zea mays subsp. mays; identical to SEQ ID NO: 24737
  misc_feature (1)..(1671): Ceres Seq. ID no. 12594232

SEQ ID NO: 35203 - protein, 491 aa, Zea mays subsp. mays; identical to SEQ ID NO: 24738
  peptide (1)..(491): Ceres Seq. ID no. 12594233
  misc_feature (75)..(108): Pfam Name: Pfam Description:  TPR Domain
  misc_feature (32)..(491): NCBI GI NO: 38175649 NR Description: tetratricopeptide repeat-containing protein-like
  misc_feature (140)..(491): NCBI GI NO: 32352192 NR Description: hypothetical protein
  misc_feature (54)..(432): NCBI GI NO: 18419996 NR Description: putative protein; protein id: At4g37210.1
  misc_feature (54)..(375): NCBI GI NO: 25407799 NR Description: hypothetical protein AT4g37210
  misc_feature (61)..(330): NCBI GI NO: 4104353 NR Description: nuclear autoantigenic sperm protein autosomalvariant
  misc_feature (59)..(136): NCBI GI NO: 18129310 NR Description: hypothetical protein [Pinus pinaster]
  misc_feature (52)..(482): NCBI GI NO: 123127 NR Description: HISTONE-BINDING PROTEIN N1/N2
  misc_feature (32)..(330): NCBI GI NO: 13435642 NR Description: Unknown (protein for MGC:5829) [Mus musculus]
  misc_feature (61)..(330): NCBI GI NO: 27262630 NR Description: nuclear autoantigenic sperm protein isoform 3
  misc_feature (61)..(330): NCBI GI NO: 30584691 NR Description: Homo sapiens nuclear autoantigenic sperm protein

SEQ ID NO: 35204 - protein, 460 aa, Zea mays subsp. mays; identical to SEQ ID NO: 24739
  peptide (1)..(460): Ceres Seq. ID no. 12594234
  misc_feature (44)..(77): Pfam Name: Pfam Description:  TPR Domain
  misc_feature (1)..(460): NCBI GI NO: 38175649 NR Description: tetratricopeptide repeat-containing protein-like
  misc_feature (109)..(460): NCBI GI NO: 32352192 NR Description: hypothetical protein
  misc_feature (23)..(401): NCBI GI NO: 18419996 NR Description: putative protein; protein id: At4g37210.1
  misc_feature (23)..(344): NCBI GI NO: 25407799 NR Description: hypothetical protein AT4g37210
  misc_feature (30)..(299): NCBI GI NO: 4104353 NR Description: nuclear autoantigenic sperm protein autosomalvariant
  misc_feature (28)..(105): NCBI GI NO: 18129310 NR Description: hypothetical protein [Pinus pinaster]
  misc_feature (21)..(451): NCBI GI NO: 123127 NR Description: HISTONE-BINDING PROTEIN N1/N2
  misc_feature (1)..(299): NCBI GI NO: 13435642 NR Description: Unknown (protein for MGC:5829) [Mus musculus]
  misc_feature (30)..(299): NCBI GI NO: 27262630 NR Description: nuclear autoantigenic sperm protein isoform 3
  misc_feature (30)..(299): NCBI GI NO: 30584691 NR Description: Homo sapiens nuclear autoantigenic sperm protein

SEQ ID NO: 35205 - protein, 280 aa, Zea mays subsp. mays; identical to SEQ ID NO: 24336
  peptide (1)..(280): Ceres Seq. ID no. 12594235
  misc_feature (1)..(280): NCBI GI NO: 38175649 NR Description: tetratricopeptide repeat-containing protein-like
  misc_feature (1)..(280): NCBI GI NO: 32352192 NR Description: hypothetical protein
  misc_feature (1)..(221): NCBI GI NO: 18419996 NR Description: putative protein; protein id: At4g37210.1
  misc_feature (1)..(164): NCBI GI NO: 25407799 NR Description: hypothetical protein AT4g37210
  misc_feature (1)..(119): NCBI GI NO: 4104353 NR Description: nuclear autoantigenic sperm protein autosomalvariant
  misc_feature (1)..(271): NCBI GI NO: 123127 NR Description: HISTONE-BINDING PROTEIN N1/N2
  misc_feature (1)..(119): NCBI GI NO: 13435642 NR Description: Unknown (protein for MGC:5829) [Mus musculus]
  misc_feature (1)..(119): NCBI GI NO: 27262630 NR Description: nuclear autoantigenic sperm protein isoform 3
  misc_feature (1)..(119): NCBI GI NO: 30584691 NR Description: Homo sapiens nuclear autoantigenic sperm protein
  misc_feature (1)..(268): NCBI GI NO: 28277791 NR Description: Unknown (protein for MGC:56007) [Danio rerio]

SEQ ID NO: 35206 - DNA, 1891 bp, Zea mays subsp. mays
  misc_feature (1)..(1891): Ceres Seq. ID no. 12361798
aggacgacgaccggtcccattccccccgccccaacttgtcaggactcaagaggctcccctcctccctcgccgcggaacacgcgcgccgtcgtcgccagcccgggttcatttctccgttccttggtgcggtggtagccgagcgctccggccatggcgttctatcggggcctcaccgcagtctcgagactgcgatcacgcatggcgcaggaggccaccacgctggggggtgtgaggtggctgcagatgcagagcgcgtccgatctcgatcttaagtcccagttgcaggaattgattccggaacaacaggatcgcttaaagaagctcaagtcagagcatggaaagacccagcttggaaacataactgtggatatggtccttggtggaatgagagggatgactggaatgctttgggaaacatccctacttgatccagaggagggtattcgttttaggggcctctcaattccagaatgccaaaaagtgctgccaacagcagttaagggcggcgaacctttgcctgagggtctcctttggcttcttttgacggggaaggtcccaaccaaagagcaagttgatgcactatcaaaggaattgcttgcgcgctcaactgttccagctcatgtctataagacaatagatgctctcccagtagatgcacatcctatgacacagtttaccacgggagtaatggctcttcaggttgagagtgaatttcaaaaggcttatgacaatggattgccaaagtcaaagttttgggagcctacttatgaagactgcttaaatttgattgctcggcttccaccagtgtcttcttatgtttaccggagaattttcaagagtgggaaatcaatagaagccgataattctttggactatgcggcaaatttctcacacatgcttggttttgacgaccaaaaaatgctggagctgatgcggctctatgtaacaattcacactgatcatgaaggcgggaatgtcagtgctcatactggtcatctggttgggagtgctctgtcagatccttatctttctttcgcagcggctctaaatgggctagctgggccactgcatggccttgcaaatcaggaagtgcttttatggatcaaatctgtaattgaggaaactgggagtggtgttaccacagatcaactcaaagactatgtctggaagacactaaagagtggaaaggttgttcctgggtttggtcatggagttctgcgtaagaccgacccacggtattcatgtcaaagggagtttgccctgaagcatttgcctgaggatccacttttccaattggtgtccaagttgtatgaagttgtacctcctatcctcactgagctgggcaaggtcaagaacccatggccaaatgttgatgctcacagtggagttttgctgaaccactttggactatctgaagcacggtattacactgtcttgttcggtgtttcaagaagcatggggataggatctcagctcatctgggaccgtgcccttggcctgccacttgagaggccgaagagtgttaccatggagtggctggagaactactgcaagaacaaggctgcttgaagcttttcacaaatgctgctttttcccaaccttggctgttaataatttaaacgcgagttatagaaatagtcattttcctttggccgttgaataacgcaagagcaatatgctcaggcggaagaattttgtatcttccgtaacttggtgaacatccagatacttgatctgcggcaacaatgggcagaagagattaggacatgctgattgatctttatacgccaacacttgtttttctttaacattacttgttcgctgcagctttaatccagctgtttgtaactgcaatttatagcaatttatagagatttgggctatggcatgc

SEQ ID NO: 35207 - protein, 472 aa, Zea mays subsp. mays
  peptide (1)..(472): Ceres Seq. ID no. 12361799
  misc_feature (78)..(455): Pfam Name: Pfam Description:  Citrate synthase
  misc_feature (1)..(472): NCBI GI NO: 11066954 NR Description: citrate synthase [Oryza sativa]
  misc_feature (1)..(472): NCBI GI NO: 18406515 NR Description: citrate synthase; protein id: At2g44350
  misc_feature (1)..(472): NCBI GI NO: 21553775 NR Description: citrate synthase [Arabidopsis thaliana]
  misc_feature (1)..(472): NCBI GI NO: 15982952 NR Description: citrate synthase [Prunus persica]
  misc_feature (1)..(472): NCBI GI NO: 30689693 NR Description: citrate synthase [Arabidopsis thaliana]
  misc_feature (149)..(472): NCBI GI NO: 5441892 NR Description: ESTs C96653
  misc_feature (32)..(134): NCBI GI NO: 5441892 NR Description: ESTs C96653
  misc_feature (1)..(471): NCBI GI NO: 8928010 NR Description: Citrate synthase, mitochondrial precursor
  misc_feature (1)..(472): NCBI GI NO: 1352088 NR Description: Citrate synthase, mitochondrial precursor
  misc_feature (1)..(468): NCBI GI NO: 1556429 NR Description: citrate synthase [Nicotiana tabacum]
MAFYRGLTAVSRLRSRMAQEATTLGGVRWLQMQSASDLDLKSQLQELIPEQQDRLKKLKSEHGKTQLGNITVDMVLGGMRGMTGMLWETSLLDPEEGIRFRGLSIPECQKVLPTAVKGGEPLPEGLLWLLLTGKVPTKEQVDALSKELLARSTVPAHVYKTIDALPVDAHPMTQFTTGVMALQVESEFQKAYDNGLPKSKFWEPTYEDCLNLIARLPPVSSYVYRRIFKSGKSIEADNSLDYAANFSHMLGFDDQKMLELMRLYVTIHTDHEGGNVSAHTGHLVGSALSDPYLSFAAALNGLAGPLHGLANQEVLLWIKSVIEETGSGVTTDQLKDYVWKTLKSGKVVPGFGHGVLRKTDPRYSCQREFALKHLPEDPLFQLVSKLYEVVPPILTELGKVKNPWPNVDAHSGVLLNHFGLSEARYYTVLFGVSRSMGIGSQLIWDRALGLPLERPKSVTMEWLENYCKNKAA

SEQ ID NO: 35208 - protein, 456 aa, Zea mays subsp. mays
  peptide (1)..(456): Ceres Seq. ID no. 12361800
  misc_feature (62)..(439): Pfam Name: Pfam Description:  Citrate synthase
  misc_feature (1)..(456): NCBI GI NO: 11066954 NR Description: citrate synthase [Oryza sativa]
  misc_feature (1)..(456): NCBI GI NO: 18406515 NR Description: citrate synthase; protein id: At2g44350
  misc_feature (1)..(456): NCBI GI NO: 21553775 NR Description: citrate synthase [Arabidopsis thaliana]
  misc_feature (1)..(456): NCBI GI NO: 15982952 NR Description: citrate synthase [Prunus persica]
  misc_feature (1)..(456): NCBI GI NO: 30689693 NR Description: citrate synthase [Arabidopsis thaliana]
  misc_feature (133)..(456): NCBI GI NO: 5441892 NR Description: ESTs C96653
  misc_feature (16)..(118): NCBI GI NO: 5441892 NR Description: ESTs C96653
  misc_feature (1)..(455): NCBI GI NO: 8928010 NR Description: Citrate synthase, mitochondrial precursor
  misc_feature (1)..(456): NCBI GI NO: 1352088 NR Description: Citrate synthase, mitochondrial precursor
  misc_feature (1)..(452): NCBI GI NO: 1556429 NR Description: citrate synthase [Nicotiana tabacum]
MAQEATTLGGVRWLQMQSASDLDLKSQLQELIPEQQDRLKKLKSEHGKTQLGNITVDMVLGGMRGMTGMLWETSLLDPEEGIRFRGLSIPECQKVLPTAVKGGEPLPEGLLWLLLTGKVPTKEQVDALSKELLARSTVPAHVYKTIDALPVDAHPMTQFTTGVMALQVESEFQKAYDNGLPKSKFWEPTYEDCLNLIARLPPVSSYVYRRIFKSGKSIEADNSLDYAANFSHMLGFDDQKMLELMRLYVTIHTDHEGGNVSAHTGHLVGSALSDPYLSFAAALNGLAGPLHGLANQEVLLWIKSVIEETGSGVTTDQLKDYVWKTLKSGKVVPGFGHGVLRKTDPRYSCQREFALKHLPEDPLFQLVSKLYEVVPPILTELGKVKNPWPNVDAHSGVLLNHFGLSEARYYTVLFGVSRSMGIGSQLIWDRALGLPLERPKSVTMEWLENYCKNKAA

SEQ ID NO: 35209 - protein, 441 aa, Zea mays subsp. mays
  peptide (1)..(441): Ceres Seq. ID no. 12361801
  misc_feature (47)..(424): Pfam Name: Pfam Description:  Citrate synthase
  misc_feature (1)..(441): NCBI GI NO: 11066954 NR Description: citrate synthase [Oryza sativa]
  misc_feature (1)..(441): NCBI GI NO: 18406515 NR Description: citrate synthase; protein id: At2g44350
  misc_feature (1)..(441): NCBI GI NO: 21553775 NR Description: citrate synthase [Arabidopsis thaliana]
  misc_feature (1)..(441): NCBI GI NO: 15982952 NR Description: citrate synthase [Prunus persica]
  misc_feature (1)..(441): NCBI GI NO: 30689693 NR Description: citrate synthase [Arabidopsis thaliana]
  misc_feature (118)..(441): NCBI GI NO: 5441892 NR Description: ESTs C96653
  misc_feature (1)..(103): NCBI GI NO: 5441892 NR Description: ESTs C96653
  misc_feature (1)..(440): NCBI GI NO: 8928010 NR Description: Citrate synthase, mitochondrial precursor
  misc_feature (1)..(441): NCBI GI NO: 1352088 NR Description: Citrate synthase, mitochondrial precursor
  misc_feature (1)..(437): NCBI GI NO: 1556429 NR Description: citrate synthase [Nicotiana tabacum]
MQSASDLDLKSQLQELIPEQQDRLKKLKSEHGKTQLGNITVDMVLGGMRGMTGMLWETSLLDPEEGIRFRGLSIPECQKVLPTAVKGGEPLPEGLLWLLLTGKVPTKEQVDALSKELLARSTVPAHVYKTIDALPVDAHPMTQFTTGVMALQVESEFQKAYDNGLPKSKFWEPTYEDCLNLIARLPPVSSYVYRRIFKSGKSIEADNSLDYAANFSHMLGFDDQKMLELMRLYVTIHTDHEGGNVSAHTGHLVGSALSDPYLSFAAALNGLAGPLHGLANQEVLLWIKSVIEETGSGVTTDQLKDYVWKTLKSGKVVPGFGHGVLRKTDPRYSCQREFALKHLPEDPLFQLVSKLYEVVPPILTELGKVKNPWPNVDAHSGVLLNHFGLSEARYYTVLFGVSRSMGIGSQLIWDRALGLPLERPKSVTMEWLENYCKNKAA

SEQ ID NO: 35210 - DNA, 1082 bp, Zea mays subsp. mays
  misc_feature (1)..(1082): Ceres Seq. ID no. 12342470
aagcattatcggcgcatgtccacgttgattcatcaatcagttccacaatccacttgcctcggccgctatcgtgaccgggaacaacaactgcgagatggccacggtggagacctcgggcacggcgatagggtcctccgggagatgggcactacacggcaagacagccctcgtcaccggcggcacccgcggcatcgggcgtgcggtagtggaggagctggcggcgctgggggcggccgtgcacacatgctcccggaaggcggaggagctcggcgagcgcatcaaggagtgggaggccaggggattcagcgttaccgggtccgtctgcgacctctccgagagggaccagcgggagcggttgctccgcgaggttgccgaccgcttcggcggcaagctcaacatcctcgtaaacaatgtaggaacaaacataaggaaaccaactactgagtttactgcagaggaatactcgtttctgatggctactaatcttgaatctgcatatcacttgtgccaaattgcacatcctcttttgaaattatctgggtcaggcagcattatattcatatcatctgttgctggagcgataggaatctttagtggaactatatatgctatgactaaaggtgccattaaccagctaaccaagaatttagcttgtgaatgggctaaggacaacataagagccaactctgtcgctccgtggtacatcaccacttcacttacggaaggaattttggcaaataagaactttgaggaacaagttgtgagtcgaactccgcttggacgtgtcggagaacctggagaagtatcggcacttgttgcttttctttgcatgccgggttccacttatattagcggccagacgattgcggtcgacggaggtatgactgtgaacgggttttaccctcccaagccctaggcggcagctgccatgtttctttgtgctgaggaaacgacaatagctgttgttcttggttgttgagaaaaaaaatctaataaaatgtatgtaaaggtaaggttgtcatgttgatactgttcattacattacataattctatcagggcaatgtgaagaacgttgtgttt

SEQ ID NO: 35211 - protein, 273 aa, Zea mays subsp. mays
  peptide (1)..(273): Ceres Seq. ID no. 12342471
  misc_feature (1)..(261): NCBI GI NO: 34902058 NR Description: putative pfam00106
  misc_feature (2)..(212): NCBI GI NO: 29893663 NR Description: unknown protein
  misc_feature (205)..(262): NCBI GI NO: 29893663 NR Description: unknown protein
  misc_feature (36)..(270): NCBI GI NO: 34902060 NR Description: hypothetical protein
  misc_feature (10)..(34): NCBI GI NO: 34902060 NR Description: hypothetical protein
  misc_feature (16)..(273): NCBI GI NO: 15239327 NR Description: short chain alcohol dehydrogenase-like
  misc_feature (16)..(273): NCBI GI NO: 21536785 NR Description: short chain alcohol dehydrogenase-like
  misc_feature (11)..(268): NCBI GI NO: 15227075 NR Description: putative tropinone reductase; protein id:At2g29350
  misc_feature (7)..(270): NCBI GI NO: 15227060 NR Description: putative tropinone reductase; protein id:At2g29260
  misc_feature (7)..(270): NCBI GI NO: 28393476 NR Description: putative tropinone reductase
MATVETSGTAIGSSGRWALHGKTALVTGGTRGIGRAVVEELAALGAAVHTCSRKAEELGERIKEWEARGFSVTGSVCDLSERDQRERLLREVADRFGGKLNILVNNVGTNIRKPTTEFTAEEYSFLMATNLESAYHLCQIAHPLLKLSGSGSIIFISSVAGAIGIFSGTIYAMTKGAINQLTKNLACEWAKDNIRANSVAPWYITTSLTEGILANKNFEEQVVSRTPLGRVGEPGEVSALVAFLCMPGSTYISGQTIAVDGGMTVNGFYPPKP

SEQ ID NO: 35212 - protein, 147 aa, Zea mays subsp. mays
  peptide (1)..(147): Ceres Seq. ID no. 12342472
  misc_feature (1)..(135): NCBI GI NO: 34902058 NR Description: putative pfam00106
  misc_feature (1)..(86): NCBI GI NO: 29893663 NR Description: unknown protein
  misc_feature (79)..(136): NCBI GI NO: 29893663 NR Description: unknown protein
  misc_feature (1)..(144): NCBI GI NO: 34902060 NR Description: hypothetical protein
  misc_feature (1)..(147): NCBI GI NO: 15239327 NR Description: short chain alcohol dehydrogenase-like
  misc_feature (1)..(147): NCBI GI NO: 21536785 NR Description: short chain alcohol dehydrogenase-like
  misc_feature (1)..(142): NCBI GI NO: 15227075 NR Description: putative tropinone reductase; protein id:At2g29350
  misc_feature (1)..(144): NCBI GI NO: 15227060 NR Description: putative tropinone reductase; protein id:At2g29260
  misc_feature (1)..(144): NCBI GI NO: 28393476 NR Description: putative tropinone reductase
  misc_feature (1)..(147): NCBI GI NO: 15227076 NR Description: putative tropinone reductase; protein id:At2g29360
MATNLESAYHLCQIAHPLLKLSGSGSIIFISSVAGAIGIFSGTIYAMTKGAINQLTKNLACEWAKDNIRANSVAPWYITTSLTEGILANKNFEEQVVSRTPLGRVGEPGEVSALVAFLCMPGSTYISGQTIAVDGGMTVNGFYPPKP

SEQ ID NO: 35213 - protein, 147 aa, Zea mays subsp. mays
  peptide (1)..(147): Ceres Seq. ID no. 12342473
KHYRRMSTLIHQSVPQSTCLGRYRDREQQLRDGHGGDLGHGDRVLREMGTTRQDSPRHRRHPRHRACGSGGAGGAGGGRAHMLPEGGGARRAHQGVGGQGIQRYRVRLRPLREGPAGAVAPRGCRPLRRQAQHPRKQCRNKHKETNY

SEQ ID NO: 35214 - DNA, 1405 bp, Zea mays subsp. mays
  misc_feature (1)..(1405): Ceres Seq. ID no. 12374348
gattattctgtttgctctcgttcaagtcatcgtctggtcgcgtcggcagcagacacccagagccggagggagcgccatggccgcgtcggatctggagagcaaagccaaggaggccttcgtcgacgacgacttcgagctggccgccgaactctacacccaggccatcgacgccgggcccgccactgccgatctctacgccgaccgcgcccaggcgcacatcaagctcggcaactacactgaggctgtggcagatgctaacaaagcaattggtcttgatcctacaatgcataaagcctactaccggaaaggtgctgcatgcattaatcttgaagaataccaaactgcaaaggctgctcttgagttaggttcttcctatgcaccaggcgattcaaggtttacccgtctattgaaggaatgtgatgagcgcattgctgaggaatctagccaggcaccagcaaagaatgtcgatgctcctgtagctgctactgttgaggacaaggaggatgtcgcaaatatggataatacaccgccagtggtagaacccccaagcaaacctaaatataggcatgactactacaacagtgccacagaagtggtcctcacaatatatgctaagggtgttcctgctgatagtgtagtcattgattttggtgaacagatgttaagtgtatccattgaagtacctggtgaagaaccgtaccattttcagccccgtctgttttctaaggttatccctgagaaatgcaagtatcaagttttgtccaccaaggtcgaaatacgccttgcaaaagctgagcaggtgacatggacaaccctggattatagtggaagaccaaaggctattccccagaagataagcacaccagctgaaacagccccaagaccttcatacccatcttcaaagtcaaaaaaggactgggataaactggaagctgaagtaaaaaaggaggagaaggaagaaaaacttgaaggtgatgctgcattgaacaagttcttccgtgatatctacaaggatgctgatgaagatatgcggagggccatggacaagtcattcagggaatctaatggtaccgttctctcaaccaattggaaagatgttggatcaaagacggtggaagcgagccctcctgatggtatggagctcaagaagtgggaaatttgaagtttggactgcccctcttgtaaatccaggtcttggaagttatgacctagttctgtccacccatttggtgtcgtaagtttggttaagtgtgtgtgtgtttttggttcagctgtcgttcgaggaaaagctactgtaagttgtggactgtgtaaaagctgcaatagattgtgggttgtgaaaaaggtgtatgctgtttaatttaaacaagcataaaacttacacgtatctctattttttcttttt

SEQ ID NO: 35215 - protein, 386 aa, Zea mays subsp. mays
  peptide (1)..(386): Ceres Seq. ID no. 12374349
  misc_feature (185)..(272): Pfam Name: Pfam Description:  CS domain
  misc_feature (27)..(385): NCBI GI NO: 34912836 NR Description: Sgt1 [Oryza sativa (japonica cultivar-group)]
  misc_feature (27)..(385): NCBI GI NO: 6581058 NR Description: Sgt1 [Oryza sativa]
  misc_feature (24)..(385): NCBI GI NO: 17017306 NR Description: SGT1 [Hordeum vulgare]
  misc_feature (28)..(386): NCBI GI NO: 29468339 NR Description: SGT1 [Nicotiana benthamiana]
  misc_feature (28)..(386): NCBI GI NO: 17017308 NR Description: SGT1a [Arabidopsis thaliana]
  misc_feature (28)..(385): NCBI GI NO: 40974917 NR Description: SGT1-like protein [Brassica oleracea]
  misc_feature (28)..(386): NCBI GI NO: 15236528 NR Description: phosphatase like protein; protein id: At4g23570
  misc_feature (28)..(385): NCBI GI NO: 15237122 NR Description: putative protein; protein id: At4g11260
  misc_feature (28)..(385): NCBI GI NO: 40974915 NR Description: SGT1-like protein [Brassica oleracea]
  misc_feature (59)..(386): NCBI GI NO: 6468695 NR Description: putative protein phosphatase [Rubus idaeus]
IILFALVQVIVWSRRQQTPRAGGSAMAASDLESKAKEAFVDDDFELAAELYTQAIDAGPATADLYADRAQAHIKLGNYTEAVADANKAIGLDPTMHKAYYRKGAACINLEEYQTAKAALELGSSYAPGDSRFTRLLKECDERIAEESSQAPAKNVDAPVAATVEDKEDVANMDNTPPVVEPPSKPKYRHDYYNSATEVVLTIYAKGVPADSVVIDFGEQMLSVSIEVPGEEPYHFQPRLFSKVIPEKCKYQVLSTKVEIRLAKAEQVTWTTLDYSGRPKAIPQKISTPAETAPRPSYPSSKSKKDWDKLEAEVKKEEKEEKLEGDAALNKFFRDIYKDADEDMRRAMDKSFRESNGTVLSTNWKDVGSKTVEASPPDGMELKKWEI

SEQ ID NO: 35216 - protein, 361 aa, Zea mays subsp. mays
  peptide (1)..(361): Ceres Seq. ID no. 12374350
  misc_feature (160)..(247): Pfam Name: Pfam Description:  CS domain
  misc_feature (2)..(360): NCBI GI NO: 34912836 NR Description: Sgt1 [Oryza sativa (japonica cultivar-group)]
  misc_feature (2)..(360): NCBI GI NO: 6581058 NR Description: Sgt1 [Oryza sativa]
  misc_feature (1)..(360): NCBI GI NO: 17017306 NR Description: SGT1 [Hordeum vulgare]
  misc_feature (3)..(361): NCBI GI NO: 29468339 NR Description: SGT1 [Nicotiana benthamiana]
  misc_feature (3)..(361): NCBI GI NO: 17017308 NR Description: SGT1a [Arabidopsis thaliana]
  misc_feature (3)..(360): NCBI GI NO: 40974917 NR Description: SGT1-like protein [Brassica oleracea]
  misc_feature (3)..(361): NCBI GI NO: 15236528 NR Description: phosphatase like protein; protein id: At4g23570
  misc_feature (3)..(360): NCBI GI NO: 15237122 NR Description: putative protein; protein id: At4g11260
  misc_feature (3)..(360): NCBI GI NO: 40974915 NR Description: SGT1-like protein [Brassica oleracea]
  misc_feature (34)..(361): NCBI GI NO: 6468695 NR Description: putative protein phosphatase [Rubus idaeus]
MAASDLESKAKEAFVDDDFELAAELYTQAIDAGPATADLYADRAQAHIKLGNYTEAVADANKAIGLDPTMHKAYYRKGAACINLEEYQTAKAALELGSSYAPGDSRFTRLLKECDERIAEESSQAPAKNVDAPVAATVEDKEDVANMDNTPPVVEPPSKPKYRHDYYNSATEVVLTIYAKGVPADSVVIDFGEQMLSVSIEVPGEEPYHFQPRLFSKVIPEKCKYQVLSTKVEIRLAKAEQVTWTTLDYSGRPKAIPQKISTPAETAPRPSYPSSKSKKDWDKLEAEVKKEEKEEKLEGDAALNKFFRDIYKDADEDMRRAMDKSFRESNGTVLSTNWKDVGSKTVEASPPDGMELKKWEI

SEQ ID NO: 35217 - protein, 292 aa, Zea mays subsp. mays
  peptide (1)..(292): Ceres Seq. ID no. 12374351
  misc_feature (91)..(178): Pfam Name: Pfam Description:  CS domain
  misc_feature (1)..(291): NCBI GI NO: 34912836 NR Description: Sgt1 [Oryza sativa (japonica cultivar-group)]
  misc_feature (1)..(291): NCBI GI NO: 6581058 NR Description: Sgt1 [Oryza sativa]
  misc_feature (1)..(291): NCBI GI NO: 17017306 NR Description: SGT1 [Hordeum vulgare]
  misc_feature (1)..(292): NCBI GI NO: 29468339 NR Description: SGT1 [Nicotiana benthamiana]
  misc_feature (1)..(292): NCBI GI NO: 17017308 NR Description: SGT1a [Arabidopsis thaliana]
  misc_feature (1)..(291): NCBI GI NO: 40974917 NR Description: SGT1-like protein [Brassica oleracea]
  misc_feature (1)..(292): NCBI GI NO: 15236528 NR Description: phosphatase like protein; protein id: At4g23570
  misc_feature (1)..(291): NCBI GI NO: 15237122 NR Description: putative protein; protein id: At4g11260
  misc_feature (1)..(291): NCBI GI NO: 40974915 NR Description: SGT1-like protein [Brassica oleracea]
  misc_feature (1)..(292): NCBI GI NO: 6468695 NR Description: putative protein phosphatase [Rubus idaeus]
MHKAYYRKGAACINLEEYQTAKAALELGSSYAPGDSRFTRLLKECDERIAEESSQAPAKNVDAPVAATVEDKEDVANMDNTPPVVEPPSKPKYRHDYYNSATEVVLTIYAKGVPADSVVIDFGEQMLSVSIEVPGEEPYHFQPRLFSKVIPEKCKYQVLSTKVEIRLAKAEQVTWTTLDYSGRPKAIPQKISTPAETAPRPSYPSSKSKKDWDKLEAEVKKEEKEEKLEGDAALNKFFRDIYKDADEDMRRAMDKSFRESNGTVLSTNWKDVGSKTVEASPPDGMELKKWEI

SEQ ID NO: 35218 - DNA, 1452 bp, Zea mays subsp. mays
  misc_feature (1)..(1452): Ceres Seq. ID no. 12364192
gcacgagaccattacctagaacatcctaatcaaagacgctcgtgccagcaggccattcttctcgccttactccctcacagaacccagtaaaatatcgccagtcccgccgtcgagatggccccacgccgcctgctcgtcctcgccgtcgtcgccctcgcggccaccgccgccgcggccaactccggcttcgcggactccaacccgatccgccccgtcaccgaccgcgcggcctccgcgctcgagtccacggtcttcgccgcgctcggccgcacccgcgacgcgctccgcttcgcacgcttcgccgtcaggtacggcaagagctacgagagcgcggcggaggtccacaagcggttcaggatcttctccgagagcctccagctggtccgctccaccaaccgcaaaggcctctcctaccgcctcggcatcaaccgcttcgcggacatgagctgggaggagttccgtgcgacccggctcggcgcagcccagaactgctccgccacgcttaccggcaaccaccggatgcgcgccgccgccgttgcgctgccggagacgaaagactggagggaggatgggattgtgagcccagtgaaaaaccagggccactgtggatcatgctggaccttcagcactactggtgcacttgaggctgcatatacccaggcaactggcaagcccatctctctctctgagcaacagcttgttgactgtggttttgcattcaacaatttcggatgcaacggaggccttccatcccaggcctttgaatacatcaaatacaatggtggccttgacactgaggaatcttacccttaccaaggtgtcaatggaatctgcaagtttaagaatgagaatgttggagtcaaggttttggactcggttaacatcaccctgggtgctgaggatgaactgaaggatgctgttggtctggttcgcccagttagtgttgccttcgaggtgatcactggtttcaggctgtacaagagcggagtttacactagcgaccattgtggaactacaccgatggatgtgaaccacgctgttctggctgttggctacggtgtcgaagatggtgtaccctactggctcatcaagaactcatggggcgctgactggggtgatgagggttacttcaagatggaaatgggcaagaacatgtgcggtgttgctacgtgtgcatcctaccctattgtcgcatgaggcccttacgaaatgttacatggtctgtttggcatcaataatgcatgtttaacctgagcttggcgatgggttatacagaacggaaactctgtttgtgaatagaaaatcatgaagggaaggagttgaccggattcctgcttgtacgtctccccgactgtgtaggtagattgtcagttggggttccgaagtactctactcatacgtgtgtatgacagtttatttatgaaacaaaatacgcattgatcgttatggtcc

SEQ ID NO: 35219 - protein, 360 aa, Zea mays subsp. mays
  peptide (1)..(360): Ceres Seq. ID no. 12364193
  misc_feature (143)..(358): Pfam Name: Pfam Description:  Papain family cysteine protease
  misc_feature (1)..(360): NCBI GI NO: 1491774 NR Description: cysteine protease [Zea mays]
  misc_feature (1)..(360): NCBI GI NO: 1706261 NR Description: Cysteine proteinase 2 precursor
  misc_feature (6)..(360): NCBI GI NO: 113603 NR Description: Thiol protease aleurain precursor
  misc_feature (1)..(360): NCBI GI NO: 129233 NR Description: Oryzain gamma chain precursor
  misc_feature (6)..(360): NCBI GI NO: 67656 NR Description: aleurain (EC 3.4.22.-) precursor - barley
  misc_feature (1)..(360): NCBI GI NO: 6851030 NR Description: cysteine protease [Lolium multiflorum]
  misc_feature (1)..(360): NCBI GI NO: 18141289 NR Description: senescence-associated cysteine protease
  misc_feature (1)..(360): NCBI GI NO: 18424347 NR Description: cysteine proteinase AALP; protein id: At5g60360
  misc_feature (1)..(360): NCBI GI NO: 23397070 NR Description: putative cysteine proteinase AALP
  misc_feature (6)..(360): NCBI GI NO: 8347420 NR Description: cysteine protease [Nicotiana tabacum]
MAPRRLLVLAVVALAATAAAANSGFADSNPIRPVTDRAASALESTVFAALGRTRDALRFARFAVRYGKSYESAAEVHKRFRIFSESLQLVRSTNRKGLSYRLGINRFADMSWEEFRATRLGAAQNCSATLTGNHRMRAAAVALPETKDWREDGIVSPVKNQGHCGSCWTFSTTGALEAAYTQATGKPISLSEQQLVDCGFAFNNFGCNGGLPSQAFEYIKYNGGLDTEESYPYQGVNGICKFKNENVGVKVLDSVNITLGAEDELKDAVGLVRPVSVAFEVITGFRLYKSGVYTSDHCGTTPMDVNHAVLAVGYGVEDGVPYWLIKNSWGADWGDEGYFKMEMGKNMCGVATCASYPIVA

SEQ ID NO: 35220 - protein, 251 aa, Zea mays subsp. mays
  peptide (1)..(251): Ceres Seq. ID no. 12364194
  misc_feature (34)..(249): Pfam Name: Pfam Description:  Papain family cysteine protease
  misc_feature (1)..(251): NCBI GI NO: 1491774 NR Description: cysteine protease [Zea mays]
  misc_feature (1)..(251): NCBI GI NO: 1706261 NR Description: Cysteine proteinase 2 precursor
  misc_feature (1)..(251): NCBI GI NO: 113603 NR Description: Thiol protease aleurain precursor
  misc_feature (1)..(251): NCBI GI NO: 129233 NR Description: Oryzain gamma chain precursor
  misc_feature (1)..(251): NCBI GI NO: 67656 NR Description: aleurain (EC 3.4.22.-) precursor - barley
  misc_feature (1)..(251): NCBI GI NO: 6851030 NR Description: cysteine protease [Lolium multiflorum]
  misc_feature (1)..(251): NCBI GI NO: 18141289 NR Description: senescence-associated cysteine protease
  misc_feature (1)..(251): NCBI GI NO: 18424347 NR Description: cysteine proteinase AALP; protein id: At5g60360
  misc_feature (1)..(251): NCBI GI NO: 23397070 NR Description: putative cysteine proteinase AALP
  misc_feature (1)..(251): NCBI GI NO: 8347420 NR Description: cysteine protease [Nicotiana tabacum]
MSWEEFRATRLGAAQNCSATLTGNHRMRAAAVALPETKDWREDGIVSPVKNQGHCGSCWTFSTTGALEAAYTQATGKPISLSEQQLVDCGFAFNNFGCNGGLPSQAFEYIKYNGGLDTEESYPYQGVNGICKFKNENVGVKVLDSVNITLGAEDELKDAVGLVRPVSVAFEVITGFRLYKSGVYTSDHCGTTPMDVNHAVLAVGYGVEDGVPYWLIKNSWGADWGDEGYFKMEMGKNMCGVATCASYPIVA

SEQ ID NO: 35221 - protein, 225 aa, Zea mays subsp. mays
  peptide (1)..(225): Ceres Seq. ID no. 12364195
  misc_feature (8)..(223): Pfam Name: Pfam Description:  Papain family cysteine protease
  misc_feature (1)..(225): NCBI GI NO: 1491774 NR Description: cysteine protease [Zea mays]
  misc_feature (1)..(225): NCBI GI NO: 1706261 NR Description: Cysteine proteinase 2 precursor
  misc_feature (1)..(225): NCBI GI NO: 113603 NR Description: Thiol protease aleurain precursor
  misc_feature (1)..(225): NCBI GI NO: 129233 NR Description: Oryzain gamma chain precursor
  misc_feature (1)..(225): NCBI GI NO: 67656 NR Description: aleurain (EC 3.4.22.-) precursor - barley
  misc_feature (1)..(225): NCBI GI NO: 6851030 NR Description: cysteine protease [Lolium multiflorum]
  misc_feature (1)..(225): NCBI GI NO: 18141289 NR Description: senescence-associated cysteine protease
  misc_feature (1)..(225): NCBI GI NO: 18424347 NR Description: cysteine proteinase AALP; protein id: At5g60360
  misc_feature (1)..(225): NCBI GI NO: 23397070 NR Description: putative cysteine proteinase AALP
  misc_feature (1)..(225): NCBI GI NO: 8347420 NR Description: cysteine protease [Nicotiana tabacum]
MRAAAVALPETKDWREDGIVSPVKNQGHCGSCWTFSTTGALEAAYTQATGKPISLSEQQLVDCGFAFNNFGCNGGLPSQAFEYIKYNGGLDTEESYPYQGVNGICKFKNENVGVKVLDSVNITLGAEDELKDAVGLVRPVSVAFEVITGFRLYKSGVYTSDHCGTTPMDVNHAVLAVGYGVEDGVPYWLIKNSWGADWGDEGYFKMEMGKNMCGVATCASYPIVA

SEQ ID NO: 35222 - DNA, 1422 bp, Zea mays subsp. mays
  misc_feature (1)..(1422): Ceres Seq. ID no. 12353579
gacagccacggccgcgacggcgtccgcgtgcaccggacaccacggccagacccagacggcaacgggaggccacacagccctctgaccaaacgcacggatccggccagccacccaccccgcccccctagcggccgccacccacccgtgcgcgcggcgcaccaaggcctggcccggcagtggcagccaggctctcacacgcctcgcctagtcgccttgccgccgcgcgttatataagccgccccggcaggcacggtcggtcgatccagcaatacccgacggcgcaagccagtgccgcgcccagatctccgcgacagatcagtcgttcgtccagctaactgcactgcacgcaatggccaccacggcgaccgaggcgaccaagacgactgcaccggcgcaggagcagcaggccaacggcaacggcaacggcgagcagaagacgcgccactccgaggtcggccacaagagcctgctcaagagcgacgacctctaccagtacatcctggacacgagcgtgtacccgcgggagccggagagcatgaaggagctgcgcgagatcaccgccaagcacccatggaacctgatgaccacctccgccgacgagggccagttcctcaacatgctcatcaagctcatcggcgccaagaagaccatggagatcggcgtctacaccggctactcgctcctcgccaccgcgctcgcactcccggaggacggcacgatcttggccatggacatcaaccgcgagaactacgagctaggccttccctgcatcaacaaggccggcgtgggccacaagatcgacttccgcgagggccccgcgctccccgtcctggacgacctcgtggcggacaaggagcagcacgggtcgttcgacttcgccttcgtggacgccgacaaggacaactacctcaactaccacgagcggctcctgaagctggtgaggcccggcggcctcatcggctacgacaacacgctgtggaacggctccgtcgtgctccccgacgacgcgcccatgcgcaagtacatccgcttctaccgcgacttcgtcctcgccctcaacagcgcgctcgccgccgacgaccgcgtcgagatctgccagctccccgtcggcgacggcgtcacgctctgccgccgcgtcaagtgaaaaaaagaaagaaaaaaaaaacacacataccctgcgttcctgctgcccccggctccgtctggcccccaccgccaccgacggcggcgccgcaccccccgttccaatcatatcgtagacgacgcgcagcattaaattatcaatcaccggctctggctctttcttggccctgtactgtactactatactaatgtcccttcttgtttttttttcttgggaattgtcgccgtttcagtatacgtaaaatctcgatgtcgataatacagtactactaccaattt

SEQ ID NO: 35223 - protein, 264 aa, Zea mays subsp. mays
  peptide (1)..(264): Ceres Seq. ID no. 12353580
  misc_feature (51)..(263): Pfam Name: Pfam Description:  O-methyltransferase
  misc_feature (1)..(264): NCBI GI NO: 30580384 NR Description: Caffeoyl-CoA O-methyltransferase 2
  misc_feature (1)..(264): NCBI GI NO: 32347441 NR Description: caffeoyl CoA 3-O-methyltransferase [Zea mays]
  misc_feature (1)..(264): NCBI GI NO: 32347443 NR Description: caffeoyl CoA 3-O-methyltransferase [Zea mays]
  misc_feature (1)..(264): NCBI GI NO: 32347435 NR Description: caffeoyl CoA 3-O-methyltransferase [Zea mays]
  misc_feature (1)..(264): NCBI GI NO: 32347447 NR Description: caffeoyl CoA 3-O-methyltransferase [Zea mays]
  misc_feature (1)..(264): NCBI GI NO: 32347449 NR Description: caffeoyl CoA 3-O-methyltransferase [Zea mays]
  misc_feature (1)..(264): NCBI GI NO: 32347431 NR Description: caffeoyl CoA 3-O-methyltransferase [Zea mays]
  misc_feature (5)..(264): NCBI GI NO: 32347437 NR Description: caffeoyl CoA 3-O-methyltransferase [Zea mays]
  misc_feature (1)..(264): NCBI GI NO: 37221545 NR Description: caffeoyl-CoA 3-O-methyltransferase 1 [Zea mays]
  misc_feature (1)..(264): NCBI GI NO: 30580385 NR Description: Caffeoyl-CoA O-methyltransferase 1
MATTATEATKTTAPAQEQQANGNGNGEQKTRHSEVGHKSLLKSDDLYQYILDTSVYPREPESMKELREITAKHPWNLMTTSADEGQFLNMLIKLIGAKKTMEIGVYTGYSLLATALALPEDGTILAMDINRENYELGLPCINKAGVGHKIDFREGPALPVLDDLVADKEQHGSFDFAFVDADKDNYLNYHERLLKLVRPGGLIGYDNTLWNGSVVLPDDAPMRKYIRFYRDFVLALNSALAADDRVEICQLPVGDGVTLCRRVK

SEQ ID NO: 35224 - protein, 253 aa, Zea mays subsp. mays
  peptide (1)..(253): Ceres Seq. ID no. 12353581
  misc_feature (1)..(216): NCBI GI NO: 23018788 NR Description: hypothetical protein [Thermobifida fusca]
MEPDDHLRRRGPVPQHAHQAHRRQEDHGDRRLHRLLAPRHRARTPGGRHDLGHGHQPRELRARPSLHQQGRRGPQDRLPRGPRAPRPGRPRGGQGAARVVRLRLRGRRQGQLPQLPRAAPEAGEARRPHRLRQHAVERLRRAPRRRAHAQVHPLLPRLRPRPQQRARRRRPRRDLPAPRRRRRHALPPRQVKKRKKKKTHIPCVPAAPGSVWPPPPPTAAPHPPFQSYRRRRAALNYQSPALALSWPCTVLLY

SEQ ID NO: 35225 - protein, 202 aa, Zea mays subsp. mays
  peptide (1)..(202): Ceres Seq. ID no. 12353582
  misc_feature (1)..(201): Pfam Name: Pfam Description:  O-methyltransferase
  misc_feature (1)..(202): NCBI GI NO: 30580384 NR Description: Caffeoyl-CoA O-methyltransferase 2
  misc_feature (1)..(202): NCBI GI NO: 32347441 NR Description: caffeoyl CoA 3-O-methyltransferase [Zea mays]
  misc_feature (1)..(202): NCBI GI NO: 32347443 NR Description: caffeoyl CoA 3-O-methyltransferase [Zea mays]
  misc_feature (1)..(202): NCBI GI NO: 32347435 NR Description: caffeoyl CoA 3-O-methyltransferase [Zea mays]
  misc_feature (1)..(202): NCBI GI NO: 32347447 NR Description: caffeoyl CoA 3-O-methyltransferase [Zea mays]
  misc_feature (1)..(202): NCBI GI NO: 32347449 NR Description: caffeoyl CoA 3-O-methyltransferase [Zea mays]
  misc_feature (1)..(202): NCBI GI NO: 32347431 NR Description: caffeoyl CoA 3-O-methyltransferase [Zea mays]
  misc_feature (1)..(202): NCBI GI NO: 32347437 NR Description: caffeoyl CoA 3-O-methyltransferase [Zea mays]
  misc_feature (1)..(202): NCBI GI NO: 37221545 NR Description: caffeoyl-CoA 3-O-methyltransferase 1 [Zea mays]
  misc_feature (1)..(202): NCBI GI NO: 30580385 NR Description: Caffeoyl-CoA O-methyltransferase 1
MKELREITAKHPWNLMTTSADEGQFLNMLIKLIGAKKTMEIGVYTGYSLLATALALPEDGTILAMDINRENYELGLPCINKAGVGHKIDFREGPALPVLDDLVADKEQHGSFDFAFVDADKDNYLNYHERLLKLVRPGGLIGYDNTLWNGSVVLPDDAPMRKYIRFYRDFVLALNSALAADDRVEICQLPVGDGVTLCRRVK

SEQ ID NO: 35226 - DNA, 1539 bp, Zea mays subsp. mays
  misc_feature (1)..(1539): Ceres Seq. ID no. 12355783
agtgcctccttaaacctcactgacgattcttcgttcatgtctccctcgcccaggggccgcaagagggcctgcgtcacctattgcatcagctacatcctcagctgcatcaccaagcactcccccgagtacagggtcctcatgatcggccgcatcctcgggggcatcgccacctcgctgctcttctccgccttcgagtcctggctcgtcgccgagcacaacaagagaggctttgacccgcagtggctgtccataacattctccaaagccatcttccttgggaacggcttaattgccattgtatctgggctatttgcgaaccttcttgctgagaacttgggttttggtcctgtggctccatttgatgcggctgcgtgctttctggcgattggcatggctatcataatgtcctcatggagtgaaaactacggagatccatctgaaagcaaggacctgatggcccagttcaaggttgcggctaaggcaattgcgtcagatgaaaagattgcattactgggagccatacagtcattgtttgagggctccatgtacacatttgtcttcctatggactccagcattgagtccaaatgaagaagacattcctcatggttttatttttgctacattcatgctgtcatccatgctgggtagctccatcgcgtcacgtctattagcccgaaagctcaaggttgaaggctatatgcagatcgtgttctcgatatcggctgtcacccttgtcctccctgtcgccaccaacatcttagtgccaacgtcttctgtgaaaggaggcagcgtatcaattggaggttctcttcagcttcttggtttctgcacctttgaggcatgtgttggcatattctggccgtcaatcatgaagatgagatctcagtacattcctgaggaagcgagaagcacaatcatgaacttcttccgcataccactcaacttatttgtttgtgtggtgctttacaacgtgaatgcattccctatcactgtcatgtttgggatgtgttctatcttcctcttcatggcagcaatcttgcagagacggctgatggttgtctctgatcaagtacacaaatcatcaactacacaagaaatgatcggggaagatgagccactaaatccttaggtgtcgacagaaccatacatgcgaaatcagatattgaagacgacgtacatactgcatttcgtttcgtcacctgtgcaataagatggacgtcaaaaccatgtagtagagtctagtggttttcgtttctgtagtgtagatttgaccaggctgctaagtttgcacctgtcccgagaagattagatgagcaagtcaatcaatattggctattcgcattgttgtttcttttttttaaaaaaaaaaaagatgttcgctttaaagtttaaacgatacggtatatatccttgtaagtgttgcattgctgcatctgatgacaattctggtggtgctgttactgactgttgagggctctctctacttggtcgttgtaagaactgttgcttcttaatgaaaaatgggctcaacaaattc

SEQ ID NO: 35227 - protein, 376 aa, Zea mays subsp. mays
  peptide (1)..(376): Ceres Seq. ID no. 12355784
  misc_feature (18)..(276): Pfam Name: DUF791 Pfam Description: Protein of unknown function
  misc_feature (18)..(376): NCBI GI NO: 34902182 NR Description: Putative transporter
  misc_feature (18)..(376): NCBI GI NO: 37536124 NR Description: putative transporter
  misc_feature (18)..(376): NCBI GI NO: 15217708 NR Description: unknown protein; protein id: At1g64650.1
  misc_feature (18)..(375): NCBI GI NO: 18417054 NR Description: putative protein; protein id: At4g27720
  misc_feature (18)..(374): NCBI GI NO: 30693172 NR Description: expressed protein [Arabidopsis thaliana]
  misc_feature (18)..(372): NCBI GI NO: 6633826 NR Description: F1N19.22 [Arabidopsis thaliana]
  misc_feature (63)..(374): NCBI GI NO: 11292198 NR Description: hypothetical protein F2K15
  misc_feature (18)..(74): NCBI GI NO: 11292198 NR Description: hypothetical protein F2K15
  misc_feature (18)..(249): NCBI GI NO: 7487513 NR Description: hypothetical protein T29A15
  misc_feature (267)..(324): NCBI GI NO: 7487513 NR Description: hypothetical protein T29A15
SASLNLTDDSSFMSPSPRGRKRACVTYCISYILSCITKHSPEYRVLMIGRILGGIATSLLFSAFESWLVAEHNKRGFDPQWLSITFSKAIFLGNGLIAIVSGLFANLLAENLGFGPVAPFDAAACFLAIGMAIIMSSWSENYGDPSESKDLMAQFKVAAKAIASDEKIALLGAIQSLFEGSMYTFVFLWTPALSPNEEDIPHGFIFATFMLSSMLGSSIASRLLARKLKVEGYMQIVFSISAVTLVLPVATNILVPTSSVKGGSVSIGGSLQLLGFCTFEACVGIFWPSIMKMRSQYIPEEARSTIMNFFRIPLNLFVCVVLYNVNAFPITVMFGMCSIFLFMAAILQRRLMVVSDQVHKSSTTQEMIGEDEPLNP

SEQ ID NO: 35228 - protein, 364 aa, Zea mays subsp. mays
  peptide (1)..(364): Ceres Seq. ID no. 12355785
  misc_feature (6)..(264): Pfam Name: DUF791 Pfam Description: Protein of unknown function
  misc_feature (6)..(364): NCBI GI NO: 34902182 NR Description: Putative transporter
  misc_feature (6)..(364): NCBI GI NO: 37536124 NR Description: putative transporter
  misc_feature (6)..(364): NCBI GI NO: 15217708 NR Description: unknown protein; protein id: At1g64650.1
  misc_feature (6)..(363): NCBI GI NO: 18417054 NR Description: putative protein; protein id: At4g27720
  misc_feature (6)..(362): NCBI GI NO: 30693172 NR Description: expressed protein [Arabidopsis thaliana]
  misc_feature (6)..(360): NCBI GI NO: 6633826 NR Description: F1N19.22 [Arabidopsis thaliana]
  misc_feature (51)..(362): NCBI GI NO: 11292198 NR Description: hypothetical protein F2K15
  misc_feature (6)..(62): NCBI GI NO: 11292198 NR Description: hypothetical protein F2K15
  misc_feature (6)..(237): NCBI GI NO: 7487513 NR Description: hypothetical protein T29A15
  misc_feature (255)..(312): NCBI GI NO: 7487513 NR Description: hypothetical protein T29A15
MSPSPRGRKRACVTYCISYILSCITKHSPEYRVLMIGRILGGIATSLLFSAFESWLVAEHNKRGFDPQWLSITFSKAIFLGNGLIAIVSGLFANLLAENLGFGPVAPFDAAACFLAIGMAIIMSSWSENYGDPSESKDLMAQFKVAAKAIASDEKIALLGAIQSLFEGSMYTFVFLWTPALSPNEEDIPHGFIFATFMLSSMLGSSIASRLLARKLKVEGYMQIVFSISAVTLVLPVATNILVPTSSVKGGSVSIGGSLQLLGFCTFEACVGIFWPSIMKMRSQYIPEEARSTIMNFFRIPLNLFVCVVLYNVNAFPITVMFGMCSIFLFMAAILQRRLMVVSDQVHKSSTTQEMIGEDEPLNP

SEQ ID NO: 35229 - protein, 330 aa, Zea mays subsp. mays
  peptide (1)..(330): Ceres Seq. ID no. 12355786
  misc_feature (1)..(230): Pfam Name: DUF791 Pfam Description: Protein of unknown function
  misc_feature (1)..(330): NCBI GI NO: 34902182 NR Description: Putative transporter
  misc_feature (1)..(330): NCBI GI NO: 37536124 NR Description: putative transporter
  misc_feature (1)..(330): NCBI GI NO: 15217708 NR Description: unknown protein; protein id: At1g64650.1
  misc_feature (1)..(329): NCBI GI NO: 18417054 NR Description: putative protein; protein id: At4g27720
  misc_feature (1)..(328): NCBI GI NO: 30693172 NR Description: expressed protein [Arabidopsis thaliana]
  misc_feature (1)..(326): NCBI GI NO: 6633826 NR Description: F1N19.22 [Arabidopsis thaliana]
  misc_feature (17)..(328): NCBI GI NO: 11292198 NR Description: hypothetical protein F2K15
  misc_feature (1)..(28): NCBI GI NO: 11292198 NR Description: hypothetical protein F2K15
  misc_feature (1)..(203): NCBI GI NO: 7487513 NR Description: hypothetical protein T29A15
  misc_feature (221)..(278): NCBI GI NO: 7487513 NR Description: hypothetical protein T29A15
MIGRILGGIATSLLFSAFESWLVAEHNKRGFDPQWLSITFSKAIFLGNGLIAIVSGLFANLLAENLGFGPVAPFDAAACFLAIGMAIIMSSWSENYGDPSESKDLMAQFKVAAKAIASDEKIALLGAIQSLFEGSMYTFVFLWTPALSPNEEDIPHGFIFATFMLSSMLGSSIASRLLARKLKVEGYMQIVFSISAVTLVLPVATNILVPTSSVKGGSVSIGGSLQLLGFCTFEACVGIFWPSIMKMRSQYIPEEARSTIMNFFRIPLNLFVCVVLYNVNAFPITVMFGMCSIFLFMAAILQRRLMVVSDQVHKSSTTQEMIGEDEPLNP

SEQ ID NO: 35230 - DNA, 1411 bp, Zea mays subsp. mays
  misc_feature (1)..(1411): Ceres Seq. ID no. 12353544
aggaactatcgaaagaagaaaaagttgctgcttatgggagtacattgataagagattcatttgatgaacctgattatgcccttatagatacacttttctcactgggtgaagcttatctatttgctcagcttgttgatttcatagacaagaatcctggaaaagtacctgcaggcacagactatccacttatgtacagagatgtgaggtctgcggttgacttgtgtcatcgtgatggaactctaaagcggatggttgcgaaggatcctgccaggtacatcaatgaggacttggcaattgtaccaatgcttgaaatgatcaggaaatctggacgctcaacattcttagtgacaaatagtttgtgggactacaccgatgttgtcatgaactacctttgtgggccatacacttcaggtgtaggctctggtctcaatcacaagtggcttcaatattttgatattgtaataacaggcagttcgaagccaagtttcttccatgatgataaccgtgcaggattgtttgaagttgagcctgattctggaaaacttctgaatgctgatattcagatcggaagcccaagatcaagtcatcaacactcaacaccagttcagaaagtttatcaggggggcaatgttggtcatctccacagattactttctgttgcttctagttcacagattctctatgttggtgatcacatatacggagatattctgcggagcaagaaagttctaggctggcggactatgctggtgattccagaactagaacaagagctgaagcttctctcagaatcaaagtctactcgaaaggagcttagacatcttagaatggagcgtgattcgattgaagacaaaatccatcatcttgaatggtctcttaagcttgatgatatctcagaaaaccagaaggagaaattgttctctgaacatgacaatctgctgaaacagagagggcatgttcgtggtcttcatcaagaagctcagaggcaacatcatcagaagtttcataaggtgtggggacagctcatgaagactgggtaccaaaattccagatttgctcatcaggttgagagatttgcttgcttgtacagcagccaggttacaaacttcggtttgtattctcctgacaaatactatcgtccgagcgaagattacatgccccacgagtttgatgtgcttgggctgtaggagcagcccctactgctggtcggagttcctcgttgtaattgatccatagcctaggaggggacatcgtagttgccgtattatataacaggaagcttcacccattgtgaaggagagaaggtttataactatagtagctacatttctacttatcagtaagtttacctgtatataaatatgtacataactgatatatgatgcgtgttatttgtgagcacgcgataagt

SEQ ID NO: 35231 - protein, 394 aa, Zea mays subsp. mays
  peptide (1)..(394): Ceres Seq. ID no. 12353545
  misc_feature (1)..(394): Pfam Name: Pfam Description:  5' nucleotidase family
  misc_feature (1)..(394): NCBI GI NO: 34915208 NR Description: putative N5'-nucleotidase
  misc_feature (1)..(394): NCBI GI NO: 22330644 NR Description: cytosolic IMP-GMP specific 5'-nucleotidase
  misc_feature (1)..(352): NCBI GI NO: 25353625 NR Description: hypothetical protein F22H5.7
  misc_feature (245)..(394): NCBI GI NO: 25353625 NR Description: hypothetical protein F22H5.7
  misc_feature (21)..(310): NCBI GI NO: 40555840 NR Description: 5'-nucleotidase, cytosolic II [Mus musculus]
  misc_feature (304)..(391): NCBI GI NO: 40555840 NR Description: 5'-nucleotidase, cytosolic II [Mus musculus]
  misc_feature (21)..(310): NCBI GI NO: 6912598 NR Description: 5'-nucleotidase, cytosolic II
  misc_feature (304)..(391): NCBI GI NO: 6912598 NR Description: 5'-nucleotidase, cytosolic II
  misc_feature (21)..(310): NCBI GI NO: 27806031 NR Description: 5'-nucleotidase, cytosolic II [Bos taurus]
  misc_feature (304)..(391): NCBI GI NO: 27806031 NR Description: 5'-nucleotidase, cytosolic II [Bos taurus]
ELSKEEKVAAYGSTLIRDSFDEPDYALIDTLFSLGEAYLFAQLVDFIDKNPGKVPAGTDYPLMYRDVRSAVDLCHRDGTLKRMVAKDPARYINEDLAIVPMLEMIRKSGRSTFLVTNSLWDYTDVVMNYLCGPYTSGVGSGLNHKWLQYFDIVITGSSKPSFFHDDNRAGLFEVEPDSGKLLNADIQIGSPRSSHQHSTPVQKVYQGGNVGHLHRLLSVASSSQILYVGDHIYGDILRSKKVLGWRTMLVIPELEQELKLLSESKSTRKELRHLRMERDSIEDKIHHLEWSLKLDDISENQKEKLFSEHDNLLKQRGHVRGLHQEAQRQHHQKFHKVWGQLMKTGYQNSRFAHQVERFACLYSSQVTNFGLYSPDKYYRPSEDYMPHEFDVLGL

SEQ ID NO: 35232 - protein, 332 aa, Zea mays subsp. mays
  peptide (1)..(332): Ceres Seq. ID no. 12353546
  misc_feature (1)..(332): Pfam Name: Pfam Description:  5' nucleotidase family
  misc_feature (1)..(332): NCBI GI NO: 34915208 NR Description: putative N5'-nucleotidase
  misc_feature (1)..(332): NCBI GI NO: 22330644 NR Description: cytosolic IMP-GMP specific 5'-nucleotidase
  misc_feature (1)..(290): NCBI GI NO: 25353625 NR Description: hypothetical protein F22H5.7
  misc_feature (183)..(332): NCBI GI NO: 25353625 NR Description: hypothetical protein F22H5.7
  misc_feature (1)..(248): NCBI GI NO: 40555840 NR Description: 5'-nucleotidase, cytosolic II [Mus musculus]
  misc_feature (242)..(329): NCBI GI NO: 40555840 NR Description: 5'-nucleotidase, cytosolic II [Mus musculus]
  misc_feature (1)..(248): NCBI GI NO: 6912598 NR Description: 5'-nucleotidase, cytosolic II
  misc_feature (242)..(329): NCBI GI NO: 6912598 NR Description: 5'-nucleotidase, cytosolic II
  misc_feature (1)..(248): NCBI GI NO: 27806031 NR Description: 5'-nucleotidase, cytosolic II [Bos taurus]
  misc_feature (242)..(329): NCBI GI NO: 27806031 NR Description: 5'-nucleotidase, cytosolic II [Bos taurus]
MYRDVRSAVDLCHRDGTLKRMVAKDPARYINEDLAIVPMLEMIRKSGRSTFLVTNSLWDYTDVVMNYLCGPYTSGVGSGLNHKWLQYFDIVITGSSKPSFFHDDNRAGLFEVEPDSGKLLNADIQIGSPRSSHQHSTPVQKVYQGGNVGHLHRLLSVASSSQILYVGDHIYGDILRSKKVLGWRTMLVIPELEQELKLLSESKSTRKELRHLRMERDSIEDKIHHLEWSLKLDDISENQKEKLFSEHDNLLKQRGHVRGLHQEAQRQHHQKFHKVWGQLMKTGYQNSRFAHQVERFACLYSSQVTNFGLYSPDKYYRPSEDYMPHEFDVLGL

SEQ ID NO: 35233 - protein, 312 aa, Zea mays subsp. mays
  peptide (1)..(312): Ceres Seq. ID no. 12353547
  misc_feature (1)..(312): Pfam Name: Pfam Description:  5' nucleotidase family
  misc_feature (1)..(312): NCBI GI NO: 34915208 NR Description: putative N5'-nucleotidase
  misc_feature (1)..(312): NCBI GI NO: 22330644 NR Description: cytosolic IMP-GMP specific 5'-nucleotidase
  misc_feature (1)..(270): NCBI GI NO: 25353625 NR Description: hypothetical protein F22H5.7
  misc_feature (163)..(312): NCBI GI NO: 25353625 NR Description: hypothetical protein F22H5.7
  misc_feature (1)..(228): NCBI GI NO: 40555840 NR Description: 5'-nucleotidase, cytosolic II [Mus musculus]
  misc_feature (222)..(309): NCBI GI NO: 40555840 NR Description: 5'-nucleotidase, cytosolic II [Mus musculus]
  misc_feature (1)..(228): NCBI GI NO: 6912598 NR Description: 5'-nucleotidase, cytosolic II
  misc_feature (222)..(309): NCBI GI NO: 6912598 NR Description: 5'-nucleotidase, cytosolic II
  misc_feature (1)..(228): NCBI GI NO: 27806031 NR Description: 5'-nucleotidase, cytosolic II [Bos taurus]
  misc_feature (222)..(309): NCBI GI NO: 27806031 NR Description: 5'-nucleotidase, cytosolic II [Bos taurus]
MVAKDPARYINEDLAIVPMLEMIRKSGRSTFLVTNSLWDYTDVVMNYLCGPYTSGVGSGLNHKWLQYFDIVITGSSKPSFFHDDNRAGLFEVEPDSGKLLNADIQIGSPRSSHQHSTPVQKVYQGGNVGHLHRLLSVASSSQILYVGDHIYGDILRSKKVLGWRTMLVIPELEQELKLLSESKSTRKELRHLRMERDSIEDKIHHLEWSLKLDDISENQKEKLFSEHDNLLKQRGHVRGLHQEAQRQHHQKFHKVWGQLMKTGYQNSRFAHQVERFACLYSSQVTNFGLYSPDKYYRPSEDYMPHEFDVLGL

SEQ ID NO: 35234 - DNA, 2052 bp, Zea mays subsp. mays
  misc_feature (1)..(2052): Ceres Seq. ID no. 12341362
tctcacctccctcgcactccattggatttgggggagctcggggggcgcgggccactgatgatccccggaacgagcaccgatccgtggcgaggaaactccaccgggtagccggcccgggagcgcggggcacggcgatggcgggcgccggggcagcggccaatggcggcaggaacaagtacgcggttctcgatcggagcgaggagcgacagacggacgctaggacggagcggcggaggaggccgttggcgcccgagagcgagagggggagaagggagcggttcgtgtacgcctgcgcggtcttcgcctccctcaacgccgtcctgctcggctacgatgttggcgtaatgagtggcgcgatcatctacatgcagaaagacctccacataaccgagtttcagcaagaaatcctagtaggctgtctgagcgtggtctcactcttgggaagcctatcaggggggcgaacatctgacgcaattggcagaaaatggacaatgggcctcggtgcaattgtgttccagataggcgcgaccatcatgacgtttgctccatcattcactgtgcttatgatagggaggctccttgctggggttggcattggctttggtgccatggtatctggagtgtacattgctgagatctcccccgcaggtgcccgagggacgctcacatcccttcctgagatctgcatcaattttgggatccttcttggctacgtttccaattatgccttctcaggcctttctgagcacatcaattggaggattatgcttggtgtcggtatcctcccatcagtcttcattggctttgcgcttttcgtgatcccggagtcccctaggtggttgatgatggagaagagagtttcagaagcaagggcagtgctgctgcagattagcgagtctgaagctgaagctgaagaacggctggctgagatcgaggaagccgcaggtctgatgaaatcaatgaaatctgaggacaaagaagtgtggagggaacttttgaacccgtctcccgccgtccgtcggatgctgtacgctggttgcggtattcagttgttccaacagatcacaggaattgatgctactgtctattacagcccaacaattttcaaagatgctggcatcaagtctgatcaggagcttctcgctgcaactgttgctgtgggtttcactaagacagtgttcatcttggttgcaattttcctaattgatagagttggacggaagccacttctttatgtgagcaccattggcatgaccatctgcttatttctcttgggggttgcacttacactgcaaaaccatgcggtggggcttatgtctccacgtgttggtatcgacctagcaattttcgcagtttgtggcaacgtggcattcttttcaattggcatgggaccaatatgttgggtcttgtcctcagaggtatttcctttaagattacgagctcaagggtcagcgcttggtcaagtaggtggtagagtgagcagtggtttggtttccatgtcattcctttctatggcccgtgctatatcagtggcaggaatgttcttcgtctttgctgcaatatccactatctctgtactgtttgtgtacttttgtgtgccagaaacaaaagggaaaacactggagcagatcgaaatgatgtttgaaagtggggacgaatggggaggaggtgaaattgagcttgaggatacacagcatttaataccgagtatcaagaagtctgtgcctcttggttgatatttgtagcatcaataaaattcttattagctccatgtttcaatgacgagccaaccaaaccagctggattctgaactttggtttcgagtgatctggccacactgagccacgaccgatctgataaaagataagcttgatagacataggtgcaacgtagaagattaattgtgatgttagttcaaaatgtcaatgattttactgggaggcggtctgtaatgtatgatcttacatctcttgtaccttcttacatctctcgtacctcccagcggaagaatatactcgcagaaaagttttctactgtgcatttttttataac

SEQ ID NO: 35235 - protein, 577 aa, Zea mays subsp. mays
  peptide (1)..(577): Ceres Seq. ID no. 12341363
  misc_feature (93)..(547): Pfam Name: and other Pfam Description: Sugar
  misc_feature (48)..(577): NCBI GI NO: 21742093 NR Description: OSJNBa0074L08.15
  misc_feature (38)..(567): NCBI GI NO: 32487389 NR Description: OSJNBb0017I01.3
  misc_feature (46)..(567): NCBI GI NO: 15225426 NR Description: putative sugar transporter; protein id: At2g20780
  misc_feature (88)..(567): NCBI GI NO: 32487390 NR Description: OSJNBb0017I01.4
  misc_feature (89)..(553): NCBI GI NO: 30025133 NR Description: putative sorbitol transporter [Prunus cerasus]
  misc_feature (72)..(547): NCBI GI NO: 33636088 NR Description: sorbitol-like transporter [Glycine max]
  misc_feature (37)..(557): NCBI GI NO: 16118827 NR Description: putative sugar transporter [Oryza sativa]
  misc_feature (81)..(557): NCBI GI NO: 34393630 NR Description: putative sorbitol transporter
  misc_feature (70)..(567): NCBI GI NO: 28316433 NR Description: sorbitol transporter [Prunus cerasus]
  misc_feature (83)..(548): NCBI GI NO: 1778095 NR Description: putative sugar transporter
SPPSHSIGFGGARGARATDDPRNEHRSVARKLHRVAGPGARGTAMAGAGAAANGGRNKYAVLDRSEERQTDARTERRRRPLAPESERGRRERFVYACAVFASLNAVLLGYDVGVMSGAIIYMQKDLHITEFQQEILVGCLSVVSLLGSLSGGRTSDAIGRKWTMGLGAIVFQIGATIMTFAPSFTVLMIGRLLAGVGIGFGAMVSGVYIAEISPAGARGTLTSLPEICINFGILLGYVSNYAFSGLSEHINWRIMLGVGILPSVFIGFALFVIPESPRWLMMEKRVSEARAVLLQISESEAEAEERLAEIEEAAGLMKSMKSEDKEVWRELLNPSPAVRRMLYAGCGIQLFQQITGIDATVYYSPTIFKDAGIKSDQELLAATVAVGFTKTVFILVAIFLIDRVGRKPLLYVSTIGMTICLFLLGVALTLQNHAVGLMSPRVGIDLAIFAVCGNVAFFSIGMGPICWVLSSEVFPLRLRAQGSALGQVGGRVSSGLVSMSFLSMARAISVAGMFFVFAAISTISVLFVYFCVPETKGKTLEQIEMMFESGDEWGGGEIELEDTQHLIPSIKKSVPLG

SEQ ID NO: 35236 - protein, 533 aa, Zea mays subsp. mays
  peptide (1)..(533): Ceres Seq. ID no. 12341364
  misc_feature (49)..(503): Pfam Name: and other Pfam Description: Sugar
  misc_feature (4)..(533): NCBI GI NO: 21742093 NR Description: OSJNBa0074L08.15
  misc_feature (1)..(523): NCBI GI NO: 32487389 NR Description: OSJNBb0017I01.3
  misc_feature (2)..(523): NCBI GI NO: 15225426 NR Description: putative sugar transporter; protein id: At2g20780
  misc_feature (44)..(523): NCBI GI NO: 32487390 NR Description: OSJNBb0017I01.4
  misc_feature (45)..(509): NCBI GI NO: 30025133 NR Description: putative sorbitol transporter [Prunus cerasus]
  misc_feature (28)..(503): NCBI GI NO: 33636088 NR Description: sorbitol-like transporter [Glycine max]
  misc_feature (1)..(513): NCBI GI NO: 16118827 NR Description: putative sugar transporter [Oryza sativa]
  misc_feature (37)..(513): NCBI GI NO: 34393630 NR Description: putative sorbitol transporter
  misc_feature (26)..(523): NCBI GI NO: 28316433 NR Description: sorbitol transporter [Prunus cerasus]
  misc_feature (39)..(504): NCBI GI NO: 1778095 NR Description: putative sugar transporter
MAGAGAAANGGRNKYAVLDRSEERQTDARTERRRRPLAPESERGRRERFVYACAVFASLNAVLLGYDVGVMSGAIIYMQKDLHITEFQQEILVGCLSVVSLLGSLSGGRTSDAIGRKWTMGLGAIVFQIGATIMTFAPSFTVLMIGRLLAGVGIGFGAMVSGVYIAEISPAGARGTLTSLPEICINFGILLGYVSNYAFSGLSEHINWRIMLGVGILPSVFIGFALFVIPESPRWLMMEKRVSEARAVLLQISESEAEAEERLAEIEEAAGLMKSMKSEDKEVWRELLNPSPAVRRMLYAGCGIQLFQQITGIDATVYYSPTIFKDAGIKSDQELLAATVAVGFTKTVFILVAIFLIDRVGRKPLLYVSTIGMTICLFLLGVALTLQNHAVGLMSPRVGIDLAIFAVCGNVAFFSIGMGPICWVLSSEVFPLRLRAQGSALGQVGGRVSSGLVSMSFLSMARAISVAGMFFVFAAISTISVLFVYFCVPETKGKTLEQIEMMFESGDEWGGGEIELEDTQHLIPSIKKSVPLG

SEQ ID NO: 35237 - protein, 463 aa, Zea mays subsp. mays
  peptide (1)..(463): Ceres Seq. ID no. 12341365
  misc_feature (1)..(433): Pfam Name: and other Pfam Description: Sugar
  misc_feature (1)..(463): NCBI GI NO: 21742093 NR Description: OSJNBa0074L08.15
  misc_feature (1)..(453): NCBI GI NO: 32487389 NR Description: OSJNBb0017I01.3
  misc_feature (1)..(453): NCBI GI NO: 15225426 NR Description: putative sugar transporter; protein id: At2g20780
  misc_feature (1)..(453): NCBI GI NO: 32487390 NR Description: OSJNBb0017I01.4
  misc_feature (1)..(439): NCBI GI NO: 30025133 NR Description: putative sorbitol transporter [Prunus cerasus]
  misc_feature (1)..(433): NCBI GI NO: 33636088 NR Description: sorbitol-like transporter [Glycine max]
  misc_feature (1)..(443): NCBI GI NO: 16118827 NR Description: putative sugar transporter [Oryza sativa]
  misc_feature (1)..(443): NCBI GI NO: 34393630 NR Description: putative sorbitol transporter
  misc_feature (1)..(453): NCBI GI NO: 28316433 NR Description: sorbitol transporter [Prunus cerasus]
  misc_feature (1)..(434): NCBI GI NO: 1778095 NR Description: putative sugar transporter
MSGAIIYMQKDLHITEFQQEILVGCLSVVSLLGSLSGGRTSDAIGRKWTMGLGAIVFQIGATIMTFAPSFTVLMIGRLLAGVGIGFGAMVSGVYIAEISPAGARGTLTSLPEICINFGILLGYVSNYAFSGLSEHINWRIMLGVGILPSVFIGFALFVIPESPRWLMMEKRVSEARAVLLQISESEAEAEERLAEIEEAAGLMKSMKSEDKEVWRELLNPSPAVRRMLYAGCGIQLFQQITGIDATVYYSPTIFKDAGIKSDQELLAATVAVGFTKTVFILVAIFLIDRVGRKPLLYVSTIGMTICLFLLGVALTLQNHAVGLMSPRVGIDLAIFAVCGNVAFFSIGMGPICWVLSSEVFPLRLRAQGSALGQVGGRVSSGLVSMSFLSMARAISVAGMFFVFAAISTISVLFVYFCVPETKGKTLEQIEMMFESGDEWGGGEIELEDTQHLIPSIKKSVPLG

SEQ ID NO: 35238 - DNA, 1414 bp, Zea mays subsp. mays
  misc_feature (1)..(1414): Ceres Seq. ID no. 12374326
aagcgacatgttcacgcctgttggttcggttcggtttcggcatggaggtagctgagagaccgatggcctcgtcccacctggcagctctcgtctccctgctgatcccctgcctccttgcgcttctgctgctccgcctcgccgccgtgctggacccggaccccgacgccgccgtgccccgcatcaaggcggccgcgcccctccctctccggttccgccacgatggcgccttcaagatcctccaggtggcggacatgcacttcggcaacggcgccaccacgcgctgccgggacgtgggccccgaaggcggcggcgcgcgctgctccgacctcaacaccacgcggttcctgcgccgtgtcatcgaggccgagaagcccgacctcatcgccttcaccggggacaacatatttgggggcagtgcaactgacgcagcagaatcactactcagagcaatcagccctgctatcgaatacagggtgccatgggctgccatcttaggtaatcatgaccaagagtcgacaatgacccgggaggagctgatgaccttcatgtctctaatggactactcggtatctcaagtaaacccacctggttttttggtacatgggtttgggaattatcatgttggcatccatgggccattcggatccgagctggtcaatactagcctgcttaacctttacttcctggatagcggtgatcgtgaaatggtgaatggagttaaaacatatggatggatcagagagtctcaactcgcctggcttcgttctacttccctggagcttcagaaaaaaatacatgccccagcattagcgttcttccacataccaatcccagaggtccgagggctctggtactcaggcttcaagggtcagtaccaggaaggggtggcttgctcatctgtacattctggtgtccttgggacccttgtctccatgggagatgtaaaatctgtctttttgggtcacgaccatcttaatgatttttgtggcaatctcaatgggatctggttctgttatggtggtggctttggttatcatgcctatggaagaccccattggccaaggagagctcggataatttacagtgaactcaaaaaggggcagaggtcgtggttggaagttgactcgatctcgacttggaagctgctagatgatgaaaagctcacaaaaattgatgaacaggttatctggagacatagcacaggtgattctgaccacagagtctacttgtgaagaccatgaacctaaaactacttcctgtatgtgtcatgtgtataatgtttgtcgcaaagattcctccaattttataggtcgattgattattggtagtatggtgtggcacggacctattttagatttcacatttggttcaatgttgatatgctaaccctggtttgggtcgctgacctgttttc

SEQ ID NO: 35239 - protein, 409 aa, Zea mays subsp. mays
  peptide (1)..(409): Ceres Seq. ID no. 12374327
  misc_feature (76)..(325): Pfam Name: Pfam Description:  Calcineurin-like phosphoesterase
  misc_feature (59)..(403): NCBI GI NO: 15242042 NR Description: putative protein; protein id: At5g57140.1
  misc_feature (33)..(399): NCBI GI NO: 15242654 NR Description: putative protein; protein id: At5g63140.1
  misc_feature (68)..(399): NCBI GI NO: 7208777 NR Description: putative PTS protein [Cicer arietinum]
  misc_feature (68)..(408): NCBI GI NO: 15226455 NR Description: hypothetical protein; protein id: At2g46880.1
  misc_feature (68)..(400): NCBI GI NO: 25763519 NR Description: probable phosphoesterase (EC 3
  misc_feature (68)..(400): NCBI GI NO: 30267807 NR Description: hypothetical protein [Arabidopsis thaliana]
  misc_feature (68)..(343): NCBI GI NO: 30267809 NR Description: hypothetical protein [Arabidopsis thaliana]
  misc_feature (73)..(383): NCBI GI NO: 6323393 NR Description: Dose-Dependent Cell cycle Regulator; Dcr2p
  misc_feature (60)..(395): NCBI GI NO: 40740622 NR Description: hypothetical protein AN3604.2
  misc_feature (106)..(385): NCBI GI NO: 15895233 NR Description: Predicted phosphohydrolases, Icc family
ATCSRLLVRFGFGMEVAERPMASSHLAALVSLLIPCLLALLLLRLAAVLDPDPDAAVPRIKAAAPLPLRFRHDGAFKILQVADMHFGNGATTRCRDVGPEGGGARCSDLNTTRFLRRVIEAEKPDLIAFTGDNIFGGSATDAAESLLRAISPAIEYRVPWAAILGNHDQESTMTREELMTFMSLMDYSVSQVNPPGFLVHGFGNYHVGIHGPFGSELVNTSLLNLYFLDSGDREMVNGVKTYGWIRESQLAWLRSTSLELQKKIHAPALAFFHIPIPEVRGLWYSGFKGQYQEGVACSSVHSGVLGTLVSMGDVKSVFLGHDHLNDFCGNLNGIWFCYGGGFGYHAYGRPHWPRRARIIYSELKKGQRSWLEVDSISTWKLLDDEKLTKIDEQVIWRHSTGDSDHRVYL

SEQ ID NO: 35240 - protein, 396 aa, Zea mays subsp. mays
  peptide (1)..(396): Ceres Seq. ID no. 12374328
  misc_feature (63)..(312): Pfam Name: Pfam Description:  Calcineurin-like phosphoesterase
  misc_feature (46)..(390): NCBI GI NO: 15242042 NR Description: putative protein; protein id: At5g57140.1
  misc_feature (20)..(386): NCBI GI NO: 15242654 NR Description: putative protein; protein id: At5g63140.1
  misc_feature (55)..(386): NCBI GI NO: 7208777 NR Description: putative PTS protein [Cicer arietinum]
  misc_feature (55)..(395): NCBI GI NO: 15226455 NR Description: hypothetical protein; protein id: At2g46880.1
  misc_feature (55)..(387): NCBI GI NO: 25763519 NR Description: probable phosphoesterase (EC 3
  misc_feature (55)..(387): NCBI GI NO: 30267807 NR Description: hypothetical protein [Arabidopsis thaliana]
  misc_feature (55)..(330): NCBI GI NO: 30267809 NR Description: hypothetical protein [Arabidopsis thaliana]
  misc_feature (60)..(370): NCBI GI NO: 6323393 NR Description: Dose-Dependent Cell cycle Regulator; Dcr2p
  misc_feature (47)..(382): NCBI GI NO: 40740622 NR Description: hypothetical protein AN3604.2
  misc_feature (93)..(372): NCBI GI NO: 15895233 NR Description: Predicted phosphohydrolases, Icc family
MEVAERPMASSHLAALVSLLIPCLLALLLLRLAAVLDPDPDAAVPRIKAAAPLPLRFRHDGAFKILQVADMHFGNGATTRCRDVGPEGGGARCSDLNTTRFLRRVIEAEKPDLIAFTGDNIFGGSATDAAESLLRAISPAIEYRVPWAAILGNHDQESTMTREELMTFMSLMDYSVSQVNPPGFLVHGFGNYHVGIHGPFGSELVNTSLLNLYFLDSGDREMVNGVKTYGWIRESQLAWLRSTSLELQKKIHAPALAFFHIPIPEVRGLWYSGFKGQYQEGVACSSVHSGVLGTLVSMGDVKSVFLGHDHLNDFCGNLNGIWFCYGGGFGYHAYGRPHWPRRARIIYSELKKGQRSWLEVDSISTWKLLDDEKLTKIDEQVIWRHSTGDSDHRVYL

SEQ ID NO: 35241 - protein, 389 aa, Zea mays subsp. mays
  peptide (1)..(389): Ceres Seq. ID no. 12374329
  misc_feature (56)..(305): Pfam Name: Pfam Description:  Calcineurin-like phosphoesterase
  misc_feature (39)..(383): NCBI GI NO: 15242042 NR Description: putative protein; protein id: At5g57140.1
  misc_feature (13)..(379): NCBI GI NO: 15242654 NR Description: putative protein; protein id: At5g63140.1
  misc_feature (48)..(379): NCBI GI NO: 7208777 NR Description: putative PTS protein [Cicer arietinum]
  misc_feature (48)..(388): NCBI GI NO: 15226455 NR Description: hypothetical protein; protein id: At2g46880.1
  misc_feature (48)..(380): NCBI GI NO: 25763519 NR Description: probable phosphoesterase (EC 3
  misc_feature (48)..(380): NCBI GI NO: 30267807 NR Description: hypothetical protein [Arabidopsis thaliana]
  misc_feature (48)..(323): NCBI GI NO: 30267809 NR Description: hypothetical protein [Arabidopsis thaliana]
  misc_feature (53)..(363): NCBI GI NO: 6323393 NR Description: Dose-Dependent Cell cycle Regulator; Dcr2p
  misc_feature (40)..(375): NCBI GI NO: 40740622 NR Description: hypothetical protein AN3604.2
  misc_feature (86)..(365): NCBI GI NO: 15895233 NR Description: Predicted phosphohydrolases, Icc family
MASSHLAALVSLLIPCLLALLLLRLAAVLDPDPDAAVPRIKAAAPLPLRFRHDGAFKILQVADMHFGNGATTRCRDVGPEGGGARCSDLNTTRFLRRVIEAEKPDLIAFTGDNIFGGSATDAAESLLRAISPAIEYRVPWAAILGNHDQESTMTREELMTFMSLMDYSVSQVNPPGFLVHGFGNYHVGIHGPFGSELVNTSLLNLYFLDSGDREMVNGVKTYGWIRESQLAWLRSTSLELQKKIHAPALAFFHIPIPEVRGLWYSGFKGQYQEGVACSSVHSGVLGTLVSMGDVKSVFLGHDHLNDFCGNLNGIWFCYGGGFGYHAYGRPHWPRRARIIYSELKKGQRSWLEVDSISTWKLLDDEKLTKIDEQVIWRHSTGDSDHRVYL

SEQ ID NO: 35242 - DNA, 1458 bp, Zea mays subsp. mays; identical to SEQ ID NO: 33199
  misc_feature (1)..(1458): Ceres Seq. ID no. 12373464

SEQ ID NO: 35243 - protein, 369 aa, Zea mays subsp. mays; identical to SEQ ID NO: 33200
  peptide (1)..(369): Ceres Seq. ID no. 12373465
  misc_feature (38)..(349): Pfam Name: Pfam Description:  GDSL-like Lipase/Acylhydrolase
  misc_feature (11)..(369): NCBI GI NO: 34909504 NR Description: putative GDSL-motif lipase/hydrolase-like protein
  misc_feature (13)..(369): NCBI GI NO: 34910808 NR Description: GDSL-motif lipase/hydrolase-like protein
  misc_feature (14)..(369): NCBI GI NO: 15242458 NR Description: GDSL-motif lipase/hydrolase-like protein
  misc_feature (14)..(369): NCBI GI NO: 21553940 NR Description: GDSL-motif lipase/hydrolase-like protein
  misc_feature (1)..(369): NCBI GI NO: 7485419 NR Description: hypothetical protein F13C5
  misc_feature (15)..(369): NCBI GI NO: 18415211 NR Description: Expressed protein; protein id: At4g18970
  misc_feature (29)..(369): NCBI GI NO: 15220512 NR Description: lipase/hydrolase, putative; protein id:At1g29660
  misc_feature (29)..(369): NCBI GI NO: 21594055 NR Description: lipase/hydrolase, putative [Arabidopsis thaliana]
  misc_feature (15)..(369): NCBI GI NO: 21618199 NR Description: GDSL-motif lipase/hydrolase-like protein
  misc_feature (15)..(369): NCBI GI NO: 21592417 NR Description: lipase/hydrolase, putative [Arabidopsis thaliana]

SEQ ID NO: 35244 - protein, 198 aa, Zea mays subsp. mays; identical to SEQ ID NO: 33201
  peptide (1)..(198): Ceres Seq. ID no. 12373466
  misc_feature (1)..(178): Pfam Name: Pfam Description:  GDSL-like Lipase/Acylhydrolase
  misc_feature (1)..(198): NCBI GI NO: 34909504 NR Description: putative GDSL-motif lipase/hydrolase-like protein
  misc_feature (1)..(198): NCBI GI NO: 34910808 NR Description: GDSL-motif lipase/hydrolase-like protein
  misc_feature (1)..(198): NCBI GI NO: 15242458 NR Description: GDSL-motif lipase/hydrolase-like protein
  misc_feature (1)..(198): NCBI GI NO: 21553940 NR Description: GDSL-motif lipase/hydrolase-like protein
  misc_feature (1)..(198): NCBI GI NO: 7485419 NR Description: hypothetical protein F13C5
  misc_feature (1)..(198): NCBI GI NO: 18415211 NR Description: Expressed protein; protein id: At4g18970
  misc_feature (1)..(198): NCBI GI NO: 15220512 NR Description: lipase/hydrolase, putative; protein id:At1g29660
  misc_feature (1)..(198): NCBI GI NO: 21594055 NR Description: lipase/hydrolase, putative [Arabidopsis thaliana]
  misc_feature (1)..(198): NCBI GI NO: 21618199 NR Description: GDSL-motif lipase/hydrolase-like protein
  misc_feature (1)..(198): NCBI GI NO: 21592417 NR Description: lipase/hydrolase, putative [Arabidopsis thaliana]

SEQ ID NO: 35245 - protein, 187 aa, Zea mays subsp. mays; identical to SEQ ID NO: 33202
  peptide (1)..(187): Ceres Seq. ID no. 12373467
  misc_feature (1)..(167): Pfam Name: Pfam Description:  GDSL-like Lipase/Acylhydrolase
  misc_feature (1)..(187): NCBI GI NO: 34909504 NR Description: putative GDSL-motif lipase/hydrolase-like protein
  misc_feature (1)..(187): NCBI GI NO: 34910808 NR Description: GDSL-motif lipase/hydrolase-like protein
  misc_feature (1)..(187): NCBI GI NO: 15242458 NR Description: GDSL-motif lipase/hydrolase-like protein
  misc_feature (1)..(187): NCBI GI NO: 21553940 NR Description: GDSL-motif lipase/hydrolase-like protein
  misc_feature (1)..(187): NCBI GI NO: 7485419 NR Description: hypothetical protein F13C5
  misc_feature (1)..(187): NCBI GI NO: 18415211 NR Description: Expressed protein; protein id: At4g18970
  misc_feature (1)..(187): NCBI GI NO: 15220512 NR Description: lipase/hydrolase, putative; protein id:At1g29660
  misc_feature (1)..(187): NCBI GI NO: 21594055 NR Description: lipase/hydrolase, putative [Arabidopsis thaliana]
  misc_feature (1)..(187): NCBI GI NO: 21618199 NR Description: GDSL-motif lipase/hydrolase-like protein
  misc_feature (1)..(187): NCBI GI NO: 21592417 NR Description: lipase/hydrolase, putative [Arabidopsis thaliana]

SEQ ID NO: 35246 - DNA, 1453 bp, Zea mays subsp. mays
  misc_feature (1)..(1453): Ceres Seq. ID no. 12365159
gcacgagaccattacctagaacatcctaatcgaaaaaatcttttttcctcttgacggcgcacataaatccgcgccaaatcgtcaaaccaaaaccaggccgcgcccgcctcgtcagtcctcagtcctcactttcgggccgagctccggatatccagcggcggcaatggcagccgaagccagcgccgtccagcagctcgctggcctcctggaccaagtggacgcgccgctgaagaagacatttgagaatgtgcatcagggctacccaacagagacattattgcgtttccttaaagctagagagtggcatgtgaataaggctcacaggatgcttgaagattctttgaattggaggatgcaaaatgaaatcgatagtatattggagaaacctattatcccagtagatttgtatagatcaattcgtgatacacagcttattgggttatcaggatactccaaagagggcattcctgtatttgcagttggtgttgggctgagtacatatgacaaagcttcggttaactactatgtgcaatctcacattcagatcaatgagtaccgagatcgttttattttgcctacagtgacaaagaagtatgggagacctattaccacctgtataaaggttctcgatatgactggtctgaaattgtcagcactacaccaaatgaagattgtgactgcaatatctacagttgatgatttgaattaccctgaaaagactgagacctattatatagtaaacgctccatacatattttctgcatgttggaaggtcgtgaagcctctgttgcaagagagaacaaggaagaaagttcatgtgttgcgtggctgcgggagagacgagcttctacagatcatggactactcctccctcccccatttctgcagacaggagggctcgggctcatccaaacattcgtcaggcgacgccgataactgcttctctctcgaccacccgttccaccaggagctctacagcttcatccaggagcaggcgctgaaccaggagctcatcaagcagggctccttgcacgtgaaaatccccgagcaggaccctgaggacgcaaagatcgtggaggtcatcgaggccgagttccacaagcttggcgtgcagaacgggtccgccaatggcatcgaccaagcatagcacctttgtctaataagaccagcctgattcaaccgagacgttgcttgccacttctgatgcaactaatcctactgtttattttttttggtggggtgggcccacccccgttgctgtttcctggggggaggggggtgattggtattggtggtatacatagcaaagtcatttgcagatccatccatgatgcaggactgagatagacgatatcacctgtgtaaacttgcagatttgcaatgtgtcctcatctcatatgtatgctgagttgagatgaaatgaataaatcatcctacaagttttttttgagcc

SEQ ID NO: 35247 - protein, 327 aa, Zea mays subsp. mays
  peptide (1)..(327): Ceres Seq. ID no. 12365160
  misc_feature (134)..(238): Pfam Name: Pfam Description:  CRAL/TRIO domain
  misc_feature (7)..(324): NCBI GI NO: 7488694 NR Description: phosphatidylinositol-phosphatidylcholine transfer protein SEC14 homolog Ssh1
  misc_feature (7)..(315): NCBI GI NO: 15222786 NR Description: polyphosphoinositide binding protein, putative
  misc_feature (7)..(325): NCBI GI NO: 15238794 NR Description: putative protein; protein id: At5g47730.1
  misc_feature (27)..(315): NCBI GI NO: 25295905 NR Description: protein F14J16.8 [imported] - Arabidopsis thaliana
  misc_feature (7)..(206): NCBI GI NO: 14532536 NR Description: AT5g47730/MCA23_5 [Arabidopsis thaliana]
  misc_feature (30)..(302): NCBI GI NO: 15230198 NR Description: phosphatidylinositol transfer protein, putative
  misc_feature (30)..(305): NCBI GI NO: 11994666 NR Description: phosphatidylinositol/phosphatidylcholine transfer protein-like
  misc_feature (38)..(275): NCBI GI NO: 15234966 NR Description: SEC14 - like protein; protein id: At4g39180.1
  misc_feature (30)..(250): NCBI GI NO: 5257268 NR Description: Similar to putative SEC14 cytosolic factor
  misc_feature (22)..(240): NCBI GI NO: 14335006 NR Description: AT4g39170/T22F8_70 [Arabidopsis thaliana]
MAAEASAVQQLAGLLDQVDAPLKKTFENVHQGYPTETLLRFLKAREWHVNKAHRMLEDSLNWRMQNEIDSILEKPIIPVDLYRSIRDTQLIGLSGYSKEGIPVFAVGVGLSTYDKASVNYYVQSHIQINEYRDRFILPTVTKKYGRPITTCIKVLDMTGLKLSALHQMKIVTAISTVDDLNYPEKTETYYIVNAPYIFSACWKVVKPLLQERTRKKVHVLRGCGRDELLQIMDYSSLPHFCRQEGSGSSKHSSGDADNCFSLDHPFHQELYSFIQEQALNQELIKQGSLHVKIPEQDPEDAKIVEVIEAEFHKLGVQNGSANGIDQA

SEQ ID NO: 35248 - protein, 273 aa, Zea mays subsp. mays
  peptide (1)..(273): Ceres Seq. ID no. 12365161
  misc_feature (80)..(184): Pfam Name: Pfam Description:  CRAL/TRIO domain
  misc_feature (1)..(270): NCBI GI NO: 7488694 NR Description: phosphatidylinositol-phosphatidylcholine transfer protein SEC14 homolog Ssh1
  misc_feature (1)..(261): NCBI GI NO: 15222786 NR Description: polyphosphoinositide binding protein, putative
  misc_feature (1)..(271): NCBI GI NO: 15238794 NR Description: putative protein; protein id: At5g47730.1
  misc_feature (1)..(261): NCBI GI NO: 25295905 NR Description: protein F14J16.8 [imported] - Arabidopsis thaliana
  misc_feature (1)..(152): NCBI GI NO: 14532536 NR Description: AT5g47730/MCA23_5 [Arabidopsis thaliana]
  misc_feature (1)..(248): NCBI GI NO: 15230198 NR Description: phosphatidylinositol transfer protein, putative
  misc_feature (1)..(251): NCBI GI NO: 11994666 NR Description: phosphatidylinositol/phosphatidylcholine transfer protein-like
  misc_feature (1)..(221): NCBI GI NO: 15234966 NR Description: SEC14 - like protein; protein id: At4g39180.1
  misc_feature (1)..(196): NCBI GI NO: 5257268 NR Description: Similar to putative SEC14 cytosolic factor
  misc_feature (1)..(186): NCBI GI NO: 14335006 NR Description: AT4g39170/T22F8_70 [Arabidopsis thaliana]
MLEDSLNWRMQNEIDSILEKPIIPVDLYRSIRDTQLIGLSGYSKEGIPVFAVGVGLSTYDKASVNYYVQSHIQINEYRDRFILPTVTKKYGRPITTCIKVLDMTGLKLSALHQMKIVTAISTVDDLNYPEKTETYYIVNAPYIFSACWKVVKPLLQERTRKKVHVLRGCGRDELLQIMDYSSLPHFCRQEGSGSSKHSSGDADNCFSLDHPFHQELYSFIQEQALNQELIKQGSLHVKIPEQDPEDAKIVEVIEAEFHKLGVQNGSANGIDQA

SEQ ID NO: 35249 - protein, 264 aa, Zea mays subsp. mays
  peptide (1)..(264): Ceres Seq. ID no. 12365162
  misc_feature (71)..(175): Pfam Name: Pfam Description:  CRAL/TRIO domain
  misc_feature (1)..(261): NCBI GI NO: 7488694 NR Description: phosphatidylinositol-phosphatidylcholine transfer protein SEC14 homolog Ssh1
  misc_feature (1)..(252): NCBI GI NO: 15222786 NR Description: polyphosphoinositide binding protein, putative
  misc_feature (1)..(262): NCBI GI NO: 15238794 NR Description: putative protein; protein id: At5g47730.1
  misc_feature (1)..(252): NCBI GI NO: 25295905 NR Description: protein F14J16.8 [imported] - Arabidopsis thaliana
  misc_feature (1)..(143): NCBI GI NO: 14532536 NR Description: AT5g47730/MCA23_5 [Arabidopsis thaliana]
  misc_feature (1)..(239): NCBI GI NO: 15230198 NR Description: phosphatidylinositol transfer protein, putative
  misc_feature (1)..(242): NCBI GI NO: 11994666 NR Description: phosphatidylinositol/phosphatidylcholine transfer protein-like
  misc_feature (1)..(212): NCBI GI NO: 15234966 NR Description: SEC14 - like protein; protein id: At4g39180.1
  misc_feature (1)..(187): NCBI GI NO: 5257268 NR Description: Similar to putative SEC14 cytosolic factor
  misc_feature (1)..(177): NCBI GI NO: 14335006 NR Description: AT4g39170/T22F8_70 [Arabidopsis thaliana]
MQNEIDSILEKPIIPVDLYRSIRDTQLIGLSGYSKEGIPVFAVGVGLSTYDKASVNYYVQSHIQINEYRDRFILPTVTKKYGRPITTCIKVLDMTGLKLSALHQMKIVTAISTVDDLNYPEKTETYYIVNAPYIFSACWKVVKPLLQERTRKKVHVLRGCGRDELLQIMDYSSLPHFCRQEGSGSSKHSSGDADNCFSLDHPFHQELYSFIQEQALNQELIKQGSLHVKIPEQDPEDAKIVEVIEAEFHKLGVQNGSANGIDQA

SEQ ID NO: 35250 - DNA, 849 bp, Zea mays subsp. mays
  misc_feature (1)..(849): Ceres Seq. ID no. 12379687
ctctaaagttttgctctggccaaacacgtcaatagtagagattttggactagattcgtgcaaaacactagaaaagaaaaggccatcgaaaacgccgccgccgcctctgatgctttccgccgtgcgatgtggtgcccttcgccggtggcgcccgccgccgcacctcctcccacgcatcctttcctcctcctttggtacatctcccgcgcgaccacaggtgggggcgctgctggagctcccggaggtggagaaggtactgcgcgacgtacgagcgggtgacgtgcgcgtattccccgtcggcgagagcggtctgcacggcggggcctgcgccgactacatggtcgtcgccacaggccgctccgattggcacgtccgtaacatcgcgcaggcgctcctctacaagataaagcaaaagcagaagggctctgatagaatattgatgccaagtgtagaaggtcagcaagcgggaaaatgggttgtcattgattctggaagcataatcatccatgcacttgaagaaagggcaagagagtattatgatttagagagcatttggtcaaaagaggtgtcccctaacacttccattcaggagttggagacctcgctggtgaagacacgtcgccggaacctatcacagaaacccatgaagagcatctgaactaggggatctggtacgatgatccgtgaaccgagataaattacgggaggtcgagcttttatctctttccattttgtagcatcttttacttacctaaacttgtcttattatggtggtagttaatgtaagattcactgcaaacattactgagttcaccatggggtaaatccagtctcacatgagtcatctagt

SEQ ID NO: 35251 - protein, 182 aa, Zea mays subsp. mays
  peptide (1)..(182): Ceres Seq. ID no. 12379688
  misc_feature (40)..(150): Pfam Name: Pfam Description:  Domain of unknown function DUF143
  misc_feature (6)..(180): NCBI GI NO: 18408812 NR Description: expressed protein; protein id: At1g67620
  misc_feature (6)..(180): NCBI GI NO: 21536608 NR Description: unknown [Arabidopsis thaliana]
  misc_feature (50)..(159): NCBI GI NO: 15890026 NR Description: AGR_C_5039p [Agrobacterium tumefaciens]
  misc_feature (50)..(159): NCBI GI NO: 17936652 NR Description: conserved hypothetical protein
  misc_feature (52)..(150): NCBI GI NO: 39998299 NR Description: iojap-related protein
  misc_feature (75)..(150): NCBI GI NO: 33519773 NR Description: conserved hypothetical protein
  misc_feature (22)..(150): NCBI GI NO: 21232046 NR Description: conserved hypothetical protein
  misc_feature (38)..(149): NCBI GI NO: 22983541 NR Description: hypothetical protein [Burkholderia fungorum]
  misc_feature (30)..(150): NCBI GI NO: 23109914 NR Description: hypothetical protein
  misc_feature (46)..(152): NCBI GI NO: 24372753 NR Description: iojap domain protein [Shewanella oneidensis MR-1]
MLSAVRCGALRRWRPPPHLLPRILSSSFGTSPARPQVGALLELPEVEKVLRDVRAGDVRVFPVGESGLHGGACADYMVVATGRSDWHVRNIAQALLYKIKQKQKGSDRILMPSVEGQQAGKWVVIDSGSIIIHALEERAREYYDLESIWSKEVSPNTSIQELETSLVKTRRRNLSQKPMKSI

SEQ ID NO: 35252 - protein, 106 aa, Zea mays subsp. mays
  peptide (1)..(106): Ceres Seq. ID no. 12379689
  misc_feature (1)..(74): Pfam Name: Pfam Description:  Domain of unknown function DUF143
  misc_feature (1)..(104): NCBI GI NO: 18408812 NR Description: expressed protein; protein id: At1g67620
  misc_feature (1)..(104): NCBI GI NO: 21536608 NR Description: unknown [Arabidopsis thaliana]
  misc_feature (1)..(83): NCBI GI NO: 15890026 NR Description: AGR_C_5039p [Agrobacterium tumefaciens]
  misc_feature (1)..(83): NCBI GI NO: 17936652 NR Description: conserved hypothetical protein
  misc_feature (1)..(74): NCBI GI NO: 39998299 NR Description: iojap-related protein
  misc_feature (1)..(74): NCBI GI NO: 33519773 NR Description: conserved hypothetical protein
  misc_feature (1)..(74): NCBI GI NO: 21232046 NR Description: conserved hypothetical protein
  misc_feature (1)..(73): NCBI GI NO: 22983541 NR Description: hypothetical protein [Burkholderia fungorum]
  misc_feature (1)..(74): NCBI GI NO: 23109914 NR Description: hypothetical protein
  misc_feature (1)..(76): NCBI GI NO: 24372753 NR Description: iojap domain protein [Shewanella oneidensis MR-1]
MVVATGRSDWHVRNIAQALLYKIKQKQKGSDRILMPSVEGQQAGKWVVIDSGSIIIHALEERAREYYDLESIWSKEVSPNTSIQELETSLVKTRRRNLSQKPMKSI

SEQ ID NO: 35253 - DNA, 1623 bp, Zea mays subsp. mays
  misc_feature (1)..(1623): Ceres Seq. ID no. 12462280
tgccttctgcgccctccatttcggcctctgtcccttgcaagttcaatctcacctccaaccatgggtaaagagaagtcccacatcaacattgtggttattggccacgttgactctggcaagtcgaccaccacaggacacctgatctacaagcttggaggcattgacaagcgtgtgatcgagaggttcgagaaggaggctgctgaaatgaacaagcggtccttcaagtacgcatgggtgctcgacaagctcaaggctgagcgtgagagaggtatcaccattgatatcgctctgtggaagtttgagaccaccaagtactactgcacggtcattgatgcccctggacaccgtgacttcatcaagaacatgatcactggtacctcccaggctgactgtgctgtccttatcattgactccaccactggtggttttgaggctggtatctccaaggatggccagacccgtgaacatgctctccttgcgttcacccttggtgtgaagcagatgatttgctgctgcaacaagatggatgcaaccactcccaaatactccaaggcacgttatgatgagattgtgaaggaagtctcatcctacctcaagaaagttgggtacaaccctgataagattgccttcgttcccatttctggttttgagggcgacaacatgattgagaggtccaccaaccttgactggtacaaaggcccaaccctgcttgaggctcttgaccagatcaccgagcccaagaggccttcagacaagcccctgcgtctagccctccaggatgtgtacaagattggtggtattggaactgtaccggttggtcgtgtggagactggtgtcatcaagcctggtatggtagtcacctttggtccaactggcctgactactgaggtgaagtctgttgagatgcaccatgaggcgcttcaggaggctcttccgggcgacaatgttggcttcaacgtgaagaacgttgctgtcaaggatctcaagcgtgggttcgtggcctccaactccaaggatgaccctgccaaggaggctgccagcttcacctcccaggtcatcatcatgaaccaccctgggcagattggcaacggctatgccccagtgctggactgccacacctcccacatcgccgtcaagtttgctgagctcattaccaagatcgacaggcgatctggcaaggagctcgagaaggagcccaagttcctgaagaacggtgatgctggtatggtgaagatgattcccaccaagcctatggtggtggagacattctccgcgtatcctcccctgggtaggtttgccgtccgcgacatgaggcagacggttgctgttggagtcatcaagagtgtggagaagaaggacccaaccggcgccaaggtgaccaaggcggccgccaagaagaaatgatcgatccgtgtctgctttgcagtgcctggataacttgccactaaagttgtgtatgcggttgttgctgttattgcgtggactgtttgctgcggtgtctcctgtttgtttgggtagcgcagcgtctggcctcttcaggtgtctgttgtctgttgtctttactatcagtaatgctcctgagacttctatttgtccttttggcgccgctaaatggaattttcg

SEQ ID NO: 35254 - protein, 467 aa, Zea mays subsp. mays
  peptide (1)..(467): Ceres Seq. ID no. 12462281
  misc_feature (25)..(247): Pfam Name: Pfam Description:  Elongation factor Tu GTP binding domain
  misc_feature (21)..(467): NCBI GI NO: 7230387 NR Description: elongation factor 1 alpha [Zea mays]
  misc_feature (21)..(467): NCBI GI NO: 7230385 NR Description: elongation factor 1 alpha [Zea mays]
  misc_feature (21)..(467): NCBI GI NO: 7230397 NR Description: elongation factor 1 alpha [Zea mays]
  misc_feature (21)..(467): NCBI GI NO: 2282584 NR Description: elongation factor 1-alpha [Zea mays]
  misc_feature (21)..(467): NCBI GI NO: 2662341 NR Description: EF-1 alpha [Oryza sativa]
  misc_feature (21)..(467): NCBI GI NO: 7230391 NR Description: elongation factor 1 alpha [Zea mays]
  misc_feature (21)..(467): NCBI GI NO: 2662343 NR Description: EF-1 alpha [Oryza sativa]
  misc_feature (21)..(467): NCBI GI NO: 6015059 NR Description: ELONGATION FACTOR 1-ALPHA (EF-1-ALPHA)
  misc_feature (21)..(467): NCBI GI NO: 3122071 NR Description: ELONGATION FACTOR 1-ALPHA (EF-1-ALPHA)
  misc_feature (21)..(467): NCBI GI NO: 9802384 NR Description: elongation factor [Saccharum officinarum]
CLLRPPFRPLSLASSISPPTMGKEKSHINIVVIGHVDSGKSTTTGHLIYKLGGIDKRVIERFEKEAAEMNKRSFKYAWVLDKLKAERERGITIDIALWKFETTKYYCTVIDAPGHRDFIKNMITGTSQADCAVLIIDSTTGGFEAGISKDGQTREHALLAFTLGVKQMICCCNKMDATTPKYSKARYDEIVKEVSSYLKKVGYNPDKIAFVPISGFEGDNMIERSTNLDWYKGPTLLEALDQITEPKRPSDKPLRLALQDVYKIGGIGTVPVGRVETGVIKPGMVVTFGPTGLTTEVKSVEMHHEALQEALPGDNVGFNVKNVAVKDLKRGFVASNSKDDPAKEAASFTSQVIIMNHPGQIGNGYAPVLDCHTSHIAVKFAELITKIDRRSGKELEKEPKFLKNGDAGMVKMIPTKPMVVETFSAYPPLGRFAVRDMRQTVAVGVIKSVEKKDPTGAKVTKAAAKKK

SEQ ID NO: 35255 - protein, 447 aa, Zea mays subsp. mays
  peptide (1)..(447): Ceres Seq. ID no. 12462282
  misc_feature (5)..(227): Pfam Name: Pfam Description:  Elongation factor Tu GTP binding domain
  misc_feature (1)..(447): NCBI GI NO: 7230387 NR Description: elongation factor 1 alpha [Zea mays]
  misc_feature (1)..(447): NCBI GI NO: 7230385 NR Description: elongation factor 1 alpha [Zea mays]
  misc_feature (1)..(447): NCBI GI NO: 7230397 NR Description: elongation factor 1 alpha [Zea mays]
  misc_feature (1)..(447): NCBI GI NO: 2282584 NR Description: elongation factor 1-alpha [Zea mays]
  misc_feature (1)..(447): NCBI GI NO: 2662341 NR Description: EF-1 alpha [Oryza sativa]
  misc_feature (1)..(447): NCBI GI NO: 7230391 NR Description: elongation factor 1 alpha [Zea mays]
  misc_feature (1)..(447): NCBI GI NO: 2662343 NR Description: EF-1 alpha [Oryza sativa]
  misc_feature (1)..(447): NCBI GI NO: 6015059 NR Description: ELONGATION FACTOR 1-ALPHA (EF-1-ALPHA)
  misc_feature (1)..(447): NCBI GI NO: 3122071 NR Description: ELONGATION FACTOR 1-ALPHA (EF-1-ALPHA)
  misc_feature (1)..(447): NCBI GI NO: 9802384 NR Description: elongation factor [Saccharum officinarum]
MGKEKSHINIVVIGHVDSGKSTTTGHLIYKLGGIDKRVIERFEKEAAEMNKRSFKYAWVLDKLKAERERGITIDIALWKFETTKYYCTVIDAPGHRDFIKNMITGTSQADCAVLIIDSTTGGFEAGISKDGQTREHALLAFTLGVKQMICCCNKMDATTPKYSKARYDEIVKEVSSYLKKVGYNPDKIAFVPISGFEGDNMIERSTNLDWYKGPTLLEALDQITEPKRPSDKPLRLALQDVYKIGGIGTVPVGRVETGVIKPGMVVTFGPTGLTTEVKSVEMHHEALQEALPGDNVGFNVKNVAVKDLKRGFVASNSKDDPAKEAASFTSQVIIMNHPGQIGNGYAPVLDCHTSHIAVKFAELITKIDRRSGKELEKEPKFLKNGDAGMVKMIPTKPMVVETFSAYPPLGRFAVRDMRQTVAVGVIKSVEKKDPTGAKVTKAAAKKK

SEQ ID NO: 35256 - protein, 399 aa, Zea mays subsp. mays
  peptide (1)..(399): Ceres Seq. ID no. 12462283
  misc_feature (1)..(179): Pfam Name: Pfam Description:  Elongation factor Tu GTP binding domain
  misc_feature (1)..(399): NCBI GI NO: 7230387 NR Description: elongation factor 1 alpha [Zea mays]
  misc_feature (1)..(399): NCBI GI NO: 7230385 NR Description: elongation factor 1 alpha [Zea mays]
  misc_feature (1)..(399): NCBI GI NO: 7230397 NR Description: elongation factor 1 alpha [Zea mays]
  misc_feature (1)..(399): NCBI GI NO: 2282584 NR Description: elongation factor 1-alpha [Zea mays]
  misc_feature (1)..(399): NCBI GI NO: 2662341 NR Description: EF-1 alpha [Oryza sativa]
  misc_feature (1)..(399): NCBI GI NO: 7230391 NR Description: elongation factor 1 alpha [Zea mays]
  misc_feature (1)..(399): NCBI GI NO: 2662343 NR Description: EF-1 alpha [Oryza sativa]
  misc_feature (1)..(399): NCBI GI NO: 6015059 NR Description: ELONGATION FACTOR 1-ALPHA (EF-1-ALPHA)
  misc_feature (1)..(399): NCBI GI NO: 3122071 NR Description: ELONGATION FACTOR 1-ALPHA (EF-1-ALPHA)
  misc_feature (1)..(399): NCBI GI NO: 9802384 NR Description: elongation factor [Saccharum officinarum]
MNKRSFKYAWVLDKLKAERERGITIDIALWKFETTKYYCTVIDAPGHRDFIKNMITGTSQADCAVLIIDSTTGGFEAGISKDGQTREHALLAFTLGVKQMICCCNKMDATTPKYSKARYDEIVKEVSSYLKKVGYNPDKIAFVPISGFEGDNMIERSTNLDWYKGPTLLEALDQITEPKRPSDKPLRLALQDVYKIGGIGTVPVGRVETGVIKPGMVVTFGPTGLTTEVKSVEMHHEALQEALPGDNVGFNVKNVAVKDLKRGFVASNSKDDPAKEAASFTSQVIIMNHPGQIGNGYAPVLDCHTSHIAVKFAELITKIDRRSGKELEKEPKFLKNGDAGMVKMIPTKPMVVETFSAYPPLGRFAVRDMRQTVAVGVIKSVEKKDPTGAKVTKAAAKKK

SEQ ID NO: 35257 - DNA, 2017 bp, Zea mays subsp. mays
  misc_feature (1)..(2017): Ceres Seq. ID no. 12434851
  misc_feature (387)..(387): n is a, c, t, g, unknown, or other
cgcaattaaccctcactaaagggaacaaaagctggagctccaccgcggtggcggccgctctagaactagtggatcccccgggctgcaggaattcgcacgagaccattacctagaacatcctaatcgaaaaatgcatcccgattactatctgccgagccgaccagcggcaccagaacccacaaggttcactcatggcgcccacgtccatgctcccgttcgcgccctccaatacgtcgctgccctattcctcccgcgccacaactgccgccgcgttcgctcctcgtgggctccaccacgccgcggccggaaggagcggcggcggccaacggctcgcgtgcgctgcgcctcggcgccgccgcggagggggtcttgtggtcagggcgtcgnccgactactacgcgacgctgggcgtgccgcgcgccgccagtaacagagacatcaaggccgcgtaccggaagctcgcgcgccagtatcatcctgatgtcaataaggagcctggagcgactgaaaagtttaaagagataagtgcagcatatgaggtgctgtcagatgaaaagaagagggcgttgtatgaccaatatggtgaagctggtgttaagagtgcagttggaggctccggtggagcttacacaaccaatccatttgatctgtttgagacattttttggagcaagcatgggtggtttttctggcatggaccagagcgcgtttaggacaagcaggcgaagcactgctatacagggtgaagacatcagatatgatgtgattctggggttcacagaggcgatatttggaacagagaaagatattatattatctcatttggaaacatgtgatacatgtggtggttctggatcaaaggctggctccaagatgagaatatgttccacatgtggtgggcgagggcaagtaatgcgaactgagcaaacaccatttggtctgttctcccaggtttctatttgccccacttgtgcaggagagggcgaagtcatttcagagtattgcaggaaatgttctggagaggggcgtatccgtgtcagaaaggagatcaaagtaaaaatccctccaggagtgagcaaaggcagtactcttcgtgtacgtggggaaggtgatgctggaccaaaaggtgggcctcctggagatctctttgtttgccttgatatagaggagccatcagatatcaagagggatggtataaacttgtattcaactgtgtcaataagctatcttgaagctattttgggcactgttatgcaagtcagaactgttgatggaaccagtgaccttcgaatacctccaggtatccaacctggtgatgtaattgtcttagcgaagcaaggagttccatcattgaataagccgtctatacgtggtgatcatctcttcactgttaaagtcgcaataccgaagcgcataagtgggcgtgaaagagaattacttgaggaacttgcatctttgagtaatggtcgctttgcacgaacagacactaagccaaaacctgcccagccaaaagccatacatcaagagaaagaagttggtgctagtcaagaagatacaagcaaatctaaagaagcagagggtgactggttgaagaaacttacagattttgctgggtccattgttaatggcgctgcgaagtggctgaacgacaacctgtaggctgtaaatatttactgcaggatagaagattgtcttacatggtgctgtagtccaatcaaagttcttagattcattggtggtccccacgagctcgtatattcgttttattggagagctgcaagattttcaggctgagtggcaaccgagggagtgaaagttgtcaactaatatcgtcgcggcgttggtcccttgtcattcttgccaagcaattatttttatgtagttggagtccttttcagtctggcaagcggcgtagaagtctgaagctgtgggatgctgatcccaaaccccgggactagacaaacactgtacttgaggttttggattaatcaaattcaccgatatcgaattgcaaactt

SEQ ID NO: 35258 - protein, 488 aa, Zea mays subsp. mays
  peptide (1)..(488): Ceres Seq. ID no. 12434852
  misc_feature (298)..(420): Pfam Name: Pfam Description:  DnaJ C terminal region
  misc_feature (10)..(488): NCBI GI NO: 18412605 NR Description: DnaJ protein, putative; protein id: At1g80030
  misc_feature (10)..(488): NCBI GI NO: 14326568 NR Description: At1g80030/F18B13_37 [Arabidopsis thaliana]
  misc_feature (54)..(488): NCBI GI NO: 7441921 NR Description: heat shock protein dnaJ - garden pea
  misc_feature (53)..(474): NCBI GI NO: 25296044 NR Description: hypothetical protein F18B13.12
  misc_feature (55)..(430): NCBI GI NO: 7441920 NR Description: heat shock protein T5J17
  misc_feature (55)..(430): NCBI GI NO: 18420568 NR Description: DnaJ - like protein; protein id: At4g39960
  misc_feature (6)..(421): NCBI GI NO: 16326131 NR Description: DNAJ homologue [Oryza sativa]
  misc_feature (55)..(433): NCBI GI NO: 30794072 NR Description: putative DnaJ protein [Arabidopsis thaliana]
  misc_feature (55)..(433): NCBI GI NO: 18399949 NR Description: putative DnaJ protein; protein id: At2g22360
  misc_feature (55)..(433): NCBI GI NO: 25296019 NR Description: probable DnaJ protein
  misc_feature (66)..(66): Xaa is any aa, unknown or other
MAPTSMLPFAPSNTSLPYSSRATTAAAFAPRGLHHAAAGRSGGGQRLACAAPRRRRGGGLVVRASXDYYATLGVPRAASNRDIKAAYRKLARQYHPDVNKEPGATEKFKEISAAYEVLSDEKKRALYDQYGEAGVKSAVGGSGGAYTTNPFDLFETFFGASMGGFSGMDQSAFRTSRRSTAIQGEDIRYDVILGFTEAIFGTEKDIILSHLETCDTCGGSGSKAGSKMRICSTCGGRGQVMRTEQTPFGLFSQVSICPTCAGEGEVISEYCRKCSGEGRIRVRKEIKVKIPPGVSKGSTLRVRGEGDAGPKGGPPGDLFVCLDIEEPSDIKRDGINLYSTVSISYLEAILGTVMQVRTVDGTSDLRIPPGIQPGDVIVLAKQGVPSLNKPSIRGDHLFTVKVAIPKRISGRERELLEELASLSNGRFARTDTKPKPAQPKAIHQEKEVGASQEDTSKSKEAEGDWLKKLTDFAGSIVNGAAKWLNDNL

SEQ ID NO: 35259 - protein, 483 aa, Zea mays subsp. mays
  peptide (1)..(483): Ceres Seq. ID no. 12434853
  misc_feature (293)..(415): Pfam Name: Pfam Description:  DnaJ C terminal region
  misc_feature (5)..(483): NCBI GI NO: 18412605 NR Description: DnaJ protein, putative; protein id: At1g80030
  misc_feature (5)..(483): NCBI GI NO: 14326568 NR Description: At1g80030/F18B13_37 [Arabidopsis thaliana]
  misc_feature (49)..(483): NCBI GI NO: 7441921 NR Description: heat shock protein dnaJ - garden pea
  misc_feature (48)..(469): NCBI GI NO: 25296044 NR Description: hypothetical protein F18B13.12
  misc_feature (50)..(425): NCBI GI NO: 7441920 NR Description: heat shock protein T5J17
  misc_feature (50)..(425): NCBI GI NO: 18420568 NR Description: DnaJ - like protein; protein id: At4g39960
  misc_feature (1)..(416): NCBI GI NO: 16326131 NR Description: DNAJ homologue [Oryza sativa]
  misc_feature (50)..(428): NCBI GI NO: 30794072 NR Description: putative DnaJ protein [Arabidopsis thaliana]
  misc_feature (50)..(428): NCBI GI NO: 18399949 NR Description: putative DnaJ protein; protein id: At2g22360
  misc_feature (50)..(428): NCBI GI NO: 25296019 NR Description: probable DnaJ protein
  misc_feature (61)..(61): Xaa is any aa, unknown or other
MLPFAPSNTSLPYSSRATTAAAFAPRGLHHAAAGRSGGGQRLACAAPRRRRGGGLVVRASXDYYATLGVPRAASNRDIKAAYRKLARQYHPDVNKEPGATEKFKEISAAYEVLSDEKKRALYDQYGEAGVKSAVGGSGGAYTTNPFDLFETFFGASMGGFSGMDQSAFRTSRRSTAIQGEDIRYDVILGFTEAIFGTEKDIILSHLETCDTCGGSGSKAGSKMRICSTCGGRGQVMRTEQTPFGLFSQVSICPTCAGEGEVISEYCRKCSGEGRIRVRKEIKVKIPPGVSKGSTLRVRGEGDAGPKGGPPGDLFVCLDIEEPSDIKRDGINLYSTVSISYLEAILGTVMQVRTVDGTSDLRIPPGIQPGDVIVLAKQGVPSLNKPSIRGDHLFTVKVAIPKRISGRERELLEELASLSNGRFARTDTKPKPAQPKAIHQEKEVGASQEDTSKSKEAEGDWLKKLTDFAGSIVNGAAKWLNDNL

SEQ ID NO: 35260 - protein, 327 aa, Zea mays subsp. mays
  peptide (1)..(327): Ceres Seq. ID no. 12434854
  misc_feature (137)..(259): Pfam Name: Pfam Description:  DnaJ C terminal region
  misc_feature (1)..(327): NCBI GI NO: 18412605 NR Description: DnaJ protein, putative; protein id: At1g80030
  misc_feature (1)..(327): NCBI GI NO: 14326568 NR Description: At1g80030/F18B13_37 [Arabidopsis thaliana]
  misc_feature (1)..(327): NCBI GI NO: 7441921 NR Description: heat shock protein dnaJ - garden pea
  misc_feature (1)..(313): NCBI GI NO: 25296044 NR Description: hypothetical protein F18B13.12
  misc_feature (1)..(269): NCBI GI NO: 7441920 NR Description: heat shock protein T5J17
  misc_feature (1)..(269): NCBI GI NO: 18420568 NR Description: DnaJ - like protein; protein id: At4g39960
  misc_feature (1)..(260): NCBI GI NO: 16326131 NR Description: DNAJ homologue [Oryza sativa]
  misc_feature (1)..(272): NCBI GI NO: 30794072 NR Description: putative DnaJ protein [Arabidopsis thaliana]
  misc_feature (1)..(272): NCBI GI NO: 18399949 NR Description: putative DnaJ protein; protein id: At2g22360
  misc_feature (1)..(272): NCBI GI NO: 25296019 NR Description: probable DnaJ protein
MGGFSGMDQSAFRTSRRSTAIQGEDIRYDVILGFTEAIFGTEKDIILSHLETCDTCGGSGSKAGSKMRICSTCGGRGQVMRTEQTPFGLFSQVSICPTCAGEGEVISEYCRKCSGEGRIRVRKEIKVKIPPGVSKGSTLRVRGEGDAGPKGGPPGDLFVCLDIEEPSDIKRDGINLYSTVSISYLEAILGTVMQVRTVDGTSDLRIPPGIQPGDVIVLAKQGVPSLNKPSIRGDHLFTVKVAIPKRISGRERELLEELASLSNGRFARTDTKPKPAQPKAIHQEKEVGASQEDTSKSKEAEGDWLKKLTDFAGSIVNGAAKWLNDNL

SEQ ID NO: 35261 - DNA, 1467 bp, Zea mays subsp. mays
  misc_feature (1)..(1467): Ceres Seq. ID no. 12368243
gcacgagaccattacctagaacatcctaatcgaaaaagaggaaacgccctgcacagcacgactcctccccatctaccgctacctttctacctacccatctagcacccctcgctcgccaagccaaggtctgagccgttcgaggagaaggacggagttaagctgccgagctacaggggcgacaacgtcaacggcgacgacttcaccgagaagagccgcgtgccggacccgcagaggatgatccgcgcctacgcacagtcggtggcgacactcaacctgctccgcgcgttcgccaccggagggtacgctgccatgcagcgcgtcactcagtggaacctcgatttcatggatcacaacgagcaaggtgataggtaccgtgaattggcccatagggtggatgatgctcttgggttcatgactgcatcggggcttacagtcgaccacccgataatgacgactactgacttctggacctcgcacgagtgccttctcttaccctacgagcaggctcttacccgtgaggattccaccagtggccttttctatgattgttcggcccacatgttgtgggttggtgagcgcactcgacaactcgatggagctcatgttgaattcctccgtggtgttgccaaccctctgggcataaaggtgagcgacaaaatgaaccccagtgagttggtgaagctgattgatattctgaacccttcaaacaaacctggaaggatcaccataattacaaggatgggggcagagaacatgagggtgaagttgcctcatctcatccgtgctgttcgcaatgctggactgattgtcacatggattactgatcctatgcatggaaacaccatcaaggccccttgtggcctgaagactcgtccatttgactccattctggctgaagtgcgtgcttcttcgatgtgcatgaccaagaaggaagccaccctgggggcgtccaccttgaaatgactgggcagaacgtgaccgagtatcggtggatcacggaccgtgaccttcgacgatctgagcgaccgctaccacacccactgcgacccaaggctgaatgcctcccagtccctggagctcgcctttatcatcgcagagaggctgaggaagaggaggatgcgatcggggctcaacagcagcctgccactgccgccactggcttctgagtagccggagccaaacacaaaggagggtaggaatagctgtggtgactcggaagagaaagagacagtcgacgccttgttttgttgatgcttagtgtggtgacctggtggtggtggtggtgggtgttcttggcacaagttacatgctggggatagctataggaggtacctgttgaggtgtgtaagacagtagctagcaaccgtatgccttggtttcctgtttgggtgcgtgacttgccgactttctagctgcttctggggttttgacctcggtaaggaaagaataaaaagataatcggagtgc

SEQ ID NO: 35262 - protein, 242 aa, Zea mays subsp. mays
  peptide (1)..(242): Ceres Seq. ID no. 12368244
  misc_feature (1)..(242): Pfam Name: Pfam Description:  Class-II DAHP synthetase family
  misc_feature (1)..(242): NCBI GI NO: 34906844 NR Description: putative phospho-2-dehydro-3-deoxyheptonatealdolase 1
  misc_feature (1)..(242): NCBI GI NO: 2398679 NR Description: 3-deoxy-D-arabino-heptulosonate 7-phosphatesynthase
  misc_feature (1)..(242): NCBI GI NO: 2546988 NR Description: 2-dehydro-3-deoxyphosphoheptonate aldolase
  misc_feature (1)..(242): NCBI GI NO: 15219878 NR Description: 3-deoxy-D-arabino-heptulosonate 7-phosphate
  misc_feature (1)..(242): NCBI GI NO: 7488957 NR Description: probable 2-dehydro-3-deoxy-phosphoheptonatealdolase
  misc_feature (1)..(242): NCBI GI NO: 584777 NR Description: Phospho-2-dehydro-3-deoxyheptonate aldolase 1
  misc_feature (1)..(242): NCBI GI NO: 24745903 NR Description: 3-deoxy-D-arabino-heptulosonate 7-phosphatesynthase
  misc_feature (1)..(242): NCBI GI NO: 2398681 NR Description: 3-deoxy-D-arabino-heptulosonate 7-phosphatesynthase
  misc_feature (1)..(242): NCBI GI NO: 584778 NR Description: Phospho-2-dehydro-3-deoxyheptonate aldolase 2
  misc_feature (1)..(242): NCBI GI NO: 114193 NR Description: Phospho-2-dehydro-3-deoxyheptonate aldolase 1
MIRAYAQSVATLNLLRAFATGGYAAMQRVTQWNLDFMDHNEQGDRYRELAHRVDDALGFMTASGLTVDHPIMTTTDFWTSHECLLLPYEQALTREDSTSGLFYDCSAHMLWVGERTRQLDGAHVEFLRGVANPLGIKVSDKMNPSELVKLIDILNPSNKPGRITIITRMGAENMRVKLPHLIRAVRNAGLIVTWITDPMHGNTIKAPCGLKTRPFDSILAEVRASSMCMTKKEATLGASTLK

SEQ ID NO: 35263 - protein, 217 aa, Zea mays subsp. mays
  peptide (1)..(217): Ceres Seq. ID no. 12368245
  misc_feature (1)..(217): Pfam Name: Pfam Description:  Class-II DAHP synthetase family
  misc_feature (1)..(217): NCBI GI NO: 34906844 NR Description: putative phospho-2-dehydro-3-deoxyheptonatealdolase 1
  misc_feature (1)..(217): NCBI GI NO: 2398679 NR Description: 3-deoxy-D-arabino-heptulosonate 7-phosphatesynthase
  misc_feature (1)..(217): NCBI GI NO: 2546988 NR Description: 2-dehydro-3-deoxyphosphoheptonate aldolase
  misc_feature (1)..(217): NCBI GI NO: 15219878 NR Description: 3-deoxy-D-arabino-heptulosonate 7-phosphate
  misc_feature (1)..(217): NCBI GI NO: 7488957 NR Description: probable 2-dehydro-3-deoxy-phosphoheptonatealdolase
  misc_feature (1)..(217): NCBI GI NO: 584777 NR Description: Phospho-2-dehydro-3-deoxyheptonate aldolase 1
  misc_feature (1)..(217): NCBI GI NO: 24745903 NR Description: 3-deoxy-D-arabino-heptulosonate 7-phosphatesynthase
  misc_feature (1)..(217): NCBI GI NO: 2398681 NR Description: 3-deoxy-D-arabino-heptulosonate 7-phosphatesynthase
  misc_feature (1)..(217): NCBI GI NO: 584778 NR Description: Phospho-2-dehydro-3-deoxyheptonate aldolase 2
  misc_feature (1)..(217): NCBI GI NO: 114193 NR Description: Phospho-2-dehydro-3-deoxyheptonate aldolase 1
MQRVTQWNLDFMDHNEQGDRYRELAHRVDDALGFMTASGLTVDHPIMTTTDFWTSHECLLLPYEQALTREDSTSGLFYDCSAHMLWVGERTRQLDGAHVEFLRGVANPLGIKVSDKMNPSELVKLIDILNPSNKPGRITIITRMGAENMRVKLPHLIRAVRNAGLIVTWITDPMHGNTIKAPCGLKTRPFDSILAEVRASSMCMTKKEATLGASTLK

SEQ ID NO: 35264 - protein, 206 aa, Zea mays subsp. mays
  peptide (1)..(206): Ceres Seq. ID no. 12368246
  misc_feature (1)..(206): Pfam Name: Pfam Description:  Class-II DAHP synthetase family
  misc_feature (1)..(206): NCBI GI NO: 34906844 NR Description: putative phospho-2-dehydro-3-deoxyheptonatealdolase 1
  misc_feature (1)..(206): NCBI GI NO: 2398679 NR Description: 3-deoxy-D-arabino-heptulosonate 7-phosphatesynthase
  misc_feature (1)..(206): NCBI GI NO: 2546988 NR Description: 2-dehydro-3-deoxyphosphoheptonate aldolase
  misc_feature (1)..(206): NCBI GI NO: 15219878 NR Description: 3-deoxy-D-arabino-heptulosonate 7-phosphate
  misc_feature (1)..(206): NCBI GI NO: 7488957 NR Description: probable 2-dehydro-3-deoxy-phosphoheptonatealdolase
  misc_feature (1)..(206): NCBI GI NO: 584777 NR Description: Phospho-2-dehydro-3-deoxyheptonate aldolase 1
  misc_feature (1)..(206): NCBI GI NO: 24745903 NR Description: 3-deoxy-D-arabino-heptulosonate 7-phosphatesynthase
  misc_feature (1)..(206): NCBI GI NO: 2398681 NR Description: 3-deoxy-D-arabino-heptulosonate 7-phosphatesynthase
  misc_feature (1)..(206): NCBI GI NO: 584778 NR Description: Phospho-2-dehydro-3-deoxyheptonate aldolase 2
  misc_feature (1)..(206): NCBI GI NO: 114193 NR Description: Phospho-2-dehydro-3-deoxyheptonate aldolase 1
MDHNEQGDRYRELAHRVDDALGFMTASGLTVDHPIMTTTDFWTSHECLLLPYEQALTREDSTSGLFYDCSAHMLWVGERTRQLDGAHVEFLRGVANPLGIKVSDKMNPSELVKLIDILNPSNKPGRITIITRMGAENMRVKLPHLIRAVRNAGLIVTWITDPMHGNTIKAPCGLKTRPFDSILAEVRASSMCMTKKEATLGASTLK

SEQ ID NO: 35265 - DNA, 1406 bp, Zea mays subsp. mays
  misc_feature (1)..(1406): Ceres Seq. ID no. 12341374
aaaaattgcaagagtttgagccaacacacacagagagaggacaactcctcacaactctcccttccctcctgtaggggccaaaagggttagagagtaggagaagtagttccctagcccaacacaagaaaaacaagctcgatctcctcatcaccctaatccaagcaactgctttgtgtgttgggaaattcttgtgacccctgttatattattatccgtgtagctactagcttcattcccccctttgtacccatcaaatggctggcatgtctctgcaacacccctgggcgtttgctttcggtctactaggtaacgtcatctccttcatgaccttcctggccccgataccgacgttctaccgcatctacaagagcaagtcgacggaaggcttccagtcggttccctacgtggttgccctgttcagcgccatgctgtggatcttctacgcactgatcaagtccaacgagaccttcctcatcaccatcaacgccgccggctgcgtcatcgagaccatctacgtcgtcatgtacttcgtctacgcgcccaagaaagccaagctgttcacggccaagatcatggtcctcctcaatggcggcgtctttggggtcatcctcctgctcacccttctcctcttcaagggcagtaagcgcgttgtgctgcttggctggatctgcgtcggtttctccgtcagtgtcttcgtcgcgccactcagcatcatgagacgagtgatccagacgaagagcgtggagtacatgcccttctccctctccctctcgctcaccctcagcgccgtcgtctggttcctctacggcctcctcatcaaggacaaatacgtcgcgcttccaaacatcctggggttcaccttcggcgtggtccagatggtgctctacgtgttgtacatgaacaagacgccggtggcggcgactgccgagggcaaggatgccggcaagctttcctcagctgcagacgagcacgtcctcgtcaacatcgccaagctcagcccagccctcccggagaggagctccggggtgcacccagtcacccagatggcgggcgttcccgtcaggagctgcgctgctgaagcaaccgcgccggcgatgctgcccaacagggacgtggtcgacgtcttcgtcagccgacacagccccgccgtccacgtggcatagattctcgatcgatcgcgtgcatggcccatgcatgcgcccgccacacgtacgctagcttttatatattcgaaggacttgctgctggtcgtgagcatatatatgatggagaaaatgattaagtagtatatatgtaagtaattaactgccatggaagcttgctaatggatggaggcagaggccagaacgatgaagggggaagctatacatatatgtgtgtaatatagatatatggggtttgtgtcc

SEQ ID NO: 35266 - protein, 302 aa, Zea mays subsp. mays
  peptide (1)..(302): Ceres Seq. ID no. 12341375
  misc_feature (12)..(99): Pfam Name: Pfam Description:  MtN3/saliva family
  misc_feature (10)..(296): NCBI GI NO: 15241278 NR Description: MtN3-like protein; protein id: At5g50800
  misc_feature (10)..(296): NCBI GI NO: 21593109 NR Description: MtN3-like protein [Arabidopsis thaliana]
  misc_feature (1)..(252): NCBI GI NO: 15237803 NR Description: MtN3-like protein; protein id: At5g23660
  misc_feature (1)..(232): NCBI GI NO: 15229019 NR Description: MTN3-like protein; protein id: At3g48740
  misc_feature (10)..(228): NCBI GI NO: 14715258 NR Description: N3 like protein [Medicago truncatula]
  misc_feature (4)..(227): NCBI GI NO: 1619602 NR Description: MtN3 [Medicago truncatula]
  misc_feature (4)..(262): NCBI GI NO: 15234863 NR Description: MtN3 - like protein; protein id: At4g25010.1
  misc_feature (4)..(231): NCBI GI NO: 21554178 NR Description: similar to MtN3 protein [Arabidopsis thaliana]
  misc_feature (8)..(231): NCBI GI NO: 15225014 NR Description: similar to MtN3 protein; protein id: At2g39060
  misc_feature (3)..(261): NCBI GI NO: 15240040 NR Description: senescence-associated protein
MAGMSLQHPWAFAFGLLGNVISFMTFLAPIPTFYRIYKSKSTEGFQSVPYVVALFSAMLWIFYALIKSNETFLITINAAGCVIETIYVVMYFVYAPKKAKLFTAKIMVLLNGGVFGVILLLTLLLFKGSKRVVLLGWICVGFSVSVFVAPLSIMRRVIQTKSVEYMPFSLSLSLTLSAVVWFLYGLLIKDKYVALPNILGFTFGVVQMVLYVLYMNKTPVAATAEGKDAGKLSSAADEHVLVNIAKLSPALPERSSGVHPVTQMAGVPVRSCAAEATAPAMLPNRDVVDVFVSRHSPAVHVA

SEQ ID NO: 35267 - protein, 299 aa, Zea mays subsp. mays
  peptide (1)..(299): Ceres Seq. ID no. 12341376
  misc_feature (9)..(96): Pfam Name: Pfam Description:  MtN3/saliva family
  misc_feature (7)..(293): NCBI GI NO: 15241278 NR Description: MtN3-like protein; protein id: At5g50800
  misc_feature (7)..(293): NCBI GI NO: 21593109 NR Description: MtN3-like protein [Arabidopsis thaliana]
  misc_feature (1)..(249): NCBI GI NO: 15237803 NR Description: MtN3-like protein; protein id: At5g23660
  misc_feature (1)..(229): NCBI GI NO: 15229019 NR Description: MTN3-like protein; protein id: At3g48740
  misc_feature (7)..(225): NCBI GI NO: 14715258 NR Description: N3 like protein [Medicago truncatula]
  misc_feature (1)..(224): NCBI GI NO: 1619602 NR Description: MtN3 [Medicago truncatula]
  misc_feature (1)..(259): NCBI GI NO: 15234863 NR Description: MtN3 - like protein; protein id: At4g25010.1
  misc_feature (1)..(228): NCBI GI NO: 21554178 NR Description: similar to MtN3 protein [Arabidopsis thaliana]
  misc_feature (5)..(228): NCBI GI NO: 15225014 NR Description: similar to MtN3 protein; protein id: At2g39060
  misc_feature (1)..(258): NCBI GI NO: 15240040 NR Description: senescence-associated protein
MSLQHPWAFAFGLLGNVISFMTFLAPIPTFYRIYKSKSTEGFQSVPYVVALFSAMLWIFYALIKSNETFLITINAAGCVIETIYVVMYFVYAPKKAKLFTAKIMVLLNGGVFGVILLLTLLLFKGSKRVVLLGWICVGFSVSVFVAPLSIMRRVIQTKSVEYMPFSLSLSLTLSAVVWFLYGLLIKDKYVALPNILGFTFGVVQMVLYVLYMNKTPVAATAEGKDAGKLSSAADEHVLVNIAKLSPALPERSSGVHPVTQMAGVPVRSCAAEATAPAMLPNRDVVDVFVSRHSPAVHVA

SEQ ID NO: 35268 - protein, 279 aa, Zea mays subsp. mays
  peptide (1)..(279): Ceres Seq. ID no. 12341377
  misc_feature (1)..(76): Pfam Name: Pfam Description:  MtN3/saliva family
  misc_feature (1)..(273): NCBI GI NO: 15241278 NR Description: MtN3-like protein; protein id: At5g50800
  misc_feature (1)..(273): NCBI GI NO: 21593109 NR Description: MtN3-like protein [Arabidopsis thaliana]
  misc_feature (1)..(229): NCBI GI NO: 15237803 NR Description: MtN3-like protein; protein id: At5g23660
  misc_feature (1)..(209): NCBI GI NO: 15229019 NR Description: MTN3-like protein; protein id: At3g48740
  misc_feature (1)..(205): NCBI GI NO: 14715258 NR Description: N3 like protein [Medicago truncatula]
  misc_feature (1)..(204): NCBI GI NO: 1619602 NR Description: MtN3 [Medicago truncatula]
  misc_feature (1)..(239): NCBI GI NO: 15234863 NR Description: MtN3 - like protein; protein id: At4g25010.1
  misc_feature (1)..(208): NCBI GI NO: 21554178 NR Description: similar to MtN3 protein [Arabidopsis thaliana]
  misc_feature (1)..(208): NCBI GI NO: 15225014 NR Description: similar to MtN3 protein; protein id: At2g39060
  misc_feature (1)..(238): NCBI GI NO: 15240040 NR Description: senescence-associated protein
MTFLAPIPTFYRIYKSKSTEGFQSVPYVVALFSAMLWIFYALIKSNETFLITINAAGCVIETIYVVMYFVYAPKKAKLFTAKIMVLLNGGVFGVILLLTLLLFKGSKRVVLLGWICVGFSVSVFVAPLSIMRRVIQTKSVEYMPFSLSLSLTLSAVVWFLYGLLIKDKYVALPNILGFTFGVVQMVLYVLYMNKTPVAATAEGKDAGKLSSAADEHVLVNIAKLSPALPERSSGVHPVTQMAGVPVRSCAAEATAPAMLPNRDVVDVFVSRHSPAVHVA

SEQ ID NO: 35269 - DNA, 1250 bp, Zea mays subsp. mays
  misc_feature (1)..(1250): Ceres Seq. ID no. 12411217
aagtcaaggacaaggagcaaagcaaacgctgcaagcgaactcgccgccccacaaagcagtgccagggtctggctgattggctcccaccatggcatcgacctctccgcaccgctcctccggcggggatccaccttcctcgtccacgcccctcatctcctcgccgacctccccggcatccggctcctccggcggcccgctagggcggctcacgagcctccgcggcgcagcgcggttcatccggcgcacggggagccggcgtttgatgagggagccctccgtggcggtgcgggagacggctgccgagcacctagaggagcgtcagaccgactgggcctactctaagcccgtcatcgtggtcgacatgctctggaacgtcgccttcgtcgcaatcgccgcggccgtcgtcgccgcgtcgctgggcgagattcccgccgtgcctctccgcgtctggatcgcgggctacgtgctccagtgcctcctccacatcctctgcgtcacagtcgaatacaggcgtcgacgcagggacgcggaccaggagggagtgggtgttgacttcaagttcaggaggagggagcatctgaagatgacgtaaacaacctttccaaattcaaatttcggacaatgagtgatgcagacaagctagctgccggcattgcagcacctgtgggtggagtgatgacagagtgcggtaccaatcctcctgtcgaacatattctttcggctgaggatgcagagtgctgtatctgcctatgcccgtatgaagatggcgtggaactacgtgagctcccttgcaaccaccattttcactgcagctgtatagacaagtggcttcacataaatgctacatgcccattgtgcaagttcaacatcgtcaagagcaatctccacagagaagaggtctaggtcaataaggaaaaaaaaataatcatggcaacacatttcggcatgtcccatcccagctgtgctcgtcagtattgccacatttgccaactggagttgtgactacctgtcttgtagtcaagtcataaaagtcactggtgatgcgcaggtggttgcaatgtcggttctcgtgaatattccttgtaacagtttgctgcaggggctgtacattctcgttctgctcgatctgattgcattgcgatttatttgtacatgaacacgtggccatgttggatcatgaaagcggtcagtcgtttgtaaaatgattcatgaattggaggctagtatgcaggctgctatctcttgtctcg

SEQ ID NO: 35270 - protein, 167 aa, Zea mays subsp. mays
  peptide (1)..(167): Ceres Seq. ID no. 12411218
  misc_feature (1)..(167): NCBI GI NO: 33146524 NR Description: putative RES protein
  misc_feature (1)..(145): NCBI GI NO: 9502381 NR Description: T12C24.29 [Arabidopsis thaliana]
  misc_feature (1)..(145): NCBI GI NO: 15222059 NR Description: unknown protein; protein id: At1g12760.1
  misc_feature (14)..(153): NCBI GI NO: 18413629 NR Description: putative protein; protein id: At4g11680
  misc_feature (14)..(153): NCBI GI NO: 7487667 NR Description: hypothetical protein T5C23
  misc_feature (59)..(155): NCBI GI NO: 38344371 NR Description: OSJNBb0032E06.5
  misc_feature (16)..(148): NCBI GI NO: 18407748 NR Description: expressed protein; protein id: At1g63170
  misc_feature (16)..(148): NCBI GI NO: 21554228 NR Description: unknown [Arabidopsis thaliana]
  misc_feature (16)..(148): NCBI GI NO: 16604388 NR Description: At1g63170/F16M19_7 [Arabidopsis thaliana]
  misc_feature (17)..(144): NCBI GI NO: 18411876 NR Description: putative protein; protein id: At3g61180
MASTSPHRSSGGDPPSSSTPLISSPTSPASGSSGGPLGRLTSLRGAARFIRRTGSRRLMREPSVAVRETAAEHLEERQTDWAYSKPVIVVDMLWNVAFVAIAAAVVAASLGEIPAVPLRVWIAGYVLQCLLHILCVTVEYRRRRRDADQEGVGVDFKFRRREHLKMT

SEQ ID NO: 35271 - protein, 113 aa, Zea mays subsp. mays
  peptide (1)..(113): Ceres Seq. ID no. 12411219
KSRTRSKANAASELAAPQSSARVWLIGSHHGIDLSAPLLRRGSTFLVHAPHLLADLPGIRLLRRPARAAHEPPRRSAVHPAHGEPAFDEGALRGGAGDGCRAPRGASDRLGLL

SEQ ID NO: 35272 - protein, 109 aa, Zea mays subsp. mays
  peptide (1)..(109): Ceres Seq. ID no. 12411220
  misc_feature (1)..(109): NCBI GI NO: 33146524 NR Description: putative RES protein
  misc_feature (1)..(87): NCBI GI NO: 9502381 NR Description: T12C24.29 [Arabidopsis thaliana]
  misc_feature (1)..(87): NCBI GI NO: 15222059 NR Description: unknown protein; protein id: At1g12760.1
  misc_feature (1)..(95): NCBI GI NO: 18413629 NR Description: putative protein; protein id: At4g11680
  misc_feature (1)..(95): NCBI GI NO: 7487667 NR Description: hypothetical protein T5C23
  misc_feature (1)..(97): NCBI GI NO: 38344371 NR Description: OSJNBb0032E06.5
  misc_feature (1)..(90): NCBI GI NO: 18407748 NR Description: expressed protein; protein id: At1g63170
  misc_feature (1)..(90): NCBI GI NO: 21554228 NR Description: unknown [Arabidopsis thaliana]
  misc_feature (1)..(90): NCBI GI NO: 16604388 NR Description: At1g63170/F16M19_7 [Arabidopsis thaliana]
  misc_feature (1)..(86): NCBI GI NO: 18411876 NR Description: putative protein; protein id: At3g61180
MREPSVAVRETAAEHLEERQTDWAYSKPVIVVDMLWNVAFVAIAAAVVAASLGEIPAVPLRVWIAGYVLQCLLHILCVTVEYRRRRRDADQEGVGVDFKFRRREHLKMT

SEQ ID NO: 35273 - DNA, 1597 bp, Zea mays subsp. mays
  misc_feature (1)..(1597): Ceres Seq. ID no. 12411213
gtcaccgtccgtcgtcgcagacgagcccagtggcgactggcgattcgctttcgaaccgcagtcgtccctgctgtgttcccggttccctcccttcctcctcctatagttggcttctcgccaccctctgccttcgaccaactttctcccttctcccctccccgttcccctctccaactccaatccatggcctccacggatcgctccgcgccggcggaggaccagcaacagccgcagcgcccgtccctcttctcgccgtaccagatgccccacttccgcctcgcgcaccgggtggtgctggcgccgatgaccaggtgccgggcgcccgatgcgctcccgggccccgcgctcgcggagtactacgcgcagcggtccacggaaggcggcttgctcatctccgagggcaccatcatctcgcccgccagccctgggttccctcgtgtccctgggatatacaatcaagagcagactgatgcatggaaaaaggtggttgatgctgttcatgccaagggagccatctttttctgccaactatggcatgtaggtcgagcttctcaccaagtatatcagccgggtggttctgctccaatatcctctactgataaaccaatatcatcaagatggaggatactgatgcccgatggatcctatggcaagtatccaactccgaggcgcctagccacatccgagataccagaaattgtcgagcaataccgacaggctgccataaacgccatcaaagcaggtttcgatggcatcgagatccacggtgcccatggctacctaatcgaccagttcctcaaggacggtatcaacgacagggctgacgagtacggtggctcactctccaaccgctgccggttcctcctggaggtgacgcgcgccgtggtctccgcgataggggcagaccgggtggcggtccgggtgtccccggccatcgaccacctcgacgcgtacgactccaacccgctgcagctcggcctggccgtagtggaccgcctcaacgctctccaggaggagaccgggcggctggcctacctgcacgtgacgcagccacggtacacggcgtacgggcagacggagtccggccagcacgggagcgccgaggaggagagccggctgatgcgcgccctgcggggcgcctaccgcggcacgttcatgtgcagcggtgggtacacgcgcgagctcggcgtggaggccgtcgagtcgtgggacgccgacctggtgtcctacgggcggctgttcatcgctaacccggacctggtggagcggttccggcgcgacgccccgctgaacagatacgtgcgcaagacgttctacaccccggatcccgtcgttggttacacggactacccgttcctcggccagcctaaggcgcgcatgtgattattagttaggttggtaactataagaggcggactattgttcgtgtattgtggcttgagaaaataagcaaacacatggtggtagtgctgtgcaataagccttaggtgcaaacatgagcctcctgggcctttagataatgatctaattatagatgtaattatagttttgtcaagaagttaatgtttatttgcacagcaatcagcagtcatctctc

SEQ ID NO: 35274 - protein, 460 aa, Zea mays subsp. mays
  peptide (1)..(460): Ceres Seq. ID no. 12411214
  misc_feature (82)..(431): Pfam Name: Pfam Description:  NADH:flavin oxidoreductase / NADH oxidase family
  misc_feature (71)..(453): NCBI GI NO: 12056507 NR Description: 12-oxophytodienoate reductase 3
  misc_feature (81)..(460): NCBI GI NO: 6707797 NR Description: 12-oxo-phytodienoate reductase
  misc_feature (81)..(460): NCBI GI NO: 5059115 NR Description: OPDA-reductase homolog [Arabidopsis thaliana]
  misc_feature (81)..(460): NCBI GI NO: 10242314 NR Description: 12-oxo-phytodienoate reductase
  misc_feature (81)..(460): NCBI GI NO: 7688991 NR Description: 12-oxo-phytodienoate reductase
  misc_feature (81)..(460): NCBI GI NO: 15225045 NR Description: 12-oxophytodienoate reductase
  misc_feature (69)..(453): NCBI GI NO: 23495288 NR Description: 12-oxophytodienoic acid reductase [Oryza sativa]
  misc_feature (74)..(453): NCBI GI NO: 40645459 NR Description: LEDI-5c protein [Lithospermum erythrorhizon]
  misc_feature (62)..(453): NCBI GI NO: 7449901 NR Description: probable 12-oxophytodienoate reductase (EC1
  misc_feature (73)..(453): NCBI GI NO: 14277800 NR Description: Chain A
VTVRRRRRAQWRLAIRFRTAVVPAVFPVPSLPPPIVGFSPPSAFDQLSPFSPPRSPLQLQSMASTDRSAPAEDQQQPQRPSLFSPYQMPHFRLAHRVVLAPMTRCRAPDALPGPALAEYYAQRSTEGGLLISEGTIISPASPGFPRVPGIYNQEQTDAWKKVVDAVHAKGAIFFCQLWHVGRASHQVYQPGGSAPISSTDKPISSRWRILMPDGSYGKYPTPRRLATSEIPEIVEQYRQAAINAIKAGFDGIEIHGAHGYLIDQFLKDGINDRADEYGGSLSNRCRFLLEVTRAVVSAIGADRVAVRVSPAIDHLDAYDSNPLQLGLAVVDRLNALQEETGRLAYLHVTQPRYTAYGQTESGQHGSAEEESRLMRALRGAYRGTFMCSGGYTRELGVEAVESWDADLVSYGRLFIANPDLVERFRRDAPLNRYVRKTFYTPDPVVGYTDYPFLGQPKARM

SEQ ID NO: 35275 - protein, 399 aa, Zea mays subsp. mays
  peptide (1)..(399): Ceres Seq. ID no. 12411215
  misc_feature (21)..(370): Pfam Name: Pfam Description:  NADH:flavin oxidoreductase / NADH oxidase family
  misc_feature (10)..(392): NCBI GI NO: 12056507 NR Description: 12-oxophytodienoate reductase 3
  misc_feature (20)..(399): NCBI GI NO: 6707797 NR Description: 12-oxo-phytodienoate reductase
  misc_feature (20)..(399): NCBI GI NO: 5059115 NR Description: OPDA-reductase homolog [Arabidopsis thaliana]
  misc_feature (20)..(399): NCBI GI NO: 10242314 NR Description: 12-oxo-phytodienoate reductase
  misc_feature (20)..(399): NCBI GI NO: 7688991 NR Description: 12-oxo-phytodienoate reductase
  misc_feature (20)..(399): NCBI GI NO: 15225045 NR Description: 12-oxophytodienoate reductase
  misc_feature (8)..(392): NCBI GI NO: 23495288 NR Description: 12-oxophytodienoic acid reductase [Oryza sativa]
  misc_feature (13)..(392): NCBI GI NO: 40645459 NR Description: LEDI-5c protein [Lithospermum erythrorhizon]
  misc_feature (1)..(392): NCBI GI NO: 7449901 NR Description: probable 12-oxophytodienoate reductase (EC1
  misc_feature (12)..(392): NCBI GI NO: 14277800 NR Description: Chain A
MASTDRSAPAEDQQQPQRPSLFSPYQMPHFRLAHRVVLAPMTRCRAPDALPGPALAEYYAQRSTEGGLLISEGTIISPASPGFPRVPGIYNQEQTDAWKKVVDAVHAKGAIFFCQLWHVGRASHQVYQPGGSAPISSTDKPISSRWRILMPDGSYGKYPTPRRLATSEIPEIVEQYRQAAINAIKAGFDGIEIHGAHGYLIDQFLKDGINDRADEYGGSLSNRCRFLLEVTRAVVSAIGADRVAVRVSPAIDHLDAYDSNPLQLGLAVVDRLNALQEETGRLAYLHVTQPRYTAYGQTESGQHGSAEEESRLMRALRGAYRGTFMCSGGYTRELGVEAVESWDADLVSYGRLFIANPDLVERFRRDAPLNRYVRKTFYTPDPVVGYTDYPFLGQPKARM

SEQ ID NO: 35276 - protein, 373 aa, Zea mays subsp. mays
  peptide (1)..(373): Ceres Seq. ID no. 12411216
  misc_feature (1)..(344): Pfam Name: Pfam Description:  NADH:flavin oxidoreductase / NADH oxidase family
  misc_feature (1)..(366): NCBI GI NO: 12056507 NR Description: 12-oxophytodienoate reductase 3
  misc_feature (1)..(373): NCBI GI NO: 6707797 NR Description: 12-oxo-phytodienoate reductase
  misc_feature (1)..(373): NCBI GI NO: 5059115 NR Description: OPDA-reductase homolog [Arabidopsis thaliana]
  misc_feature (1)..(373): NCBI GI NO: 10242314 NR Description: 12-oxo-phytodienoate reductase
  misc_feature (1)..(373): NCBI GI NO: 7688991 NR Description: 12-oxo-phytodienoate reductase
  misc_feature (1)..(373): NCBI GI NO: 15225045 NR Description: 12-oxophytodienoate reductase
  misc_feature (1)..(366): NCBI GI NO: 23495288 NR Description: 12-oxophytodienoic acid reductase [Oryza sativa]
  misc_feature (1)..(366): NCBI GI NO: 40645459 NR Description: LEDI-5c protein [Lithospermum erythrorhizon]
  misc_feature (1)..(366): NCBI GI NO: 7449901 NR Description: probable 12-oxophytodienoate reductase (EC1
  misc_feature (1)..(366): NCBI GI NO: 14277800 NR Description: Chain A
MPHFRLAHRVVLAPMTRCRAPDALPGPALAEYYAQRSTEGGLLISEGTIISPASPGFPRVPGIYNQEQTDAWKKVVDAVHAKGAIFFCQLWHVGRASHQVYQPGGSAPISSTDKPISSRWRILMPDGSYGKYPTPRRLATSEIPEIVEQYRQAAINAIKAGFDGIEIHGAHGYLIDQFLKDGINDRADEYGGSLSNRCRFLLEVTRAVVSAIGADRVAVRVSPAIDHLDAYDSNPLQLGLAVVDRLNALQEETGRLAYLHVTQPRYTAYGQTESGQHGSAEEESRLMRALRGAYRGTFMCSGGYTRELGVEAVESWDADLVSYGRLFIANPDLVERFRRDAPLNRYVRKTFYTPDPVVGYTDYPFLGQPKARM

SEQ ID NO: 35277 - DNA, 1561 bp, Zea mays subsp. mays
  misc_feature (1)..(1561): Ceres Seq. ID no. 12411207
aaaattcacgctgagccgccgcctgttccacggttccacctctccaaaccaaaaactcctaggttttctaaacgtgaattccaatcactgcacacgcggtcgtttcggtgtgatttgccaggaagagggggcgaattcgtggtgctaaaagagaccccatctggtgcggttctggggttcgaggagcggcgaggcaggtgggaaatgagggatgtggtcgtggttgacgaagattgcgtccgcgtgcttgggcccggtccggaggtgcgcgcgtacgaggaaggatgaggacgacagcgataatggccgcggcgtcgccgacgacctgctgtggtcgcgggacctcgggcgccacgcggcggggtcagttctcgtttgccgtcgtgcaggccaacgaggcgttggaggaccacagccaagtggagacaggctctgccgcaactttcgtaggcgtctacgacggtcatggcggcgctgaggctgcccgcttcatatctgaccacctcttcgcacacctcattcgacttgctcaggaaaatggaacaatatctgaggatgttgttcggagtgcgttttctgctacggaggaaggcttcttgacactcgtgcggagaacacgttttataaagcctttgattgctgcggttggatcctgctgtctagttggtgtcatatggagaggaacactatatgtggctaatctaggcgattccagggctgttattggcgttctaggtagatcaaacaagatcgtggctgagccactcacaagagatcataatgcaagtagggaggaggtcaggcaggagcttatatcccgtcatccagatgattctcaaattgtggttctcaagcatggtgtttggcgcatcaagggcataattcaggtttcaagaacaattggagatgcttacttgaagaggcgggaatttgctcttgatccatctatcactcgtttccgcctttcggagcctctccgccagcctgttctcacagcagagccatctatctatacaagggtgcttaacccacaagataaatttattatttttgcatctgatggtctttgggagcacttgacaaatcaacaggccgttgaaattgtccacagcaatccacgatcaggaattgcaaagaggctggtaacggcagcgttgaaacaagctgcacggaagagggaaatgaggtatgatgacctcaggaaagttgagaagggaattcgccgcttcttccacgatgacattacagtagttgttgtttacatagatcacggattactgcaagagagggatacttccgtgccagagctctcagtccgtggctttgttgactccgttggcccctcaaatttctcagggataaccgccatatcatgactcactactaatcgagcagcacaattttggtgtacggcattcaagtagcatttgactatctgagtgttatgctttaccaggcttttgcttttagtattgcctttatattgagtactactacaatacttcatgtcgctttgttttcaaaaatactttatgtcaattttgcaagtctgatttgctcc

SEQ ID NO: 35278 - protein, 363 aa, Zea mays subsp. mays
  peptide (1)..(363): Ceres Seq. ID no. 12411208
  misc_feature (27)..(299): Pfam Name: Pfam Description:  Protein phosphatase 2C
  misc_feature (27)..(363): NCBI GI NO: 38346816 NR Description: OSJNBa0088A01.23
  misc_feature (27)..(357): NCBI GI NO: 18415301 NR Description: protein phosphatase 2C-like; protein id:At5g06750
  misc_feature (27)..(357): NCBI GI NO: 21536936 NR Description: protein phosphatase 2C-like [Arabidopsis thaliana]
  misc_feature (27)..(357): NCBI GI NO: 9759303 NR Description: protein phosphatase 2C-like [Arabidopsis thaliana]
  misc_feature (27)..(346): NCBI GI NO: 15239244 NR Description: protein phosphatase 2C-like protein
  misc_feature (21)..(346): NCBI GI NO: 20340237 NR Description: protein phosphatase 2c-like protein
  misc_feature (21)..(354): NCBI GI NO: 9294356 NR Description: protein phosphatase 2C [Arabidopsis thaliana]
  misc_feature (21)..(354): NCBI GI NO: 15230540 NR Description: protein phosphatase 2C, putative
  misc_feature (21)..(346): NCBI GI NO: 13357263 NR Description: putative protein phosphatase 2C
  misc_feature (21)..(346): NCBI GI NO: 37536574 NR Description: putative protein phosphatase 2C
MRTTAIMAAASPTTCCGRGTSGATRRGQFSFAVVQANEALEDHSQVETGSAATFVGVYDGHGGAEAARFISDHLFAHLIRLAQENGTISEDVVRSAFSATEEGFLTLVRRTRFIKPLIAAVGSCCLVGVIWRGTLYVANLGDSRAVIGVLGRSNKIVAEPLTRDHNASREEVRQELISRHPDDSQIVVLKHGVWRIKGIIQVSRTIGDAYLKRREFALDPSITRFRLSEPLRQPVLTAEPSIYTRVLNPQDKFIIFASDGLWEHLTNQQAVEIVHSNPRSGIAKRLVTAALKQAARKREMRYDDLRKVEKGIRRFFHDDITVVVVYIDHGLLQERDTSVPELSVRGFVDSVGPSNFSGITAIS

SEQ ID NO: 35279 - protein, 357 aa, Zea mays subsp. mays
  peptide (1)..(357): Ceres Seq. ID no. 12411209
  misc_feature (21)..(293): Pfam Name: Pfam Description:  Protein phosphatase 2C
  misc_feature (21)..(357): NCBI GI NO: 38346816 NR Description: OSJNBa0088A01.23
  misc_feature (21)..(351): NCBI GI NO: 18415301 NR Description: protein phosphatase 2C-like; protein id:At5g06750
  misc_feature (21)..(351): NCBI GI NO: 21536936 NR Description: protein phosphatase 2C-like [Arabidopsis thaliana]
  misc_feature (21)..(351): NCBI GI NO: 9759303 NR Description: protein phosphatase 2C-like [Arabidopsis thaliana]
  misc_feature (21)..(340): NCBI GI NO: 15239244 NR Description: protein phosphatase 2C-like protein
  misc_feature (15)..(340): NCBI GI NO: 20340237 NR Description: protein phosphatase 2c-like protein
  misc_feature (15)..(348): NCBI GI NO: 9294356 NR Description: protein phosphatase 2C [Arabidopsis thaliana]
  misc_feature (15)..(348): NCBI GI NO: 15230540 NR Description: protein phosphatase 2C, putative
  misc_feature (15)..(340): NCBI GI NO: 13357263 NR Description: putative protein phosphatase 2C
  misc_feature (15)..(340): NCBI GI NO: 37536574 NR Description: putative protein phosphatase 2C
MAAASPTTCCGRGTSGATRRGQFSFAVVQANEALEDHSQVETGSAATFVGVYDGHGGAEAARFISDHLFAHLIRLAQENGTISEDVVRSAFSATEEGFLTLVRRTRFIKPLIAAVGSCCLVGVIWRGTLYVANLGDSRAVIGVLGRSNKIVAEPLTRDHNASREEVRQELISRHPDDSQIVVLKHGVWRIKGIIQVSRTIGDAYLKRREFALDPSITRFRLSEPLRQPVLTAEPSIYTRVLNPQDKFIIFASDGLWEHLTNQQAVEIVHSNPRSGIAKRLVTAALKQAARKREMRYDDLRKVEKGIRRFFHDDITVVVVYIDHGLLQERDTSVPELSVRGFVDSVGPSNFSGITAIS

SEQ ID NO: 35280 - DNA, 980 bp, Zea mays subsp. mays
  misc_feature (1)..(980): Ceres Seq. ID no. 13637386
  misc_feature (910)..(910): n is a, c, t, g, unknown, or other
  misc_feature (769)..(769): n is a, c, t, g, unknown, or other
  misc_feature (966)..(966): n is a, c, t, g, unknown, or other
ctctccgtcgcatttcccgtccggtctttccgttacccggcggcttaaaccctagttcccattccatcttcgtttccgctccgccgccgtcgatggagttctggggtctcgaggtcaaacctggatccactgtcaagtgtgagcctggacatggctttatcctgcacgtttcccaggctgcccttggggaatcaaagaaaagtgacagtgccttaatgtatgtcaaagttgatgacaagaagcttgccattggaacgctctctatcgacaaatacccacagatacaattcgatttggttttcaataaagagtttgagctgtcacacacatcgaaaactaccagtgtatttttctctggttacaaggttgagcagccaattgagggagatgaaatggatcttgattctgaggatgaagaggaggagctaaacattccagtaatcaaggaaaatggcaaaggtgatgggaaggaggagcagaaaaatcaagagaaggcagtagctgctacagcttcaaaatcaagtcttggccttgaaaagaaaagcaaggatgactctgatgattctgatgaggatgagtctgatgattctgatgaggatgattctgatgattctgatgagggcgagggattatctcctgacgaaggcgatgatgattcaagtgatgaggatgataccagtgatgatgacgaggaagaaaccccaactcctaaaaagccagaggcaggcaagaagagaggtgctgaaaatgctctgaaaacgcctctttntgataagaaagcaaaggttgccacaccgccagcccagaaaacaggtggcaagaagggtgccacccatgtggcaactccacacccagcaaaaggcaagacccctgcaaacaatgacaaatcaacggagaagtctccaaaatntggtgggtcagtcccttgcaaatcatgcaacaagacattcaatagtgagatggctntgcaggctcagctc

SEQ ID NO: 35281 - protein, 326 aa, Zea mays subsp. mays
  peptide (1)..(326): Ceres Seq. ID no. 13637387
  misc_feature (54)..(230): Pfam Name: Pfam Description:  Nucleoplasmin
  misc_feature (31)..(324): NCBI GI NO: 7716948 NR Description: histone deacetylase 2 isoform b [Zea mays]
  misc_feature (31)..(324): NCBI GI NO: 7489751 NR Description: histone deacetylase (EC 3
  misc_feature (31)..(324): NCBI GI NO: 7716950 NR Description: histone deacetylase 2 isoform c [Zea mays]
  misc_feature (31)..(324): NCBI GI NO: 7804960 NR Description: putative histone deacetylase HD2 [Oryza sativa]
  misc_feature (31)..(323): NCBI GI NO: 22597156 NR Description: nucleolar histone deacetylase HD2-P39
  misc_feature (31)..(324): NCBI GI NO: 7804963 NR Description: putative histone deacetylase HD2c
  misc_feature (31)..(324): NCBI GI NO: 11282318 NR Description: histone deacetylase-like protein
  misc_feature (31)..(318): NCBI GI NO: 25352191 NR Description: probable histone deacetylase (EC 3.5.1.-)
  misc_feature (31)..(318): NCBI GI NO: 30688577 NR Description: histone deacetylase-related protein
  misc_feature (31)..(310): NCBI GI NO: 14550106 NR Description: HD2 type histone deacetylase HDA106 [Zea mays]
  misc_feature (256)..(256): Xaa is any aa, unknown or other
  misc_feature (303)..(303): Xaa is any aa, unknown or other
  misc_feature (322)..(322): Xaa is any aa, unknown or other
LRRISRPVFPLPGGLNPSSHSIFVSAPPPSMEFWGLEVKPGSTVKCEPGHGFILHVSQAALGESKKSDSALMYVKVDDKKLAIGTLSIDKYPQIQFDLVFNKEFELSHTSKTTSVFFSGYKVEQPIEGDEMDLDSEDEEEELNIPVIKENGKGDGKEEQKNQEKAVAATASKSSLGLEKKSKDDSDDSDEDESDDSDEDDSDDSDEGEGLSPDEGDDDSSDEDDTSDDDEEETPTPKKPEAGKKRGAENALKTPLXDKKAKVATPPAQKTGGKKGATHVATPHPAKGKTPANNDKSTEKSPKXGGSVPCKSCNKTFNSEMAXQAQL

SEQ ID NO: 35282 - protein, 296 aa, Zea mays subsp. mays
  peptide (1)..(296): Ceres Seq. ID no. 13637388
  misc_feature (24)..(200): Pfam Name: Pfam Description:  Nucleoplasmin
  misc_feature (1)..(294): NCBI GI NO: 7716948 NR Description: histone deacetylase 2 isoform b [Zea mays]
  misc_feature (1)..(294): NCBI GI NO: 7489751 NR Description: histone deacetylase (EC 3
  misc_feature (1)..(294): NCBI GI NO: 7716950 NR Description: histone deacetylase 2 isoform c [Zea mays]
  misc_feature (1)..(294): NCBI GI NO: 7804960 NR Description: putative histone deacetylase HD2 [Oryza sativa]
  misc_feature (1)..(293): NCBI GI NO: 22597156 NR Description: nucleolar histone deacetylase HD2-P39
  misc_feature (1)..(294): NCBI GI NO: 7804963 NR Description: putative histone deacetylase HD2c
  misc_feature (1)..(294): NCBI GI NO: 11282318 NR Description: histone deacetylase-like protein
  misc_feature (1)..(288): NCBI GI NO: 25352191 NR Description: probable histone deacetylase (EC 3.5.1.-)
  misc_feature (1)..(288): NCBI GI NO: 30688577 NR Description: histone deacetylase-related protein
  misc_feature (1)..(280): NCBI GI NO: 14550106 NR Description: HD2 type histone deacetylase HDA106 [Zea mays]
  misc_feature (226)..(226): Xaa is any aa, unknown or other
  misc_feature (273)..(273): Xaa is any aa, unknown or other
  misc_feature (292)..(292): Xaa is any aa, unknown or other
MEFWGLEVKPGSTVKCEPGHGFILHVSQAALGESKKSDSALMYVKVDDKKLAIGTLSIDKYPQIQFDLVFNKEFELSHTSKTTSVFFSGYKVEQPIEGDEMDLDSEDEEEELNIPVIKENGKGDGKEEQKNQEKAVAATASKSSLGLEKKSKDDSDDSDEDESDDSDEDDSDDSDEGEGLSPDEGDDDSSDEDDTSDDDEEETPTPKKPEAGKKRGAENALKTPLXDKKAKVATPPAQKTGGKKGATHVATPHPAKGKTPANNDKSTEKSPKXGGSVPCKSCNKTFNSEMAXQAQL

SEQ ID NO: 35283 - protein, 255 aa, Zea mays subsp. mays
  peptide (1)..(255): Ceres Seq. ID no. 13637389
  misc_feature (1)..(159): Pfam Name: Pfam Description:  Nucleoplasmin
  misc_feature (1)..(253): NCBI GI NO: 7716948 NR Description: histone deacetylase 2 isoform b [Zea mays]
  misc_feature (1)..(253): NCBI GI NO: 7489751 NR Description: histone deacetylase (EC 3
  misc_feature (1)..(253): NCBI GI NO: 7716950 NR Description: histone deacetylase 2 isoform c [Zea mays]
  misc_feature (1)..(253): NCBI GI NO: 7804960 NR Description: putative histone deacetylase HD2 [Oryza sativa]
  misc_feature (1)..(252): NCBI GI NO: 22597156 NR Description: nucleolar histone deacetylase HD2-P39
  misc_feature (1)..(253): NCBI GI NO: 7804963 NR Description: putative histone deacetylase HD2c
  misc_feature (1)..(253): NCBI GI NO: 11282318 NR Description: histone deacetylase-like protein
  misc_feature (1)..(247): NCBI GI NO: 25352191 NR Description: probable histone deacetylase (EC 3.5.1.-)
  misc_feature (1)..(247): NCBI GI NO: 30688577 NR Description: histone deacetylase-related protein
  misc_feature (1)..(239): NCBI GI NO: 14550106 NR Description: HD2 type histone deacetylase HDA106 [Zea mays]
  misc_feature (185)..(185): Xaa is any aa, unknown or other
  misc_feature (232)..(232): Xaa is any aa, unknown or other
  misc_feature (251)..(251): Xaa is any aa, unknown or other
MYVKVDDKKLAIGTLSIDKYPQIQFDLVFNKEFELSHTSKTTSVFFSGYKVEQPIEGDEMDLDSEDEEEELNIPVIKENGKGDGKEEQKNQEKAVAATASKSSLGLEKKSKDDSDDSDEDESDDSDEDDSDDSDEGEGLSPDEGDDDSSDEDDTSDDDEEETPTPKKPEAGKKRGAENALKTPLXDKKAKVATPPAQKTGGKKGATHVATPHPAKGKTPANNDKSTEKSPKXGGSVPCKSCNKTFNSEMAXQAQL

SEQ ID NO: 35284 - DNA, 1681 bp, Zea mays subsp. mays
  misc_feature (1)..(1681): Ceres Seq. ID no. 12411203
aaattccagtccgatttggacattgtcttcgtctccttcatcccctgcccacctgttctgctctgccgccgccgccgctgccgctcccgctgccgcaggaaccctagaccacgctgagcaacccccggcctacacggcgtagctttgcaggaaatggaatacggcgccgtcctcgccgccgcgccgctcgtcgcacggccgaactggctcctcctctcgccgccgccactggcgccgtctattcagattcagaatcgtctttattcgatctcgtcattcccactaaaggctggacctgtaagggcatgcagagctttagcaagcaactacacgcaaacatctgaaacagttgatttggactgggagaacctgggttttgggattgtgcaaactgattatatgtatattgctaagtgcgggacagacgggaatttttctgagggtgaaatggtgccttttggacctatagcgctgagtccatcttctggagtcctaaattatggacagggattgtttgagggcctaaaggcgtataagaaaactgatggatccatcctattatttcgcccagaggaaaatgctgagaggatgcggacaggtgctgagaggatgtgcatgcctgcaccctctgtcgagcagtttattgatgcagtaaaacaaaccgttcttgcaaataagagatggattcctcctactggtaaaggttctctttatattaggcccttacttatgggaagtggggctgttcttggtcttgcacctgctcctgagtatacattcattatatttgtctctcctgttggaaactactttaaggaaggtttagcaccaataaatttgatagttgaagacaagttccatcgtgctactcctggtggtactgggggtgtgaagaccataggaaattatgcttcggtgttgatggcacagaaaattgcaaaggaaaagggttattctgatgtcctctacttggacgctgttcacaagaagtaccttgaagaagtttcttcatgcaatgtttttgttgtcaaggacaatgttatttctaccccagcaataaaaggaacaatattacctggtatcacaaggaaaagtataattgacgttgctttgagtaaaggcttccaggttgaggagcggcttgtttcagtggatgaactgcttgatgctgatgaggtattctgcacaggaactgctgttgtggtgtctcctgttgggagcattacatatcaagggaaaagagtggaatacggccaccaaggtgttggcgttgtgtcccagcagctgtacacttcactgacgagtcttcagatgggtcaaaccgaggattggatgggctggactgtgcaacctgaattagttggccgtggttcgtggatcattcccaacagatgatgggttcgcaagatccaaatctggaggatcacaaccatgtgtacctcttcggttacagttttgtagtgtcttatgcgatggcgtcctgcctgtatatttcttagacggtatttaaaccataaaacagtattcgtctgtacgactgtacccttcagttctgtagcatctgccggagacgagtactagttttgttattttctttcttttacaaaccaagaacagttctatagttttattgtagacactggaccatcatatgatctcaatgggtagctttttccttttt

SEQ ID NO: 35285 - protein, 413 aa, Zea mays subsp. mays
  peptide (1)..(413): Ceres Seq. ID no. 12411204
  misc_feature (96)..(383): Pfam Name: Pfam Description:  Aminotransferase class IV
  misc_feature (141)..(399): NCBI GI NO: 37536656 NR Description: putative aminotransferase
  misc_feature (1)..(112): NCBI GI NO: 37536656 NR Description: putative aminotransferase
  misc_feature (4)..(399): NCBI GI NO: 34902362 NR Description: Putative aminotransferase
  misc_feature (21)..(398): NCBI GI NO: 18408919 NR Description: branched-chain-amino-acid transaminase -like
  misc_feature (21)..(398): NCBI GI NO: 21593211 NR Description: branched-chain-amino-acid transaminase-like
  misc_feature (50)..(399): NCBI GI NO: 26391655 NR Description: Branched-chain amino acid aminotransferase 5
  misc_feature (63)..(399): NCBI GI NO: 6319167 NR Description: branched-chain amino acid aminotransferase
  misc_feature (21)..(398): NCBI GI NO: 11280250 NR Description: branched-chain-amino-acid transaminase-like
  misc_feature (50)..(399): NCBI GI NO: 15239157 NR Description: branched-chain amino acid aminotransferase
  misc_feature (55)..(398): NCBI GI NO: 6319165 NR Description: branched-chain amino acid aminotransferase
MEYGAVLAAAPLVARPNWLLLSPPPLAPSIQIQNRLYSISSFPLKAGPVRACRALASNYTQTSETVDLDWENLGFGIVQTDYMYIAKCGTDGNFSEGEMVPFGPIALSPSSGVLNYGQGLFEGLKAYKKTDGSILLFRPEENAERMRTGAERMCMPAPSVEQFIDAVKQTVLANKRWIPPTGKGSLYIRPLLMGSGAVLGLAPAPEYTFIIFVSPVGNYFKEGLAPINLIVEDKFHRATPGGTGGVKTIGNYASVLMAQKIAKEKGYSDVLYLDAVHKKYLEEVSSCNVFVVKDNVISTPAIKGTILPGITRKSIIDVALSKGFQVEERLVSVDELLDADEVFCTGTAVVVSPVGSITYQGKRVEYGHQGVGVVSQQLYTSLTSLQMGQTEDWMGWTVQPELVGRGSWIIPNR

SEQ ID NO: 35286 - protein, 331 aa, Zea mays subsp. mays
  peptide (1)..(331): Ceres Seq. ID no. 12411205
  misc_feature (14)..(301): Pfam Name: Pfam Description:  Aminotransferase class IV
  misc_feature (59)..(317): NCBI GI NO: 37536656 NR Description: putative aminotransferase
  misc_feature (1)..(30): NCBI GI NO: 37536656 NR Description: putative aminotransferase
  misc_feature (1)..(317): NCBI GI NO: 34902362 NR Description: Putative aminotransferase
  misc_feature (1)..(316): NCBI GI NO: 18408919 NR Description: branched-chain-amino-acid transaminase -like
  misc_feature (1)..(316): NCBI GI NO: 21593211 NR Description: branched-chain-amino-acid transaminase-like
  misc_feature (1)..(317): NCBI GI NO: 26391655 NR Description: Branched-chain amino acid aminotransferase 5
  misc_feature (1)..(317): NCBI GI NO: 6319167 NR Description: branched-chain amino acid aminotransferase
  misc_feature (1)..(316): NCBI GI NO: 11280250 NR Description: branched-chain-amino-acid transaminase-like
  misc_feature (1)..(317): NCBI GI NO: 15239157 NR Description: branched-chain amino acid aminotransferase
  misc_feature (1)..(316): NCBI GI NO: 6319165 NR Description: branched-chain amino acid aminotransferase
MYIAKCGTDGNFSEGEMVPFGPIALSPSSGVLNYGQGLFEGLKAYKKTDGSILLFRPEENAERMRTGAERMCMPAPSVEQFIDAVKQTVLANKRWIPPTGKGSLYIRPLLMGSGAVLGLAPAPEYTFIIFVSPVGNYFKEGLAPINLIVEDKFHRATPGGTGGVKTIGNYASVLMAQKIAKEKGYSDVLYLDAVHKKYLEEVSSCNVFVVKDNVISTPAIKGTILPGITRKSIIDVALSKGFQVEERLVSVDELLDADEVFCTGTAVVVSPVGSITYQGKRVEYGHQGVGVVSQQLYTSLTSLQMGQTEDWMGWTVQPELVGRGSWIIPNR

SEQ ID NO: 35287 - protein, 315 aa, Zea mays subsp. mays
  peptide (1)..(315): Ceres Seq. ID no. 12411206
  misc_feature (1)..(285): Pfam Name: Pfam Description:  Aminotransferase class IV
  misc_feature (43)..(301): NCBI GI NO: 37536656 NR Description: putative aminotransferase
  misc_feature (1)..(14): NCBI GI NO: 37536656 NR Description: putative aminotransferase
  misc_feature (1)..(301): NCBI GI NO: 34902362 NR Description: Putative aminotransferase
  misc_feature (1)..(300): NCBI GI NO: 18408919 NR Description: branched-chain-amino-acid transaminase -like
  misc_feature (1)..(300): NCBI GI NO: 21593211 NR Description: branched-chain-amino-acid transaminase-like
  misc_feature (1)..(301): NCBI GI NO: 26391655 NR Description: Branched-chain amino acid aminotransferase 5
  misc_feature (1)..(301): NCBI GI NO: 6319167 NR Description: branched-chain amino acid aminotransferase
  misc_feature (1)..(300): NCBI GI NO: 11280250 NR Description: branched-chain-amino-acid transaminase-like
  misc_feature (1)..(301): NCBI GI NO: 15239157 NR Description: branched-chain amino acid aminotransferase
  misc_feature (1)..(300): NCBI GI NO: 6319165 NR Description: branched-chain amino acid aminotransferase
MVPFGPIALSPSSGVLNYGQGLFEGLKAYKKTDGSILLFRPEENAERMRTGAERMCMPAPSVEQFIDAVKQTVLANKRWIPPTGKGSLYIRPLLMGSGAVLGLAPAPEYTFIIFVSPVGNYFKEGLAPINLIVEDKFHRATPGGTGGVKTIGNYASVLMAQKIAKEKGYSDVLYLDAVHKKYLEEVSSCNVFVVKDNVISTPAIKGTILPGITRKSIIDVALSKGFQVEERLVSVDELLDADEVFCTGTAVVVSPVGSITYQGKRVEYGHQGVGVVSQQLYTSLTSLQMGQTEDWMGWTVQPELVGRGSWIIPNR

SEQ ID NO: 35288 - DNA, 1397 bp, Zea mays subsp. mays
  misc_feature (1)..(1397): Ceres Seq. ID no. 12342474
cttttccaaaaaaaaaagaagcccctcctatccatccctatccctacccctacgagtatccaagtccaaccagcaagaggggaggcgctgcacgcaggtcacgcggcgatggacatatgcgatgtttgagcaggcggtggcagatttctgctggcatgcgagggaagtagtgtcgtcagggatggggctctggggttggccgtgggggcgacgtgggccgtcgggcttcggctccgcgtccaccgccgaggaggtcaccgccggcgtcgacgcaagcaacatcactgccatcgtcacaggagcgacgaatggcattggaaaggagacagccagagttctagcactgagcgggagccaaggtaatcataccagctaggacactggagagtggcctcaagttgaaggagagcctcgcagatgaggtcccaagctccaaggtacacgttatggagatggacctgagctgtctcagctccgtccgcgacttcgcacggtccttcaattcatcccacaagcatctgaacctcctcataaacaatgcagggatcatggcctgcccttaccagctgtccaaggatggaattgagctgcaattcgcaacgaatcatgttggccatttcttgctgacaagtctcctgctagacaagatgaaatcaactgctgcagagacaggtgtgcagggaaggatcataaacgtatcatcggtcgcgcataaaagaagtgatggtacatgctttgagctgaacaagctaaacgataaggctaggtaccaaccgttcattgcatacgcgcattcgaagttagccaatgttctccacacaaatgagttatccaggcgttttcaggaagaaggatgcaatctgacagcgaattccctgcatcctggagtgatcgtcaccaatatcattcgctatgttgctggaaacagtgcgctgatttcggctctctcccctgtagcaaatcttgttctgaagagcgtgccccggggggctgcaactacttgttacttggcattgcaccctaatgtcaaaggtgtatctggtaaatacttcgctgattgcaatgaagcaacaccgactgctgtcgcgagagactcagagctggcgaagaggctatggtcgttcagcgaagaacttgtcaagatctatgctgatatgtcacagacgacacaggcaagcgaagaagaggaaaccacggttacgaaagacgttttccaagacaagtagcgtaatatatgttgctgcgttttctacgttttgtacctgtcctctgggcccgaatggccagtgactgtaatagcacctaagtgcccgagactggtaagacaaggggtattcagacaatcaagaaaccacggtgcggctgaggcctgaggcagtcctctccgtcgttcactc

SEQ ID NO: 35289 - protein, 259 aa, Zea mays subsp. mays
  peptide (1)..(259): Ceres Seq. ID no. 12342475
  misc_feature (1)..(231): NCBI GI NO: 18413950 NR Description: putative protein; protein id: At5g02540
  misc_feature (1)..(231): NCBI GI NO: 20260302 NR Description: putative protein [Arabidopsis thaliana]
  misc_feature (1)..(231): NCBI GI NO: 21554820 NR Description: putativepod-specific dehydrogenase SAC25
  misc_feature (28)..(231): NCBI GI NO: 11250521 NR Description: hypothetical protein T22P11
  misc_feature (1)..(29): NCBI GI NO: 11250521 NR Description: hypothetical protein T22P11
  misc_feature (1)..(230): NCBI GI NO: 30686197 NR Description: short-chain dehydrogenase/reductase family protein
  misc_feature (1)..(230): NCBI GI NO: 23297050 NR Description: unknown protein [Arabidopsis thaliana]
  misc_feature (1)..(230): NCBI GI NO: 18416145 NR Description: putative protein; protein id: At4g23430
  misc_feature (1)..(232): NCBI GI NO: 34895876 NR Description: P0009G03.18
  misc_feature (1)..(231): NCBI GI NO: 15224306 NR Description: putative oxidoreductase; protein id: At2g37540
MEMDLSCLSSVRDFARSFNSSHKHLNLLINNAGIMACPYQLSKDGIELQFATNHVGHFLLTSLLLDKMKSTAAETGVQGRIINVSSVAHKRSDGTCFELNKLNDKARYQPFIAYAHSKLANVLHTNELSRRFQEEGCNLTANSLHPGVIVTNIIRYVAGNSALISALSPVANLVLKSVPRGAATTCYLALHPNVKGVSGKYFADCNEATPTAVARDSELAKRLWSFSEELVKIYADMSQTTQASEEEETTVTKDVFQDK

SEQ ID NO: 35290 - protein, 257 aa, Zea mays subsp. mays
  peptide (1)..(257): Ceres Seq. ID no. 12342476
  misc_feature (1)..(229): NCBI GI NO: 18413950 NR Description: putative protein; protein id: At5g02540
  misc_feature (1)..(229): NCBI GI NO: 20260302 NR Description: putative protein [Arabidopsis thaliana]
  misc_feature (1)..(229): NCBI GI NO: 21554820 NR Description: putativepod-specific dehydrogenase SAC25
  misc_feature (26)..(229): NCBI GI NO: 11250521 NR Description: hypothetical protein T22P11
  misc_feature (1)..(27): NCBI GI NO: 11250521 NR Description: hypothetical protein T22P11
  misc_feature (1)..(228): NCBI GI NO: 30686197 NR Description: short-chain dehydrogenase/reductase family protein
  misc_feature (1)..(228): NCBI GI NO: 23297050 NR Description: unknown protein [Arabidopsis thaliana]
  misc_feature (1)..(228): NCBI GI NO: 18416145 NR Description: putative protein; protein id: At4g23430
  misc_feature (1)..(230): NCBI GI NO: 34895876 NR Description: P0009G03.18
  misc_feature (1)..(229): NCBI GI NO: 15224306 NR Description: putative oxidoreductase; protein id: At2g37540
MDLSCLSSVRDFARSFNSSHKHLNLLINNAGIMACPYQLSKDGIELQFATNHVGHFLLTSLLLDKMKSTAAETGVQGRIINVSSVAHKRSDGTCFELNKLNDKARYQPFIAYAHSKLANVLHTNELSRRFQEEGCNLTANSLHPGVIVTNIIRYVAGNSALISALSPVANLVLKSVPRGAATTCYLALHPNVKGVSGKYFADCNEATPTAVARDSELAKRLWSFSEELVKIYADMSQTTQASEEEETTVTKDVFQDK

SEQ ID NO: 35291 - protein, 225 aa, Zea mays subsp. mays
  peptide (1)..(225): Ceres Seq. ID no. 12342477
  misc_feature (1)..(197): NCBI GI NO: 18413950 NR Description: putative protein; protein id: At5g02540
  misc_feature (1)..(197): NCBI GI NO: 20260302 NR Description: putative protein [Arabidopsis thaliana]
  misc_feature (1)..(197): NCBI GI NO: 21554820 NR Description: putativepod-specific dehydrogenase SAC25
  misc_feature (1)..(197): NCBI GI NO: 11250521 NR Description: hypothetical protein T22P11
  misc_feature (1)..(196): NCBI GI NO: 30686197 NR Description: short-chain dehydrogenase/reductase family protein
  misc_feature (1)..(196): NCBI GI NO: 23297050 NR Description: unknown protein [Arabidopsis thaliana]
  misc_feature (1)..(196): NCBI GI NO: 18416145 NR Description: putative protein; protein id: At4g23430
  misc_feature (1)..(198): NCBI GI NO: 34895876 NR Description: P0009G03.18
  misc_feature (1)..(197): NCBI GI NO: 15224306 NR Description: putative oxidoreductase; protein id: At2g37540
  misc_feature (1)..(196): NCBI GI NO: 15233359 NR Description: putative protein; protein id: At4g11410.1
MACPYQLSKDGIELQFATNHVGHFLLTSLLLDKMKSTAAETGVQGRIINVSSVAHKRSDGTCFELNKLNDKARYQPFIAYAHSKLANVLHTNELSRRFQEEGCNLTANSLHPGVIVTNIIRYVAGNSALISALSPVANLVLKSVPRGAATTCYLALHPNVKGVSGKYFADCNEATPTAVARDSELAKRLWSFSEELVKIYADMSQTTQASEEEETTVTKDVFQDK

SEQ ID NO: 35292 - DNA, 1663 bp, Zea mays subsp. mays
  misc_feature (1)..(1663): Ceres Seq. ID no. 13598841
ctccagagcttgggcagactctcctcagtaactatagttttttttgttccttgggaggatagaaaaaatatatccttggttttcttgaacagataacatttcaggtgtgcttctgaagggagatttcgttgaacaggatgaatgcattggcagcaaccagcaggaacttcaagcaggcagctaagctgctgggcctcgactccaagctggagaagagcttgctcattccattcagggagatcaaggttgaatgcacaatcccaaaagatgatggaactttggcatcctatgttggatttagggttcaacatgataatgctaggggacctatgaagggtggaatcagataccaccatgaggttgatcctgatgaagttaatgccttggcacaattgatgacttggaaaacagcagtagctaacataccatatggaggagccaaaggtggaattggatgtagccctggagacctgagcatctctgagcttgagaggcttacccgagtttttactcagaaaatccatgacttgattggcatccatactgacgttccagctccagatatgggcaccaactcacagacaatggcatggatacttgacgaatactcaaagttccatggttactcacctgctgttgtgacaggaaagcctgtggacctcggaggatcattgggaagagacgccgctactggaaggggagttctgtttgctactgaagctttgcttgcagagcatggcaaaggcattgcaggccagcgtttcgtcatacagggattcggtaacgttggttcctgggcagctcagctgataagtgaagccggtggcaaggtgattgctatcagtgacgtcacaggcgccgtcaaaaacgtcgatggcctcgacatcgtgcagctagtgaagcactcggcggagaacaaggggatcaagggcttcaaggggggagacgccatcgctccagactcgttgctcactgaagagtgcgacgtcctcatcccagcagcgcttgggggagtcataaacaaggataatgctaacgacataaaggcaaagtacatcatcgaggctgccaatcaccccacagatccagaggcagacgagatcctgtcaaagaaaggcgtcctcatcctccccgacatactggccaactctggtggcgtcacagtgagctacttcgagtgggtacaaaacatccaggggttcatgtgggacgaagagaaggtaaacgcggagctgcggacgtacatgacgcgcgccttcggggacgtgaagcagatgtgccggagccacagctgcgacctccgcatgggcgccttcacgcttggcgtcaaccgcgtcgcgcgcgccaccgtcctcaggggatgggaagcatgacctccctccgtgtcgtccgtgtgcccctccctgttgtatcctcttggtcttgggcccttgtttttctttggttaattattgtcgagatcaacggagatccgagaaaaacgggctcagttaataattccaagaagtgcgtcttcttggagataaaatagcggaaggagagttataataagtctgtaactgtaacccatagctgagatgctgtctgcaagcagcaatgccaatgccaatgccatctggttttcgtgctaaaaaaaaaaaaaaaaaagcttatcgataccgtc

SEQ ID NO: 35293 - protein, 411 aa, Zea mays subsp. mays
  peptide (1)..(411): Ceres Seq. ID no. 15222433
  misc_feature (176)..(408): Pfam Name: Pfam Description:  Glutamate/ Leucine/Phenylalanine/Valine dehydrogenase
  misc_feature (1)..(411): NCBI GI NO: 7431775 NR Description: glutamate dehydrogenase (EC 1.4.1.2) - maize
  misc_feature (1)..(411): NCBI GI NO: 12643763 NR Description: Glutamate dehydrogenase (GDH)
  misc_feature (1)..(411): NCBI GI NO: 1931629 NR Description: glutamate dehydrogenase mutant [Zea mays]
  misc_feature (1)..(411): NCBI GI NO: 28269441 NR Description: glutamate dehydrogenase
  misc_feature (1)..(411): NCBI GI NO: 4150965 NR Description: glutamate dehydrogenase [Asparagus officinalis]
  misc_feature (1)..(411): NCBI GI NO: 20873461 NR Description: glutamate dehydrogenase [Nicotiana tabacum]
  misc_feature (1)..(411): NCBI GI NO: 12643806 NR Description: Glutamate dehydrogenase B (GDH B)
  misc_feature (1)..(411): NCBI GI NO: 21314959 NR Description: NADH-glutamate dehydrogenase
  misc_feature (1)..(411): NCBI GI NO: 7431768 NR Description: glutamate dehydrogenase (EC 1
  misc_feature (1)..(411): NCBI GI NO: 15238762 NR Description: glutamate dehydrogenase (EC 1
MNALAATSRNFKQAAKLLGLDSKLEKSLLIPFREIKVECTIPKDDGTLASYVGFRVQHDNARGPMKGGIRYHHEVDPDEVNALAQLMTWKTAVANIPYGGAKGGIGCSPGDLSISELERLTRVFTQKIHDLIGIHTDVPAPDMGTNSQTMAWILDEYSKFHGYSPAVVTGKPVDLGGSLGRDAATGRGVLFATEALLAEHGKGIAGQRFVIQGFGNVGSWAAQLISEAGGKVIAISDVTGAVKNVDGLDIVQLVKHSAENKGIKGFKGGDAIAPDSLLTEECDVLIPAALGGVINKDNANDIKAKYIIEAANHPTDPEADEILSKKGVLILPDILANSGGVTVSYFEWVQNIQGFMWDEEKVNAELRTYMTRAFGDVKQMCRSHSCDLRMGAFTLGVNRVARATVLRGWEA

SEQ ID NO: 35294 - protein, 347 aa, Zea mays subsp. mays
  peptide (1)..(347): Ceres Seq. ID no. 15222434
  misc_feature (112)..(344): Pfam Name: Pfam Description:  Glutamate/ Leucine/Phenylalanine/Valine dehydrogenase
  misc_feature (1)..(347): NCBI GI NO: 7431775 NR Description: glutamate dehydrogenase (EC 1.4.1.2) - maize
  misc_feature (1)..(347): NCBI GI NO: 12643763 NR Description: Glutamate dehydrogenase (GDH)
  misc_feature (1)..(347): NCBI GI NO: 1931629 NR Description: glutamate dehydrogenase mutant [Zea mays]
  misc_feature (1)..(347): NCBI GI NO: 28269441 NR Description: glutamate dehydrogenase
  misc_feature (1)..(347): NCBI GI NO: 4150965 NR Description: glutamate dehydrogenase [Asparagus officinalis]
  misc_feature (1)..(347): NCBI GI NO: 20873461 NR Description: glutamate dehydrogenase [Nicotiana tabacum]
  misc_feature (1)..(347): NCBI GI NO: 12643806 NR Description: Glutamate dehydrogenase B (GDH B)
  misc_feature (1)..(347): NCBI GI NO: 21314959 NR Description: NADH-glutamate dehydrogenase
  misc_feature (1)..(347): NCBI GI NO: 7431768 NR Description: glutamate dehydrogenase (EC 1
  misc_feature (1)..(347): NCBI GI NO: 15238762 NR Description: glutamate dehydrogenase (EC 1
MKGGIRYHHEVDPDEVNALAQLMTWKTAVANIPYGGAKGGIGCSPGDLSISELERLTRVFTQKIHDLIGIHTDVPAPDMGTNSQTMAWILDEYSKFHGYSPAVVTGKPVDLGGSLGRDAATGRGVLFATEALLAEHGKGIAGQRFVIQGFGNVGSWAAQLISEAGGKVIAISDVTGAVKNVDGLDIVQLVKHSAENKGIKGFKGGDAIAPDSLLTEECDVLIPAALGGVINKDNANDIKAKYIIEAANHPTDPEADEILSKKGVLILPDILANSGGVTVSYFEWVQNIQGFMWDEEKVNAELRTYMTRAFGDVKQMCRSHSCDLRMGAFTLGVNRVARATVLRGWEA

SEQ ID NO: 35295 - protein, 325 aa, Zea mays subsp. mays
  peptide (1)..(325): Ceres Seq. ID no. 15222435
  misc_feature (90)..(322): Pfam Name: Pfam Description:  Glutamate/ Leucine/Phenylalanine/Valine dehydrogenase
  misc_feature (1)..(325): NCBI GI NO: 7431775 NR Description: glutamate dehydrogenase (EC 1.4.1.2) - maize
  misc_feature (1)..(325): NCBI GI NO: 12643763 NR Description: Glutamate dehydrogenase (GDH)
  misc_feature (1)..(325): NCBI GI NO: 1931629 NR Description: glutamate dehydrogenase mutant [Zea mays]
  misc_feature (1)..(325): NCBI GI NO: 28269441 NR Description: glutamate dehydrogenase
  misc_feature (1)..(325): NCBI GI NO: 4150965 NR Description: glutamate dehydrogenase [Asparagus officinalis]
  misc_feature (1)..(325): NCBI GI NO: 20873461 NR Description: glutamate dehydrogenase [Nicotiana tabacum]
  misc_feature (1)..(325): NCBI GI NO: 12643806 NR Description: Glutamate dehydrogenase B (GDH B)
  misc_feature (1)..(325): NCBI GI NO: 21314959 NR Description: NADH-glutamate dehydrogenase
  misc_feature (1)..(325): NCBI GI NO: 7431768 NR Description: glutamate dehydrogenase (EC 1
  misc_feature (1)..(325): NCBI GI NO: 15238762 NR Description: glutamate dehydrogenase (EC 1
MTWKTAVANIPYGGAKGGIGCSPGDLSISELERLTRVFTQKIHDLIGIHTDVPAPDMGTNSQTMAWILDEYSKFHGYSPAVVTGKPVDLGGSLGRDAATGRGVLFATEALLAEHGKGIAGQRFVIQGFGNVGSWAAQLISEAGGKVIAISDVTGAVKNVDGLDIVQLVKHSAENKGIKGFKGGDAIAPDSLLTEECDVLIPAALGGVINKDNANDIKAKYIIEAANHPTDPEADEILSKKGVLILPDILANSGGVTVSYFEWVQNIQGFMWDEEKVNAELRTYMTRAFGDVKQMCRSHSCDLRMGAFTLGVNRVARATVLRGWEA

SEQ ID NO: 35296 - DNA, 620 bp, Zea mays subsp. mays; identical to SEQ ID NO: 28069
  misc_feature (1)..(620): Ceres Seq. ID no. 12367118

SEQ ID NO: 35297 - protein, 206 aa, Zea mays subsp. mays; identical to SEQ ID NO: 28070
  peptide (1)..(206): Ceres Seq. ID no. 12367119
  misc_feature (101)..(203): Pfam Name: Pfam Description:  Translocation protein Sec62
  misc_feature (48)..(203): NCBI GI NO: 18402801 NR Description: expressed protein; protein id: At3g20920
  misc_feature (48)..(203): NCBI GI NO: 21593719 NR Description: unknown [Arabidopsis thaliana]

SEQ ID NO: 35298 - protein, 172 aa, Zea mays subsp. mays; identical to SEQ ID NO: 28071
  peptide (1)..(172): Ceres Seq. ID no. 12367120
  misc_feature (67)..(169): Pfam Name: Pfam Description:  Translocation protein Sec62
  misc_feature (14)..(169): NCBI GI NO: 18402801 NR Description: expressed protein; protein id: At3g20920
  misc_feature (14)..(169): NCBI GI NO: 21593719 NR Description: unknown [Arabidopsis thaliana]

SEQ ID NO: 35299 - protein, 108 aa, Zea mays subsp. mays; identical to SEQ ID NO: 28072
  peptide (1)..(108): Ceres Seq. ID no. 12367121
  misc_feature (3)..(105): Pfam Name: Pfam Description:  Translocation protein Sec62
  misc_feature (1)..(105): NCBI GI NO: 18402801 NR Description: expressed protein; protein id: At3g20920
  misc_feature (1)..(105): NCBI GI NO: 21593719 NR Description: unknown [Arabidopsis thaliana]

SEQ ID NO: 35300 - DNA, 1413 bp, Zea mays subsp. mays
  misc_feature (1)..(1413): Ceres Seq. ID no. 12353553
caccttttctttttcaagaggaagtttttaccatgctacagtttgttggacagatctacaattgggttttggcatgcaggtgagagcctgcacacgcctttcctgagcccatacctcaaggcgctgggcgcggatttcagcaacggcgtgaacttcgccatcggcggctcgacggcgacgccggggggctctccattctcgctggacgtgcagctccatcagtggctctacttcagggccaggtccatggagatgatcaacctaggacagaggcctcccatcgatcgcgaaggattccgaaaggccatctacaccatcgacatcgggcagaacgacgtgtctgcttacatgcacctgccctacgaccaagtgcttgccaagatccctggatttgttgctcagatcaagtacaccatcgagacgctgtactcgcacggggcccgcaagttctggatccacggcacgggcgcgctgggctgcctgccgcagaagctggccatcccgcgggacgccgacgacggcgaccagctggacgcccacggctgcctcaagacctacaacaacgccgccaagcgcttcaacgcgctgctcggcgacgcctgcgcccagctccggcgccggatggtggacgcggcgctcgtcttcgtcgacatgtacgccgtcaagtacgacctggtggccaaccacacgacgcacgggatcgagaaacctctcatggcgtgctgcggctacggcgggccgccgtacaactacaaccacttcaaggcgtgcatgtcggcggagatgcagctgtgcgacgtgggcacgcgcttcatcagctgggacggcgtgcacttcaccgaggccgccaacgccatcgtcgccgccaaggtgctcaccggcgactactccacgcccagggtcaccatcgccaaactcgtcaactccacgctgcccaacgacgactagctggctggccgatcgatcgatcgtcgtcgtcattctgataaacatactgcaggcaggcttctcatcgatccatatccaattgtccgtagaaatctacgactagctcattgtagatccgtaatgtgggctaagagatgcatgacgatcgactagctgcccaactcgtcaagagctggttcaccactctcgtcaggatcgagctagaatggacgagcaattccatggcaccgagtgacacaatttatatcctcattgactagtactagtagtcgtactagcaaaaagaaaacagggttgggccaactgagtgattctgtggggttaggcctttgaggcttttacatgcaattcgtacatgtgtgtgtgtgacatttacagtttttttttaaaaaaaattaggaaatccgatcaatgggtggagggaatgcgacaacatcaaaaagtttacgtaaaatccattacctt

SEQ ID NO: 35301 - protein, 315 aa, Zea mays subsp. mays
  peptide (1)..(315): Ceres Seq. ID no. 12353554
  misc_feature (28)..(291): Pfam Name: Pfam Description:  GDSL-like Lipase/Acylhydrolase
  misc_feature (28)..(314): NCBI GI NO: 34894838 NR Description: putative lipase homolog
  misc_feature (25)..(301): NCBI GI NO: 34894844 NR Description: putative lipase homolog
  misc_feature (25)..(301): NCBI GI NO: 34894866 NR Description: putative lipase homolog
  misc_feature (28)..(299): NCBI GI NO: 15217506 NR Description: putative lipase; protein id: At1g09390.1
  misc_feature (28)..(299): NCBI GI NO: 15223585 NR Description: nodule-specific protein, putative
  misc_feature (28)..(280): NCBI GI NO: 25336281 NR Description: lipase-like protein Lip-4
  misc_feature (28)..(299): NCBI GI NO: 18405064 NR Description: early nodule-specific protein, putative
  misc_feature (28)..(299): NCBI GI NO: 21537184 NR Description: early nodule-specific protein, putative
  misc_feature (28)..(299): NCBI GI NO: 25405771 NR Description: hypothetical protein T22H22.20
  misc_feature (172)..(300): NCBI GI NO: 15228721 NR Description: putative protein; protein id: At3g62280.1
HLFFFKRKFLPCYSLLDRSTIGFWHAGESLHTPFLSPYLKALGADFSNGVNFAIGGSTATPGGSPFSLDVQLHQWLYFRARSMEMINLGQRPPIDREGFRKAIYTIDIGQNDVSAYMHLPYDQVLAKIPGFVAQIKYTIETLYSHGARKFWIHGTGALGCLPQKLAIPRDADDGDQLDAHGCLKTYNNAAKRFNALLGDACAQLRRRMVDAALVFVDMYAVKYDLVANHTTHGIEKPLMACCGYGGPPYNYNHFKACMSAEMQLCDVGTRFISWDGVHFTEAANAIVAAKVLTGDYSTPRVTIAKLVNSTLPNDD

SEQ ID NO: 35302 - protein, 233 aa, Zea mays subsp. mays
  peptide (1)..(233): Ceres Seq. ID no. 12353555
  misc_feature (1)..(209): Pfam Name: Pfam Description:  GDSL-like Lipase/Acylhydrolase
  misc_feature (1)..(232): NCBI GI NO: 34894838 NR Description: putative lipase homolog
  misc_feature (1)..(219): NCBI GI NO: 34894844 NR Description: putative lipase homolog
  misc_feature (1)..(219): NCBI GI NO: 34894866 NR Description: putative lipase homolog
  misc_feature (1)..(217): NCBI GI NO: 15217506 NR Description: putative lipase; protein id: At1g09390.1
  misc_feature (1)..(217): NCBI GI NO: 15223585 NR Description: nodule-specific protein, putative
  misc_feature (1)..(198): NCBI GI NO: 25336281 NR Description: lipase-like protein Lip-4
  misc_feature (1)..(217): NCBI GI NO: 18405064 NR Description: early nodule-specific protein, putative
  misc_feature (1)..(217): NCBI GI NO: 25405771 NR Description: hypothetical protein T22H22.20
  misc_feature (1)..(217): NCBI GI NO: 21537184 NR Description: early nodule-specific protein, putative
  misc_feature (90)..(218): NCBI GI NO: 15228721 NR Description: putative protein; protein id: At3g62280.1
MEMINLGQRPPIDREGFRKAIYTIDIGQNDVSAYMHLPYDQVLAKIPGFVAQIKYTIETLYSHGARKFWIHGTGALGCLPQKLAIPRDADDGDQLDAHGCLKTYNNAAKRFNALLGDACAQLRRRMVDAALVFVDMYAVKYDLVANHTTHGIEKPLMACCGYGGPPYNYNHFKACMSAEMQLCDVGTRFISWDGVHFTEAANAIVAAKVLTGDYSTPRVTIAKLVNSTLPNDD

SEQ ID NO: 35303 - protein, 231 aa, Zea mays subsp. mays
  peptide (1)..(231): Ceres Seq. ID no. 12353556
  misc_feature (1)..(207): Pfam Name: Pfam Description:  GDSL-like Lipase/Acylhydrolase
  misc_feature (1)..(230): NCBI GI NO: 34894838 NR Description: putative lipase homolog
  misc_feature (1)..(217): NCBI GI NO: 34894844 NR Description: putative lipase homolog
  misc_feature (1)..(217): NCBI GI NO: 34894866 NR Description: putative lipase homolog
  misc_feature (1)..(215): NCBI GI NO: 15217506 NR Description: putative lipase; protein id: At1g09390.1
  misc_feature (1)..(215): NCBI GI NO: 15223585 NR Description: nodule-specific protein, putative
  misc_feature (1)..(196): NCBI GI NO: 25336281 NR Description: lipase-like protein Lip-4
  misc_feature (1)..(215): NCBI GI NO: 18405064 NR Description: early nodule-specific protein, putative
  misc_feature (1)..(215): NCBI GI NO: 21537184 NR Description: early nodule-specific protein, putative
  misc_feature (1)..(215): NCBI GI NO: 25405771 NR Description: hypothetical protein T22H22.20
  misc_feature (88)..(216): NCBI GI NO: 15228721 NR Description: putative protein; protein id: At3g62280.1
MINLGQRPPIDREGFRKAIYTIDIGQNDVSAYMHLPYDQVLAKIPGFVAQIKYTIETLYSHGARKFWIHGTGALGCLPQKLAIPRDADDGDQLDAHGCLKTYNNAAKRFNALLGDACAQLRRRMVDAALVFVDMYAVKYDLVANHTTHGIEKPLMACCGYGGPPYNYNHFKACMSAEMQLCDVGTRFISWDGVHFTEAANAIVAAKVLTGDYSTPRVTIAKLVNSTLPNDD

SEQ ID NO: 35304 - DNA, 1472 bp, Zea mays subsp. mays
  misc_feature (1)..(1472): Ceres Seq. ID no. 12374378
  misc_feature (954)..(954): n is a, c, t, g, unknown, or other
  misc_feature (979)..(979): n is a, c, t, g, unknown, or other
  misc_feature (896)..(896): n is a, c, t, g, unknown, or other
  misc_feature (901)..(901): n is a, c, t, g, unknown, or other
gcacgagaccattacctagaacatcctaatcgaaaagtacttggcaatcctctctagctagctcagcatccgaggacgggacttgcattgcactatggatgctgctcttatgcctctgctcgtcgtctccctcgtcttctgcctgctggcggcttccccggcggcgtccgcggcgcgggccttcttcgtcttcggcgactccctcgtcgacaatggcaacaacaactacctgctgaccacggcgcgcgccgacgcgcccccctacggcatcgacttccccacgcaccaagccacgggccgcttctccaacgggctcaacatccccgacatcatcagcgagcacctcggggccgaacctgcgctgccgtacctgagccccgagctccgaggggagaagctgctcgtcggcgccaacttcgcgtcggccggcgtcgggatcctcaacgacacaggaatacaatttgtgaacattatcaggatcggcgaccagctgcagtacttccgggagtaccagcggaagctgcgagccctcgtcggcgagccgcaggcgacgcagctcgtgaaccaggccctcgtgctcatcacgctcggcggcaacgacttcgtgaacaactactacctggtgcccatgtccgtgcggtcgcgccagtacgcgctcccggactatgtccgcttcatcgtctccgagtacaggaagatcctctcgaggctgtacgagctgggcgcgcggcgcgtgatcgtgacggggacggggccgctggggtgcgtcccggccgagctggcgctgcacagccagaacggcgagtgcgcggcggagctgacgcgcgccgtgaacctcttcaacccgcagatggtggacatggtgcgcggcctcaaccgcgccatcggcaccgacntcttngtcgccgccaaccacctaccgcatgaacttcgagctacctcgcaaacccgcangacttcggggttcacgaacgtgcangtggcgtgctgcggccagggcccgtacaacggggatcgggctgtgcacggcggcgtcgaacgtgtgcgacaaccgcgacgtgttcgcgttctgggacgcgttccaccccacggagagggcaaaccgcatcatcgtcgcccagttcatgcacggcgacacggactacatgcaccccatgaacctcagcaccatcctcgccatggaccaggagggcctctagactatagcttgatcagccggacacgattatacgtacatgcgtgatgtgtctcacgtgcctagcacgttagtcatgttttggatgatggcagcccaatttgccaataatattcgtgcctcgatccaagtttcactaatgtgtcactcacgccttaaaaagaattagtgactggctatggttaatcgatccgtgttatatgtgctccgcgagcattcgtttgttggtggtgttggttcgttgtcaagcgaaatggccatttgcagccgtggcgtc

SEQ ID NO: 35305 - protein, 382 aa, Zea mays subsp. mays
  peptide (1)..(382): Ceres Seq. ID no. 12374379
  misc_feature (30)..(306): Pfam Name: Pfam Description:  GDSL-like Lipase/Acylhydrolase
  misc_feature (1)..(306): NCBI GI NO: 15229265 NR Description: putative GDSL-motif lipase/acylhydrolase
  misc_feature (13)..(306): NCBI GI NO: 15242808 NR Description: putative protein; protein id: At5g33370
  misc_feature (10)..(306): NCBI GI NO: 28071322 NR Description: P0705A05.30
  misc_feature (8)..(306): NCBI GI NO: 15235421 NR Description: Proline-rich APG - like protein
  misc_feature (11)..(306): NCBI GI NO: 15238814 NR Description: putative protein; protein id: At5g18430.1
  misc_feature (1)..(306): NCBI GI NO: 37535146 NR Description: putative early nodulin gene (Enod) related protein
  misc_feature (8)..(306): NCBI GI NO: 22758315 NR Description: putative early nodulin gene (Enod) related protein
  misc_feature (14)..(189): NCBI GI NO: 37789825 NR Description: putative GDSL-motif lipase [Vitis vinifera]
  misc_feature (29)..(306): NCBI GI NO: 15227849 NR Description: putative GDSL-motif lipase/hydrolase
  misc_feature (6)..(306): NCBI GI NO: 34909504 NR Description: putative GDSL-motif lipase/hydrolase-like protein
  misc_feature (268)..(268): Xaa is any aa, unknown or other
  misc_feature (269)..(269): Xaa is any aa, unknown or other
  misc_feature (287)..(287): Xaa is any aa, unknown or other
  misc_feature (295)..(295): Xaa is any aa, unknown or other
MDAALMPLLVVSLVFCLLAASPAASAARAFFVFGDSLVDNGNNNYLLTTARADAPPYGIDFPTHQATGRFSNGLNIPDIISEHLGAEPALPYLSPELRGEKLLVGANFASAGVGILNDTGIQFVNIIRIGDQLQYFREYQRKLRALVGEPQATQLVNQALVLITLGGNDFVNNYYLVPMSVRSRQYALPDYVRFIVSEYRKILSRLYELGARRVIVTGTGPLGCVPAELALHSQNGECAAELTRAVNLFNPQMVDMVRGLNRAIGTDXXVAANHLPHELRATSQTRXTSGFTNVXVACCGQGPYNGDRAVHGGVERVRQPRRVRVLGRVPPHGEGKPHHRRPVHARRHGLHAPHEPQHHPRHGPGGPLDYSLISRTRLYVHA

SEQ ID NO: 35306 - protein, 377 aa, Zea mays subsp. mays
  peptide (1)..(377): Ceres Seq. ID no. 12374380
  misc_feature (25)..(301): Pfam Name: Pfam Description:  GDSL-like Lipase/Acylhydrolase
  misc_feature (1)..(301): NCBI GI NO: 15229265 NR Description: putative GDSL-motif lipase/acylhydrolase
  misc_feature (8)..(301): NCBI GI NO: 15242808 NR Description: putative protein; protein id: At5g33370
  misc_feature (5)..(301): NCBI GI NO: 28071322 NR Description: P0705A05.30
  misc_feature (3)..(301): NCBI GI NO: 15235421 NR Description: Proline-rich APG - like protein
  misc_feature (6)..(301): NCBI GI NO: 15238814 NR Description: putative protein; protein id: At5g18430.1
  misc_feature (1)..(301): NCBI GI NO: 37535146 NR Description: putative early nodulin gene (Enod) related protein
  misc_feature (3)..(301): NCBI GI NO: 22758315 NR Description: putative early nodulin gene (Enod) related protein
  misc_feature (9)..(184): NCBI GI NO: 37789825 NR Description: putative GDSL-motif lipase [Vitis vinifera]
  misc_feature (24)..(301): NCBI GI NO: 15227849 NR Description: putative GDSL-motif lipase/hydrolase
  misc_feature (1)..(301): NCBI GI NO: 34909504 NR Description: putative GDSL-motif lipase/hydrolase-like protein
  misc_feature (263)..(263): Xaa is any aa, unknown or other
  misc_feature (264)..(264): Xaa is any aa, unknown or other
  misc_feature (282)..(282): Xaa is any aa, unknown or other
  misc_feature (290)..(290): Xaa is any aa, unknown or other
MPLLVVSLVFCLLAASPAASAARAFFVFGDSLVDNGNNNYLLTTARADAPPYGIDFPTHQATGRFSNGLNIPDIISEHLGAEPALPYLSPELRGEKLLVGANFASAGVGILNDTGIQFVNIIRIGDQLQYFREYQRKLRALVGEPQATQLVNQALVLITLGGNDFVNNYYLVPMSVRSRQYALPDYVRFIVSEYRKILSRLYELGARRVIVTGTGPLGCVPAELALHSQNGECAAELTRAVNLFNPQMVDMVRGLNRAIGTDXXVAANHLPHELRATSQTRXTSGFTNVXVACCGQGPYNGDRAVHGGVERVRQPRRVRVLGRVPPHGEGKPHHRRPVHARRHGLHAPHEPQHHPRHGPGGPLDYSLISRTRLYVHA

SEQ ID NO: 35307 - protein, 204 aa, Zea mays subsp. mays
  peptide (1)..(204): Ceres Seq. ID no. 12374381
  misc_feature (1)..(128): Pfam Name: Pfam Description:  GDSL-like Lipase/Acylhydrolase
  misc_feature (1)..(128): NCBI GI NO: 15229265 NR Description: putative GDSL-motif lipase/acylhydrolase
  misc_feature (1)..(128): NCBI GI NO: 15242808 NR Description: putative protein; protein id: At5g33370
  misc_feature (1)..(128): NCBI GI NO: 28071322 NR Description: P0705A05.30
  misc_feature (1)..(128): NCBI GI NO: 15235421 NR Description: Proline-rich APG - like protein
  misc_feature (1)..(128): NCBI GI NO: 15238814 NR Description: putative protein; protein id: At5g18430.1
  misc_feature (1)..(128): NCBI GI NO: 37535146 NR Description: putative early nodulin gene (Enod) related protein
  misc_feature (1)..(128): NCBI GI NO: 22758315 NR Description: putative early nodulin gene (Enod) related protein
  misc_feature (1)..(11): NCBI GI NO: 37789825 NR Description: putative GDSL-motif lipase [Vitis vinifera]
  misc_feature (1)..(128): NCBI GI NO: 15227849 NR Description: putative GDSL-motif lipase/hydrolase
  misc_feature (1)..(128): NCBI GI NO: 34909504 NR Description: putative GDSL-motif lipase/hydrolase-like protein
  misc_feature (90)..(90): Xaa is any aa, unknown or other
  misc_feature (91)..(91): Xaa is any aa, unknown or other
  misc_feature (109)..(109): Xaa is any aa, unknown or other
  misc_feature (117)..(117): Xaa is any aa, unknown or other
MSVRSRQYALPDYVRFIVSEYRKILSRLYELGARRVIVTGTGPLGCVPAELALHSQNGECAAELTRAVNLFNPQMVDMVRGLNRAIGTDXXVAANHLPHELRATSQTRXTSGFTNVXVACCGQGPYNGDRAVHGGVERVRQPRRVRVLGRVPPHGEGKPHHRRPVHARRHGLHAPHEPQHHPRHGPGGPLDYSLISRTRLYVHA

SEQ ID NO: 35308 - DNA, 1446 bp, Zea mays subsp. mays; identical to SEQ ID NO: 32372
  misc_feature (1)..(1446): Ceres Seq. ID no. 13569613

SEQ ID NO: 35309 - protein, 439 aa, Zea mays subsp. mays; identical to SEQ ID NO: 32373
  peptide (1)..(439): Ceres Seq. ID no. 13569614
  misc_feature (80)..(216): Pfam Name: Pfam Description:  GDSL-like Lipase/Acylhydrolase
  misc_feature (204)..(439): NCBI GI NO: 34911804 NR Description: lipase-like protein
  misc_feature (60)..(216): NCBI GI NO: 34911804 NR Description: lipase-like protein
  misc_feature (46)..(439): NCBI GI NO: 34911800 NR Description: lipase-like protein
  misc_feature (60)..(413): NCBI GI NO: 10764858 NR Description: F1K23.17 [Arabidopsis thaliana]
  misc_feature (60)..(413): NCBI GI NO: 15218731 NR Description: lipase, putative [Arabidopsis thaliana]
  misc_feature (60)..(413): NCBI GI NO: 21593234 NR Description: lipase, putative [Arabidopsis thaliana]
  misc_feature (65)..(413): NCBI GI NO: 10764858 NR Description: F1K23.17 [Arabidopsis thaliana]
  misc_feature (65)..(413): NCBI GI NO: 15218728 NR Description: lipase, putative [Arabidopsis thaliana]
  misc_feature (62)..(413): NCBI GI NO: 15225872 NR Description: lipase, putative [Arabidopsis thaliana]
  misc_feature (53)..(413): NCBI GI NO: 12322540 NR Description: unknown protein [Arabidopsis thaliana]

SEQ ID NO: 35310 - protein, 399 aa, Zea mays subsp. mays; identical to SEQ ID NO: 32374
  peptide (1)..(399): Ceres Seq. ID no. 13569615
  misc_feature (40)..(176): Pfam Name: Pfam Description:  GDSL-like Lipase/Acylhydrolase
  misc_feature (164)..(399): NCBI GI NO: 34911804 NR Description: lipase-like protein
  misc_feature (20)..(176): NCBI GI NO: 34911804 NR Description: lipase-like protein
  misc_feature (6)..(399): NCBI GI NO: 34911800 NR Description: lipase-like protein
  misc_feature (20)..(373): NCBI GI NO: 10764858 NR Description: F1K23.17 [Arabidopsis thaliana]
  misc_feature (20)..(373): NCBI GI NO: 15218731 NR Description: lipase, putative [Arabidopsis thaliana]
  misc_feature (20)..(373): NCBI GI NO: 21593234 NR Description: lipase, putative [Arabidopsis thaliana]
  misc_feature (25)..(373): NCBI GI NO: 10764858 NR Description: F1K23.17 [Arabidopsis thaliana]
  misc_feature (25)..(373): NCBI GI NO: 15218728 NR Description: lipase, putative [Arabidopsis thaliana]
  misc_feature (22)..(373): NCBI GI NO: 15225872 NR Description: lipase, putative [Arabidopsis thaliana]
  misc_feature (13)..(373): NCBI GI NO: 12322540 NR Description: unknown protein [Arabidopsis thaliana]

SEQ ID NO: 35311 - protein, 262 aa, Zea mays subsp. mays; identical to SEQ ID NO: 32375
  peptide (1)..(262): Ceres Seq. ID no. 13569616
  misc_feature (27)..(227): Pfam Name: Pfam Description:  GDSL-like Lipase/Acylhydrolase
  misc_feature (27)..(262): NCBI GI NO: 34911804 NR Description: lipase-like protein
  misc_feature (1)..(39): NCBI GI NO: 34911804 NR Description: lipase-like protein
  misc_feature (1)..(262): NCBI GI NO: 34911800 NR Description: lipase-like protein
  misc_feature (1)..(236): NCBI GI NO: 10764858 NR Description: F1K23.17 [Arabidopsis thaliana]
  misc_feature (1)..(236): NCBI GI NO: 15218731 NR Description: lipase, putative [Arabidopsis thaliana]
  misc_feature (1)..(236): NCBI GI NO: 21593234 NR Description: lipase, putative [Arabidopsis thaliana]
  misc_feature (1)..(236): NCBI GI NO: 10764858 NR Description: F1K23.17 [Arabidopsis thaliana]
  misc_feature (1)..(236): NCBI GI NO: 15218728 NR Description: lipase, putative [Arabidopsis thaliana]
  misc_feature (1)..(236): NCBI GI NO: 15225872 NR Description: lipase, putative [Arabidopsis thaliana]
  misc_feature (1)..(236): NCBI GI NO: 12322540 NR Description: unknown protein [Arabidopsis thaliana]

SEQ ID NO: 35312 - DNA, 1622 bp, Zea mays subsp. mays
  misc_feature (1)..(1622): Ceres Seq. ID no. 12342501
acatctgactgaggagggccgagggtttttagaggaaggaacccgtccgcgaccgatggcgatggcgttgtcgccggggacggtgcctttgggagtgctgctgcggcgggaggtcaccaaggagcggatggagcggccggacgtgctgtgcggcgaggccaacctcagccgcaagggcgaggacttcacgctgctccgcgccgacgcaggccagcgcatccccggcgacccgtccacctccttctccgtcttcgcgatttttgatgggcacaacggatcaggagctgccatatacgcaagggagaatctgttgaaaaacgtcttgcgtgccattcctacatgtttctgcagggaggagtggcttgccgtgctcccacgtgcgcttgttgcagcgttcgtcaagactgataaagattttcaggcagtggatgaaacttctggcacaactgtgacatttgtgataatagacgagtgggttgtgactgtagcatctgtcggtgattcacgttgcatactagaatctgccgatggctcaatctactttttatcagctgatcatcgctttgactccaacccagatgaggtcaagcgcgtgacagcatgtgggagcaaagttgggaaaatggatattgtcggtggaccagaggttggtcctctaagatgttggccaggtggtttgtgtctatctagatccataggggatcttgatgttggtgaatgcatcattgctgttcctcatgttaagcaagtgaagctttctaatgctggaggcagaattatcattgcaagcgatggtgtgtgggatgatttgacttgtgaaatggctcttgattgttcccgtgggttctcatcagatgtagctgccaatcgaattgttaatgaagcaacccggcctcgtggaatcagggatgatactacttgcatcgtaatcgacattctaccaccagaaaatatagtcccgagtcctcgtaagagaccccgcaggattacattcaataatgtgtttcgcaaaagacatctagacgtcccccccgaaacaaatagatcagaatatgctgaaccggatgtggtggaagaaatatttgaagatggctctccgatgctttctaaaaggctaactaccggatatacacttgagaaaacttttgcaccctccagttgtgcagtttgtctggtacggttgaaatctggacagggaatttcagtgcatgataacccattgcaatatgagaaactacaaggttggcagggtcctttcctgtgcccgagctgtcatgaaaagaaagaagcaatggaagggaaacgccggccaaaaggatcttcatcaaacgtctttggtcacatgtgctaggcctgcctaccactaaagattcttttattgattgttagctggaaataatagtcagcccataacaattcattggctagaattgaccgtttcagttgagtaagacggaatattcttgacaaacagcctggagatttattcatcagtttgagtagagcataggaaaacccatcttattttttcgaaggactacggctgtgtccgcatctaggcatttcactgtacagactcttgcttgtatagagatcttctaaatgatcattagtcttcctgt

SEQ ID NO: 35313 - protein, 449 aa, Zea mays subsp. mays
  peptide (1)..(449): Ceres Seq. ID no. 12342502
  misc_feature (51)..(305): Pfam Name: Pfam Description:  Protein phosphatase 2C
  misc_feature (27)..(435): NCBI GI NO: 18401703 NR Description: expressed protein; protein id: At1g47380.1
  misc_feature (27)..(435): NCBI GI NO: 15292869 NR Description: unknown protein [Arabidopsis thaliana]
  misc_feature (26)..(446): NCBI GI NO: 38344839 NR Description: OSJNBa0064H22.20
  misc_feature (28)..(445): NCBI GI NO: 14029015 NR Description: Unknown protein [Oryza sativa]
  misc_feature (28)..(439): NCBI GI NO: 15221404 NR Description: putative protein phosphatase; protein id:At1g68410
  misc_feature (28)..(440): NCBI GI NO: 15217454 NR Description: putative protein phosphatase 2C
  misc_feature (25)..(435): NCBI GI NO: 34394411 NR Description: protein phosphatase 2C-like
  misc_feature (42)..(439): NCBI GI NO: 34914644 NR Description: OSJNBa0054L14.21
  misc_feature (28)..(370): NCBI GI NO: 16930415 NR Description: At1g09160/T12M4_13 [Arabidopsis thaliana]
  misc_feature (25)..(371): NCBI GI NO: 34898168 NR Description: protein phosphatase 2C-like
HLTEEGRGFLEEGTRPRPMAMALSPGTVPLGVLLRREVTKERMERPDVLCGEANLSRKGEDFTLLRADAGQRIPGDPSTSFSVFAIFDGHNGSGAAIYARENLLKNVLRAIPTCFCREEWLAVLPRALVAAFVKTDKDFQAVDETSGTTVTFVIIDEWVVTVASVGDSRCILESADGSIYFLSADHRFDSNPDEVKRVTACGSKVGKMDIVGGPEVGPLRCWPGGLCLSRSIGDLDVGECIIAVPHVKQVKLSNAGGRIIIASDGVWDDLTCEMALDCSRGFSSDVAANRIVNEATRPRGIRDDTTCIVIDILPPENIVPSPRKRPRRITFNNVFRKRHLDVPPETNRSEYAEPDVVEEIFEDGSPMLSKRLTTGYTLEKTFAPSSCAVCLVRLKSGQGISVHDNPLQYEKLQGWQGPFLCPSCHEKKEAMEGKRRPKGSSSNVFGHMC

SEQ ID NO: 35314 - protein, 431 aa, Zea mays subsp. mays
  peptide (1)..(431): Ceres Seq. ID no. 12342503
  misc_feature (33)..(287): Pfam Name: Pfam Description:  Protein phosphatase 2C
  misc_feature (9)..(417): NCBI GI NO: 18401703 NR Description: expressed protein; protein id: At1g47380.1
  misc_feature (9)..(417): NCBI GI NO: 15292869 NR Description: unknown protein [Arabidopsis thaliana]
  misc_feature (8)..(428): NCBI GI NO: 38344839 NR Description: OSJNBa0064H22.20
  misc_feature (10)..(427): NCBI GI NO: 14029015 NR Description: Unknown protein [Oryza sativa]
  misc_feature (10)..(421): NCBI GI NO: 15221404 NR Description: putative protein phosphatase; protein id:At1g68410
  misc_feature (10)..(422): NCBI GI NO: 15217454 NR Description: putative protein phosphatase 2C
  misc_feature (7)..(417): NCBI GI NO: 34394411 NR Description: protein phosphatase 2C-like
  misc_feature (24)..(421): NCBI GI NO: 34914644 NR Description: OSJNBa0054L14.21
  misc_feature (10)..(352): NCBI GI NO: 16930415 NR Description: At1g09160/T12M4_13 [Arabidopsis thaliana]
  misc_feature (7)..(353): NCBI GI NO: 34898168 NR Description: protein phosphatase 2C-like
MAMALSPGTVPLGVLLRREVTKERMERPDVLCGEANLSRKGEDFTLLRADAGQRIPGDPSTSFSVFAIFDGHNGSGAAIYARENLLKNVLRAIPTCFCREEWLAVLPRALVAAFVKTDKDFQAVDETSGTTVTFVIIDEWVVTVASVGDSRCILESADGSIYFLSADHRFDSNPDEVKRVTACGSKVGKMDIVGGPEVGPLRCWPGGLCLSRSIGDLDVGECIIAVPHVKQVKLSNAGGRIIIASDGVWDDLTCEMALDCSRGFSSDVAANRIVNEATRPRGIRDDTTCIVIDILPPENIVPSPRKRPRRITFNNVFRKRHLDVPPETNRSEYAEPDVVEEIFEDGSPMLSKRLTTGYTLEKTFAPSSCAVCLVRLKSGQGISVHDNPLQYEKLQGWQGPFLCPSCHEKKEAMEGKRRPKGSSSNVFGHMC

SEQ ID NO: 35315 - protein, 429 aa, Zea mays subsp. mays
  peptide (1)..(429): Ceres Seq. ID no. 12342504
  misc_feature (31)..(285): Pfam Name: Pfam Description:  Protein phosphatase 2C
  misc_feature (7)..(415): NCBI GI NO: 18401703 NR Description: expressed protein; protein id: At1g47380.1
  misc_feature (7)..(415): NCBI GI NO: 15292869 NR Description: unknown protein [Arabidopsis thaliana]
  misc_feature (6)..(426): NCBI GI NO: 38344839 NR Description: OSJNBa0064H22.20
  misc_feature (8)..(425): NCBI GI NO: 14029015 NR Description: Unknown protein [Oryza sativa]
  misc_feature (8)..(419): NCBI GI NO: 15221404 NR Description: putative protein phosphatase; protein id:At1g68410
  misc_feature (8)..(420): NCBI GI NO: 15217454 NR Description: putative protein phosphatase 2C
  misc_feature (5)..(415): NCBI GI NO: 34394411 NR Description: protein phosphatase 2C-like
  misc_feature (22)..(419): NCBI GI NO: 34914644 NR Description: OSJNBa0054L14.21
  misc_feature (8)..(350): NCBI GI NO: 16930415 NR Description: At1g09160/T12M4_13 [Arabidopsis thaliana]
  misc_feature (5)..(351): NCBI GI NO: 34898168 NR Description: protein phosphatase 2C-like
MALSPGTVPLGVLLRREVTKERMERPDVLCGEANLSRKGEDFTLLRADAGQRIPGDPSTSFSVFAIFDGHNGSGAAIYARENLLKNVLRAIPTCFCREEWLAVLPRALVAAFVKTDKDFQAVDETSGTTVTFVIIDEWVVTVASVGDSRCILESADGSIYFLSADHRFDSNPDEVKRVTACGSKVGKMDIVGGPEVGPLRCWPGGLCLSRSIGDLDVGECIIAVPHVKQVKLSNAGGRIIIASDGVWDDLTCEMALDCSRGFSSDVAANRIVNEATRPRGIRDDTTCIVIDILPPENIVPSPRKRPRRITFNNVFRKRHLDVPPETNRSEYAEPDVVEEIFEDGSPMLSKRLTTGYTLEKTFAPSSCAVCLVRLKSGQGISVHDNPLQYEKLQGWQGPFLCPSCHEKKEAMEGKRRPKGSSSNVFGHMC

SEQ ID NO: 35316 - DNA, 1100 bp, Zea mays subsp. mays; identical to SEQ ID NO: 25888
  misc_feature (1)..(1100): Ceres Seq. ID no. 13571176
  misc_feature (902)..(902): n is a, c, t, g, unknown, or other
  misc_feature (955)..(955): n is a, c, t, g, unknown, or other
  misc_feature (620)..(620): n is a, c, t, g, unknown, or other
  misc_feature (579)..(579): n is a, c, t, g, unknown, or other
  misc_feature (929)..(929): n is a, c, t, g, unknown, or other
  misc_feature (854)..(854): n is a, c, t, g, unknown, or other

SEQ ID NO: 35317 - protein, 182 aa, Zea mays subsp. mays; identical to SEQ ID NO: 25889
  peptide (1)..(182): Ceres Seq. ID no. 13571177
  misc_feature (1)..(106): Pfam Name: Pfam Description:  Ribosomal protein S4/S9 N-terminal domain
  misc_feature (1)..(181): NCBI GI NO: 38346067 NR Description: OSJNBa0084K01.7
  misc_feature (1)..(181): NCBI GI NO: 18417773 NR Description: ribosomal protein S4/S9 related
  misc_feature (1)..(181): NCBI GI NO: 21554411 NR Description: ribosomal protein-like [Arabidopsis thaliana]
  misc_feature (1)..(181): NCBI GI NO: 11358773 NR Description: ribosomal protein-like - Arabidopsis thaliana
  misc_feature (1)..(179): NCBI GI NO: 19527196 NR Description: RIKEN cDNA 1190002L16 [Mus musculus]
  misc_feature (1)..(179): NCBI GI NO: 34864645 NR Description: similar to RIKEN cDNA 1190002L16
  misc_feature (1)..(179): NCBI GI NO: 6321942 NR Description: part of small
  misc_feature (1)..(179): NCBI GI NO: 8922794 NR Description: chromosome 15 open reading frame 12
  misc_feature (1)..(181): NCBI GI NO: 19115815 NR Description: putative component of U3 snoRNP
  misc_feature (1)..(181): NCBI GI NO: 23479022 NR Description: S4 domain, putative [Plasmodium yoelii yoelii]
  misc_feature (91)..(91): Xaa is any aa, unknown or other
  misc_feature (104)..(104): Xaa is any aa, unknown or other
  misc_feature (182)..(182): Xaa is any aa, unknown or other

SEQ ID NO: 35318 - protein, 131 aa, Zea mays subsp. mays; identical to SEQ ID NO: 25890
  peptide (1)..(131): Ceres Seq. ID no. 13571178
  misc_feature (1)..(55): Pfam Name: Pfam Description:  Ribosomal protein S4/S9 N-terminal domain
  misc_feature (1)..(130): NCBI GI NO: 38346067 NR Description: OSJNBa0084K01.7
  misc_feature (1)..(130): NCBI GI NO: 18417773 NR Description: ribosomal protein S4/S9 related
  misc_feature (1)..(130): NCBI GI NO: 21554411 NR Description: ribosomal protein-like [Arabidopsis thaliana]
  misc_feature (1)..(130): NCBI GI NO: 11358773 NR Description: ribosomal protein-like - Arabidopsis thaliana
  misc_feature (1)..(128): NCBI GI NO: 19527196 NR Description: RIKEN cDNA 1190002L16 [Mus musculus]
  misc_feature (1)..(128): NCBI GI NO: 34864645 NR Description: similar to RIKEN cDNA 1190002L16
  misc_feature (1)..(128): NCBI GI NO: 6321942 NR Description: part of small
  misc_feature (1)..(128): NCBI GI NO: 8922794 NR Description: chromosome 15 open reading frame 12
  misc_feature (1)..(130): NCBI GI NO: 19115815 NR Description: putative component of U3 snoRNP
  misc_feature (1)..(130): NCBI GI NO: 23479022 NR Description: S4 domain, putative [Plasmodium yoelii yoelii]
  misc_feature (40)..(40): Xaa is any aa, unknown or other
  misc_feature (53)..(53): Xaa is any aa, unknown or other
  misc_feature (131)..(131): Xaa is any aa, unknown or other

SEQ ID NO: 35319 - protein, 120 aa, Zea mays subsp. mays; identical to SEQ ID NO: 25891
  peptide (1)..(120): Ceres Seq. ID no. 13571179
  misc_feature (45)..(92): Pfam Name: Pfam Description:  S4 domain
  misc_feature (1)..(119): NCBI GI NO: 38346067 NR Description: OSJNBa0084K01.7
  misc_feature (1)..(119): NCBI GI NO: 18417773 NR Description: ribosomal protein S4/S9 related
  misc_feature (1)..(119): NCBI GI NO: 21554411 NR Description: ribosomal protein-like [Arabidopsis thaliana]
  misc_feature (1)..(119): NCBI GI NO: 11358773 NR Description: ribosomal protein-like - Arabidopsis thaliana
  misc_feature (1)..(117): NCBI GI NO: 19527196 NR Description: RIKEN cDNA 1190002L16 [Mus musculus]
  misc_feature (1)..(117): NCBI GI NO: 34864645 NR Description: similar to RIKEN cDNA 1190002L16
  misc_feature (1)..(117): NCBI GI NO: 6321942 NR Description: part of small
  misc_feature (1)..(117): NCBI GI NO: 8922794 NR Description: chromosome 15 open reading frame 12
  misc_feature (1)..(119): NCBI GI NO: 19115815 NR Description: putative component of U3 snoRNP
  misc_feature (1)..(119): NCBI GI NO: 23479022 NR Description: S4 domain, putative [Plasmodium yoelii yoelii]
  misc_feature (29)..(29): Xaa is any aa, unknown or other
  misc_feature (42)..(42): Xaa is any aa, unknown or other
  misc_feature (120)..(120): Xaa is any aa, unknown or other

SEQ ID NO: 35320 - DNA, 1544 bp, Zea mays subsp. mays
  misc_feature (1)..(1544): Ceres Seq. ID no. 12373997
tctatgatgcagtgtagtgataagttgggcctgagtctcgagttgggttcttttgcagctggagtaatgatatcaacaacagaccttgcacaacatactcttgaacaagtaactttttacatgtaccttgcatgttttttctgtcccctttccaggaaaaggggggaattactatctactaccccctctttcaaaccacaggccactttagctttgttctaagtcaaacatctttgactttggccaaatattaaaaatacatcaacaaatgcacaaggcacgtttcatggataatttaatgaaatcaatttgatgttggagcattttctgtaaaccttgtgaaagttagagaagtttgacttatgagattgctgaattgatctataatttggaacggagaaagtctttagtttgatctttattttatgcttgagcaaactcatagctagactcttgtagttagtaattcattatattgttctcttatttcaggcttgttctttctgcagatcgaacccatccgcaactttttcgctgctcttttccttgccagcattgggatgctaattaatgtccatttcttgtggaaccatgtggatatactccttgcagcagtaattttggtgatcaccgtaaagacctttattgttgctattgttgtaaaagggtttgggtatagcaacaaaacatctcttcttgtcggcatgtcacttgcacaaataggagagtttgcttttgttctcttaagccgtgcttcaagtattcatctaatcgagggcaagctatacctgcttcttcttggaaccactgcacttagtttggtgacaacccctctgctattcaaaatgatccctgcaatggtccacctcggggttcttttgagatggttttctgtcgataccaatcaggtggaggtacacgatcataccagttgagttcattgatggattgctttactctagaatgtttgccaatcaattcatcggttcttccttttcagctgggcctgaaaaatgatgtcctccgcatcgatagcggcaagcgcataaatctgatagtccaaggctcacatgactcatgacacatttgacacactgcaagctactttttgtatggcttaagtttacaagctctgtaaagtgttttcacctgtactgaagagtttctagcagatatacgagggtggaggcaagagaactcaactcagatcttgctcctagtgcaagatcaatcctcccccgtcatgacggctgcaagggcaaagtcgggttttgccgttcttgagagcagtgtgtcttggatgattggtgcagtgagtggctgtcgaccccaaatgagggtctcgtgtaacatatgaatgtatggtgattaattaattggattagcatgataggatgtaggcctgatcctcagtaaaggttatgcccttgtgttctttcaccaaagttgtgtatcctcactacacgaaagtgtgtacgacatccatcagatcacgaattttgttgtgtagccatatatgtcagtttcttaacatgtccaagttc

SEQ ID NO: 35321 - protein, 124 aa, Zea mays subsp. mays
  peptide (1)..(124): Ceres Seq. ID no. 12373998
  misc_feature (1)..(115): NCBI GI NO: 30680729 NR Description: K+ efflux antiporter, putative (KEA4)
  misc_feature (1)..(115): NCBI GI NO: 25411916 NR Description: probable potassium/proton antiporter
  misc_feature (1)..(114): NCBI GI NO: 15239787 NR Description: potassium/proton antiporter family
  misc_feature (1)..(110): NCBI GI NO: 18423310 NR Description: potassium/proton antiporter family
  misc_feature (1)..(119): NCBI GI NO: 10177870 NR Description: potassium/proton antiporter-like protein
  misc_feature (1)..(113): NCBI GI NO: 22298081 NR Description: ORF_ID:tll0538~putative potassium/proton antiporter
  misc_feature (1)..(80): NCBI GI NO: 34902264 NR Description: Putative potassium/proton antiporter-like protein
  misc_feature (1)..(121): NCBI GI NO: 23123962 NR Description: hypothetical protein [Nostoc punctiforme]
  misc_feature (1)..(109): NCBI GI NO: 17229538 NR Description: putative potassium/proton antiporter
  misc_feature (1)..(116): NCBI GI NO: 17231026 NR Description: probable potassium efflux transporter
MLINVHFLWNHVDILLAAVILVITVKTFIVAIVVKGFGYSNKTSLLVGMSLAQIGEFAFVLLSRASSIHLIEGKLYLLLLGTTALSLVTTPLLFKMIPAMVHLGVLLRWFSVDTNQVEVHDHTS

SEQ ID NO: 35322 - protein, 76 aa, Zea mays subsp. mays
  peptide (1)..(76): Ceres Seq. ID no. 12373999
  misc_feature (1)..(67): NCBI GI NO: 30680729 NR Description: K+ efflux antiporter, putative (KEA4)
  misc_feature (1)..(67): NCBI GI NO: 25411916 NR Description: probable potassium/proton antiporter
  misc_feature (1)..(66): NCBI GI NO: 15239787 NR Description: potassium/proton antiporter family
  misc_feature (1)..(62): NCBI GI NO: 18423310 NR Description: potassium/proton antiporter family
  misc_feature (1)..(71): NCBI GI NO: 10177870 NR Description: potassium/proton antiporter-like protein
  misc_feature (1)..(65): NCBI GI NO: 22298081 NR Description: ORF_ID:tll0538~putative potassium/proton antiporter
  misc_feature (1)..(32): NCBI GI NO: 34902264 NR Description: Putative potassium/proton antiporter-like protein
  misc_feature (1)..(73): NCBI GI NO: 23123962 NR Description: hypothetical protein [Nostoc punctiforme]
  misc_feature (1)..(61): NCBI GI NO: 17229538 NR Description: putative potassium/proton antiporter
  misc_feature (1)..(68): NCBI GI NO: 17231026 NR Description: probable potassium efflux transporter
MSLAQIGEFAFVLLSRASSIHLIEGKLYLLLLGTTALSLVTTPLLFKMIPAMVHLGVLLRWFSVDTNQVEVHDHTS

SEQ ID NO: 35323 - protein, 73 aa, Zea mays subsp. mays
  peptide (1)..(73): Ceres Seq. ID no. 12374000
  misc_feature (5)..(37): NCBI GI NO: 30680729 NR Description: K+ efflux antiporter, putative (KEA4)
  misc_feature (5)..(36): NCBI GI NO: 25411916 NR Description: probable potassium/proton antiporter
  misc_feature (4)..(37): NCBI GI NO: 15239787 NR Description: potassium/proton antiporter family
  misc_feature (5)..(37): NCBI GI NO: 18423310 NR Description: potassium/proton antiporter family
  misc_feature (5)..(37): NCBI GI NO: 10177870 NR Description: potassium/proton antiporter-like protein
  misc_feature (9)..(37): NCBI GI NO: 22298081 NR Description: ORF_ID:tll0538~putative potassium/proton antiporter
  misc_feature (5)..(37): NCBI GI NO: 34902264 NR Description: Putative potassium/proton antiporter-like protein
  misc_feature (6)..(37): NCBI GI NO: 23123962 NR Description: hypothetical protein [Nostoc punctiforme]
  misc_feature (6)..(37): NCBI GI NO: 17229538 NR Description: putative potassium/proton antiporter
  misc_feature (8)..(47): NCBI GI NO: 17231026 NR Description: probable potassium efflux transporter
SMMQCSDKLGLSLELGSFAAGVMISTTDLAQHTLEQVTFYMYLACFFCPLSRKRGELLSTTPSFKPQATLALF

SEQ ID NO: 35324 - DNA, 1052 bp, Zea mays subsp. mays; identical to SEQ ID NO: 24435
  misc_feature (1)..(1052): Ceres Seq. ID no. 12340741

SEQ ID NO: 35325 - protein, 172 aa, Zea mays subsp. mays; identical to SEQ ID NO: 24436
  peptide (1)..(172): Ceres Seq. ID no. 12340742
  misc_feature (1)..(172): NCBI GI NO: 118104 NR Description: Peptidyl-prolyl cis-trans isomerase
  misc_feature (1)..(172): NCBI GI NO: 1084455 NR Description: peptidylprolyl isomerase (EC 5.2.1.8) Cyp2 - rice
  misc_feature (1)..(172): NCBI GI NO: 600769 NR Description: cyclophilin 2
  misc_feature (1)..(171): NCBI GI NO: 13925731 NR Description: cyclophilin A-1 [Triticum aestivum]
  misc_feature (1)..(171): NCBI GI NO: 13925734 NR Description: cyclophilin A-2 [Triticum aestivum]
  misc_feature (1)..(172): NCBI GI NO: 18376589 NR Description: putative cyclosporin A-binding protein
  misc_feature (2)..(172): NCBI GI NO: 18076088 NR Description: cyclophilin [Ricinus communis]
  misc_feature (1)..(171): NCBI GI NO: 11270316 NR Description: peptidylprolyl isomerase (EC 5.2.1.8)
  misc_feature (1)..(171): NCBI GI NO: 23394388 NR Description: peptidylprolyl isomerase [Phytophthora infestans]
  misc_feature (1)..(172): NCBI GI NO: 3334157 NR Description: Peptidyl-prolyl cis-trans isomerase

SEQ ID NO: 35326 - protein, 163 aa, Zea mays subsp. mays; identical to SEQ ID NO: 24437
  peptide (1)..(163): Ceres Seq. ID no. 12340743
  misc_feature (1)..(163): NCBI GI NO: 118104 NR Description: Peptidyl-prolyl cis-trans isomerase
  misc_feature (1)..(163): NCBI GI NO: 1084455 NR Description: peptidylprolyl isomerase (EC 5.2.1.8) Cyp2 - rice
  misc_feature (1)..(163): NCBI GI NO: 600769 NR Description: cyclophilin 2
  misc_feature (1)..(162): NCBI GI NO: 13925731 NR Description: cyclophilin A-1 [Triticum aestivum]
  misc_feature (1)..(162): NCBI GI NO: 13925734 NR Description: cyclophilin A-2 [Triticum aestivum]
  misc_feature (1)..(163): NCBI GI NO: 18376589 NR Description: putative cyclosporin A-binding protein
  misc_feature (1)..(163): NCBI GI NO: 18076088 NR Description: cyclophilin [Ricinus communis]
  misc_feature (1)..(162): NCBI GI NO: 11270316 NR Description: peptidylprolyl isomerase (EC 5.2.1.8)
  misc_feature (1)..(162): NCBI GI NO: 23394388 NR Description: peptidylprolyl isomerase [Phytophthora infestans]
  misc_feature (1)..(163): NCBI GI NO: 3334157 NR Description: Peptidyl-prolyl cis-trans isomerase

SEQ ID NO: 35327 - protein, 151 aa, Zea mays subsp. mays; identical to SEQ ID NO: 24438
  peptide (1)..(151): Ceres Seq. ID no. 12340744
  misc_feature (1)..(151): NCBI GI NO: 118104 NR Description: Peptidyl-prolyl cis-trans isomerase
  misc_feature (1)..(151): NCBI GI NO: 1084455 NR Description: peptidylprolyl isomerase (EC 5.2.1.8) Cyp2 - rice
  misc_feature (1)..(151): NCBI GI NO: 600769 NR Description: cyclophilin 2
  misc_feature (1)..(150): NCBI GI NO: 13925731 NR Description: cyclophilin A-1 [Triticum aestivum]
  misc_feature (1)..(150): NCBI GI NO: 13925734 NR Description: cyclophilin A-2 [Triticum aestivum]
  misc_feature (1)..(151): NCBI GI NO: 18376589 NR Description: putative cyclosporin A-binding protein
  misc_feature (1)..(151): NCBI GI NO: 18076088 NR Description: cyclophilin [Ricinus communis]
  misc_feature (1)..(150): NCBI GI NO: 11270316 NR Description: peptidylprolyl isomerase (EC 5.2.1.8)
  misc_feature (1)..(150): NCBI GI NO: 23394388 NR Description: peptidylprolyl isomerase [Phytophthora infestans]
  misc_feature (1)..(151): NCBI GI NO: 3334157 NR Description: Peptidyl-prolyl cis-trans isomerase

SEQ ID NO: 35328 - DNA, 1395 bp, Zea mays subsp. mays
  misc_feature (1)..(1395): Ceres Seq. ID no. 12342650
gctagggttacgcgtccacggcgacgacctctgcgcagagcgtgctgcgattggccggccttcctgggatcctccccgcgcccgacacccggaaacgcgcgcgcgcgcgagggagagacagagtgaggaaacgagggaaggagacgacgcgctcgcctattggccgccggctccgctccttcgcgcccagtgcgacggccacggcctgagcggcgctgccagcaaggcggctagtatgagcagcatggagtcgcggccgggccgaacgaacctggtggagcccatagggcacggcgccgcgctgccgtccggcggccaggcagtgcagccgtggtggacgagctccggggctgtgctcggtgcagtctcgccagccgtcgtggcggtggcgcccgggagcgggacggggattagcctgtcgagcagcccggcaggtggtagtggtggtggcggcgcggctaaaggagccgcgagtgacgagagcagcgaggattcacggagatctggggaaccaaaagatggaagcgctagtcaagaaaagaaccatgccacatcgcagatacccgctctggcgccagagtatttggcaccatactcgcagctggaactgaaccaatcaattgcttctgcagcatatcagtacccagatccttactatgcaggcatggttgctccctatggaagtcatgctgtggctcattttcagctacctggactaactcaatctcgaatgccattacctcttgaagtatccgaggagcctgtttatgtaaatgccaagcagtaccatggtatcttaagacgacggcagtcccgtgctaaggctgaacttgagaaaaaggtggtcaaagccagaaagccataccttcacgagtctcgtcatcagcacgcgatgaggagggcaagaggaaacgggggacgcttcctgaacacaaagaaaagtgacagtggtgctcccaatggaggcgaaaacgccgagcatctccatgtccctcccgacttactacagctacgacagaacgaggcttgaagtagcggtatggctctggcatccttgaacagcagttcctgtccacgggcgtaggcattcgagaccggattcatatagctctccacagcatacgcgcagccatctctgcggtaacgcacgttctcctgaacgagctttgtagcgagataggtatgcaagtgcaatctgggcgcaggaatccatcatcaagtgcccaatgcccatggggtaggtacgctgtttcaggcaattcattcttggctttcacgttccacccttgtgtaactggtgtgttgtaaatgtgtggaaaactaagcttgtgctctgtatcgggccgttcagcggaactgcaaaacgcctgtataattaagatcgaactttggatt

SEQ ID NO: 35329 - protein, 342 aa, Zea mays subsp. mays
  peptide (1)..(342): Ceres Seq. ID no. 12342651
  misc_feature (252)..(308): Pfam Name: CBF-B/NF-YA Pfam Description: CCAAT-binding transcription factor
  misc_feature (82)..(341): NCBI GI NO: 27552556 NR Description: putative CCAAT-binding transcription factor
  misc_feature (140)..(329): NCBI GI NO: 7489565 NR Description: probable transcription factor - rice
  misc_feature (138)..(333): NCBI GI NO: 38640734 NR Description: transcription factor WAPB [Triticum aestivum]
  misc_feature (82)..(326): NCBI GI NO: 30684143 NR Description: CCAAT box binding factor/ transcription factorHap2a
  misc_feature (82)..(326): NCBI GI NO: 18416875 NR Description: CCAAT box binding factor/ transcription factorHap2a
  misc_feature (141)..(342): NCBI GI NO: 28209479 NR Description: putative CCAAT-binding transcription factor
  misc_feature (142)..(325): NCBI GI NO: 34395137 NR Description: putative transcription factor
  misc_feature (90)..(342): NCBI GI NO: 9293997 NR Description: CCAAT-binding transcription factor B subunit
  misc_feature (90)..(342): NCBI GI NO: 18402799 NR Description: CCAAT-binding factor B chain, putative
  misc_feature (160)..(315): NCBI GI NO: 25511727 NR Description: F26G16.12 protein - Arabidopsis thaliana
LGLRVHGDDLCAERAAIGRPSWDPPRARHPETRARARERQSEETREGDDALAYWPPAPLLRAQCDGHGLSGAASKAASMSSMESRPGRTNLVEPIGHGAALPSGGQAVQPWWTSSGAVLGAVSPAVVAVAPGSGTGISLSSSPAGGSGGGGAAKGAASDESSEDSRRSGEPKDGSASQEKNHATSQIPALAPEYLAPYSQLELNQSIASAAYQYPDPYYAGMVAPYGSHAVAHFQLPGLTQSRMPLPLEVSEEPVYVNAKQYHGILRRRQSRAKAELEKKVVKARKPYLHESRHQHAMRRARGNGGRFLNTKKSDSGAPNGGENAEHLHVPPDLLQLRQNEA

SEQ ID NO: 35330 - protein, 264 aa, Zea mays subsp. mays; identical to SEQ ID NO: 26803
  peptide (1)..(264): Ceres Seq. ID no. 12342652
  misc_feature (174)..(230): Pfam Name: CBF-B/NF-YA Pfam Description: CCAAT-binding transcription factor
  misc_feature (4)..(263): NCBI GI NO: 27552556 NR Description: putative CCAAT-binding transcription factor
  misc_feature (62)..(251): NCBI GI NO: 7489565 NR Description: probable transcription factor - rice
  misc_feature (60)..(255): NCBI GI NO: 38640734 NR Description: transcription factor WAPB [Triticum aestivum]
  misc_feature (4)..(248): NCBI GI NO: 30684143 NR Description: CCAAT box binding factor/ transcription factorHap2a
  misc_feature (4)..(248): NCBI GI NO: 18416875 NR Description: CCAAT box binding factor/ transcription factorHap2a
  misc_feature (63)..(264): NCBI GI NO: 28209479 NR Description: putative CCAAT-binding transcription factor
  misc_feature (64)..(247): NCBI GI NO: 34395137 NR Description: putative transcription factor
  misc_feature (12)..(264): NCBI GI NO: 9293997 NR Description: CCAAT-binding transcription factor B subunit
  misc_feature (12)..(264): NCBI GI NO: 18402799 NR Description: CCAAT-binding factor B chain, putative
  misc_feature (82)..(237): NCBI GI NO: 25511727 NR Description: F26G16.12 protein - Arabidopsis thaliana

SEQ ID NO: 35331 - protein, 261 aa, Zea mays subsp. mays; identical to SEQ ID NO: 26804
  peptide (1)..(261): Ceres Seq. ID no. 12342653
  misc_feature (171)..(227): Pfam Name: CBF-B/NF-YA Pfam Description: CCAAT-binding transcription factor
  misc_feature (1)..(260): NCBI GI NO: 27552556 NR Description: putative CCAAT-binding transcription factor
  misc_feature (59)..(248): NCBI GI NO: 7489565 NR Description: probable transcription factor - rice
  misc_feature (57)..(252): NCBI GI NO: 38640734 NR Description: transcription factor WAPB [Triticum aestivum]
  misc_feature (1)..(245): NCBI GI NO: 30684143 NR Description: CCAAT box binding factor/ transcription factorHap2a
  misc_feature (1)..(245): NCBI GI NO: 18416875 NR Description: CCAAT box binding factor/ transcription factorHap2a
  misc_feature (60)..(261): NCBI GI NO: 28209479 NR Description: putative CCAAT-binding transcription factor
  misc_feature (61)..(244): NCBI GI NO: 34395137 NR Description: putative transcription factor
  misc_feature (9)..(261): NCBI GI NO: 9293997 NR Description: CCAAT-binding transcription factor B subunit
  misc_feature (9)..(261): NCBI GI NO: 18402799 NR Description: CCAAT-binding factor B chain, putative
  misc_feature (79)..(234): NCBI GI NO: 25511727 NR Description: F26G16.12 protein - Arabidopsis thaliana

SEQ ID NO: 35332 - DNA, 1054 bp, Zea mays subsp. mays
  misc_feature (1)..(1054): Ceres Seq. ID no. 12349863
agttcagattccgcaaaacaggcagtcaggctcaggcaccaacaccaaccatggcctccgctgcgacacctgcgcctttgctccccgtgaccagcacggctgccggcggcggctccgcgccgtcctccgccacgggcctctccgacgcggcgctcgccacgccggccttccgcctcttcgtgagccggctggccgagacggcgcggcgctcgctcgcggaccggcgcccatggacggagctgctggaccgatcggctttctcccgccccgactccctctccgaggccacctcgcgcctgcgccgcaacctcggctacttccgcgtcaactacgccgccgtcgtcgccttctccctcgcggcctcgctcctggcgcaccctttctccctcctcgtcctcctcagcatcctcggcgcctggtgcttcctctacgtcttccgcgcccccgaccagctcgtcgtgctcttcggccgcaccttcaccgaccgcgagacgctgcttggccttaccgtcgcttctgtgctcgccttcttcctcacctccgtggcttcgctcatcatctccgggctgcttgtcgggggcgccattgtcgcagcgcacggcgcctgccgcattccagaggacctcttccttgatgatccgagcgctgcgtccagtggaaacaccaccagcaggctgatctccttccttgcgtcgcccggatctggggtttgatgcatcaaggaccggtaggaaattcttgtgctcggcgaattcagttgaagtcaaatagagatctgatccagaagctgtataaaccagctccttgctcatgtggtacctcacctgcgagtagcattgtataagtggatccgatttttctgttctactttgtgtggaattacgcaaggatctgcaattgctgtacttctcttgcacttcaccagatctggtgacaatgaccattaagcattgtcaaatgccaacatgtatcggtgtgatctttacattcatcattcatgtgtacaactctacatcatgacaaatttttatggatctctggttatttttgcctc

SEQ ID NO: 35333 - protein, 236 aa, Zea mays subsp. mays
  peptide (1)..(236): Ceres Seq. ID no. 12349864
  misc_feature (20)..(231): NCBI GI NO: 15226664 NR Description: unknown protein; protein id: At2g40380.1
  misc_feature (21)..(235): NCBI GI NO: 15239101 NR Description: putative protein; protein id: At5g05380.1
  misc_feature (21)..(235): NCBI GI NO: 18072825 NR Description: prenylated Rab receptor 2 [Arabidopsis thaliana]
  misc_feature (21)..(229): NCBI GI NO: 15228824 NR Description: putative protein; protein id: At3g56110
  misc_feature (21)..(229): NCBI GI NO: 15450978 NR Description: putative protein [Arabidopsis thaliana]
  misc_feature (17)..(234): NCBI GI NO: 15224494 NR Description: unknown protein; protein id: At2g38360.1
  misc_feature (21)..(232): NCBI GI NO: 15241022 NR Description: putative protein; protein id: At5g01640.1
  misc_feature (24)..(219): NCBI GI NO: 15240698 NR Description: putative protein; protein id: At5g07110
  misc_feature (7)..(219): NCBI GI NO: 40539036 NR Description: putative prenylated rab acceptor protein
  misc_feature (53)..(231): NCBI GI NO: 18405248 NR Description: expressed protein; protein id: At1g55190
FRFRKTGSQAQAPTPTMASAATPAPLLPVTSTAAGGGSAPSSATGLSDAALATPAFRLFVSRLAETARRSLADRRPWTELLDRSAFSRPDSLSEATSRLRRNLGYFRVNYAAVVAFSLAASLLAHPFSLLVLLSILGAWCFLYVFRAPDQLVVLFGRTFTDRETLLGLTVASVLAFFLTSVASLIISGLLVGGAIVAAHGACRIPEDLFLDDPSAASSGNTTSRLISFLASPGSGV

SEQ ID NO: 35334 - protein, 220 aa, Zea mays subsp. mays
  peptide (1)..(220): Ceres Seq. ID no. 12349865
  misc_feature (4)..(215): NCBI GI NO: 15226664 NR Description: unknown protein; protein id: At2g40380.1
  misc_feature (5)..(219): NCBI GI NO: 15239101 NR Description: putative protein; protein id: At5g05380.1
  misc_feature (5)..(219): NCBI GI NO: 18072825 NR Description: prenylated Rab receptor 2 [Arabidopsis thaliana]
  misc_feature (5)..(213): NCBI GI NO: 15228824 NR Description: putative protein; protein id: At3g56110
  misc_feature (5)..(213): NCBI GI NO: 15450978 NR Description: putative protein [Arabidopsis thaliana]
  misc_feature (1)..(218): NCBI GI NO: 15224494 NR Description: unknown protein; protein id: At2g38360.1
  misc_feature (5)..(216): NCBI GI NO: 15241022 NR Description: putative protein; protein id: At5g01640.1
  misc_feature (8)..(203): NCBI GI NO: 15240698 NR Description: putative protein; protein id: At5g07110
  misc_feature (1)..(203): NCBI GI NO: 40539036 NR Description: putative prenylated rab acceptor protein
  misc_feature (37)..(215): NCBI GI NO: 18405248 NR Description: expressed protein; protein id: At1g55190
MASAATPAPLLPVTSTAAGGGSAPSSATGLSDAALATPAFRLFVSRLAETARRSLADRRPWTELLDRSAFSRPDSLSEATSRLRRNLGYFRVNYAAVVAFSLAASLLAHPFSLLVLLSILGAWCFLYVFRAPDQLVVLFGRTFTDRETLLGLTVASVLAFFLTSVASLIISGLLVGGAIVAAHGACRIPEDLFLDDPSAASSGNTTSRLISFLASPGSGV

SEQ ID NO: 35335 - protein, 210 aa, Zea mays subsp. mays
  peptide (1)..(210): Ceres Seq. ID no. 12349866
VQIPQNRQSGSGTNTNHGLRCDTCAFAPRDQHGCRRRLRAVLRHGPLRRGARHAGLPPLREPAGRDGAALARGPAPMDGAAGPIGFLPPRLPLRGHLAPAPQPRLLPRQLRRRRRLLPRGLAPGAPFLPPRPPQHPRRLVLPLRLPRPRPARRALRPHLHRPRDAAWPYRRFCARLLPHLRGFAHHLRAACRGRHCRSARRLPHSRGPLP

SEQ ID NO: 35336 - DNA, 1831 bp, Zea mays subsp. mays
  misc_feature (1)..(1831): Ceres Seq. ID no. 12411187
atccggttcggttccgtcgtccactctcgttccccagttcgctggaccatctcaaaatcctatcctcctctccttccctccgtatctcatccggccgattcgaatctccggtcccatcctctacggcttcaccccgcgcccaatccagtctgtacgtgaatcttgacaggggagagaagaatcggataaggagacctgcaccttcctccgagcaaagcaggagaggaaacaagaatagaggaggagatggccatgcccaccttacgccttgctcctgacctgccgcccgtatcccgcctctgcttcgggacaatgacgatgggagagcagagcggggcggcgtgctcgctccgcctcctcgacgccgcctacgacgccggcgtcaacttcttcgactccgcagagatgtaggctcacctgctccctcatctccctgcctcggttcgagagtaatgaaaggaaaggtgtctggaactctggatgcacatctgcaaacatgtttactcgtcaggtacccagtcccacagcgcagtgagacgcgcgggcgtagcgaggagctcctcggccgctggttgcgggcccgccgggccccacgggacagcgtcgtcgtcgcaaccaaagtcgcggggccttcagggcagatgacgtggattcgcggcgggccgacatctctcgattcacagaacatcgcagaggcaatcgatggctgtttgcgcaggctgggtgtggactacatcgacctctaccagatacactggccggatcggtatgttccaatgtttggggagacagagtatgatccgaactgccagtacacgtctgttccaatggaagagcaactggaggctctcggaagagcaatagatgctggcaaggtacattggccttagcaatgagacaccatatggtttgatgaaatttcttcagttgagtaaggattctcagttgcttccaaagctactgacactgcaggtaagtagcgcagtttgatctaatctgtagtactgtaatcgctctccatatttcttcacctgtgtttttgcagaactcgtataatttgttgtgccgaaattttgattctggattggcagaatgctgccatcatgagaggtatgcttgacacggtcagaagccctaactgttgtcttcagtgtctctaatcttctcatgtatggtcctggcatgagttggtaatgcatattggctttttcccctctatgactatgatacaacgatacatagctctcctgcatgttcgaaaaaatattgacatctgtttagtttaaagaagaatggcattgtcatatcgtatttgctcttggttaagatattttccaaattgtattctgttttgactcaatttatacaattgtttttcttctgaacttccattgttgaactatggcatttgcagaattagccttgctggcttatagcccaatggcaatgggtatactttcaggaaagtatcacttatctgataactgtggtccgccagacgcaagaatgaatcttttcaaagggagatactctgaaggtgaatcccggtacaaactgcagagccccaaagtgaaagcagctgtgaaggaatacacacaaatttctgcaaagtatggcatttctccagtgaccttagcgattgcatttgtcttgagacatccacttgtggcatcggctgttttcggtgcgactaaattgtggcagcttgatgaagttcttcaggcaactacagtccatctttgtgaggaaattgttgctgagatcaatgatgtacatgcaagataccctaacccttgcccataaaattttgcaaaaaaatctttatttagcc

SEQ ID NO: 35337 - protein, 145 aa, Zea mays subsp. mays
  peptide (1)..(145): Ceres Seq. ID no. 12411188
  misc_feature (21)..(144): NCBI GI NO: 23042202 NR Description: hypothetical protein
  misc_feature (21)..(144): NCBI GI NO: 15640686 NR Description: oxidoreductase Tas, aldo/keto reductase family
  misc_feature (21)..(144): NCBI GI NO: 23124929 NR Description: hypothetical protein [Nostoc punctiforme]
  misc_feature (21)..(144): NCBI GI NO: 27363986 NR Description: Oxidoreductase Tas, aldo/keto reductase family
  misc_feature (21)..(144): NCBI GI NO: 23043449 NR Description: hypothetical protein
  misc_feature (21)..(145): NCBI GI NO: 15599630 NR Description: probable oxidoreductase
  misc_feature (21)..(144): NCBI GI NO: 16121102 NR Description: putative aldo/keto reductase-family protein
  misc_feature (21)..(144): NCBI GI NO: 28897290 NR Description: oxidoreductase Tas, aldo/keto reductase family
  misc_feature (21)..(145): NCBI GI NO: 23061190 NR Description: hypothetical protein
  misc_feature (21)..(144): NCBI GI NO: 24372488 NR Description: oxidoreductase, aldo/keto reductase family
MKGKVSGTLDAHLQTCLLVRYPVPQRSETRGRSEELLGRWLRARRAPRDSVVVATKVAGPSGQMTWIRGGPTSLDSQNIAEAIDGCLRRLGVDYIDLYQIHWPDRYVPMFGETEYDPNCQYTSVPMEEQLEALGRAIDAGKVHWP

SEQ ID NO: 35338 - protein, 133 aa, Zea mays subsp. mays
  peptide (1)..(133): Ceres Seq. ID no. 12411189
  misc_feature (1)..(133): NCBI GI NO: 23042202 NR Description: hypothetical protein
  misc_feature (8)..(133): NCBI GI NO: 15640686 NR Description: oxidoreductase Tas, aldo/keto reductase family
  misc_feature (3)..(133): NCBI GI NO: 23124929 NR Description: hypothetical protein [Nostoc punctiforme]
  misc_feature (8)..(133): NCBI GI NO: 27363986 NR Description: Oxidoreductase Tas, aldo/keto reductase family
  misc_feature (1)..(131): NCBI GI NO: 23043449 NR Description: hypothetical protein
  misc_feature (5)..(133): NCBI GI NO: 15599630 NR Description: probable oxidoreductase
  misc_feature (8)..(133): NCBI GI NO: 16121102 NR Description: putative aldo/keto reductase-family protein
  misc_feature (8)..(133): NCBI GI NO: 28897290 NR Description: oxidoreductase Tas, aldo/keto reductase family
  misc_feature (5)..(133): NCBI GI NO: 23061190 NR Description: hypothetical protein
  misc_feature (5)..(133): NCBI GI NO: 24372488 NR Description: oxidoreductase, aldo/keto reductase family
MAFAELALLAYSPMAMGILSGKYHLSDNCGPPDARMNLFKGRYSEGESRYKLQSPKVKAAVKEYTQISAKYGISPVTLAIAFVLRHPLVASAVFGATKLWQLDEVLQATTVHLCEEIVAEINDVHARYPNPCP

SEQ ID NO: 35339 - protein, 120 aa, Zea mays subsp. mays
  peptide (1)..(120): Ceres Seq. ID no. 12411190
  misc_feature (1)..(120): NCBI GI NO: 23042202 NR Description: hypothetical protein
  misc_feature (1)..(120): NCBI GI NO: 15640686 NR Description: oxidoreductase Tas, aldo/keto reductase family
  misc_feature (1)..(120): NCBI GI NO: 23124929 NR Description: hypothetical protein [Nostoc punctiforme]
  misc_feature (1)..(120): NCBI GI NO: 27363986 NR Description: Oxidoreductase Tas, aldo/keto reductase family
  misc_feature (1)..(118): NCBI GI NO: 23043449 NR Description: hypothetical protein
  misc_feature (1)..(120): NCBI GI NO: 15599630 NR Description: probable oxidoreductase
  misc_feature (1)..(120): NCBI GI NO: 16121102 NR Description: putative aldo/keto reductase-family protein
  misc_feature (1)..(120): NCBI GI NO: 28897290 NR Description: oxidoreductase Tas, aldo/keto reductase family
  misc_feature (1)..(120): NCBI GI NO: 23061190 NR Description: hypothetical protein
  misc_feature (1)..(120): NCBI GI NO: 24372488 NR Description: oxidoreductase, aldo/keto reductase family
MAMGILSGKYHLSDNCGPPDARMNLFKGRYSEGESRYKLQSPKVKAAVKEYTQISAKYGISPVTLAIAFVLRHPLVASAVFGATKLWQLDEVLQATTVHLCEEIVAEINDVHARYPNPCP

SEQ ID NO: 35340 - DNA, 1342 bp, Zea mays subsp. mays; identical to SEQ ID NO: 30171
  misc_feature (1)..(1342): Ceres Seq. ID no. 12546334

SEQ ID NO: 35341 - protein, 348 aa, Zea mays subsp. mays; identical to SEQ ID NO: 30172
  peptide (1)..(348): Ceres Seq. ID no. 12546335
  misc_feature (132)..(313): Pfam Name: Pfam Description:  Clp protease
  misc_feature (90)..(346): NCBI GI NO: 38344435 NR Description: OSJNBa0038O10.7
  misc_feature (119)..(323): NCBI GI NO: 18420643 NR Description: ATP-dependent Clp protease proteolytic subunit
  misc_feature (123)..(316): NCBI GI NO: 31238393 NR Description: ENSANGP00000017225 [Anopheles gambiae]
  misc_feature (69)..(314): NCBI GI NO: 34882298 NR Description: similar to ClpP protease [Rattus norvegicus]
  misc_feature (123)..(321): NCBI GI NO: 6685315 NR Description: ATP-dependent Clp protease proteolytic subunit
  misc_feature (83)..(314): NCBI GI NO: 8393156 NR Description: caseinolytic protease
  misc_feature (119)..(314): NCBI GI NO: 5174419 NR Description: endopeptidase Clp precursor
  misc_feature (123)..(316): NCBI GI NO: 23014984 NR Description: hypothetical protein
  misc_feature (119)..(321): NCBI GI NO: 20129427 NR Description: CG5045-PA [Drosophila melanogaster]
  misc_feature (123)..(316): NCBI GI NO: 22967580 NR Description: hypothetical protein [Rhodospirillum rubrum]

SEQ ID NO: 35342 - protein, 302 aa, Zea mays subsp. mays; identical to SEQ ID NO: 30173
  peptide (1)..(302): Ceres Seq. ID no. 12546336
  misc_feature (86)..(267): Pfam Name: Pfam Description:  Clp protease
  misc_feature (44)..(300): NCBI GI NO: 38344435 NR Description: OSJNBa0038O10.7
  misc_feature (73)..(277): NCBI GI NO: 18420643 NR Description: ATP-dependent Clp protease proteolytic subunit
  misc_feature (77)..(270): NCBI GI NO: 31238393 NR Description: ENSANGP00000017225 [Anopheles gambiae]
  misc_feature (23)..(268): NCBI GI NO: 34882298 NR Description: similar to ClpP protease [Rattus norvegicus]
  misc_feature (77)..(275): NCBI GI NO: 6685315 NR Description: ATP-dependent Clp protease proteolytic subunit
  misc_feature (37)..(268): NCBI GI NO: 8393156 NR Description: caseinolytic protease
  misc_feature (73)..(268): NCBI GI NO: 5174419 NR Description: endopeptidase Clp precursor
  misc_feature (77)..(270): NCBI GI NO: 23014984 NR Description: hypothetical protein
  misc_feature (73)..(275): NCBI GI NO: 20129427 NR Description: CG5045-PA [Drosophila melanogaster]
  misc_feature (77)..(270): NCBI GI NO: 22967580 NR Description: hypothetical protein [Rhodospirillum rubrum]

SEQ ID NO: 35343 - protein, 223 aa, Zea mays subsp. mays; identical to SEQ ID NO: 30174
  peptide (1)..(223): Ceres Seq. ID no. 12546337
  misc_feature (7)..(188): Pfam Name: Pfam Description:  Clp protease
  misc_feature (1)..(221): NCBI GI NO: 38344435 NR Description: OSJNBa0038O10.7
  misc_feature (1)..(198): NCBI GI NO: 18420643 NR Description: ATP-dependent Clp protease proteolytic subunit
  misc_feature (1)..(191): NCBI GI NO: 31238393 NR Description: ENSANGP00000017225 [Anopheles gambiae]
  misc_feature (1)..(189): NCBI GI NO: 34882298 NR Description: similar to ClpP protease [Rattus norvegicus]
  misc_feature (1)..(196): NCBI GI NO: 6685315 NR Description: ATP-dependent Clp protease proteolytic subunit
  misc_feature (1)..(189): NCBI GI NO: 8393156 NR Description: caseinolytic protease
  misc_feature (1)..(189): NCBI GI NO: 5174419 NR Description: endopeptidase Clp precursor
  misc_feature (1)..(191): NCBI GI NO: 23014984 NR Description: hypothetical protein
  misc_feature (1)..(196): NCBI GI NO: 20129427 NR Description: CG5045-PA [Drosophila melanogaster]
  misc_feature (1)..(191): NCBI GI NO: 22967580 NR Description: hypothetical protein [Rhodospirillum rubrum]

SEQ ID NO: 35344 - DNA, 1933 bp, Zea mays subsp. mays
  misc_feature (1)..(1933): Ceres Seq. ID no. 12454974
ccccattgccgcattgctctccctcggctcggtccctctccggctctccctcacggcctcgcccactgcgccttcgaggagctccgaatcccgatcgcctcggtccccgcgagctcacatggtgggggcgcgcaccagaggctagggttcccagttcccatcattctcctgctgattaaaaccgtggggttttggagagcctgaggctgtggcggcggcaggaatgaacggggaggtggaatgcagcgtgtgccatgcgaaggtgccggtgccgccgccggtgtcgaaagcgtacgacagccaccggagcactgtgtcgtcgcggcaacgtgcgctaaacgtgctcctcgtctccggcgactgcgtccttgccggcctccagcctatattagtgtacatctcaaaagtggatgggaaattcaaatttagcccaatcagcgtgaatttcttgacagagattacaaaaattatgtttaccattgtaatgctattcatccaggctagacgtctaaaggtgggagacaagccactttttacagtttcaatatttatgcaggctgctcgcaataatgttcttctttcagtacctgcttttctctatgctatcaacaactatttgaagttcataatgcagttatattttaatcctgctagcgtgaaaatgctgagtaatctcaaggttctggtaatcgcagtgcttcttaagatgataatgaggaggcgattttccgtaatccagtgggaggcccttgcccttttgttaatcggaatatctgttaatcagctgaaatcattgccagaaggttctagtgtgctaggtcttcctgttgcagctggagcctacctatatacattgttttttgtaacagttcccgcattggcttcagtttacaacgaaaaggctcttaaaagccagtttgataccagtatttaccttcagaacttgtttctgtatggttatggtgcgatatttaactttattgggcttgttgtcactgctatcatccaagggcccagtagttttaacattctagaaggccactcaaaggccacgatgtttcttatctgcaacaatgctgcacagggcatattatcatcatttttcttcaagtatgcagatacaattttgaagaagtactcatcaacaattgcgactatcttcaccggagtagcctctgctgtgctgtttggccacacactgacgataaattttgttcttggaatttcaatagtaatcatatctatgcatcagtatctttctaaccaaattaaggacgaagtgcctagcagcaaagttgaaatggctgaagctcatgatcacagcagaaaagaacctagttatgtcaacgtgcctgattcaggggcaagtgagtctaaacaccgccatggatctgacgagaggcagccacttcttcccgtatgattttgtagaagaggcgcactgtttcctcaacagagcagcatgtaaagagagtatttttagcgggtatttgacctaattgtctctgaagcaacattggtgccatgctgttggcggggtaaagtatatgcatattcggcggcagtgacgagcttcgtgaagtacactaatagagtaatggtctttggatgaatgagtcgatacctttagcctaatgggtggtaaaactagtgtgataagatcagcgaggaataaagtcaccaccattttttcctgtcttgtgagttggtgagttgatattgatacagccatcagccgtggttctactctctctctctctttctcgcggcaccatgtaaatagaaatatcagttcatttctgatggcgcgtgccacggtgccaaccagagattttattcttgtatgtgcgtgttgcatgagagatactacggcgtgtttactgatcactgagctttgcatgtcttctgaattacagcaaaacgcctaattggc

SEQ ID NO: 35345 - protein, 399 aa, Zea mays subsp. mays
  peptide (1)..(399): Ceres Seq. ID no. 12454975
  misc_feature (101)..(337): Pfam Name: Pfam Description:  Nucleotide-sugar transporter
  misc_feature (17)..(383): NCBI GI NO: 34907666 NR Description: putative transporter-like protein
  misc_feature (1)..(53): NCBI GI NO: 34907666 NR Description: putative transporter-like protein
  misc_feature (2)..(399): NCBI GI NO: 38345234 NR Description: OSJNBa0084K20.12
  misc_feature (2)..(398): NCBI GI NO: 18411150 NR Description: transporter-like protein; protein id: At3g59360
  misc_feature (2)..(398): NCBI GI NO: 26450627 NR Description: unknown protein [Arabidopsis thaliana]
  misc_feature (2)..(332): NCBI GI NO: 11358902 NR Description: transporter-like protein - Arabidopsis thaliana
  misc_feature (6)..(332): NCBI GI NO: 25408848 NR Description: hypothetical protein At2g43240
  misc_feature (211)..(383): NCBI GI NO: 30689311 NR Description: expressed protein [Arabidopsis thaliana]
  misc_feature (211)..(383): NCBI GI NO: 25408848 NR Description: hypothetical protein At2g43240
  misc_feature (6)..(332): NCBI GI NO: 30689311 NR Description: expressed protein [Arabidopsis thaliana]
MNGEVECSVCHAKVPVPPPVSKAYDSHRSTVSSRQRALNVLLVSGDCVLAGLQPILVYISKVDGKFKFSPISVNFLTEITKIMFTIVMLFIQARRLKVGDKPLFTVSIFMQAARNNVLLSVPAFLYAINNYLKFIMQLYFNPASVKMLSNLKVLVIAVLLKMIMRRRFSVIQWEALALLLIGISVNQLKSLPEGSSVLGLPVAAGAYLYTLFFVTVPALASVYNEKALKSQFDTSIYLQNLFLYGYGAIFNFIGLVVTAIIQGPSSFNILEGHSKATMFLICNNAAQGILSSFFFKYADTILKKYSSTIATIFTGVASAVLFGHTLTINFVLGISIVIISMHQYLSNQIKDEVPSSKVEMAEAHDHSRKEPSYVNVPDSGASESKHRHGSDERQPLLPV

SEQ ID NO: 35346 - protein, 317 aa, Zea mays subsp. mays
  peptide (1)..(317): Ceres Seq. ID no. 12454976
  misc_feature (19)..(255): Pfam Name: Pfam Description:  Nucleotide-sugar transporter
  misc_feature (1)..(301): NCBI GI NO: 34907666 NR Description: putative transporter-like protein
  misc_feature (1)..(317): NCBI GI NO: 38345234 NR Description: OSJNBa0084K20.12
  misc_feature (1)..(316): NCBI GI NO: 18411150 NR Description: transporter-like protein; protein id: At3g59360
  misc_feature (1)..(316): NCBI GI NO: 26450627 NR Description: unknown protein [Arabidopsis thaliana]
  misc_feature (1)..(250): NCBI GI NO: 11358902 NR Description: transporter-like protein - Arabidopsis thaliana
  misc_feature (1)..(250): NCBI GI NO: 25408848 NR Description: hypothetical protein At2g43240
  misc_feature (129)..(301): NCBI GI NO: 30689311 NR Description: expressed protein [Arabidopsis thaliana]
  misc_feature (129)..(301): NCBI GI NO: 25408848 NR Description: hypothetical protein At2g43240
  misc_feature (1)..(250): NCBI GI NO: 30689311 NR Description: expressed protein [Arabidopsis thaliana]
  misc_feature (1)..(316): NCBI GI NO: 11358902 NR Description: transporter-like protein - Arabidopsis thaliana
MFTIVMLFIQARRLKVGDKPLFTVSIFMQAARNNVLLSVPAFLYAINNYLKFIMQLYFNPASVKMLSNLKVLVIAVLLKMIMRRRFSVIQWEALALLLIGISVNQLKSLPEGSSVLGLPVAAGAYLYTLFFVTVPALASVYNEKALKSQFDTSIYLQNLFLYGYGAIFNFIGLVVTAIIQGPSSFNILEGHSKATMFLICNNAAQGILSSFFFKYADTILKKYSSTIATIFTGVASAVLFGHTLTINFVLGISIVIISMHQYLSNQIKDEVPSSKVEMAEAHDHSRKEPSYVNVPDSGASESKHRHGSDERQPLLPV

SEQ ID NO: 35347 - protein, 312 aa, Zea mays subsp. mays
  peptide (1)..(312): Ceres Seq. ID no. 12454977
  misc_feature (14)..(250): Pfam Name: Pfam Description:  Nucleotide-sugar transporter
  misc_feature (1)..(296): NCBI GI NO: 34907666 NR Description: putative transporter-like protein
  misc_feature (1)..(312): NCBI GI NO: 38345234 NR Description: OSJNBa0084K20.12
  misc_feature (1)..(311): NCBI GI NO: 18411150 NR Description: transporter-like protein; protein id: At3g59360
  misc_feature (1)..(311): NCBI GI NO: 26450627 NR Description: unknown protein [Arabidopsis thaliana]
  misc_feature (1)..(245): NCBI GI NO: 11358902 NR Description: transporter-like protein - Arabidopsis thaliana
  misc_feature (1)..(245): NCBI GI NO: 25408848 NR Description: hypothetical protein At2g43240
  misc_feature (124)..(296): NCBI GI NO: 30689311 NR Description: expressed protein [Arabidopsis thaliana]
  misc_feature (124)..(296): NCBI GI NO: 25408848 NR Description: hypothetical protein At2g43240
  misc_feature (1)..(245): NCBI GI NO: 30689311 NR Description: expressed protein [Arabidopsis thaliana]
  misc_feature (1)..(311): NCBI GI NO: 11358902 NR Description: transporter-like protein - Arabidopsis thaliana
MLFIQARRLKVGDKPLFTVSIFMQAARNNVLLSVPAFLYAINNYLKFIMQLYFNPASVKMLSNLKVLVIAVLLKMIMRRRFSVIQWEALALLLIGISVNQLKSLPEGSSVLGLPVAAGAYLYTLFFVTVPALASVYNEKALKSQFDTSIYLQNLFLYGYGAIFNFIGLVVTAIIQGPSSFNILEGHSKATMFLICNNAAQGILSSFFFKYADTILKKYSSTIATIFTGVASAVLFGHTLTINFVLGISIVIISMHQYLSNQIKDEVPSSKVEMAEAHDHSRKEPSYVNVPDSGASESKHRHGSDERQPLLPV

SEQ ID NO: 35348 - DNA, 463 bp, Zea mays subsp. mays
  misc_feature (1)..(463): Ceres Seq. ID no. 2871588
gtgactcgagccgttggagatccacactttcctccctccatcgtttctcgatctctcgaccgggcgagggcgacgccgcccgcgcgcgcgccatggatgtggagtacgacgtgatcgtgctgggcaccgggctcaaggagtgcatcctcagcggcctcctctctgtggaccgcctcaaggtgttgcacatggacaggaatgactactacggcggagactccacatcgctcaatctcaatcagctctggaaacggttcaagggtgaagaaacaccgcctgcgcacataggagctagcagagactacaacgttgatatggttccaaagtttatgatggcaaatggtaccttggttcgtgtgctcattcatactggtgtcaccaagtacatgtccttcaaagctgtggatggaagctatgttttcaaacaagggaaagatccacaaggttccttctactgacatgg

SEQ ID NO: 35349 - protein, 151 aa, Zea mays subsp. mays
  peptide (1)..(151): Ceres Seq. ID no. 2871589
  misc_feature (31)..(144): Pfam Name: Pfam Description:  GDP dissociation inhibitor
  misc_feature (31)..(144): NCBI GI NO: 33146460 NR Description: putative GDP dissociation inhibitor
  misc_feature (31)..(144): NCBI GI NO: 7489478 NR Description: GDP dissociation inhibitor protein - rice
  misc_feature (32)..(142): NCBI GI NO: 7489424 NR Description: probable GDP dissociation inhibitor protein -barley
  misc_feature (31)..(144): NCBI GI NO: 7489479 NR Description: GDP dissociation inhibitor protein - rice
  misc_feature (31)..(144): NCBI GI NO: 1550740 NR Description: GDP-associated inhibitor [Arabidopsis thaliana]
  misc_feature (31)..(144): NCBI GI NO: 21592535 NR Description: GDP dissociation inhibitor [Arabidopsis thaliana]
  misc_feature (31)..(144): NCBI GI NO: 15224814 NR Description: GDP dissociation inhibitor; protein id:At2g44100
  misc_feature (31)..(144): NCBI GI NO: 17473582 NR Description: GDP dissociation inhibitor [Arabidopsis thaliana]
  misc_feature (31)..(144): NCBI GI NO: 15232210 NR Description: Rab GDP dissociation inhibitor
  misc_feature (31)..(144): NCBI GI NO: 3175990 NR Description: GDP dissociation inhibitor [Cicer arietinum]
DSSRWRSTLSSLHRFSISRPGEGDAARARAMDVEYDVIVLGTGLKECILSGLLSVDRLKVLHMDRNDYYGGDSTSLNLNQLWKRFKGEETPPAHIGASRDYNVDMVPKFMMANGTLVRVLIHTGVTKYMSFKAVDGSYVFKQGKDPQGSFY

SEQ ID NO: 35350 - protein, 121 aa, Zea mays subsp. mays
  peptide (1)..(121): Ceres Seq. ID no. 2871590
  misc_feature (1)..(114): Pfam Name: Pfam Description:  GDP dissociation inhibitor
  misc_feature (1)..(114): NCBI GI NO: 33146460 NR Description: putative GDP dissociation inhibitor
  misc_feature (1)..(114): NCBI GI NO: 7489478 NR Description: GDP dissociation inhibitor protein - rice
  misc_feature (2)..(112): NCBI GI NO: 7489424 NR Description: probable GDP dissociation inhibitor protein -barley
  misc_feature (1)..(114): NCBI GI NO: 7489479 NR Description: GDP dissociation inhibitor protein - rice
  misc_feature (1)..(114): NCBI GI NO: 1550740 NR Description: GDP-associated inhibitor [Arabidopsis thaliana]
  misc_feature (1)..(114): NCBI GI NO: 15224814 NR Description: GDP dissociation inhibitor; protein id:At2g44100
  misc_feature (1)..(114): NCBI GI NO: 21592535 NR Description: GDP dissociation inhibitor [Arabidopsis thaliana]
  misc_feature (1)..(114): NCBI GI NO: 17473582 NR Description: GDP dissociation inhibitor [Arabidopsis thaliana]
  misc_feature (1)..(114): NCBI GI NO: 15232210 NR Description: Rab GDP dissociation inhibitor
  misc_feature (1)..(114): NCBI GI NO: 3175990 NR Description: GDP dissociation inhibitor [Cicer arietinum]
MDVEYDVIVLGTGLKECILSGLLSVDRLKVLHMDRNDYYGGDSTSLNLNQLWKRFKGEETPPAHIGASRDYNVDMVPKFMMANGTLVRVLIHTGVTKYMSFKAVDGSYVFKQGKDPQGSFY

SEQ ID NO: 35351 - protein, 89 aa, Zea mays subsp. mays
  peptide (1)..(89): Ceres Seq. ID no. 2871591
  misc_feature (1)..(82): Pfam Name: Pfam Description:  GDP dissociation inhibitor
  misc_feature (1)..(82): NCBI GI NO: 33146460 NR Description: putative GDP dissociation inhibitor
  misc_feature (1)..(82): NCBI GI NO: 7489478 NR Description: GDP dissociation inhibitor protein - rice
  misc_feature (1)..(80): NCBI GI NO: 7489424 NR Description: probable GDP dissociation inhibitor protein -barley
  misc_feature (1)..(82): NCBI GI NO: 7489479 NR Description: GDP dissociation inhibitor protein - rice
  misc_feature (1)..(82): NCBI GI NO: 1550740 NR Description: GDP-associated inhibitor [Arabidopsis thaliana]
  misc_feature (1)..(82): NCBI GI NO: 21592535 NR Description: GDP dissociation inhibitor [Arabidopsis thaliana]
  misc_feature (1)..(82): NCBI GI NO: 17473582 NR Description: GDP dissociation inhibitor [Arabidopsis thaliana]
  misc_feature (1)..(82): NCBI GI NO: 15224814 NR Description: GDP dissociation inhibitor; protein id:At2g44100
  misc_feature (1)..(82): NCBI GI NO: 15232210 NR Description: Rab GDP dissociation inhibitor
  misc_feature (1)..(82): NCBI GI NO: 3175990 NR Description: GDP dissociation inhibitor [Cicer arietinum]
MDRNDYYGGDSTSLNLNQLWKRFKGEETPPAHIGASRDYNVDMVPKFMMANGTLVRVLIHTGVTKYMSFKAVDGSYVFKQGKDPQGSFY

SEQ ID NO: 35352 - DNA, 739 bp, Zea mays subsp. mays
  misc_feature (1)..(739): Ceres Seq. ID no. 12376756
  misc_feature (604)..(604): n is a, c, t, g, unknown, or other
  misc_feature (722)..(722): n is a, c, t, g, unknown, or other
aaaccgagcgtacgccatggatcgcgagtggggctccaagcccggcagcggcggtgccgcctccgcccagaatgaggctattgaccggcgggagcgtctccgccgcctggccctcgagaccatcgacctcgccaaggatccctatttcatgcgcaaccacctcggcagctatgagtgcaagctgtgcctgacgctgcacaacaacgaggggaactacctagcccacacgcaagggaagaggcaccataccaacctcgccaagcgcgccgcccgagaggccaaggatgcgcccgcgcagccccagcccaacaagcgcaagcttgtcctgacgttcttatggatcctgaagggtcttctcgaggtggtctgcacatttggaagcatggtgtttgcaagcatccttcttgttcgtggtatatggtctggggtgacatacatcagagaaaaccgttacagctatattcaccggatcgacaacgatgagaaccgatggagcagagtccagactgctggttaatattttgctttccttatctatgaacagacacactctgcgttgataggctgtatagtacaaaaagaaaagatatggtcagcaagtgcnaactatgatgattgccattgctagacctcgcggctaaggctgtctctagcagtaagcctctctctagcagcgtgcgttatattaatcttctagaccccgtggttaaggctgcctctancagcgttatcttttttg

SEQ ID NO: 35353 - protein, 171 aa, Zea mays subsp. mays
  peptide (1)..(171): Ceres Seq. ID no. 12376757
  misc_feature (54)..(106): NCBI GI NO: 34902138 NR Description: hypothetical protein
  misc_feature (6)..(57): NCBI GI NO: 34902138 NR Description: hypothetical protein
  misc_feature (6)..(107): NCBI GI NO: 7488346 NR Description: probable spliceosome-associated protein SAP62homolog T26B15
  misc_feature (6)..(107): NCBI GI NO: 18403023 NR Description: spliceosome associated protein-family
  misc_feature (11)..(164): NCBI GI NO: 21361376 NR Description: splicing factor 3a, subunit 2, 66kDa
  misc_feature (11)..(107): NCBI GI NO: 27371271 NR Description: Similar to splicing factor 3a, subunit 2, 66kDa
  misc_feature (11)..(164): NCBI GI NO: 34862283 NR Description: similar to Splicing factor 3A subunit 2
  misc_feature (11)..(107): NCBI GI NO: 30931324 NR Description: Unknown (protein for MGC:64703) [Mus musculus]
  misc_feature (11)..(107): NCBI GI NO: 28278443 NR Description: Similar to splicing factor 3a, subunit 2, 66kDa
  misc_feature (11)..(164): NCBI GI NO: 627605 NR Description: spliceosome-associated protein SAP 62 - human
NRAYAMDREWGSKPGSGGAASAQNEAIDRRERLRRLALETIDLAKDPYFMRNHLGSYECKLCLTLHNNEGNYLAHTQGKRHHTNLAKRAAREAKDAPAQPQPNKRKLVLTFLWILKGLLEVVCTFGSMVFASILLVRGIWSGVTYIRENRYSYIHRIDNDENRWSRVQTAG

SEQ ID NO: 35354 - protein, 166 aa, Zea mays subsp. mays
  peptide (1)..(166): Ceres Seq. ID no. 12376758
  misc_feature (49)..(101): NCBI GI NO: 34902138 NR Description: hypothetical protein
  misc_feature (1)..(52): NCBI GI NO: 34902138 NR Description: hypothetical protein
  misc_feature (1)..(102): NCBI GI NO: 7488346 NR Description: probable spliceosome-associated protein SAP62homolog T26B15
  misc_feature (1)..(102): NCBI GI NO: 18403023 NR Description: spliceosome associated protein-family
  misc_feature (6)..(159): NCBI GI NO: 21361376 NR Description: splicing factor 3a, subunit 2, 66kDa
  misc_feature (6)..(102): NCBI GI NO: 27371271 NR Description: Similar to splicing factor 3a, subunit 2, 66kDa
  misc_feature (6)..(159): NCBI GI NO: 34862283 NR Description: similar to Splicing factor 3A subunit 2
  misc_feature (6)..(102): NCBI GI NO: 30931324 NR Description: Unknown (protein for MGC:64703) [Mus musculus]
  misc_feature (6)..(102): NCBI GI NO: 28278443 NR Description: Similar to splicing factor 3a, subunit 2, 66kDa
  misc_feature (6)..(159): NCBI GI NO: 627605 NR Description: spliceosome-associated protein SAP 62 - human
MDREWGSKPGSGGAASAQNEAIDRRERLRRLALETIDLAKDPYFMRNHLGSYECKLCLTLHNNEGNYLAHTQGKRHHTNLAKRAAREAKDAPAQPQPNKRKLVLTFLWILKGLLEVVCTFGSMVFASILLVRGIWSGVTYIRENRYSYIHRIDNDENRWSRVQTAG

SEQ ID NO: 35355 - protein, 122 aa, Zea mays subsp. mays
  peptide (1)..(122): Ceres Seq. ID no. 12376759
  misc_feature (5)..(57): NCBI GI NO: 34902138 NR Description: hypothetical protein
  misc_feature (1)..(58): NCBI GI NO: 7488346 NR Description: probable spliceosome-associated protein SAP62homolog T26B15
  misc_feature (1)..(58): NCBI GI NO: 18403023 NR Description: spliceosome associated protein-family
  misc_feature (1)..(115): NCBI GI NO: 21361376 NR Description: splicing factor 3a, subunit 2, 66kDa
  misc_feature (1)..(58): NCBI GI NO: 27371271 NR Description: Similar to splicing factor 3a, subunit 2, 66kDa
  misc_feature (1)..(115): NCBI GI NO: 34862283 NR Description: similar to Splicing factor 3A subunit 2
  misc_feature (1)..(58): NCBI GI NO: 30931324 NR Description: Unknown (protein for MGC:64703) [Mus musculus]
  misc_feature (1)..(58): NCBI GI NO: 28278443 NR Description: Similar to splicing factor 3a, subunit 2, 66kDa
  misc_feature (1)..(115): NCBI GI NO: 627605 NR Description: spliceosome-associated protein SAP 62 - human
  misc_feature (1)..(115): NCBI GI NO: 10800150 NR Description: splicing factor 3a, subunit 2
MRNHLGSYECKLCLTLHNNEGNYLAHTQGKRHHTNLAKRAAREAKDAPAQPQPNKRKLVLTFLWILKGLLEVVCTFGSMVFASILLVRGIWSGVTYIRENRYSYIHRIDNDENRWSRVQTAG

SEQ ID NO: 35356 - DNA, 2245 bp, Zea mays subsp. mays
  misc_feature (1)..(2245): Ceres Seq. ID no. 12455032
actgccagtgccatcccattcccatccgagctgcagcgctcgacgacggggagaatagcgtggcgtgggcggcgccatgaagtacagcaaggaagataagcccgagagggcgggcggcgccggcgcagggtccagggcggtgccggtggcgctcgtcgtcgtcgtgctctgcgccttctccttctacctgggcggcatctacagcacgggacggagcctgctggactccatccagccggcgccgacggctctcctcgccctcggcgccgccacgacgacccgccgtccctccgacgacggccaggctcggccggcactggcgtccacggccgccgtggcgttccccgagtgccccgccgattaccaggactacaccccctgcaccgaccccaagcgctggcggaggtacggcaactaccgcctgagcttcatggagcggcactgcccgccgccgcccgaccggcagcagtgcctggtgccgccgcccaaggggtacaagccgcccatccggtggcccaagagcaaggaccagtgctggtaccggaacgtcccctacgactggatcaacagccagaagtccaaccagcactggctcgtcaaggagggcgaccgcttccggttccccggcggcggcaccatgttccccaacggcgtgggcgcgtacgtggacctgatgcagggcctggtcccgggcatgcgcgacggcaccgtccgcaccgcgctcgacaccggctgcggcgtcgccagctggggcggcgacctgctggggcggggcatcctcaccgtgtcgctggcgcccagggacaaccacgaggcccaggtgcagttcgcgctggagcgcggcatcccggccatcctcggcatcatctccacgcagcgcctgccgttcccgtccgccgccttcgacatggcgcactgctcgcgctgcctcatcccctggaccgagttcggcagcctctacctcctggagatccaccgcgtcctccgcccgggcggcttctgggtgctctccggcccgcccgtcaactacgagaaccgctggcacggctggaacaccaccgcgcaggcgcagaaggccgacctggacaggctcaagaagatgctggccagcatgtgcttcaagctctacagcatgaagggggacatagccgtgtggcagaagtccgccgacgcctgctacgacaagctcaccccggtcaccacgcccgccaagtgcgacgacagcgtcgaccccgacgccgcctggtacgtgcccatgcgctcctgcgtcacggctcccagccccaagtacaggaagctggggctcaacgccacgcccaagtggccacagaggctcagcgtcgccccggagcgcatcagcgtcgtcccgggcagcagcgccgccgccttcaagcaggacgacgcccggtggaagctcagggccaagcactacaagacgctgctgccggcgctggggagcgacaagatcaggaacgtcatggacatgaacaccgtgtacggaggattcgcaggcagcctcatcaaggaccccgtctgggtcatgaacgtcgtctcctcctacggcccaaactccctcggcgtcgtctacgacagagggctcatcggcgtcaaccacgactggtgtgaggcgttctcgacatatccacgcacctatgacctgttgcatcttgatggcctgttcacagcagagtctcacaggtgcgagatgaagtacgtgctccttgagatggaccgtatccttcgtcccacgggctacgccataatccgggagagcacctacttcctcgattctgtggcacccattgccaaagggatgcgatggagctgcgagaagcacagcagcgagaacaaggccgacaaggacaagatcctcgtctgccagaaaaagctttgggcaggaaagcagtgacgagagaggatcatccttcttccttccgagtataaaaaagtaggcatccagatcagttgctgctgtggtctcgatcggccaacaaggcaagaggcgcttcagtacacatggaagatgagcgagtactttctgatacaagagtgttcgcagttattatcaaaataaataagccgagtaaaactccatataggatccaacagttaccatttttcattaatcacagtttaattctttttctgtaccgacagtttgtaggcaaggaatgggtcgattcatataccatggtgagcaaatgtaagtttactccacactagatgtgtatagcttggttggtgc

SEQ ID NO: 35357 - protein, 610 aa, Zea mays subsp. mays
  peptide (1)..(610): Ceres Seq. ID no. 12455033
  misc_feature (98)..(603): Pfam Name: Pfam Description:  Putative methyltransferase
  misc_feature (8)..(606): NCBI GI NO: 18415244 NR Description: putative protein; protein id: At4g19120
  misc_feature (1)..(606): NCBI GI NO: 15222494 NR Description: unknown protein; protein id: At1g31850.1
  misc_feature (1)..(606): NCBI GI NO: 24417414 NR Description: unknown [Arabidopsis thaliana]
  misc_feature (106)..(560): NCBI GI NO: 7487142 NR Description: hypothetical protein T18B16
  misc_feature (82)..(610): NCBI GI NO: 37535962 NR Description: unknown protein
  misc_feature (1)..(609): NCBI GI NO: 24413975 NR Description: hypothetical protein~similar to Oryza sativachromosome 10
  misc_feature (89)..(609): NCBI GI NO: 15235080 NR Description: putative protein; protein id: At4g10440.1
  misc_feature (89)..(608): NCBI GI NO: 18398763 NR Description: unknown protein; protein id: At1g33170.1
  misc_feature (19)..(608): NCBI GI NO: 22328758 NR Description: putative protein; protein id: At4g18030
  misc_feature (75)..(610): NCBI GI NO: 37537004 NR Description: hypothetical protein
MKYSKEDKPERAGGAGAGSRAVPVALVVVVLCAFSFYLGGIYSTGRSLLDSIQPAPTALLALGAATTTRRPSDDGQARPALASTAAVAFPECPADYQDYTPCTDPKRWRRYGNYRLSFMERHCPPPPDRQQCLVPPPKGYKPPIRWPKSKDQCWYRNVPYDWINSQKSNQHWLVKEGDRFRFPGGGTMFPNGVGAYVDLMQGLVPGMRDGTVRTALDTGCGVASWGGDLLGRGILTVSLAPRDNHEAQVQFALERGIPAILGIISTQRLPFPSAAFDMAHCSRCLIPWTEFGSLYLLEIHRVLRPGGFWVLSGPPVNYENRWHGWNTTAQAQKADLDRLKKMLASMCFKLYSMKGDIAVWQKSADACYDKLTPVTTPAKCDDSVDPDAAWYVPMRSCVTAPSPKYRKLGLNATPKWPQRLSVAPERISVVPGSSAAAFKQDDARWKLRAKHYKTLLPALGSDKIRNVMDMNTVYGGFAGSLIKDPVWVMNVVSSYGPNSLGVVYDRGLIGVNHDWCEAFSTYPRTYDLLHLDGLFTAESHRCEMKYVLLEMDRILRPTGYAIIRESTYFLDSVAPIAKGMRWSCEKHSSENKADKDKILVCQKKLWAGKQ

SEQ ID NO: 35358 - protein, 492 aa, Zea mays subsp. mays
  peptide (1)..(492): Ceres Seq. ID no. 12455034
  misc_feature (1)..(485): Pfam Name: Pfam Description:  Putative methyltransferase
  misc_feature (1)..(488): NCBI GI NO: 18415244 NR Description: putative protein; protein id: At4g19120
  misc_feature (1)..(488): NCBI GI NO: 15222494 NR Description: unknown protein; protein id: At1g31850.1
  misc_feature (1)..(488): NCBI GI NO: 24417414 NR Description: unknown [Arabidopsis thaliana]
  misc_feature (1)..(442): NCBI GI NO: 7487142 NR Description: hypothetical protein T18B16
  misc_feature (1)..(492): NCBI GI NO: 37535962 NR Description: unknown protein
  misc_feature (1)..(491): NCBI GI NO: 24413975 NR Description: hypothetical protein~similar to Oryza sativachromosome 10
  misc_feature (1)..(491): NCBI GI NO: 15235080 NR Description: putative protein; protein id: At4g10440.1
  misc_feature (1)..(490): NCBI GI NO: 18398763 NR Description: unknown protein; protein id: At1g33170.1
  misc_feature (1)..(490): NCBI GI NO: 22328758 NR Description: putative protein; protein id: At4g18030
  misc_feature (1)..(492): NCBI GI NO: 37537004 NR Description: hypothetical protein
MERHCPPPPDRQQCLVPPPKGYKPPIRWPKSKDQCWYRNVPYDWINSQKSNQHWLVKEGDRFRFPGGGTMFPNGVGAYVDLMQGLVPGMRDGTVRTALDTGCGVASWGGDLLGRGILTVSLAPRDNHEAQVQFALERGIPAILGIISTQRLPFPSAAFDMAHCSRCLIPWTEFGSLYLLEIHRVLRPGGFWVLSGPPVNYENRWHGWNTTAQAQKADLDRLKKMLASMCFKLYSMKGDIAVWQKSADACYDKLTPVTTPAKCDDSVDPDAAWYVPMRSCVTAPSPKYRKLGLNATPKWPQRLSVAPERISVVPGSSAAAFKQDDARWKLRAKHYKTLLPALGSDKIRNVMDMNTVYGGFAGSLIKDPVWVMNVVSSYGPNSLGVVYDRGLIGVNHDWCEAFSTYPRTYDLLHLDGLFTAESHRCEMKYVLLEMDRILRPTGYAIIRESTYFLDSVAPIAKGMRWSCEKHSSENKADKDKILVCQKKLWAGKQ

SEQ ID NO: 35359 - protein, 423 aa, Zea mays subsp. mays
  peptide (1)..(423): Ceres Seq. ID no. 12455035
  misc_feature (1)..(416): Pfam Name: Pfam Description:  Putative methyltransferase
  misc_feature (1)..(419): NCBI GI NO: 18415244 NR Description: putative protein; protein id: At4g19120
  misc_feature (1)..(419): NCBI GI NO: 15222494 NR Description: unknown protein; protein id: At1g31850.1
  misc_feature (1)..(419): NCBI GI NO: 24417414 NR Description: unknown [Arabidopsis thaliana]
  misc_feature (1)..(373): NCBI GI NO: 7487142 NR Description: hypothetical protein T18B16
  misc_feature (1)..(423): NCBI GI NO: 37535962 NR Description: unknown protein
  misc_feature (1)..(422): NCBI GI NO: 24413975 NR Description: hypothetical protein~similar to Oryza sativachromosome 10
  misc_feature (1)..(422): NCBI GI NO: 15235080 NR Description: putative protein; protein id: At4g10440.1
  misc_feature (1)..(421): NCBI GI NO: 18398763 NR Description: unknown protein; protein id: At1g33170.1
  misc_feature (1)..(421): NCBI GI NO: 22328758 NR Description: putative protein; protein id: At4g18030
  misc_feature (1)..(423): NCBI GI NO: 37537004 NR Description: hypothetical protein
MFPNGVGAYVDLMQGLVPGMRDGTVRTALDTGCGVASWGGDLLGRGILTVSLAPRDNHEAQVQFALERGIPAILGIISTQRLPFPSAAFDMAHCSRCLIPWTEFGSLYLLEIHRVLRPGGFWVLSGPPVNYENRWHGWNTTAQAQKADLDRLKKMLASMCFKLYSMKGDIAVWQKSADACYDKLTPVTTPAKCDDSVDPDAAWYVPMRSCVTAPSPKYRKLGLNATPKWPQRLSVAPERISVVPGSSAAAFKQDDARWKLRAKHYKTLLPALGSDKIRNVMDMNTVYGGFAGSLIKDPVWVMNVVSSYGPNSLGVVYDRGLIGVNHDWCEAFSTYPRTYDLLHLDGLFTAESHRCEMKYVLLEMDRILRPTGYAIIRESTYFLDSVAPIAKGMRWSCEKHSSENKADKDKILVCQKKLWAGKQ

SEQ ID NO: 35360 - DNA, 948 bp, Zea mays subsp. mays
  misc_feature (1)..(948): Ceres Seq. ID no. 13570435
  misc_feature (628)..(628): n is a, c, t, g, unknown, or other
  misc_feature (495)..(495): n is a, c, t, g, unknown, or other
  misc_feature (927)..(927): n is a, c, t, g, unknown, or other
gccgcacgaacgtgcatcctcctccttagagtcatctcctcccgagcggtgggttcggacgcgagccgcagcgacgtcgccgcggagggcctgggcgcggcttccgtgggcggttcgtgcgcgtccagcggcgtggtctcggttgagcggtcgacgacgaccaggcatcgcagccgtgaagagaagaaggccttggtggtggaggtggcggatcatgaatgcgacgacgacttgggcgccggcgagtctgacatctccgaggagctgggtgcgaaccatgaaggaaacagtactgaaggtggcatatcatcggtcgacagcgtttctagcttgctcagtgggataagctaccaagacgttagctctggctgtgcctaccgagcatcctctcatcatcaccatcagaggaggaggacatccgaagaaaagggtgcccagcaattgcgtccttccaaacccggtccaaaggcggagaaggtcggtctcagacatgangcggtggacggtcggagggccgctgaggagtggatggtcgactacgctctccggaaggaagtcaagaggctggctcgtgctcagaagaggaaagttgagatgcttgtccaggccttcgaatctgttctgcccncggtagcaatagcaagcgagaagaagcccgggcaacacgatggccttcgaaagcatgcatgtagctgacagatagatagatagaatcatagatagccgacactcatcttgagtcaggtagtagtaggacgtgacaatttgagtcaggtagatgaaacgtttcaattcagtcaaacactagtcacaacggatacaaggtttgatgctccaccaaccactgatccgttgtgaacttgtagtagaagcaggccaccgctggcaatgtggcatgccatgccatcaacctaacatggaccattntgaatgtcggctcaaaacgtg

SEQ ID NO: 35361 - protein, 231 aa, Zea mays subsp. mays
  peptide (1)..(231): Ceres Seq. ID no. 13570436
  misc_feature (135)..(211): NCBI GI NO: 24637279 NR Description: pathogen-induced calmodulin-binding protein
  misc_feature (46)..(207): NCBI GI NO: 24637243 NR Description: pathogen-induced calmodulin-binding protein
  misc_feature (46)..(207): NCBI GI NO: 15237600 NR Description: Calmodulin-binding protein [Arabidopsis thaliana]
  misc_feature (153)..(209): NCBI GI NO: 17933110 NR Description: PNCBP [Solanum tuberosum]
  misc_feature (150)..(209): NCBI GI NO: 15224955 NR Description: Calmodulin-binding protein [Arabidopsis thaliana]
  misc_feature (126)..(208): NCBI GI NO: 25956269 NR Description: unnamed protein product [Lotus japonicus]
  misc_feature (145)..(209): NCBI GI NO: 17933110 NR Description: PNCBP [Solanum tuberosum]
  misc_feature (165)..(165): Xaa is any aa, unknown or other
  misc_feature (210)..(210): Xaa is any aa, unknown or other
AARTCILLLRVISSRAVGSDASRSDVAAEGLGAASVGGSCASSGVVSVERSTTTRHRSREEKKALVVEVADHECDDDLGAGESDISEELGANHEGNSTEGGISSVDSVSSLLSGISYQDVSSGCAYRASSHHHHQRRRTSEEKGAQQLRPSKPGPKAEKVGLRHXAVDGRRAAEEWMVDYALRKEVKRLARAQKRKVEMLVQAFESVLPXVAIASEKKPGQHDGLRKHACS

SEQ ID NO: 35362 - DNA, 842 bp, Zea mays subsp. mays; identical to SEQ ID NO: 33850
  misc_feature (1)..(842): Ceres Seq. ID no. 12413106

SEQ ID NO: 35363 - protein, 228 aa, Zea mays subsp. mays; identical to SEQ ID NO: 33851
  peptide (1)..(228): Ceres Seq. ID no. 12413107
  misc_feature (70)..(208): Pfam Name: Pfam Description:  ATP synthase
  misc_feature (34)..(208): NCBI GI NO: 27818005 NR Description: OSJNBb0041J06.11
  misc_feature (34)..(208): NCBI GI NO: 18412632 NR Description: coded for by A
  misc_feature (31)..(208): NCBI GI NO: 114640 NR Description: ATP synthase gamma chain, chloroplast precursor
  misc_feature (31)..(208): NCBI GI NO: 231610 NR Description: ATP synthase gamma chain, chloroplast precursor
  misc_feature (34)..(205): NCBI GI NO: 114643 NR Description: ATP synthase gamma chain, chloroplast precursor
  misc_feature (67)..(205): NCBI GI NO: 755801 NR Description: ATP synthase [Spinacia oleracea]
  misc_feature (58)..(208): NCBI GI NO: 15218281 NR Description: ATP synthase gamma-subunit, putative
  misc_feature (91)..(208): NCBI GI NO: 5708095 NR Description: ATP synthase gamma chain, chloroplast precursor
  misc_feature (62)..(198): NCBI GI NO: 114638 NR Description: ATP synthase gamma chain, chloroplast precursor
  misc_feature (62)..(198): NCBI GI NO: 228698 NR Description: CF1 ATP synthase:SUBUNIT=gamma

SEQ ID NO: 35364 - protein, 195 aa, Zea mays subsp. mays; identical to SEQ ID NO: 33852
  peptide (1)..(195): Ceres Seq. ID no. 12413108
  misc_feature (37)..(175): Pfam Name: Pfam Description:  ATP synthase
  misc_feature (1)..(175): NCBI GI NO: 27818005 NR Description: OSJNBb0041J06.11
  misc_feature (1)..(175): NCBI GI NO: 18412632 NR Description: coded for by A
  misc_feature (1)..(175): NCBI GI NO: 114640 NR Description: ATP synthase gamma chain, chloroplast precursor
  misc_feature (1)..(175): NCBI GI NO: 231610 NR Description: ATP synthase gamma chain, chloroplast precursor
  misc_feature (1)..(172): NCBI GI NO: 114643 NR Description: ATP synthase gamma chain, chloroplast precursor
  misc_feature (34)..(172): NCBI GI NO: 755801 NR Description: ATP synthase [Spinacia oleracea]
  misc_feature (25)..(175): NCBI GI NO: 15218281 NR Description: ATP synthase gamma-subunit, putative
  misc_feature (58)..(175): NCBI GI NO: 5708095 NR Description: ATP synthase gamma chain, chloroplast precursor
  misc_feature (29)..(165): NCBI GI NO: 114638 NR Description: ATP synthase gamma chain, chloroplast precursor
  misc_feature (29)..(165): NCBI GI NO: 228698 NR Description: CF1 ATP synthase:SUBUNIT=gamma

SEQ ID NO: 35365 - protein, 138 aa, Zea mays subsp. mays; identical to SEQ ID NO: 33853
  peptide (1)..(138): Ceres Seq. ID no. 12413109
  misc_feature (1)..(118): Pfam Name: Pfam Description:  ATP synthase
  misc_feature (1)..(118): NCBI GI NO: 27818005 NR Description: OSJNBb0041J06.11
  misc_feature (1)..(118): NCBI GI NO: 18412632 NR Description: coded for by A
  misc_feature (1)..(118): NCBI GI NO: 114640 NR Description: ATP synthase gamma chain, chloroplast precursor
  misc_feature (1)..(118): NCBI GI NO: 231610 NR Description: ATP synthase gamma chain, chloroplast precursor
  misc_feature (1)..(115): NCBI GI NO: 114643 NR Description: ATP synthase gamma chain, chloroplast precursor
  misc_feature (1)..(115): NCBI GI NO: 755801 NR Description: ATP synthase [Spinacia oleracea]
  misc_feature (1)..(118): NCBI GI NO: 15218281 NR Description: ATP synthase gamma-subunit, putative
  misc_feature (1)..(118): NCBI GI NO: 5708095 NR Description: ATP synthase gamma chain, chloroplast precursor
  misc_feature (1)..(108): NCBI GI NO: 114638 NR Description: ATP synthase gamma chain, chloroplast precursor
  misc_feature (1)..(108): NCBI GI NO: 228698 NR Description: CF1 ATP synthase:SUBUNIT=gamma

SEQ ID NO: 35366 - DNA, 2725 bp, Zea mays subsp. mays
  misc_feature (1)..(2725): Ceres Seq. ID no. 12436176
aaacaaaaaaaatctcagaacacacacacacacacacacctctatcgccccgacctcgacgcgacccctctcgcttggatccggacggcccggtccctccgccctcccatgcgcacggcgccgccgccgccgacatgacgctcgcctccctcgcccgcgccctcggccggtccgcgcgctcctcccgcccgcgccagggtttccagctcgggggcctccggcagccgcccgcgccaccgctaccgccgcctgtccacggcggtgagggtggggcggcaggatttgttcgcagctacctgactgcggtctcgtcggcagctcttcggaagccatccgcgggcaagaccgtggattggagatatgtcctcgccagcccacatttccgacgcctcttctcggacgggtccaagaagaactacgagaactattaccccaagggtaagaaggaggtgcctaaaggagatggtacaaacaagtctgaatctaagcaggaatccaatacagatgaaggatggaattttcaggataatgctatgaaacacatgcagaatttccttgcgcctttattgattcttggcctgatgctatcatccatgtcatctagctctgcagaccagaaggagataagcttccaagagttcaagaacaagttactagaacctggtttagttgatcgcattgttgtttcaaataaatcagtagcgaaggtctacatcaggaattcacctcatccaaagagccaaggccaagatagtgatatccatattactaccactgatgctccaggcaagcctgctcccagcagatgcaagtattacttcaatattggtagtgttgatttgtttgaagagaagttagaggaagcccaggaagctttgggaatagatccacatgattttgtcccagtaacttatgttgctgaagtaaattggttccaagaagttatgaggtttgccccaacagcattgattattggtctattatatttcacgggaaaaaggatgcagagtggtttcaatattggaggtggtgctggcaaaggaagaggaggtattttcaacattggaaaagctacagtgatgaagatggacaagaactccaaaaataaggtgtttttttaaggatgtagccggttgtgacgaagcaaaacaagaaataatggagtttgtgcatttccttaaaaaccctaagaagtatgaagatttgggagctaaaatacccaaaggtgctctacttgtaggccctcctgggacagggaagactttgctcgccaaagctacagcaggagagtctggtgtgccatttttgtctatttctggttcagatttcatggaaatgtttgttggtgttggaccgtccagggtacggaacttgttccaagaagctaggcagtgtgctcctagtattgtattcattgacgaaatcgatgctattggtcgtgcaagaggacgtggaggtttttcaggttcaaatgatgaacgtgagagtactttgaaccagctgcttgtagagatggatggatttggaacaacttctggtgttgttgttcttgctgggacaaatagacctgacatcctggataaggcattattaaggccaggaagatttgatcgccagatagcaattgacaaaccagatataaagggccgtgatcaaatattccgcatatatcttaaaaagcttaagttggacaacaaaccatcattttattcgcaaaggctagctgccttgacacctgggttcgcaggagctgacattgccaatgtttgtaatgaagctgctttaattgctgcgagaagtgaggaaactcagattaccatgcagcattttgagtccgcaattgataggattatcggtggtttggagaagaaaaatagggtcattagcaaactggagcgccgtactgttgcttaccatgaatctggacatgcagttgctggatggttcttggaacatgctgagcctcttctaaaagttacaattgttcctcgtggaacagctgctttaggctttgcacaatacgtcccaaatgaaaatcttttgatgacaaaagagcagctttttgatatgacatgcatgacattaggtggccgtgctgcagaggaggttttgattggcaaaatctcaactggtgctcagaatgacctggagaaagttaccaaaatgacatatgcacaggtcgccgtgtatggttttagtgaaaaggttgggcttctgtccttcccccagaaagatggtggtttcgaattgagcaagccttacagtaatcagacagcatccatcatcgacgatgaggtccgggaatgggttggcaaggcctacaagaaaacagttgaattgataacagagcacaaggagcaagttgcacagatcgcagaattgctgctcgagaaggaagtcctacaccaggacgatctaaccagggtactaggagaacgtccattcaaggcactggaccaaccaactacgacctctttaagaaaggtttcgaggatggtggtgacaacagccaagcaccagcagagaacgccgagctgcctgatgattcatctcccccagttggtgacgttgtacccacgtagtgtttctctcctcaacgtcagagctgtacattgagcgctcattctcgatagattcttgtttgttggttgcatcataaaaaagatctgtataaattcgcgcccaagctgattatgccactgtggaaatgcatttggatttccgt

SEQ ID NO: 35367 - protein, 485 aa, Zea mays subsp. mays
  peptide (1)..(485): Ceres Seq. ID no. 12436177
  misc_feature (219)..(423): Pfam Name: Pfam Description:  Peptidase family M41
  misc_feature (1)..(436): NCBI GI NO: 15021761 NR Description: AAA-metalloprotease FtsH [Pisum sativum]
  misc_feature (1)..(431): NCBI GI NO: 22329400 NR Description: unknown protein; protein id: At1g07510
  misc_feature (1)..(459): NCBI GI NO: 30684118 NR Description: AAA-type ATPase -related [Arabidopsis thaliana]
  misc_feature (1)..(459): NCBI GI NO: 17380916 NR Description: putative AAA-type ATPase [Arabidopsis thaliana]
  misc_feature (1)..(459): NCBI GI NO: 7487874 NR Description: probable AAA-type ATPase
  misc_feature (1)..(321): NCBI GI NO: 25406980 NR Description: protein F22G5.10 [imported] - Arabidopsis thaliana
  misc_feature (316)..(431): NCBI GI NO: 25406980 NR Description: protein F22G5.10 [imported] - Arabidopsis thaliana
  misc_feature (1)..(459): NCBI GI NO: 6539504 NR Description: FtsH2 [Cyanidioschyzon merolae]
  misc_feature (1)..(430): NCBI GI NO: 6320854 NR Description: ATPase family gene; Afg3p
  misc_feature (1)..(430): NCBI GI NO: 541748 NR Description: Afg3p [Saccharomyces cerevisiae]
MEFVHFLKNPKKYEDLGAKIPKGALLVGPPGTGKTLLAKATAGESGVPFLSISGSDFMEMFVGVGPSRVRNLFQEARQCAPSIVFIDEIDAIGRARGRGGFSGSNDERESTLNQLLVEMDGFGTTSGVVVLAGTNRPDILDKALLRPGRFDRQIAIDKPDIKGRDQIFRIYLKKLKLDNKPSFYSQRLAALTPGFAGADIANVCNEAALIAARSEETQITMQHFESAIDRIIGGLEKKNRVISKLERRTVAYHESGHAVAGWFLEHAEPLLKVTIVPRGTAALGFAQYVPNENLLMTKEQLFDMTCMTLGGRAAEEVLIGKISTGAQNDLEKVTKMTYAQVAVYGFSEKVGLLSFPQKDGGFELSKPYSNQTASIIDDEVREWVGKAYKKTVELITEHKEQVAQIAELLLEKEVLHQDDLTRVLGERPFKALDQPTTTSLRKVSRMVVTTAKHQQRTPSCLMIHLPQLVTLYPRSVSLLNVRAVH

SEQ ID NO: 35368 - protein, 428 aa, Zea mays subsp. mays
  peptide (1)..(428): Ceres Seq. ID no. 12436178
  misc_feature (162)..(366): Pfam Name: Pfam Description:  Peptidase family M41
  misc_feature (1)..(379): NCBI GI NO: 15021761 NR Description: AAA-metalloprotease FtsH [Pisum sativum]
  misc_feature (1)..(374): NCBI GI NO: 22329400 NR Description: unknown protein; protein id: At1g07510
  misc_feature (1)..(402): NCBI GI NO: 30684118 NR Description: AAA-type ATPase -related [Arabidopsis thaliana]
  misc_feature (1)..(402): NCBI GI NO: 17380916 NR Description: putative AAA-type ATPase [Arabidopsis thaliana]
  misc_feature (1)..(402): NCBI GI NO: 7487874 NR Description: probable AAA-type ATPase
  misc_feature (1)..(264): NCBI GI NO: 25406980 NR Description: protein F22G5.10 [imported] - Arabidopsis thaliana
  misc_feature (259)..(374): NCBI GI NO: 25406980 NR Description: protein F22G5.10 [imported] - Arabidopsis thaliana
  misc_feature (1)..(402): NCBI GI NO: 6539504 NR Description: FtsH2 [Cyanidioschyzon merolae]
  misc_feature (1)..(373): NCBI GI NO: 6320854 NR Description: ATPase family gene; Afg3p
  misc_feature (1)..(373): NCBI GI NO: 541748 NR Description: Afg3p [Saccharomyces cerevisiae]
MEMFVGVGPSRVRNLFQEARQCAPSIVFIDEIDAIGRARGRGGFSGSNDERESTLNQLLVEMDGFGTTSGVVVLAGTNRPDILDKALLRPGRFDRQIAIDKPDIKGRDQIFRIYLKKLKLDNKPSFYSQRLAALTPGFAGADIANVCNEAALIAARSEETQITMQHFESAIDRIIGGLEKKNRVISKLERRTVAYHESGHAVAGWFLEHAEPLLKVTIVPRGTAALGFAQYVPNENLLMTKEQLFDMTCMTLGGRAAEEVLIGKISTGAQNDLEKVTKMTYAQVAVYGFSEKVGLLSFPQKDGGFELSKPYSNQTASIIDDEVREWVGKAYKKTVELITEHKEQVAQIAELLLEKEVLHQDDLTRVLGERPFKALDQPTTTSLRKVSRMVVTTAKHQQRTPSCLMIHLPQLVTLYPRSVSLLNVRAVH

SEQ ID NO: 35369 - protein, 426 aa, Zea mays subsp. mays
  peptide (1)..(426): Ceres Seq. ID no. 12436179
  misc_feature (160)..(364): Pfam Name: Pfam Description:  Peptidase family M41
  misc_feature (1)..(377): NCBI GI NO: 15021761 NR Description: AAA-metalloprotease FtsH [Pisum sativum]
  misc_feature (1)..(372): NCBI GI NO: 22329400 NR Description: unknown protein; protein id: At1g07510
  misc_feature (1)..(400): NCBI GI NO: 30684118 NR Description: AAA-type ATPase -related [Arabidopsis thaliana]
  misc_feature (1)..(400): NCBI GI NO: 17380916 NR Description: putative AAA-type ATPase [Arabidopsis thaliana]
  misc_feature (1)..(400): NCBI GI NO: 7487874 NR Description: probable AAA-type ATPase
  misc_feature (1)..(262): NCBI GI NO: 25406980 NR Description: protein F22G5.10 [imported] - Arabidopsis thaliana
  misc_feature (257)..(372): NCBI GI NO: 25406980 NR Description: protein F22G5.10 [imported] - Arabidopsis thaliana
  misc_feature (1)..(400): NCBI GI NO: 6539504 NR Description: FtsH2 [Cyanidioschyzon merolae]
  misc_feature (1)..(371): NCBI GI NO: 6320854 NR Description: ATPase family gene; Afg3p
  misc_feature (1)..(371): NCBI GI NO: 541748 NR Description: Afg3p [Saccharomyces cerevisiae]
MFVGVGPSRVRNLFQEARQCAPSIVFIDEIDAIGRARGRGGFSGSNDERESTLNQLLVEMDGFGTTSGVVVLAGTNRPDILDKALLRPGRFDRQIAIDKPDIKGRDQIFRIYLKKLKLDNKPSFYSQRLAALTPGFAGADIANVCNEAALIAARSEETQITMQHFESAIDRIIGGLEKKNRVISKLERRTVAYHESGHAVAGWFLEHAEPLLKVTIVPRGTAALGFAQYVPNENLLMTKEQLFDMTCMTLGGRAAEEVLIGKISTGAQNDLEKVTKMTYAQVAVYGFSEKVGLLSFPQKDGGFELSKPYSNQTASIIDDEVREWVGKAYKKTVELITEHKEQVAQIAELLLEKEVLHQDDLTRVLGERPFKALDQPTTTSLRKVSRMVVTTAKHQQRTPSCLMIHLPQLVTLYPRSVSLLNVRAVH

SEQ ID NO: 35370 - DNA, 1181 bp, Zea mays subsp. mays; identical to SEQ ID NO: 26099
  misc_feature (1)..(1181): Ceres Seq. ID no. 12419652
  misc_feature (486)..(486): n is a, c, t, g, unknown, or other
  misc_feature (529)..(529): n is a, c, t, g, unknown, or other
  misc_feature (478)..(478): n is a, c, t, g, unknown, or other

SEQ ID NO: 35371 - protein, 301 aa, Zea mays subsp. mays; identical to SEQ ID NO: 26100
  peptide (1)..(301): Ceres Seq. ID no. 12419653
  misc_feature (126)..(245): Pfam Name: DUF568 Pfam Description: Protein of unknown function
  misc_feature (34)..(295): NCBI GI NO: 29647484 NR Description: OJ1191_A10.2
  misc_feature (40)..(291): NCBI GI NO: 11357190 NR Description: auxin-induced protein AIR12
  misc_feature (40)..(291): NCBI GI NO: 30680258 NR Description: auxin-induced protein (AIR12)
  misc_feature (37)..(255): NCBI GI NO: 15235545 NR Description: putative protein; protein id: At4g12980
  misc_feature (37)..(255): NCBI GI NO: 21593814 NR Description: unknown [Arabidopsis thaliana]
  misc_feature (37)..(232): NCBI GI NO: 18404500 NR Description: expressed protein; protein id: At3g25290
  misc_feature (36)..(231): NCBI GI NO: 38424013 NR Description: auxin-induced protein-like
  misc_feature (44)..(228): NCBI GI NO: 18421491 NR Description: Expressed protein; protein id: At5g35735
  misc_feature (44)..(228): NCBI GI NO: 21592781 NR Description: putative membrane protein [Arabidopsis thaliana]
  misc_feature (47)..(224): NCBI GI NO: 24414271 NR Description: Unknown protein
  misc_feature (159)..(159): Xaa is any aa, unknown or other
  misc_feature (162)..(162): Xaa is any aa, unknown or other
  misc_feature (176)..(176): Xaa is any aa, unknown or other

SEQ ID NO: 35372 - protein, 274 aa, Zea mays subsp. mays; identical to SEQ ID NO: 26101
  peptide (1)..(274): Ceres Seq. ID no. 12419654
  misc_feature (99)..(218): Pfam Name: DUF568 Pfam Description: Protein of unknown function
  misc_feature (7)..(268): NCBI GI NO: 29647484 NR Description: OJ1191_A10.2
  misc_feature (13)..(264): NCBI GI NO: 11357190 NR Description: auxin-induced protein AIR12
  misc_feature (13)..(264): NCBI GI NO: 30680258 NR Description: auxin-induced protein (AIR12)
  misc_feature (10)..(228): NCBI GI NO: 15235545 NR Description: putative protein; protein id: At4g12980
  misc_feature (10)..(228): NCBI GI NO: 21593814 NR Description: unknown [Arabidopsis thaliana]
  misc_feature (10)..(205): NCBI GI NO: 18404500 NR Description: expressed protein; protein id: At3g25290
  misc_feature (9)..(204): NCBI GI NO: 38424013 NR Description: auxin-induced protein-like
  misc_feature (17)..(201): NCBI GI NO: 18421491 NR Description: Expressed protein; protein id: At5g35735
  misc_feature (17)..(201): NCBI GI NO: 21592781 NR Description: putative membrane protein [Arabidopsis thaliana]
  misc_feature (20)..(197): NCBI GI NO: 24414271 NR Description: Unknown protein
  misc_feature (132)..(132): Xaa is any aa, unknown or other
  misc_feature (135)..(135): Xaa is any aa, unknown or other
  misc_feature (149)..(149): Xaa is any aa, unknown or other

SEQ ID NO: 35373 - protein, 259 aa, Zea mays subsp. mays; identical to SEQ ID NO: 26102
  peptide (1)..(259): Ceres Seq. ID no. 12419655
  misc_feature (5)..(242): NCBI GI NO: 17027049 NR Description: elongation factor-1 alpha [Chimarra rossi]
  misc_feature (9)..(242): NCBI GI NO: 17027071 NR Description: elongation factor-1 alpha
  misc_feature (160)..(160): Xaa is any aa, unknown or other
  misc_feature (162)..(162): Xaa is any aa, unknown or other
  misc_feature (177)..(177): Xaa is any aa, unknown or other

SEQ ID NO: 35374 - DNA, 432 bp, Zea mays subsp. mays
  misc_feature (1)..(432): Ceres Seq. ID no. 2899074
  misc_feature (138)..(138): n is a, c, t, g, unknown, or other
  misc_feature (135)..(135): n is a, c, t, g, unknown, or other
  misc_feature (173)..(173): n is a, c, t, g, unknown, or other
  misc_feature (404)..(404): n is a, c, t, g, unknown, or other
acagatagaggaggtttgcccctgcacaccgctgcgctactgggaggagcacaagtgtatcgctgtggctgcggcgcccggcagtccgccacaagcacacgcgcacacaggggccaagcgcctacacctacaganganagacaaggtctgccgtccgcgcgtgcgcggaagangggacggaggaagaaggctgccagcaatcagagatggaggtggggttcttgggtctgggcatcatgggcaaggcaatggcgaccaacctcctccgccacggcttccgcgtcaccgtctggaacaggaccctcgccaagtgccaagagctcgccgcgctcggcgccaccgtcggggagacgcctgcctccgtcgtctccaagtgcagatacaccatcgccatgctctccgancccagcgccgccctatcagtcgtcttcg

SEQ ID NO: 35375 - protein, 144 aa, Zea mays subsp. mays
  peptide (1)..(144): Ceres Seq. ID no. 2899075
  misc_feature (45)..(45): Xaa is any aa, unknown or other
  misc_feature (46)..(46): Xaa is any aa, unknown or other
  misc_feature (58)..(58): Xaa is any aa, unknown or other
  misc_feature (135)..(135): Xaa is any aa, unknown or other
TDRGGLPLHTAALLGGAQVYRCGCGARQSATSTRAHRGQAPTPTXXRQGLPSARARKXGRRKKAASNQRWRWGSWVWASWARQWRPTSSATASASPSGTGPSPSAKSSPRSAPPSGRRLPPSSPSADTPSPCSPXPAPPYQSSS

SEQ ID NO: 35376 - protein, 143 aa, Zea mays subsp. mays
  peptide (1)..(143): Ceres Seq. ID no. 2899076
  misc_feature (45)..(45): Xaa is any aa, unknown or other
  misc_feature (46)..(46): Xaa is any aa, unknown or other
  misc_feature (58)..(58): Xaa is any aa, unknown or other
  misc_feature (135)..(135): Xaa is any aa, unknown or other
QIEEVCPCTPLRYWEEHKCIAVAAAPGSPPQAHAHTGAKRLHLQXXDKVCRPRVRGRXDGGRRLPAIRDGGGVLGSGHHGQGNGDQPPPPRLPRHRLEQDPRQVPRARRARRHRRGDACLRRLQVQIHHRHALRXQRRPISRL

SEQ ID NO: 35377 - protein, 75 aa, Zea mays subsp. mays
  peptide (1)..(75): Ceres Seq. ID no. 2899077
  misc_feature (2)..(74): Pfam Name: Pfam Description:  NAD binding domain of 6-phosphogluconate dehydrogenase
  misc_feature (1)..(74): NCBI GI NO: 29368238 NR Description: gamma hydroxybutyrate dehydrogenase-like protein
  misc_feature (1)..(74): NCBI GI NO: 15146314 NR Description: AT3g25530/MWL2_15 [Arabidopsis thaliana]
  misc_feature (1)..(74): NCBI GI NO: 15375068 NR Description: gamma hydroxybutyrate dehydrogenase
  misc_feature (1)..(74): NCBI GI NO: 18404556 NR Description: expressed protein; protein id: At3g25530
  misc_feature (4)..(74): NCBI GI NO: 39996474 NR Description: 3-hydroxyisobutyrate dehydrogenase family protein
  misc_feature (4)..(74): NCBI GI NO: 23054597 NR Description: hypothetical protein [Geobacter metallireducens]
  misc_feature (1)..(73): NCBI GI NO: 34914300 NR Description: putative gamma hydroxybutyrate dehydrogenase
  misc_feature (1)..(74): NCBI GI NO: 20891625 NR Description: RIKEN cDNA 3930401K13 [Mus musculus]
  misc_feature (1)..(74): NCBI GI NO: 40675370 NR Description: N-PAC protein [Homo sapiens]
  misc_feature (1)..(74): NCBI GI NO: 13277568 NR Description: Similar to RIKEN cDNA 3930401K13 gene
  misc_feature (66)..(66): Xaa is any aa, unknown or other
MEVGFLGLGIMGKAMATNLLRHGFRVTVWNRTLAKCQELAALGATVGETPASVVSKCRYTIAMLSXPSAALSVVF

SEQ ID NO: 35378 - DNA, 433 bp, Zea mays subsp. mays
  misc_feature (1)..(433): Ceres Seq. ID no. 3475522
gtgtgcgtgagagagaaacagaagaggaaaaggaatccatggcggcgacgctggcgaggagggcggggcgctccgcggcgacgacgctatggggcgcggcgaggggcttcgcatcggtggggtccgacatcgtctctgcggctcccggcgtgtcgctgcagaaggcgcggtcctgggacgagggcgtcgccaccaagttctctaccacgcctctcaaggacatcttctacgggaagaaggtggtcatcttcggcttgcccggtgcatatacaggggtttgttcacgttcctagttacaagaagaatattgacaagttgaaagcaaaaggaatcgactctgttatctgtgtatctgtgaatgatccgtatgtcctggatggatgggcaaaaaagctagacgctaaagatacaattgagttctatggtgactttg

SEQ ID NO: 35379 - protein, 144 aa, Zea mays subsp. mays
  peptide (1)..(144): Ceres Seq. ID no. 3475523
  misc_feature (95)..(143): NCBI GI NO: 34903114 NR Description: unnamed protein product
  misc_feature (95)..(143): NCBI GI NO: 7658343 NR Description: unknown protein; 13384-11892
  misc_feature (95)..(143): NCBI GI NO: 18397457 NR Description: expressed protein; protein id: At3g06050
  misc_feature (95)..(143): NCBI GI NO: 21553531 NR Description: unknown [Arabidopsis thaliana]
  misc_feature (95)..(143): NCBI GI NO: 28572977 NR Description: CG32920-PB [Drosophila melanogaster]
  misc_feature (95)..(143): NCBI GI NO: 38048721 NR Description: similar to Drosophila melanogaster CG7217
  misc_feature (95)..(143): NCBI GI NO: 18406870 NR Description: peroxiredoxin, putative; protein id: At1g60740
  misc_feature (95)..(143): NCBI GI NO: 4704732 NR Description: peroxiredoxin TPx2 [Arabidopsis thaliana]
  misc_feature (95)..(143): NCBI GI NO: 15218876 NR Description: type 2 peroxiredoxin, putative
  misc_feature (95)..(143): NCBI GI NO: 27807445 NR Description: peroxiredoxin 5 [Bos taurus]
VCVREKQKRKRNPWRRRWRGGRGAPRRRRYGARRGASHRWGPTSSLRLPACRCRRRGPGTRASPPSSLPRLSRTSSTGRRWSSSACPVHIQGFVHVPSYKKNIDKLKAKGIDSVICVSVNDPYVLDGWAKKLDAKDTIEFYGDF

SEQ ID NO: 35380 - protein, 96 aa, Zea mays subsp. mays
  peptide (1)..(96): Ceres Seq. ID no. 3475524
  misc_feature (43)..(96): Pfam Name: Pfam Description:  AhpC/TSA family
  misc_feature (13)..(96): NCBI GI NO: 34903114 NR Description: unnamed protein product
  misc_feature (23)..(95): NCBI GI NO: 7658343 NR Description: unknown protein; 13384-11892
  misc_feature (23)..(95): NCBI GI NO: 18397457 NR Description: expressed protein; protein id: At3g06050
  misc_feature (18)..(95): NCBI GI NO: 21553531 NR Description: unknown [Arabidopsis thaliana]
  misc_feature (49)..(96): NCBI GI NO: 28572977 NR Description: CG32920-PB [Drosophila melanogaster]
  misc_feature (49)..(96): NCBI GI NO: 38048721 NR Description: similar to Drosophila melanogaster CG7217
  misc_feature (65)..(96): NCBI GI NO: 18406870 NR Description: peroxiredoxin, putative; protein id: At1g60740
  misc_feature (65)..(96): NCBI GI NO: 4704732 NR Description: peroxiredoxin TPx2 [Arabidopsis thaliana]
  misc_feature (65)..(96): NCBI GI NO: 15218876 NR Description: type 2 peroxiredoxin, putative
  misc_feature (11)..(96): NCBI GI NO: 27807445 NR Description: peroxiredoxin 5 [Bos taurus]
VRERETEEEKESMAATLARRAGRSAATTLWGAARGFASVGSDIVSAAPGVSLQKARSWDEGVATKFSTTPLKDIFYGKKVVIFGLPGAYTGVCSRS

SEQ ID NO: 35381 - protein, 84 aa, Zea mays subsp. mays
  peptide (1)..(84): Ceres Seq. ID no. 3475525
  misc_feature (31)..(84): Pfam Name: Pfam Description:  AhpC/TSA family
  misc_feature (1)..(84): NCBI GI NO: 34903114 NR Description: unnamed protein product
  misc_feature (11)..(83): NCBI GI NO: 7658343 NR Description: unknown protein; 13384-11892
  misc_feature (11)..(83): NCBI GI NO: 18397457 NR Description: expressed protein; protein id: At3g06050
  misc_feature (6)..(83): NCBI GI NO: 21553531 NR Description: unknown [Arabidopsis thaliana]
  misc_feature (37)..(84): NCBI GI NO: 28572977 NR Description: CG32920-PB [Drosophila melanogaster]
  misc_feature (37)..(84): NCBI GI NO: 38048721 NR Description: similar to Drosophila melanogaster CG7217
  misc_feature (53)..(84): NCBI GI NO: 18406870 NR Description: peroxiredoxin, putative; protein id: At1g60740
  misc_feature (53)..(84): NCBI GI NO: 4704732 NR Description: peroxiredoxin TPx2 [Arabidopsis thaliana]
  misc_feature (53)..(84): NCBI GI NO: 15218876 NR Description: type 2 peroxiredoxin, putative
  misc_feature (1)..(84): NCBI GI NO: 27807445 NR Description: peroxiredoxin 5 [Bos taurus]
MAATLARRAGRSAATTLWGAARGFASVGSDIVSAAPGVSLQKARSWDEGVATKFSTTPLKDIFYGKKVVIFGLPGAYTGVCSRS

SEQ ID NO: 35382 - DNA, 2535 bp, Zea mays subsp. mays
  misc_feature (1)..(2535): Ceres Seq. ID no. 12436063
ataagacgtcgcgctgctgctgccaccgcagtcgccgactcgtccgcagtgcaatgccgggggcctgccaggacctcagcaccatcacgcccacaccacggcggcagagtatggcgcagctccagcgcgggtccgtgctggttggtgggcgcgagctcctcgtccgcgccccgcccaacgtcaacctacggcccgccggtgccggcgtcgccgacggcggggccgcctcgggcgccgcgttcctcggagccagggctccggccgcgtccagccgccacgtgttctccgtcggaaacctggctagtgggtggaggtggttgtcgttgttcaggttcaagatctggtggatgatcccggccacgggcgtcggcgcggcggctgtgccggcggagacgcagatgctgcttctggagtacaggagcgaggcgggtcctgcggccgcgacggagcgtggctcactgtacgcgctggtgctgccagttcttgacggcggcttccgagccagcctccaggggagccccgaggacgagctacagttctgcttcgagagcggtgatcctgatgtccagacgatggaagcagttgatgcagtgttcgtcaactcaggggacaaccccttcaagcttctgaaagaatccatcaagatgttgtccaagatcaaaggaactttcagtcatatagaggacaaggagatcccttcaaatttggactggtttgggtggtgcacttgggatgcattttacaaagctgttaacccaagtgggattgaggagggccttcaaagtctgcgtgaaggtggtgtgccgccaaggtttctgattatagatgatggttggcaagaaacagttgacgaaatcaaggaagtgaatgaagccctccgtgagcagactgtatttgcgcagaggctggctgatctgaaggagaatcataagttcagaggggaaacctgcaagaatcttgaggaccttgttaaaacgataaaaggaaaacatggagtcaagtgtgtctacatgtggcatgctttacttggatattggggaggtaccttagcaacatccgaagtgatgaagaagtataatccaaagcttgtttatccagtccaatcgcggggtaatgttgcgaatctgagggatattgccatggacagcttggagaaatttggagtgggcatcgttgatcctgacaagatatatgagttctacaatgatcagcacagctacctttctagtgtgggtgtggatggcgtgaaggttgatgttcagaacgtgttggaaacccttggacgcggatttggtggtcgtgttgcagtaactcgaaagtaccagcaggctcttgaggaatcaattgcccagaacttcaaaacaaacaacctaatctgctgcatgagtcacaattcagacagcatctttagtgccttgaagggtgcagttgctagagcctcagaagatttcatgcctcgggaaccaacactgcaaactctgcacattgcgtctgtggcattcaatagcctattgttgggagaaatcttcatacctgactgggatatgttccatagcaagcatgaatcagcggaattccacggagcagctagagccctgagtggaggtggtgtttatgtcagtgacaaacctggggtgcatgatttcagtgttctaaaaaagcttgttctaccagatggttcgattctaagagcaaggtatgctggtcgtcctacacgcgattgtctgttcactgacccagtcatggatggcaaaagtctgatgaagatatggaacttgaacaatttcactggtgtcattggagtgttcaattgtcagggagctggacagtgggtttggccagttaaacaaactgcttatgttcctaccaacataaacatcactggtcagctctcaccgtctgacgtagaatctctcgaggagatagctggtgatgactggaatggggagactgcagtatatgctttcggttcatgttctctttcaaggcttcagaaacaccaaagtttggaggtgtcactgtctactatgacatgtgagatctacagcatttcaccaataaagattttcagcgaagtcgtccagtttacgcctcttggactgatcgacatgttcaactccggtggtgcacttgacaatatttcaagcgttgcagattcttcagctacgacagttcatataagatgccgaggaccagggcggtttggggcgtattcagacaccaggccagagctttgcagagttgatgaacacgaagtggagttcactcttgcagaggatggcctcctgaccttttaccttcccccttcttcctcccaggacaacctgagacacgttgagattgtctacaaagcatcatgaacgacatttacccttatgattcttacgctccagcatgcaatttctggcgtgctcttcagtaaccaccacacatgcacattgacatgatgtaacaaggaacccattttgttggatttgactgtgtatgctgtgctgcaaatacctgttttatacgattgttctgcacctggactgc

SEQ ID NO: 35383 - protein, 785 aa, Zea mays subsp. mays
  peptide (1)..(785): Ceres Seq. ID no. 12436064
  misc_feature (40)..(713): Pfam Name: Pfam Description:  Raffinose synthase or seed imbibition protein Sip1
  misc_feature (36)..(713): NCBI GI NO: 15292677 NR Description: putative imbibition protein homolog
  misc_feature (708)..(781): NCBI GI NO: 15292677 NR Description: putative imbibition protein homolog
  misc_feature (36)..(713): NCBI GI NO: 15230330 NR Description: glycosyl hydrolase family 36; protein id:At3g57520
  misc_feature (708)..(781): NCBI GI NO: 15230330 NR Description: glycosyl hydrolase family 36; protein id:At3g57520
  misc_feature (36)..(718): NCBI GI NO: 629602 NR Description: probable imbibition protein - wild cabbage
  misc_feature (662)..(781): NCBI GI NO: 629602 NR Description: probable imbibition protein - wild cabbage
  misc_feature (28)..(714): NCBI GI NO: 29838631 NR Description: alkaline alpha galactosidase II [Cucumis melo]
  misc_feature (723)..(767): NCBI GI NO: 29838631 NR Description: alkaline alpha galactosidase II [Cucumis melo]
  misc_feature (43)..(767): NCBI GI NO: 282994 NR Description: Sip1 protein - barley
  misc_feature (28)..(720): NCBI GI NO: 7242785 NR Description: putative seed imbibition protein
KTSRCCCHRSRRLVRSAMPGACQDLSTITPTPRRQSMAQLQRGSVLVGGRELLVRAPPNVNLRPAGAGVADGGAASGAAFLGARAPAASSRHVFSVGNLASGWRWLSLFRFKIWWMIPATGVGAAAVPAETQMLLLEYRSEAGPAAATERGSLYALVLPVLDGGFRASLQGSPEDELQFCFESGDPDVQTMEAVDAVFVNSGDNPFKLLKESIKMLSKIKGTFSHIEDKEIPSNLDWFGWCTWDAFYKAVNPSGIEEGLQSLREGGVPPRFLIIDDGWQETVDEIKEVNEALREQTVFAQRLADLKENHKFRGETCKNLEDLVKTIKGKHGVKCVYMWHALLGYWGGTLATSEVMKKYNPKLVYPVQSRGNVANLRDIAMDSLEKFGVGIVDPDKIYEFYNDQHSYLSSVGVDGVKVDVQNVLETLGRGFGGRVAVTRKYQQALEESIAQNFKTNNLICCMSHNSDSIFSALKGAVARASEDFMPREPTLQTLHIASVAFNSLLLGEIFIPDWDMFHSKHESAEFHGAARALSGGGVYVSDKPGVHDFSVLKKLVLPDGSILRARYAGRPTRDCLFTDPVMDGKSLMKIWNLNNFTGVIGVFNCQGAGQWVWPVKQTAYVPTNINITGQLSPSDVESLEEIAGDDWNGETAVYAFGSCSLSRLQKHQSLEVSLSTMTCEIYSISPIKIFSEVVQFTPLGLIDMFNSGGALDNISSVADSSATTVHIRCRGPGRFGAYSDTRPELCRVDEHEVEFTLAEDGLLTFYLPPSSSQDNLRHVEIVYKAS

SEQ ID NO: 35384 - protein, 768 aa, Zea mays subsp. mays
  peptide (1)..(768): Ceres Seq. ID no. 12436065
  misc_feature (23)..(696): Pfam Name: Pfam Description:  Raffinose synthase or seed imbibition protein Sip1
  misc_feature (19)..(696): NCBI GI NO: 15292677 NR Description: putative imbibition protein homolog
  misc_feature (691)..(764): NCBI GI NO: 15292677 NR Description: putative imbibition protein homolog
  misc_feature (19)..(696): NCBI GI NO: 15230330 NR Description: glycosyl hydrolase family 36; protein id:At3g57520
  misc_feature (691)..(764): NCBI GI NO: 15230330 NR Description: glycosyl hydrolase family 36; protein id:At3g57520
  misc_feature (19)..(701): NCBI GI NO: 629602 NR Description: probable imbibition protein - wild cabbage
  misc_feature (645)..(764): NCBI GI NO: 629602 NR Description: probable imbibition protein - wild cabbage
  misc_feature (11)..(697): NCBI GI NO: 29838631 NR Description: alkaline alpha galactosidase II [Cucumis melo]
  misc_feature (706)..(750): NCBI GI NO: 29838631 NR Description: alkaline alpha galactosidase II [Cucumis melo]
  misc_feature (26)..(750): NCBI GI NO: 282994 NR Description: Sip1 protein - barley
  misc_feature (11)..(703): NCBI GI NO: 7242785 NR Description: putative seed imbibition protein
MPGACQDLSTITPTPRRQSMAQLQRGSVLVGGRELLVRAPPNVNLRPAGAGVADGGAASGAAFLGARAPAASSRHVFSVGNLASGWRWLSLFRFKIWWMIPATGVGAAAVPAETQMLLLEYRSEAGPAAATERGSLYALVLPVLDGGFRASLQGSPEDELQFCFESGDPDVQTMEAVDAVFVNSGDNPFKLLKESIKMLSKIKGTFSHIEDKEIPSNLDWFGWCTWDAFYKAVNPSGIEEGLQSLREGGVPPRFLIIDDGWQETVDEIKEVNEALREQTVFAQRLADLKENHKFRGETCKNLEDLVKTIKGKHGVKCVYMWHALLGYWGGTLATSEVMKKYNPKLVYPVQSRGNVANLRDIAMDSLEKFGVGIVDPDKIYEFYNDQHSYLSSVGVDGVKVDVQNVLETLGRGFGGRVAVTRKYQQALEESIAQNFKTNNLICCMSHNSDSIFSALKGAVARASEDFMPREPTLQTLHIASVAFNSLLLGEIFIPDWDMFHSKHESAEFHGAARALSGGGVYVSDKPGVHDFSVLKKLVLPDGSILRARYAGRPTRDCLFTDPVMDGKSLMKIWNLNNFTGVIGVFNCQGAGQWVWPVKQTAYVPTNINITGQLSPSDVESLEEIAGDDWNGETAVYAFGSCSLSRLQKHQSLEVSLSTMTCEIYSISPIKIFSEVVQFTPLGLIDMFNSGGALDNISSVADSSATTVHIRCRGPGRFGAYSDTRPELCRVDEHEVEFTLAEDGLLTFYLPPSSSQDNLRHVEIVYKAS

SEQ ID NO: 35385 - protein, 749 aa, Zea mays subsp. mays
  peptide (1)..(749): Ceres Seq. ID no. 12436066
  misc_feature (4)..(677): Pfam Name: Pfam Description:  Raffinose synthase or seed imbibition protein Sip1
  misc_feature (1)..(677): NCBI GI NO: 15292677 NR Description: putative imbibition protein homolog
  misc_feature (672)..(745): NCBI GI NO: 15292677 NR Description: putative imbibition protein homolog
  misc_feature (1)..(677): NCBI GI NO: 15230330 NR Description: glycosyl hydrolase family 36; protein id:At3g57520
  misc_feature (672)..(745): NCBI GI NO: 15230330 NR Description: glycosyl hydrolase family 36; protein id:At3g57520
  misc_feature (1)..(682): NCBI GI NO: 629602 NR Description: probable imbibition protein - wild cabbage
  misc_feature (626)..(745): NCBI GI NO: 629602 NR Description: probable imbibition protein - wild cabbage
  misc_feature (1)..(678): NCBI GI NO: 29838631 NR Description: alkaline alpha galactosidase II [Cucumis melo]
  misc_feature (687)..(731): NCBI GI NO: 29838631 NR Description: alkaline alpha galactosidase II [Cucumis melo]
  misc_feature (7)..(731): NCBI GI NO: 282994 NR Description: Sip1 protein - barley
  misc_feature (1)..(684): NCBI GI NO: 7242785 NR Description: putative seed imbibition protein
MAQLQRGSVLVGGRELLVRAPPNVNLRPAGAGVADGGAASGAAFLGARAPAASSRHVFSVGNLASGWRWLSLFRFKIWWMIPATGVGAAAVPAETQMLLLEYRSEAGPAAATERGSLYALVLPVLDGGFRASLQGSPEDELQFCFESGDPDVQTMEAVDAVFVNSGDNPFKLLKESIKMLSKIKGTFSHIEDKEIPSNLDWFGWCTWDAFYKAVNPSGIEEGLQSLREGGVPPRFLIIDDGWQETVDEIKEVNEALREQTVFAQRLADLKENHKFRGETCKNLEDLVKTIKGKHGVKCVYMWHALLGYWGGTLATSEVMKKYNPKLVYPVQSRGNVANLRDIAMDSLEKFGVGIVDPDKIYEFYNDQHSYLSSVGVDGVKVDVQNVLETLGRGFGGRVAVTRKYQQALEESIAQNFKTNNLICCMSHNSDSIFSALKGAVARASEDFMPREPTLQTLHIASVAFNSLLLGEIFIPDWDMFHSKHESAEFHGAARALSGGGVYVSDKPGVHDFSVLKKLVLPDGSILRARYAGRPTRDCLFTDPVMDGKSLMKIWNLNNFTGVIGVFNCQGAGQWVWPVKQTAYVPTNINITGQLSPSDVESLEEIAGDDWNGETAVYAFGSCSLSRLQKHQSLEVSLSTMTCEIYSISPIKIFSEVVQFTPLGLIDMFNSGGALDNISSVADSSATTVHIRCRGPGRFGAYSDTRPELCRVDEHEVEFTLAEDGLLTFYLPPSSSQDNLRHVEIVYKAS

SEQ ID NO: 35386 - DNA, 1298 bp, Zea mays subsp. mays
  misc_feature (1)..(1298): Ceres Seq. ID no. 12436055
aaaactgggaaagccacacgtaacctctccccgccgatcccttccttccatccttccgccacgcgcggcagcggttcgtcacactcacacgcacacaccatggcgtccacgccacggacgccggcgccggagcggtctccgccgcccgtgcccactcctcctccgcctctggaggacgagccgccgccgtatctggccgacgggtcgccgcgggaggaggccagcttctccagcgacgggagggaaggagcgccccccaagaacccgcagctctcgcccacgcaccacgctgcgccacgcctcgtgccgccgcccagcagcccagccaggcaagacgggcaagaacaagaagggagcgctaataaggccgccgcggccacggcggagccggcccgcgagccgctccgccagatggcgacgggcctcgcccggccactgtcgtcgcagacgtcgcccgccaccaccaactctcctactccgtcggcgtctccgacgccgtcgagtcccgcgcccgtggccaacaacagcaagaggagcggccagagcacgcccaagcgcgcggagacgaagctgccgctgtcgtcgccggccgtcgcggtgcacttcgacccagtcgaggaggccgtcacgtcgccgctgcgcctcggcaaggcgcgcctcgaccagcagcagcagcagcagcacgcggcgggggcggcggagagcggggcatccgtggtccccggtgtggcggcggccgtggccgcggtcgccgagcggagggagctgttgctggcgctgcgcctggccacggcggtgctcagcctcgcggccttctcggtgatcgccagtgcccggacgtccggatgggccggcgactactacgcccgccacctgcagtacaggtacgccgtcgcagtgaacgtgatcgtgttcgcctactcggtcgcgcagtcattgggcaaaatccgccacctggtctcacccaggtttacgttccggaccatgtcgagctactactgcagcctgttcctggaccaggttctggcgtacctcctcatgtcggcgtcgtcggcggccgcgtcgcgcaacgacctgtgggtgtccaggttcggcacggacgccttcgtcaggaagatcaccggcgccctgtggctgtccttcgtcgcgttcctggtgctcgctctgaacgcggtcatctccacggctaatctcttcagcatggtctgacacgactcgtcctgctctggcgttgttggaatcaagtactaattgtagattctggaaataaatgtaaccgcgcgttaattagctgttgc

SEQ ID NO: 35387 - protein, 402 aa, Zea mays subsp. mays
  peptide (1)..(402): Ceres Seq. ID no. 12436056
  misc_feature (250)..(320): Pfam Name: DUF588 Pfam Description: Domain of unknown function
  misc_feature (12)..(320): NCBI GI NO: 34911616 NR Description: P0039G05.10
  misc_feature (341)..(402): NCBI GI NO: 34911616 NR Description: P0039G05.10
  misc_feature (126)..(400): NCBI GI NO: 27754604 NR Description: unknown protein [Arabidopsis thaliana]
  misc_feature (34)..(186): NCBI GI NO: 34911616 NR Description: P0039G05.10
  misc_feature (258)..(402): NCBI GI NO: 15241975 NR Description: putative protein; protein id: At5g62820.1
  misc_feature (194)..(394): NCBI GI NO: 15242642 NR Description: putative protein; protein id: At5g40300.1
  misc_feature (121)..(326): NCBI GI NO: 15227628 NR Description: hypothetical protein; protein id: At2g36330.1
  misc_feature (351)..(400): NCBI GI NO: 15227628 NR Description: hypothetical protein; protein id: At2g36330.1
  misc_feature (10)..(212): NCBI GI NO: 1076802 NR Description: extensin-like protein - maize
  misc_feature (2)..(272): NCBI GI NO: 6958206 NR Description: kexin-like protease KEX1
KTGKATRNLSPPIPSFHPSATRGSGSSHSHAHTMASTPRTPAPERSPPPVPTPPPPLEDEPPPYLADGSPREEASFSSDGREGAPPKNPQLSPTHHAAPRLVPPPSSPARQDGQEQEGSANKAAAATAEPAREPLRQMATGLARPLSSQTSPATTNSPTPSASPTPSSPAPVANNSKRSGQSTPKRAETKLPLSSPAVAVHFDPVEEAVTSPLRLGKARLDQQQQQQHAAGAAESGASVVPGVAAAVAAVAERRELLLALRLATAVLSLAAFSVIASARTSGWAGDYYARHLQYRYAVAVNVIVFAYSVAQSLGKIRHLVSPRFTFRTMSSYYCSLFLDQVLAYLLMSASSAAASRNDLWVSRFGTDAFVRKITGALWLSFVAFLVLALNAVISTANLFSMV

SEQ ID NO: 35388 - protein, 369 aa, Zea mays subsp. mays
  peptide (1)..(369): Ceres Seq. ID no. 12436057
  misc_feature (217)..(287): Pfam Name: DUF588 Pfam Description: Domain of unknown function
  misc_feature (1)..(287): NCBI GI NO: 34911616 NR Description: P0039G05.10
  misc_feature (308)..(369): NCBI GI NO: 34911616 NR Description: P0039G05.10
  misc_feature (93)..(367): NCBI GI NO: 27754604 NR Description: unknown protein [Arabidopsis thaliana]
  misc_feature (1)..(153): NCBI GI NO: 34911616 NR Description: P0039G05.10
  misc_feature (225)..(369): NCBI GI NO: 15241975 NR Description: putative protein; protein id: At5g62820.1
  misc_feature (161)..(361): NCBI GI NO: 15242642 NR Description: putative protein; protein id: At5g40300.1
  misc_feature (88)..(293): NCBI GI NO: 15227628 NR Description: hypothetical protein; protein id: At2g36330.1
  misc_feature (318)..(367): NCBI GI NO: 15227628 NR Description: hypothetical protein; protein id: At2g36330.1
  misc_feature (1)..(179): NCBI GI NO: 1076802 NR Description: extensin-like protein - maize
  misc_feature (1)..(239): NCBI GI NO: 6958206 NR Description: kexin-like protease KEX1
MASTPRTPAPERSPPPVPTPPPPLEDEPPPYLADGSPREEASFSSDGREGAPPKNPQLSPTHHAAPRLVPPPSSPARQDGQEQEGSANKAAAATAEPAREPLRQMATGLARPLSSQTSPATTNSPTPSASPTPSSPAPVANNSKRSGQSTPKRAETKLPLSSPAVAVHFDPVEEAVTSPLRLGKARLDQQQQQQHAAGAAESGASVVPGVAAAVAAVAERRELLLALRLATAVLSLAAFSVIASARTSGWAGDYYARHLQYRYAVAVNVIVFAYSVAQSLGKIRHLVSPRFTFRTMSSYYCSLFLDQVLAYLLMSASSAAASRNDLWVSRFGTDAFVRKITGALWLSFVAFLVLALNAVISTANLFSMV

SEQ ID NO: 35389 - protein, 273 aa, Zea mays subsp. mays
  peptide (1)..(273): Ceres Seq. ID no. 12436058
  misc_feature (52)..(167): Pfam Name: Pfam Description:  Cupin
  misc_feature (22)..(273): NCBI GI NO: 5821151 NR Description: RNA binding protein [Homo sapiens]
  misc_feature (22)..(273): NCBI GI NO: 6634015 NR Description: KIAA0324 protein [Homo sapiens]
  misc_feature (22)..(273): NCBI GI NO: 7512967 NR Description: hypothetical protein KIAA0324 - human (fragment)
  misc_feature (22)..(273): NCBI GI NO: 19923466 NR Description: splicing coactivator subunit SRm300
  misc_feature (21)..(273): NCBI GI NO: 30424862 NR Description: RIKEN cDNA 5033413A03 [Mus musculus]
  misc_feature (5)..(273): NCBI GI NO: 34868816 NR Description: similar to splicing coactivator subunit SRm300
  misc_feature (5)..(273): NCBI GI NO: 28972153 NR Description: mKIAA0324 protein [Mus musculus]
  misc_feature (5)..(273): NCBI GI NO: 30424862 NR Description: RIKEN cDNA 5033413A03 [Mus musculus]
  misc_feature (35)..(273): NCBI GI NO: 34868816 NR Description: similar to splicing coactivator subunit SRm300
  misc_feature (22)..(245): NCBI GI NO: 6649242 NR Description: splicing coactivator subunit SRm300 [Homo sapiens]
KLGKPHVTSPRRSLPSILPPRAAAVRHTHTHTPWRPRHGRRRRSGLRRPCPLLLRLWRTSRRRIWPTGRRGRRPASPATGGKERPPRTRSSRPRTTLRHASCRRPAAQPGKTGKNKKGALIRPPRPRRSRPASRSARWRRASPGHCRRRRRPPPPTLLLRRRLRRRRVPRPWPTTARGAARARPSARRRSCRCRRRPSRCTSTQSRRPSRRRCASARRASTSSSSSSTRRGRRRAGHPWSPVWRRPWPRSPSGGSCCWRCAWPRRCSASRPSR

SEQ ID NO: 35390 - DNA, 651 bp, Zea mays subsp. mays
  misc_feature (1)..(651): Ceres Seq. ID no. 12436230
aacaaacatttcaacgtctcctaaagcagcatcggctaataccaccgactcttgctcacacagctcgttctctgcagctgccgcacatagctagtgaacgaccatggcgtcccaggccatcgagagccaccgtgccggtgctgaggtcgtcaccggaggagacgccatctgcaggaagaagtcaatcgagctgctggaggagctcggcctccccaaaggcttcctgccccttgaggacatccaggagttcgggtacaaccgcgagacagggtttatgtggctggtgcaggggaagaagaaggtggagcacaccttcaaaaagatcaagcagactgtgtcgtacgccactgaggtgacggcattcgccgagaagggcaagctgaggaagatcaccggcgtgaagacaaaggagctgatgctctggctcagcgtcgtcgaggtctacgtgcctgaggcctcaccggagaaggttaccttcaagactggcactggcctatccgacacctttgatgcctctgcctttgcgctgggagagtaattaccaaccacaaaaatggttggcttcaaaagacatgcataatctatcttttgtattttaaacttccatatatcttgtgatgagtttatgacccatactcaagggccgtgccc

SEQ ID NO: 35391 - protein, 144 aa, Zea mays subsp. mays
  peptide (1)..(144): Ceres Seq. ID no. 12436231
  misc_feature (4)..(143): Pfam Name: Pfam Description:  Protein of unknown function, DUF538
  misc_feature (1)..(144): NCBI GI NO: 34915410 NR Description: hypothetical protein~similar to Arabidopsisthaliana chromosome1
  misc_feature (1)..(144): NCBI GI NO: 33146557 NR Description: unknown protein
  misc_feature (1)..(144): NCBI GI NO: 34915426 NR Description: hypothetical protein~similar to Arabidopsisthaliana chromosome1
  misc_feature (1)..(144): NCBI GI NO: 34915422 NR Description: hypothetical protein~similar to Arabidopsisthaliana chromosome1
  misc_feature (1)..(144): NCBI GI NO: 34915418 NR Description: hypothetical protein~similar to Arabidopsisthaliana chromosome1
  misc_feature (1)..(144): NCBI GI NO: 34915376 NR Description: hypothetical protein~similar to Oryza sativachromosome 7
  misc_feature (1)..(144): NCBI GI NO: 34915430 NR Description: hypothetical protein~similar to Arabidopsisthaliana chromosome3
  misc_feature (1)..(144): NCBI GI NO: 34915416 NR Description: hypothetical protein~similar to Arabidopsisthaliana chromosome1
  misc_feature (1)..(144): NCBI GI NO: 34915378 NR Description: hypothetical protein~similar to Oryza sativachromosome 7
  misc_feature (1)..(141): NCBI GI NO: 34903866 NR Description: unnamed protein product
MASQAIESHRAGAEVVTGGDAICRKKSIELLEELGLPKGFLPLEDIQEFGYNRETGFMWLVQGKKKVEHTFKKIKQTVSYATEVTAFAEKGKLRKITGVKTKELMLWLSVVEVYVPEASPEKVTFKTGTGLSDTFDASAFALGE

SEQ ID NO: 35392 - protein, 117 aa, Zea mays subsp. mays
  peptide (1)..(117): Ceres Seq. ID no. 12436232
QTFQRLLKQHRLIPPTLAHTARSLQLPHIASERPWRPRPSRATVPVLRSSPEETPSAGRSQSSCWRSSASPKASCPLRTSRSSGTTARQGLCGWCRGRRRWSTPSKRSSRLCRTPLR

SEQ ID NO: 35393 - protein, 87 aa, Zea mays subsp. mays
  peptide (1)..(87): Ceres Seq. ID no. 12436233
  misc_feature (1)..(86): Pfam Name: Pfam Description:  Protein of unknown function, DUF538
  misc_feature (1)..(87): NCBI GI NO: 34915410 NR Description: hypothetical protein~similar to Arabidopsisthaliana chromosome1
  misc_feature (1)..(87): NCBI GI NO: 33146557 NR Description: unknown protein
  misc_feature (1)..(87): NCBI GI NO: 34915426 NR Description: hypothetical protein~similar to Arabidopsisthaliana chromosome1
  misc_feature (1)..(87): NCBI GI NO: 34915422 NR Description: hypothetical protein~similar to Arabidopsisthaliana chromosome1
  misc_feature (1)..(87): NCBI GI NO: 34915418 NR Description: hypothetical protein~similar to Arabidopsisthaliana chromosome1
  misc_feature (1)..(87): NCBI GI NO: 34915376 NR Description: hypothetical protein~similar to Oryza sativachromosome 7
  misc_feature (1)..(87): NCBI GI NO: 34915430 NR Description: hypothetical protein~similar to Arabidopsisthaliana chromosome3
  misc_feature (1)..(87): NCBI GI NO: 34915416 NR Description: hypothetical protein~similar to Arabidopsisthaliana chromosome1
  misc_feature (1)..(87): NCBI GI NO: 34915378 NR Description: hypothetical protein~similar to Oryza sativachromosome 7
  misc_feature (1)..(84): NCBI GI NO: 34903866 NR Description: unnamed protein product
MWLVQGKKKVEHTFKKIKQTVSYATEVTAFAEKGKLRKITGVKTKELMLWLSVVEVYVPEASPEKVTFKTGTGLSDTFDASAFALGE

SEQ ID NO: 35394 - DNA, 1288 bp, Zea mays subsp. mays
  misc_feature (1)..(1288): Ceres Seq. ID no. 12419233
  misc_feature (1030)..(1030): n is a, c, t, g, unknown, or other
  misc_feature (772)..(772): n is a, c, t, g, unknown, or other
  misc_feature (607)..(607): n is a, c, t, g, unknown, or other
  misc_feature (489)..(489): n is a, c, t, g, unknown, or other
  misc_feature (592)..(592): n is a, c, t, g, unknown, or other
  misc_feature (992)..(992): n is a, c, t, g, unknown, or other
  misc_feature (302)..(302): n is a, c, t, g, unknown, or other
  misc_feature (405)..(405): n is a, c, t, g, unknown, or other
  misc_feature (573)..(573): n is a, c, t, g, unknown, or other
aagagaagaatgtggcgtgaacagagagacctgaccctgaggcaggtgaggaggtccagggagcaatgggtttcggcgtagtgcacctcctcgacgcggtgttccgccgcatgttccggtcggccggcctccgcccgggctcggccacggtgaacgccgaagacgacacggtcatccactactgggcccacccgtccctcctccgcccgccgccctccgactccgactccgagcagcggcagccggtggtggtgctgatccacgggttcgggccggacccgacgtggcagtgggcggcgcangcgggcccgctgtcgcgccacttccgcctggtggtgccgacgctgctcttcttcggggcgtccggcacgcgcgcgcccgcgcggtccgacgcctcccaggccnccgcgctcgccgcgctgctcgcgggcccgggccagcagcacctcccgggcctcggcgccggccgcaccgtgcacgtggtgggcnccagctacggcggcctcgtggcgtaccacctcgcccgggagctggagcggcaaggcggcggcgttcgcgtcggcaaggtggtgntgtgcgactcggacgcgtncaagggcgccgaggncgaccgcgcgctggcggccaggagcggcgtggcggaggtggcggagctgctggcgcccgccgacacccgggcgctgcgccgcctcatggcggtctgcgcccaccgccccgtcaagtacgtccccgagtgcctcctccgcgacatgctccggagatacttcgcggncaagagggaggagaagatggcgctcatcagagggatcgccaccggagaaggcttcgagcttgctccgctgcctcaggaggtgctcatcatctggggagagttcgaccagatcttcccggtggacaaagcgcacaaggtgaaagagaagctcggggagaaggcgacggtgaaggtgatccccaacgcggggcacctgccgcagcaggaggacagcaagctnttcaaccgagtcctcctcgacttcctgctgcgcccttngtccaccgccgcctgacctccaacggcagcgcccaagccaaacagcttagcttgctcggctgccttcttctttggttatccattatcatcctgccgcgcgcgtttccggcgttcttgtttgtttgtagagtggaggaggcgctgccgccttctgtttttgtttgagggtggcaatgtgcagatcctacctgtttggttgtgctgtgaaaaaaagttgctgtgggctgtggaaaaagattttatcattattttatcatt

SEQ ID NO: 35395 - protein, 326 aa, Zea mays subsp. mays
  peptide (1)..(326): Ceres Seq. ID no. 12419234
  misc_feature (87)..(315): Pfam Name: Pfam Description:  alpha/beta hydrolase fold
  misc_feature (1)..(326): NCBI GI NO: 34896168 NR Description: contains ESTs C73890
  misc_feature (4)..(229): NCBI GI NO: 24059850 NR Description: hydrolase-like protein
  misc_feature (224)..(324): NCBI GI NO: 24059850 NR Description: hydrolase-like protein
  misc_feature (1)..(319): NCBI GI NO: 27436745 NR Description: Hypothetical protein
  misc_feature (1)..(319): NCBI GI NO: 27436746 NR Description: Unknown protein
  misc_feature (26)..(318): NCBI GI NO: 30689631 NR Description: hydrolase, alpha/beta fold family
  misc_feature (10)..(321): NCBI GI NO: 37533664 NR Description: putative hydrolase
  misc_feature (62)..(318): NCBI GI NO: 21592805 NR Description: unknown [Arabidopsis thaliana]
  misc_feature (3)..(319): NCBI GI NO: 18411865 NR Description: hypothetical protein; protein id: At1g78210
  misc_feature (12)..(318): NCBI GI NO: 19387256 NR Description: putative hydrolase
  misc_feature (79)..(79): Xaa is any aa, unknown or other
  misc_feature (114)..(114): Xaa is any aa, unknown or other
  misc_feature (142)..(142): Xaa is any aa, unknown or other
  misc_feature (170)..(170): Xaa is any aa, unknown or other
  misc_feature (176)..(176): Xaa is any aa, unknown or other
  misc_feature (181)..(181): Xaa is any aa, unknown or other
  misc_feature (236)..(236): Xaa is any aa, unknown or other
  misc_feature (309)..(309): Xaa is any aa, unknown or other
  misc_feature (322)..(322): Xaa is any aa, unknown or other
MGFGVVHLLDAVFRRMFRSAGLRPGSATVNAEDDTVIHYWAHPSLLRPPPSDSDSEQRQPVVVLIHGFGPDPTWQWAAXAGPLSRHFRLVVPTLLFFGASGTRAPARSDASQAXALAALLAGPGQQHLPGLGAGRTVHVVGXSYGGLVAYHLARELERQGGGVRVGKVVXCDSDAXKGAEXDRALAARSGVAEVAELLAPADTRALRRLMAVCAHRPVKYVPECLLRDMLRRYFAXKREEKMALIRGIATGEGFELAPLPQEVLIIWGEFDQIFPVDKAHKVKEKLGEKATVKVIPNAGHLPQQEDSKXFNRVLLDFLLRPXSTAA

SEQ ID NO: 35396 - protein, 311 aa, Zea mays subsp. mays
  peptide (1)..(311): Ceres Seq. ID no. 12419235
  misc_feature (72)..(300): Pfam Name: Pfam Description:  alpha/beta hydrolase fold
  misc_feature (1)..(311): NCBI GI NO: 34896168 NR Description: contains ESTs C73890
  misc_feature (1)..(214): NCBI GI NO: 24059850 NR Description: hydrolase-like protein
  misc_feature (209)..(309): NCBI GI NO: 24059850 NR Description: hydrolase-like protein
  misc_feature (1)..(304): NCBI GI NO: 27436745 NR Description: Hypothetical protein
  misc_feature (1)..(304): NCBI GI NO: 27436746 NR Description: Unknown protein
  misc_feature (11)..(303): NCBI GI NO: 30689631 NR Description: hydrolase, alpha/beta fold family
  misc_feature (1)..(306): NCBI GI NO: 37533664 NR Description: putative hydrolase
  misc_feature (47)..(303): NCBI GI NO: 21592805 NR Description: unknown [Arabidopsis thaliana]
  misc_feature (1)..(304): NCBI GI NO: 18411865 NR Description: hypothetical protein; protein id: At1g78210
  misc_feature (1)..(303): NCBI GI NO: 19387256 NR Description: putative hydrolase
  misc_feature (64)..(64): Xaa is any aa, unknown or other
  misc_feature (99)..(99): Xaa is any aa, unknown or other
  misc_feature (127)..(127): Xaa is any aa, unknown or other
  misc_feature (155)..(155): Xaa is any aa, unknown or other
  misc_feature (161)..(161): Xaa is any aa, unknown or other
  misc_feature (166)..(166): Xaa is any aa, unknown or other
  misc_feature (221)..(221): Xaa is any aa, unknown or other
  misc_feature (294)..(294): Xaa is any aa, unknown or other
  misc_feature (307)..(307): Xaa is any aa, unknown or other
MFRSAGLRPGSATVNAEDDTVIHYWAHPSLLRPPPSDSDSEQRQPVVVLIHGFGPDPTWQWAAXAGPLSRHFRLVVPTLLFFGASGTRAPARSDASQAXALAALLAGPGQQHLPGLGAGRTVHVVGXSYGGLVAYHLARELERQGGGVRVGKVVXCDSDAXKGAEXDRALAARSGVAEVAELLAPADTRALRRLMAVCAHRPVKYVPECLLRDMLRRYFAXKREEKMALIRGIATGEGFELAPLPQEVLIIWGEFDQIFPVDKAHKVKEKLGEKATVKVIPNAGHLPQQEDSKXFNRVLLDFLLRPXSTAA

SEQ ID NO: 35397 - DNA, 1990 bp, Zea mays subsp. mays
  misc_feature (1)..(1990): Ceres Seq. ID no. 12391586
attcctgagcaaaaatcccctgcaacccgacccatagccatgggcaagctcgaggagaggacgcgtgcgttctggacgaaccgatggcttgtgttcgttggggccatgtggatgcagtccatggccggcaccacttacatcttcggcgccatctcgccggtggtcaaggccaggctgggctacgaccagccgcaggtggccgcgctgggtgtcgccaagaacctcggcggctgcctcggcctcctcgccggcgcgctctcggcgacgtggccgccgtgggcgctgctggccatcggcgccgcgcagaacttcctcggctacggctggctctggctcgtcgtctccgggaacgtgccggcgctgcccctctggctgatgtgtgttgttatctttattggaacaaatggccagacgtatttcatcacggcttcacttgttacaagcatccagaatttcccaaagagcaggggcccaacagtgggcatcctcaaaggatttatgggcctaactagcgccattctgacacaagtttatacagtgatgcacactccagaccatgctgcgcttatcttcatggttgctgttggtccgtcgctggttgccattggcttgatgtttgttattaggcctgttggtggtcacaggcagatacggccatctgacaagaacagcttcatgttcatctacactgtatgcttgctcctcgcctcataccttgtcggtgctatgcttatccaagatttcctgcaaccaagctatgatgtggttgtttttctgactgtgattctgttcgtcctccttatttcaccaatcgcaatccctgtgattgtgtcgttcatgccggaaaaagctcagcatctcatggaagatgctctcttatctgaaccattgacaggagaggcaagcagttcacgacaaaaggaggatcaaccagaggtcattttaagtgaggtagaagaggagaagtctaaggaaactgattcattgccgccatctgaaaggagaaagaggattgcggaattgcaggccaagctagtggaagcagcggcaagaggtggggttagaatcaaaagaaggccacaccgaggggataacttcaccctgatgcaggcattggtgaaggctgatttttggcttatttggctatcacttttgcttgggtcgggatcagggctgacagtgattgataacctgggtcagatgagccaggctattggttataaaaatgcacatatcttttgtcactcgtgagcatatggaactttcttggtcgtgttggaggtggctacttctctgagatcattgtcagggaacgtacatacccaaggcacatagcattggcagttgctcagatcgtgatggctgctgggcatttcctctttgctatggcttggcctggaactatgtacattgcgagcttgctggttggacttggatatggagctcactgggctattgtgccagctgctgtctccgagctttttggtgtaaaacactttggtgcgatgtacaattttctcatactagcgaaccccgcaggatccctcatcttctcagagctaattgtcagcaacctctatgaacatgaagctgagaaacaagctagccaacagcagatgtcagcattgctgtctccacgattgcttcgtgataccggctttcttgcagatgatgcactcaagtgtgaagggcctgcttgcttctttttcagctctctgattatgtcggtgttctgtgctgttgccgctgggttgagcctcctcgtcgttcaaaggaccagacaagtttatcctcgcctctacagttctgtccgcacttgagattctccaattctccatggatgggaagctcaaatcctcgtattctatgtccgtttattcttgcatacatatgcacaaagataagtatgtgaataaattctcaaatcttttcctaagctggtattgtaaaaacagatattcttgaatggactgtcccttgtgacttgcct

SEQ ID NO: 35398 - protein, 416 aa, Zea mays subsp. mays
  peptide (1)..(416): Ceres Seq. ID no. 12391587
  misc_feature (27)..(210): Pfam Name: and other Pfam Description: Sugar
  misc_feature (19)..(416): NCBI GI NO: 18395988 NR Description: unknown protein; protein id: At3g01930.1
  misc_feature (19)..(416): NCBI GI NO: 15241312 NR Description: nodulin-like protein; protein id: At5g14120.1
  misc_feature (19)..(416): NCBI GI NO: 11358583 NR Description: nodulin-like protein
  misc_feature (126)..(416): NCBI GI NO: 30678455 NR Description: expressed protein [Arabidopsis thaliana]
  misc_feature (19)..(416): NCBI GI NO: 1532169 NR Description: similar to a E
  misc_feature (27)..(274): NCBI GI NO: 18423161 NR Description: nodulin-like protein; protein id: At5g50520
  misc_feature (328)..(416): NCBI GI NO: 18423161 NR Description: nodulin-like protein; protein id: At5g50520
  misc_feature (14)..(412): NCBI GI NO: 15220164 NR Description: nodulin-like protein; protein id: At1g80530
  misc_feature (28)..(325): NCBI GI NO: 15227274 NR Description: nodulin-like protein; protein id: At2g16660
  misc_feature (339)..(413): NCBI GI NO: 15227274 NR Description: nodulin-like protein; protein id: At2g16660
IPEQKSPATRPIAMGKLEERTRAFWTNRWLVFVGAMWMQSMAGTTYIFGAISPVVKARLGYDQPQVAALGVAKNLGGCLGLLAGALSATWPPWALLAIGAAQNFLGYGWLWLVVSGNVPALPLWLMCVVIFIGTNGQTYFITASLVTSIQNFPKSRGPTVGILKGFMGLTSAILTQVYTVMHTPDHAALIFMVAVGPSLVAIGLMFVIRPVGGHRQIRPSDKNSFMFIYTVCLLLASYLVGAMLIQDFLQPSYDVVVFLTVILFVLLISPIAIPVIVSFMPEKAQHLMEDALLSEPLTGEASSSRQKEDQPEVILSEVEEEKSKETDSLPPSERRKRIAELQAKLVEAAARGGVRIKRRPHRGDNFTLMQALVKADFWLIWLSLLLGSGSGLTVIDNLGQMSQAIGYKNAHIFCHS

SEQ ID NO: 35399 - protein, 403 aa, Zea mays subsp. mays
  peptide (1)..(403): Ceres Seq. ID no. 12391588
  misc_feature (14)..(197): Pfam Name: and other Pfam Description: Sugar
  misc_feature (6)..(403): NCBI GI NO: 18395988 NR Description: unknown protein; protein id: At3g01930.1
  misc_feature (6)..(403): NCBI GI NO: 15241312 NR Description: nodulin-like protein; protein id: At5g14120.1
  misc_feature (6)..(403): NCBI GI NO: 11358583 NR Description: nodulin-like protein
  misc_feature (113)..(403): NCBI GI NO: 30678455 NR Description: expressed protein [Arabidopsis thaliana]
  misc_feature (6)..(403): NCBI GI NO: 1532169 NR Description: similar to a E
  misc_feature (14)..(261): NCBI GI NO: 18423161 NR Description: nodulin-like protein; protein id: At5g50520
  misc_feature (315)..(403): NCBI GI NO: 18423161 NR Description: nodulin-like protein; protein id: At5g50520
  misc_feature (1)..(399): NCBI GI NO: 15220164 NR Description: nodulin-like protein; protein id: At1g80530
  misc_feature (15)..(312): NCBI GI NO: 15227274 NR Description: nodulin-like protein; protein id: At2g16660
  misc_feature (326)..(400): NCBI GI NO: 15227274 NR Description: nodulin-like protein; protein id: At2g16660
MGKLEERTRAFWTNRWLVFVGAMWMQSMAGTTYIFGAISPVVKARLGYDQPQVAALGVAKNLGGCLGLLAGALSATWPPWALLAIGAAQNFLGYGWLWLVVSGNVPALPLWLMCVVIFIGTNGQTYFITASLVTSIQNFPKSRGPTVGILKGFMGLTSAILTQVYTVMHTPDHAALIFMVAVGPSLVAIGLMFVIRPVGGHRQIRPSDKNSFMFIYTVCLLLASYLVGAMLIQDFLQPSYDVVVFLTVILFVLLISPIAIPVIVSFMPEKAQHLMEDALLSEPLTGEASSSRQKEDQPEVILSEVEEEKSKETDSLPPSERRKRIAELQAKLVEAAARGGVRIKRRPHRGDNFTLMQALVKADFWLIWLSLLLGSGSGLTVIDNLGQMSQAIGYKNAHIFCHS

SEQ ID NO: 35400 - protein, 381 aa, Zea mays subsp. mays
  peptide (1)..(381): Ceres Seq. ID no. 12391589
  misc_feature (1)..(175): Pfam Name: and other Pfam Description: Sugar
  misc_feature (1)..(381): NCBI GI NO: 18395988 NR Description: unknown protein; protein id: At3g01930.1
  misc_feature (1)..(381): NCBI GI NO: 15241312 NR Description: nodulin-like protein; protein id: At5g14120.1
  misc_feature (1)..(381): NCBI GI NO: 11358583 NR Description: nodulin-like protein
  misc_feature (91)..(381): NCBI GI NO: 30678455 NR Description: expressed protein [Arabidopsis thaliana]
  misc_feature (1)..(381): NCBI GI NO: 1532169 NR Description: similar to a E
  misc_feature (1)..(239): NCBI GI NO: 18423161 NR Description: nodulin-like protein; protein id: At5g50520
  misc_feature (293)..(381): NCBI GI NO: 18423161 NR Description: nodulin-like protein; protein id: At5g50520
  misc_feature (1)..(377): NCBI GI NO: 15220164 NR Description: nodulin-like protein; protein id: At1g80530
  misc_feature (1)..(290): NCBI GI NO: 15227274 NR Description: nodulin-like protein; protein id: At2g16660
  misc_feature (304)..(378): NCBI GI NO: 15227274 NR Description: nodulin-like protein; protein id: At2g16660
MWMQSMAGTTYIFGAISPVVKARLGYDQPQVAALGVAKNLGGCLGLLAGALSATWPPWALLAIGAAQNFLGYGWLWLVVSGNVPALPLWLMCVVIFIGTNGQTYFITASLVTSIQNFPKSRGPTVGILKGFMGLTSAILTQVYTVMHTPDHAALIFMVAVGPSLVAIGLMFVIRPVGGHRQIRPSDKNSFMFIYTVCLLLASYLVGAMLIQDFLQPSYDVVVFLTVILFVLLISPIAIPVIVSFMPEKAQHLMEDALLSEPLTGEASSSRQKEDQPEVILSEVEEEKSKETDSLPPSERRKRIAELQAKLVEAAARGGVRIKRRPHRGDNFTLMQALVKADFWLIWLSLLLGSGSGLTVIDNLGQMSQAIGYKNAHIFCHS

SEQ ID NO: 35401 - DNA, 1894 bp, Zea mays subsp. mays
  misc_feature (1)..(1894): Ceres Seq. ID no. 12455023
  misc_feature (550)..(550): n is a, c, t, g, unknown, or other
atgcaccagtcgactctccatattcgccacatcttcttacgtagctctctctctctctctcgctaatacaaggaggagacggagtagaagaaagggtgcagcaaattaatcgggggcactagttcaccttcatcctcaatccattcattcatcagtactcccagccttttccggcacacgcatctatggccccgccatcacacttctacaacaacaatggcgccccgcaggacgccgccagctacctccatgcgggaccaggaaatgcacctccacaggactcctgcttgctcgacgcagacgagttccgccggcagggccaccaagtcatcgacttcatcgccgactactacggccgcatggacgactaccccgtgcaccccagcgtcaaccccggcttcctgcgccgccagctccccgacaaggcgccgtcgcgtccggagtcgtccgacgcgttcggtgccgcgctgcgggacgtccgtgacctcatcctgccaggcatgacgcactggcagagcgcccgccacttcgcgcacttcccggcgtccancaacaccgtcggcgccctcggcgaggccctcacggccggcatcaactccgtcccgttcacgtgggccgcctcgccggccgccacggagctcgagatggtcgtcgtggactggctcggcaaggcgctccacctgcccgagagcctaatgttctgcggcggcggcggaggcacgcttctcggcaccacgtgcgaggccatcctctgcgccctcgtcgccgcgagggaccgcaagctcgtggacatcggcagcgggaggatcggagacctcgtcgtctactgttccgaccagacgcactttgccttccgcaaggcagcgcatattgccgggatccaccgcgacaactgccgcgagatcgccacgtaccgtgacgacatgttcgcgctctcgccagccgagctgcaggccgccatgcaggcggacgtggacgccgggctggtcccgctcttcctgtgcgcgacggtcggaaccactcagacgacggccgtcgaccctatcagagggctctgcgccgtcgcagcgacacacggtgtctgggtgcacgtggatgcggcctacgcgggctcggcgctcgtctgcccagagttccggcacctgatcgacggcgccgaagccgtggactccttcagcatgaatgctcacaagtggctgctggccaacaacgactgctgcgctctgtgggtgaagaagccagctctgctcgtcgcggctctcggcacggagcaggagtacatcctcaaagacgcggcctctgaggggcacgacgtcgtggactacaaggactggtccgtgacgctgacccgccggttccgcgcgctcaagctatggctcgtgctccgctgctatggcgtcgagggcctgcgcgaccacatccgcggccatgtgcgcatggccgcgtcgttcgaggacatggtcaaggccgacccacgcttccaagtcgtggcaaagaggcaattcgcactcgtttgctttaggctccgggcgcccgaggagttgggcggccccaaggcagccaacgcgctcaaccgaaggctgctagaggaggtgaatgcggcttgctccgggccctacatgagctccgctaatgtcggtggcgtctacatgctcagatgcgctatcgggagcacgcttacggaggagcgacacgtccgcgaggcatggacagttgtgcagaacgtagcttcttccctcctcactaaaatggagatgcatgaagattattgaaagcgcctttgcctaataagctcaactcattccactttgttgttgtttattagtttattctattattaagcatcgagttgtgtaacctattatatatacattatggaatgcattatacgact

SEQ ID NO: 35402 - protein, 528 aa, Zea mays subsp. mays
  peptide (1)..(528): Ceres Seq. ID no. 12455024
  misc_feature (70)..(448): Pfam Name: Pfam Description:  Pyridoxal-dependent decarboxylase conserved domain
  misc_feature (1)..(521): NCBI GI NO: 34909906 NR Description: putative tyrosine/DOPA decarboxylase
  misc_feature (36)..(519): NCBI GI NO: 12620328 NR Description: tyrosine/dopa decarboxylase
  misc_feature (36)..(495): NCBI GI NO: 1717826 NR Description: Tyrosine/DOPA decarboxylase 2
  misc_feature (459)..(521): NCBI GI NO: 1717826 NR Description: Tyrosine/DOPA decarboxylase 2
  misc_feature (36)..(495): NCBI GI NO: 22261822 NR Description: Tyrosine/DOPA decarboxylase 3
  misc_feature (459)..(523): NCBI GI NO: 22261822 NR Description: Tyrosine/DOPA decarboxylase 3
  misc_feature (36)..(495): NCBI GI NO: 3282525 NR Description: tyrosine/dopa decarboxylase [Papaver somniferum]
  misc_feature (459)..(521): NCBI GI NO: 3282525 NR Description: tyrosine/dopa decarboxylase [Papaver somniferum]
  misc_feature (36)..(523): NCBI GI NO: 3282527 NR Description: tyrosine/dopa decarboxylase [Papaver somniferum]
  misc_feature (36)..(519): NCBI GI NO: 3282523 NR Description: tyrosine/dopa decarboxylase [Papaver somniferum]
  misc_feature (122)..(122): Xaa is any aa, unknown or other
MAPPSHFYNNNGAPQDAASYLHAGPGNAPPQDSCLLDADEFRRQGHQVIDFIADYYGRMDDYPVHPSVNPGFLRRQLPDKAPSRPESSDAFGAALRDVRDLILPGMTHWQSARHFAHFPASXNTVGALGEALTAGINSVPFTWAASPAATELEMVVVDWLGKALHLPESLMFCGGGGGTLLGTTCEAILCALVAARDRKLVDIGSGRIGDLVVYCSDQTHFAFRKAAHIAGIHRDNCREIATYRDDMFALSPAELQAAMQADVDAGLVPLFLCATVGTTQTTAVDPIRGLCAVAATHGVWVHVDAAYAGSALVCPEFRHLIDGAEAVDSFSMNAHKWLLANNDCCALWVKKPALLVAALGTEQEYILKDAASEGHDVVDYKDWSVTLTRRFRALKLWLVLRCYGVEGLRDHIRGHVRMAASFEDMVKADPRFQVVAKRQFALVCFRLRAPEELGGPKAANALNRRLLEEVNAACSGPYMSSANVGGVYMLRCAIGSTLTEERHVREAWTVVQNVASSLLTKMEMHEDY

SEQ ID NO: 35403 - protein, 470 aa, Zea mays subsp. mays
  peptide (1)..(470): Ceres Seq. ID no. 12455025
  misc_feature (12)..(390): Pfam Name: Pfam Description:  Pyridoxal-dependent decarboxylase conserved domain
  misc_feature (1)..(463): NCBI GI NO: 34909906 NR Description: putative tyrosine/DOPA decarboxylase
  misc_feature (1)..(461): NCBI GI NO: 12620328 NR Description: tyrosine/dopa decarboxylase
  misc_feature (1)..(437): NCBI GI NO: 1717826 NR Description: Tyrosine/DOPA decarboxylase 2
  misc_feature (401)..(463): NCBI GI NO: 1717826 NR Description: Tyrosine/DOPA decarboxylase 2
  misc_feature (1)..(437): NCBI GI NO: 22261822 NR Description: Tyrosine/DOPA decarboxylase 3
  misc_feature (401)..(465): NCBI GI NO: 22261822 NR Description: Tyrosine/DOPA decarboxylase 3
  misc_feature (1)..(437): NCBI GI NO: 3282525 NR Description: tyrosine/dopa decarboxylase [Papaver somniferum]
  misc_feature (401)..(463): NCBI GI NO: 3282525 NR Description: tyrosine/dopa decarboxylase [Papaver somniferum]
  misc_feature (1)..(465): NCBI GI NO: 3282527 NR Description: tyrosine/dopa decarboxylase [Papaver somniferum]
  misc_feature (1)..(461): NCBI GI NO: 3282523 NR Description: tyrosine/dopa decarboxylase [Papaver somniferum]
  misc_feature (64)..(64): Xaa is any aa, unknown or other
MDDYPVHPSVNPGFLRRQLPDKAPSRPESSDAFGAALRDVRDLILPGMTHWQSARHFAHFPASXNTVGALGEALTAGINSVPFTWAASPAATELEMVVVDWLGKALHLPESLMFCGGGGGTLLGTTCEAILCALVAARDRKLVDIGSGRIGDLVVYCSDQTHFAFRKAAHIAGIHRDNCREIATYRDDMFALSPAELQAAMQADVDAGLVPLFLCATVGTTQTTAVDPIRGLCAVAATHGVWVHVDAAYAGSALVCPEFRHLIDGAEAVDSFSMNAHKWLLANNDCCALWVKKPALLVAALGTEQEYILKDAASEGHDVVDYKDWSVTLTRRFRALKLWLVLRCYGVEGLRDHIRGHVRMAASFEDMVKADPRFQVVAKRQFALVCFRLRAPEELGGPKAANALNRRLLEEVNAACSGPYMSSANVGGVYMLRCAIGSTLTEERHVREAWTVVQNVASSLLTKMEMHEDY

SEQ ID NO: 35404 - protein, 423 aa, Zea mays subsp. mays
  peptide (1)..(423): Ceres Seq. ID no. 12455026
  misc_feature (1)..(343): Pfam Name: Pfam Description:  Pyridoxal-dependent decarboxylase conserved domain
  misc_feature (1)..(416): NCBI GI NO: 34909906 NR Description: putative tyrosine/DOPA decarboxylase
  misc_feature (1)..(414): NCBI GI NO: 12620328 NR Description: tyrosine/dopa decarboxylase
  misc_feature (1)..(390): NCBI GI NO: 1717826 NR Description: Tyrosine/DOPA decarboxylase 2
  misc_feature (354)..(416): NCBI GI NO: 1717826 NR Description: Tyrosine/DOPA decarboxylase 2
  misc_feature (1)..(390): NCBI GI NO: 22261822 NR Description: Tyrosine/DOPA decarboxylase 3
  misc_feature (354)..(418): NCBI GI NO: 22261822 NR Description: Tyrosine/DOPA decarboxylase 3
  misc_feature (1)..(390): NCBI GI NO: 3282525 NR Description: tyrosine/dopa decarboxylase [Papaver somniferum]
  misc_feature (354)..(416): NCBI GI NO: 3282525 NR Description: tyrosine/dopa decarboxylase [Papaver somniferum]
  misc_feature (1)..(418): NCBI GI NO: 3282527 NR Description: tyrosine/dopa decarboxylase [Papaver somniferum]
  misc_feature (1)..(414): NCBI GI NO: 3282523 NR Description: tyrosine/dopa decarboxylase [Papaver somniferum]
  misc_feature (17)..(17): Xaa is any aa, unknown or other
MTHWQSARHFAHFPASXNTVGALGEALTAGINSVPFTWAASPAATELEMVVVDWLGKALHLPESLMFCGGGGGTLLGTTCEAILCALVAARDRKLVDIGSGRIGDLVVYCSDQTHFAFRKAAHIAGIHRDNCREIATYRDDMFALSPAELQAAMQADVDAGLVPLFLCATVGTTQTTAVDPIRGLCAVAATHGVWVHVDAAYAGSALVCPEFRHLIDGAEAVDSFSMNAHKWLLANNDCCALWVKKPALLVAALGTEQEYILKDAASEGHDVVDYKDWSVTLTRRFRALKLWLVLRCYGVEGLRDHIRGHVRMAASFEDMVKADPRFQVVAKRQFALVCFRLRAPEELGGPKAANALNRRLLEEVNAACSGPYMSSANVGGVYMLRCAIGSTLTEERHVREAWTVVQNVASSLLTKMEMHEDY

SEQ ID NO: 35405 - DNA, 1324 bp, Zea mays subsp. mays; identical to SEQ ID NO: 27212
  misc_feature (1)..(1324): Ceres Seq. ID no. 13492565

SEQ ID NO: 35406 - protein, 235 aa, Zea mays subsp. mays; identical to SEQ ID NO: 27213
  peptide (1)..(235): Ceres Seq. ID no. 13492566
  misc_feature (1)..(196): Pfam Name: Pfam Description:  Phosphofructokinase
  misc_feature (1)..(234): NCBI GI NO: 29647436 NR Description: putative pyrophosphate--fructose 6-phosphate 1-phosphotransferase alpha subunit
  misc_feature (1)..(234): NCBI GI NO: 29367525 NR Description: fructose-6-phosphate 1-phosphotransferase
  misc_feature (1)..(234): NCBI GI NO: 3790102 NR Description: pyrophosphate-dependent phosphofructokinase alpha subunit
  misc_feature (1)..(234): NCBI GI NO: 2499488 NR Description: Pyrophosphate --fructose 6-phosphate 1-phosphotransferase alpha subunit
  misc_feature (1)..(234): NCBI GI NO: 129881 NR Description: Pyrophosphate --fructose 6-phosphate 1-phosphotransferase alpha subunit
  misc_feature (1)..(234): NCBI GI NO: 15223082 NR Description: pyrophosphate-dependent phosphofructokinase alpha subunit -related
  misc_feature (1)..(234): NCBI GI NO: 15218074 NR Description: pyrophosphate-dependent phosphofructokinase alpha subunit -related
  misc_feature (1)..(234): NCBI GI NO: 2499489 NR Description: Pyrophosphate --fructose 6-phosphate 1-phosphotransferase beta subunit
  misc_feature (1)..(234): NCBI GI NO: 3790100 NR Description: pyrophosphate-dependent phosphofructokinase beta subunit
  misc_feature (1)..(234): NCBI GI NO: 2507174 NR Description: PYROPHOSPHATE --FRUCTOSE 6-PHOSPHATE 1-PHOSPHOTRANSFERASE BETA SUBUNIT

SEQ ID NO: 35407 - protein, 143 aa, Zea mays subsp. mays; identical to SEQ ID NO: 27214
  peptide (1)..(143): Ceres Seq. ID no. 13492567
  misc_feature (1)..(104): Pfam Name: Pfam Description:  Phosphofructokinase
  misc_feature (1)..(142): NCBI GI NO: 29647436 NR Description: putative pyrophosphate--fructose 6-phosphate 1-phosphotransferase alpha subunit
  misc_feature (1)..(142): NCBI GI NO: 29367525 NR Description: fructose-6-phosphate 1-phosphotransferase
  misc_feature (1)..(142): NCBI GI NO: 3790102 NR Description: pyrophosphate-dependent phosphofructokinase alpha subunit
  misc_feature (1)..(142): NCBI GI NO: 2499488 NR Description: Pyrophosphate --fructose 6-phosphate 1-phosphotransferase alpha subunit
  misc_feature (1)..(142): NCBI GI NO: 129881 NR Description: Pyrophosphate --fructose 6-phosphate 1-phosphotransferase alpha subunit
  misc_feature (1)..(142): NCBI GI NO: 15223082 NR Description: pyrophosphate-dependent phosphofructokinase alpha subunit -related
  misc_feature (1)..(142): NCBI GI NO: 15218074 NR Description: pyrophosphate-dependent phosphofructokinase alpha subunit -related
  misc_feature (1)..(142): NCBI GI NO: 2499489 NR Description: Pyrophosphate --fructose 6-phosphate 1-phosphotransferase beta subunit
  misc_feature (1)..(142): NCBI GI NO: 3790100 NR Description: pyrophosphate-dependent phosphofructokinase beta subunit
  misc_feature (1)..(142): NCBI GI NO: 2507174 NR Description: PYROPHOSPHATE --FRUCTOSE 6-PHOSPHATE 1-PHOSPHOTRANSFERASE BETA SUBUNIT

SEQ ID NO: 35408 - protein, 124 aa, Zea mays subsp. mays; identical to SEQ ID NO: 27215
  peptide (1)..(124): Ceres Seq. ID no. 13492568
  misc_feature (1)..(85): Pfam Name: Pfam Description:  Phosphofructokinase
  misc_feature (1)..(123): NCBI GI NO: 29647436 NR Description: putative pyrophosphate--fructose 6-phosphate 1-phosphotransferase alpha subunit
  misc_feature (1)..(123): NCBI GI NO: 29367525 NR Description: fructose-6-phosphate 1-phosphotransferase
  misc_feature (1)..(123): NCBI GI NO: 3790102 NR Description: pyrophosphate-dependent phosphofructokinase alpha subunit
  misc_feature (1)..(123): NCBI GI NO: 2499488 NR Description: Pyrophosphate --fructose 6-phosphate 1-phosphotransferase alpha subunit
  misc_feature (1)..(123): NCBI GI NO: 129881 NR Description: Pyrophosphate --fructose 6-phosphate 1-phosphotransferase alpha subunit
  misc_feature (1)..(123): NCBI GI NO: 15223082 NR Description: pyrophosphate-dependent phosphofructokinase alpha subunit -related
  misc_feature (1)..(123): NCBI GI NO: 15218074 NR Description: pyrophosphate-dependent phosphofructokinase alpha subunit -related
  misc_feature (1)..(123): NCBI GI NO: 2499489 NR Description: Pyrophosphate --fructose 6-phosphate 1-phosphotransferase beta subunit
  misc_feature (1)..(123): NCBI GI NO: 3790100 NR Description: pyrophosphate-dependent phosphofructokinase beta subunit
  misc_feature (1)..(123): NCBI GI NO: 2507174 NR Description: PYROPHOSPHATE --FRUCTOSE 6-PHOSPHATE 1-PHOSPHOTRANSFERASE BETA SUBUNIT

SEQ ID NO: 35409 - DNA, 955 bp, Zea mays subsp. mays
  misc_feature (1)..(955): Ceres Seq. ID no. 12377211
  misc_feature (902)..(902): n is a, c, t, g, unknown, or other
  misc_feature (822)..(822): n is a, c, t, g, unknown, or other
acgcttggcagttggcaagcagcgagtggggggagacagccaactctctatcctcttcccccctcgtccatccccatcccaccgccttgctctcccctctccacttccagctgtccatggctgcagcagcgtgctcctctgcctcgccgctcctcctcccctcagggccgagacatgcgtcggcctccagggcgtggtttctcggcggcaggagcagggcgctgagatcagaggcgccgtgctgctgcaaggccgccgccgcccgtggaagcgctccgcaatgcgggacggtcggtggtggcagcagcagcacccggagggggctgctaggcgtggccctgggagcctctgccttggggctggccgcgtttgacgccgtcgccgccgggttgccgccggaggagaagcccaagctctgcgacgccgcctgcgaaggcgagctcgaaaatgttggttgagcctccgtgcctatggtaactacagaatccggactgcagtacaaggatatcaaagtgggcgaagggcctagcccacccgttggtttccaggttgcagcaaattatgttgctatggtgccaactgggcagatattcgacagttcgctggagaaaggtcagccctacatattccgtgttggatcagggcaggtgatcaaggggcttgatgagggaattttgtcgatgaaggttggaggactacgtcggctgtacatacctgggccattagcgttccctaagggtcttacttctgctcctggaaggccaagagtacccccaagcagccctgtcgttttcgacgtcaatttactgtacataccaggtntcgatgatgagtgaaggcattctgtggcaacagtcatcttttttttgtatacttcattcgagagcaacatactgtacatntagagcacaattctttcaagctataaaatctatgcgaatatctatgttaaccg

SEQ ID NO: 35410 - protein, 151 aa, Zea mays subsp. mays
  peptide (1)..(151): Ceres Seq. ID no. 12377212
  misc_feature (27)..(151): NCBI GI NO: 38636681 NR Description: putative immunophilin / FKBP-type peptidyl-prolylcis-trans isomerase
  misc_feature (43)..(151): NCBI GI NO: 15224305 NR Description: FKBP-type peptidyl-prolyl cis-trans isomerase
  misc_feature (108)..(151): NCBI GI NO: 25408885 NR Description: hypothetical protein At2g43560
  misc_feature (108)..(151): NCBI GI NO: 18252321 NR Description: putative FKBP type peptidyl-prolyl cis-transisomerase
  misc_feature (140)..(151): NCBI GI NO: 23053670 NR Description: hypothetical protein [Geobacter metallireducens]
  misc_feature (111)..(151): NCBI GI NO: 16329650 NR Description: FKBP-type peptidyl-prolyl cis-trans isomerase
  misc_feature (111)..(151): NCBI GI NO: 17228073 NR Description: FKBP-type peptidyl-prolyl cis-trans isomerase
  misc_feature (115)..(151): NCBI GI NO: 37520410 NR Description: FKBP-type peptidyl-prolyl cis-trans isomerase
  misc_feature (140)..(151): NCBI GI NO: 23063828 NR Description: hypothetical protein
  misc_feature (122)..(151): NCBI GI NO: 23028135 NR Description: hypothetical protein
AWQLASSEWGETANSLSSSPLVHPHPTALLSPLHFQLSMAAAACSSASPLLLPSGPRHASASRAWFLGGRSRALRSEAPCCCKAAAARGSAPQCGTVGGGSSSTRRGLLGVALGASALGLAAFDAVAAGLPPEEKPKLCDAACEGELENVG

SEQ ID NO: 35411 - protein, 123 aa, Zea mays subsp. mays
  peptide (1)..(123): Ceres Seq. ID no. 12377213
RLAVGKQRVGGDSQLSILFPPRPSPSHRLALPSPLPAVHGCSSVLLCLAAPPPLRAETCVGLQGVVSRRQEQGAEIRGAVLLQGRRRPWKRSAMRDGRWWQQQHPEGAARRGPGSLCLGAGRV

SEQ ID NO: 35412 - protein, 121 aa, Zea mays subsp. mays
  peptide (1)..(121): Ceres Seq. ID no. 12377214
  misc_feature (16)..(112): Pfam Name: Pfam Description:  FKBP-type peptidyl-prolyl cis-trans isomerase
  misc_feature (1)..(121): NCBI GI NO: 38636681 NR Description: putative immunophilin / FKBP-type peptidyl-prolylcis-trans isomerase
  misc_feature (1)..(121): NCBI GI NO: 15224305 NR Description: FKBP-type peptidyl-prolyl cis-trans isomerase
  misc_feature (1)..(121): NCBI GI NO: 25408885 NR Description: hypothetical protein At2g43560
  misc_feature (1)..(121): NCBI GI NO: 18252321 NR Description: putative FKBP type peptidyl-prolyl cis-transisomerase
  misc_feature (1)..(113): NCBI GI NO: 22298646 NR Description: FKBP-type peptidyl-prolyl cis-trans isomerase
  misc_feature (1)..(113): NCBI GI NO: 23053670 NR Description: hypothetical protein [Geobacter metallireducens]
  misc_feature (1)..(115): NCBI GI NO: 16329650 NR Description: FKBP-type peptidyl-prolyl cis-trans isomerase
  misc_feature (1)..(115): NCBI GI NO: 23042526 NR Description: hypothetical protein
  misc_feature (2)..(113): NCBI GI NO: 39997372 NR Description: FKBP-type peptidyl-prolyl cis-trans isomerase
  misc_feature (1)..(115): NCBI GI NO: 17228073 NR Description: FKBP-type peptidyl-prolyl cis-trans isomerase
  misc_feature (118)..(118): Xaa is any aa, unknown or other
MVTTESGLQYKDIKVGEGPSPPVGFQVAANYVAMVPTGQIFDSSLEKGQPYIFRVGSGQVIKGLDEGILSMKVGGLRRLYIPGPLAFPKGLTSAPGRPRVPPSSPVVFDVNLLYIPGXDDE

SEQ ID NO: 35413 - protein, 113 aa, Zea mays subsp. mays
  peptide (1)..(113): Ceres Seq. ID no. 12377215
  misc_feature (1)..(113): NCBI GI NO: 38636681 NR Description: putative immunophilin / FKBP-type peptidyl-prolylcis-trans isomerase
  misc_feature (5)..(113): NCBI GI NO: 15224305 NR Description: FKBP-type peptidyl-prolyl cis-trans isomerase
  misc_feature (70)..(113): NCBI GI NO: 25408885 NR Description: hypothetical protein At2g43560
  misc_feature (70)..(113): NCBI GI NO: 18252321 NR Description: putative FKBP type peptidyl-prolyl cis-transisomerase
  misc_feature (102)..(113): NCBI GI NO: 23053670 NR Description: hypothetical protein [Geobacter metallireducens]
  misc_feature (73)..(113): NCBI GI NO: 16329650 NR Description: FKBP-type peptidyl-prolyl cis-trans isomerase
  misc_feature (73)..(113): NCBI GI NO: 17228073 NR Description: FKBP-type peptidyl-prolyl cis-trans isomerase
  misc_feature (77)..(113): NCBI GI NO: 37520410 NR Description: FKBP-type peptidyl-prolyl cis-trans isomerase
  misc_feature (102)..(113): NCBI GI NO: 23063828 NR Description: hypothetical protein
  misc_feature (84)..(113): NCBI GI NO: 23028135 NR Description: hypothetical protein
MAAAACSSASPLLLPSGPRHASASRAWFLGGRSRALRSEAPCCCKAAAARGSAPQCGTVGGGSSSTRRGLLGVALGASALGLAAFDAVAAGLPPEEKPKLCDAACEGELENVG

SEQ ID NO: 35414 - DNA, 1251 bp, Zea mays subsp. mays; identical to SEQ ID NO: 33594
  misc_feature (1)..(1251): Ceres Seq. ID no. 12403165

SEQ ID NO: 35415 - protein, 260 aa, Zea mays subsp. mays; identical to SEQ ID NO: 33595
  peptide (1)..(260): Ceres Seq. ID no. 12403166
  misc_feature (18)..(89): Pfam Name: a.k.a. RRM, RBD, or RNP domain Pfam Description: RNA recognition motif.
  misc_feature (1)..(258): NCBI GI NO: 7446336 NR Description: probable arginine/serine-rich splicing factor -alfalfa
  misc_feature (1)..(259): NCBI GI NO: 33146621 NR Description: putative splicing factor, arginine/serine-rich 2
  misc_feature (1)..(260): NCBI GI NO: 15237641 NR Description: arginine/serine-rich splicing factor SC35
  misc_feature (1)..(259): NCBI GI NO: 9843653 NR Description: splicing factor SC35 [Arabidopsis thaliana]
  misc_feature (4)..(219): NCBI GI NO: 28279759 NR Description: Similar to splicing factor, arginine/serine-rich 2
  misc_feature (4)..(219): NCBI GI NO: 266991 NR Description: Splicing factor, arginine/serine-rich 2
  misc_feature (4)..(219): NCBI GI NO: 6755478 NR Description: splicing factor, arginine/serine-rich 2
  misc_feature (4)..(219): NCBI GI NO: 28175397 NR Description: Unknown (protein for MGC:53177) [Xenopus laevis]
  misc_feature (4)..(219): NCBI GI NO: 39794351 NR Description: Unknown (protein for MGC:75633)
  misc_feature (4)..(219): NCBI GI NO: 4506899 NR Description: splicing factor, arginine/serine-rich 2

SEQ ID NO: 35416 - protein, 173 aa, Zea mays subsp. mays; identical to SEQ ID NO: 33596
  peptide (1)..(173): Ceres Seq. ID no. 12403167
  misc_feature (25)..(73): Pfam Name: Pfam Description:  Protamine P1
  misc_feature (1)..(171): NCBI GI NO: 7446336 NR Description: probable arginine/serine-rich splicing factor -alfalfa
  misc_feature (1)..(172): NCBI GI NO: 33146621 NR Description: putative splicing factor, arginine/serine-rich 2
  misc_feature (1)..(173): NCBI GI NO: 15237641 NR Description: arginine/serine-rich splicing factor SC35
  misc_feature (1)..(172): NCBI GI NO: 9843653 NR Description: splicing factor SC35 [Arabidopsis thaliana]
  misc_feature (1)..(132): NCBI GI NO: 28279759 NR Description: Similar to splicing factor, arginine/serine-rich 2
  misc_feature (1)..(132): NCBI GI NO: 266991 NR Description: Splicing factor, arginine/serine-rich 2
  misc_feature (1)..(132): NCBI GI NO: 6755478 NR Description: splicing factor, arginine/serine-rich 2
  misc_feature (1)..(132): NCBI GI NO: 28175397 NR Description: Unknown (protein for MGC:53177) [Xenopus laevis]
  misc_feature (1)..(132): NCBI GI NO: 39794351 NR Description: Unknown (protein for MGC:75633)
  misc_feature (1)..(132): NCBI GI NO: 4506899 NR Description: splicing factor, arginine/serine-rich 2

SEQ ID NO: 35417 - protein, 139 aa, Zea mays subsp. mays; identical to SEQ ID NO: 33597
  peptide (1)..(139): Ceres Seq. ID no. 12403168

SEQ ID NO: 35418 - DNA, 1974 bp, Zea mays subsp. mays
  misc_feature (1)..(1974): Ceres Seq. ID no. 12419180
atcgctctctcctttgcacccctagctagctagtactactgctgctcctccgacttgctcttcgcgcagcaggacggagaaacaagaaccatccctccccctaccggctaccgctgctactcatggtcgcgcgcactgcctcctggtgccgccgcgtatgatccagacatgaatagggcgcacagcagcagctccaagctcatcaacgagaagctcgtggaacaccggatctccactgcgaagcactgcccccactgcggcgagaaaatcgacagcaaaccggattgggtggggctgccggcaggcgtcaagttcgatccaactgaccaggagctgatcgagcacctcgaggcgaaagtgaaggatgaaggctcgagatctcaccctctcatcgacgagttcatacccacaatagatggggaggacggcatatgttacacccaccccgagaaacttccaggtgtgacaagggatggcctaagcaagcacttcttccaccggccgtccaaggcctacacgacgggcacgaggaagaggaggaagatacagacggagtgcgacgtccacaagggggagacgaggtggcacaagaccggcaagacgcggccggtgatggtgaacggccgtcagaaggggtgcaagaagatattggtgctgtacaccaacttcggcaagcaccgcaagccggagaagacgaactgggtcatgcaccagtaccacctcggcgacctagaagaggagaaggagggggagctggtggtgtgcaagatcttctaccagacgcaacccaggcagtgcagctggtcctccgaccggggcgccgccgccactgccttggcagcaacggcggcggcagcggcggcggcggcgcaggagcagcataggagggatagtggcagtggcagctgctcgtctagggaccacgaggtgtcagccacatcgttcccagccggatacacagtcaccacggcggtcgatatgcagcagcatatgaagcagcctgcggaccatttcagcttcgcgcctttcaggaaaaccttcgatcaggaggttggtataggtggtgatcaggtgccatctaatcagcttggacgttcagagccgcatcatgccggcctggggcagcagccacacggcccggtgctcgcgacgaagacggctgtgcctgctacagctttcctgatcagtaggccatcgaaccctgtctcgactatggtgccacctgcaatgcagcacgcatcagttgttctcgatcatgatcagttccatgtgccagcaatccttctccatcaccatgacaaatttcagcaacagcaccaacagtcacagccacaacaaaagcttgaccgcagatctgccggcttggaagaactgataatgggctgcacgtcgtccacaagcacaaaaggagatgcttccattgctcacccccaagagacagaatggccttacccgtactggccacctgacaaccaagatcatcatggatagtagcaacagggacctggtaaatagtggcgatgatgtgaatgctgaaggaacactaaccgcaaccactttcactggaatggtttttgtctgcttgaatatgcagcgttgctttcttggagaatgtacacctacaatagtggggaaagaacagagaaaaaacatatctctgtagatctccctcaataaagaaatgaggataaaactagttaacagtgtgagctctccaagacagaagagacaaaatggccaacgaaaagagaagggggaaagaccgacgggaggaaaggtactgtgtgtgctgacattgaagggatcatgtgtggaccgttagatgtattagagcaccttaatcaagtataactataatcagtttacagtttaccacagtttttttattcgtactacctgttttccaattgtaaaaactagtggcattgtttgcatgtacattaacccttttaatttctttcagtttctaaactg

SEQ ID NO: 35419 - protein, 440 aa, Zea mays subsp. mays
  peptide (1)..(440): Ceres Seq. ID no. 12419181
  misc_feature (55)..(186): Pfam Name: NAM Pfam Description: No apical meristem
  misc_feature (1)..(425): NCBI GI NO: 34906416 NR Description: P0710E05.22
  misc_feature (2)..(249): NCBI GI NO: 15233497 NR Description: putative protein; protein id: At4g29230.1
  misc_feature (6)..(275): NCBI GI NO: 15241889 NR Description: putative protein; protein id: At5g56620.1
  misc_feature (21)..(222): NCBI GI NO: 15235314 NR Description: similar to NAM protein, putative
  misc_feature (4)..(245): NCBI GI NO: 34911014 NR Description: OJ1125_C04.12
  misc_feature (27)..(210): NCBI GI NO: 18396807 NR Description: NAM protein, putative; protein id: At1g28470
  misc_feature (27)..(210): NCBI GI NO: 21554371 NR Description: NAM protein, putative [Arabidopsis thaliana]
  misc_feature (32)..(210): NCBI GI NO: 6560767 NR Description: F3M18.9 [Arabidopsis thaliana]
  misc_feature (1)..(209): NCBI GI NO: 12320749 NR Description: unknown protein [Arabidopsis thaliana]
  misc_feature (1)..(209): NCBI GI NO: 30689293 NR Description: No apical meristem (NAM) protein family
MNRAHSSSSKLINEKLVEHRISTAKHCPHCGEKIDSKPDWVGLPAGVKFDPTDQELIEHLEAKVKDEGSRSHPLIDEFIPTIDGEDGICYTHPEKLPGVTRDGLSKHFFHRPSKAYTTGTRKRRKIQTECDVHKGETRWHKTGKTRPVMVNGRQKGCKKILVLYTNFGKHRKPEKTNWVMHQYHLGDLEEEKEGELVVCKIFYQTQPRQCSWSSDRGAAATALAATAAAAAAAAQEQHRRDSGSGSCSSRDHEVSATSFPAGYTVTTAVDMQQHMKQPADHFSFAPFRKTFDQEVGIGGDQVPSNQLGRSEPHHAGLGQQPHGPVLATKTAVPATAFLISRPSNPVSTMVPPAMQHASVVLDHDQFHVPAILLHHHDKFQQQHQQSQPQQKLDRRSAGLEELIMGCTSSTSTKGDASIAHPQETEWPYPYWPPDNQDHHG

SEQ ID NO: 35420 - protein, 292 aa, Zea mays subsp. mays
  peptide (1)..(292): Ceres Seq. ID no. 12419182
  misc_feature (1)..(277): NCBI GI NO: 34906416 NR Description: P0710E05.22
  misc_feature (1)..(101): NCBI GI NO: 15233497 NR Description: putative protein; protein id: At4g29230.1
  misc_feature (1)..(127): NCBI GI NO: 15241889 NR Description: putative protein; protein id: At5g56620.1
  misc_feature (1)..(74): NCBI GI NO: 15235314 NR Description: similar to NAM protein, putative
  misc_feature (1)..(97): NCBI GI NO: 34911014 NR Description: OJ1125_C04.12
  misc_feature (1)..(62): NCBI GI NO: 18396807 NR Description: NAM protein, putative; protein id: At1g28470
  misc_feature (1)..(62): NCBI GI NO: 21554371 NR Description: NAM protein, putative [Arabidopsis thaliana]
  misc_feature (1)..(62): NCBI GI NO: 6560767 NR Description: F3M18.9 [Arabidopsis thaliana]
  misc_feature (1)..(61): NCBI GI NO: 12320749 NR Description: unknown protein [Arabidopsis thaliana]
  misc_feature (1)..(61): NCBI GI NO: 30689293 NR Description: No apical meristem (NAM) protein family
MVNGRQKGCKKILVLYTNFGKHRKPEKTNWVMHQYHLGDLEEEKEGELVVCKIFYQTQPRQCSWSSDRGAAATALAATAAAAAAAAQEQHRRDSGSGSCSSRDHEVSATSFPAGYTVTTAVDMQQHMKQPADHFSFAPFRKTFDQEVGIGGDQVPSNQLGRSEPHHAGLGQQPHGPVLATKTAVPATAFLISRPSNPVSTMVPPAMQHASVVLDHDQFHVPAILLHHHDKFQQQHQQSQPQQKLDRRSAGLEELIMGCTSSTSTKGDASIAHPQETEWPYPYWPPDNQDHHG

SEQ ID NO: 35421 - protein, 261 aa, Zea mays subsp. mays
  peptide (1)..(261): Ceres Seq. ID no. 12419183
  misc_feature (1)..(246): NCBI GI NO: 34906416 NR Description: P0710E05.22
  misc_feature (1)..(70): NCBI GI NO: 15233497 NR Description: putative protein; protein id: At4g29230.1
  misc_feature (1)..(96): NCBI GI NO: 15241889 NR Description: putative protein; protein id: At5g56620.1
  misc_feature (1)..(43): NCBI GI NO: 15235314 NR Description: similar to NAM protein, putative
  misc_feature (1)..(66): NCBI GI NO: 34911014 NR Description: OJ1125_C04.12
  misc_feature (1)..(31): NCBI GI NO: 18396807 NR Description: NAM protein, putative; protein id: At1g28470
  misc_feature (1)..(31): NCBI GI NO: 21554371 NR Description: NAM protein, putative [Arabidopsis thaliana]
  misc_feature (1)..(31): NCBI GI NO: 6560767 NR Description: F3M18.9 [Arabidopsis thaliana]
  misc_feature (1)..(30): NCBI GI NO: 12320749 NR Description: unknown protein [Arabidopsis thaliana]
  misc_feature (1)..(30): NCBI GI NO: 30689293 NR Description: No apical meristem (NAM) protein family
MHQYHLGDLEEEKEGELVVCKIFYQTQPRQCSWSSDRGAAATALAATAAAAAAAAQEQHRRDSGSGSCSSRDHEVSATSFPAGYTVTTAVDMQQHMKQPADHFSFAPFRKTFDQEVGIGGDQVPSNQLGRSEPHHAGLGQQPHGPVLATKTAVPATAFLISRPSNPVSTMVPPAMQHASVVLDHDQFHVPAILLHHHDKFQQQHQQSQPQQKLDRRSAGLEELIMGCTSSTSTKGDASIAHPQETEWPYPYWPPDNQDHHG

SEQ ID NO: 35422 - DNA, 1444 bp, Zea mays subsp. mays
  misc_feature (1)..(1444): Ceres Seq. ID no. 12455051
gtggattggggcgagtatcatgcaaatacaaacgatcgagaggttgaaactgcaaaatgacgcgtcgcatcgctgtcatcgtggtggcatcggtcttgtcggcaatggcggtcatgggcatagcgttcatctggacaaggatgaggtccagatcaagggacgatctcctccgtgcagacatgggcgacgacgggtcgtccggcgagatgatccgcgccatcgcggcgtcgcagctgagcttcaagtaccaggagctgcgcgcggcgacggacgagttcagccagacgaacaagctcgggcagggaggctacggctccgtgtacaggggcgtgctggcggacgggcgggaggtggcggtgaagcggctcttcttcaacacgcggcagtgggcggagcagttcttcaacgaggtgaagctggtgagccaggtgcagcacaagaacctggtcaagctgctgggctgcagcgtggaggggcccgagagcctgctcgtctacgagtacctctgcaacaccagcctcgaccactacctcttcgacgcgttcaagaagaacgcgctggactgggagcggaggttcgagatcgtgctgggcacggcggagggcctctcctacctgcacagcgcctcggaggtccggatcatacaccgcgacatcaaggccagcaacgtcctgctggacgacaggttcaggccgaagatcgccgacttcggcctcgccaggaacttcatggacgaccagagccacctcagcaccggcctcgccggaacttttgggtacatggctccggagtacatcgtccacgggcagctcaccgagaaggccgacatctacagctacggcgtgctggtcctcgagatcgtcaccggccggaagagccacaactcggtggcgtcatctgcagaaggcctctcactcatggcactgatatggagacactacaccgcgggcaccctgacggagctgctggacccgaacctccgcgagcagtgctcggaggaggacgccctccgggtgttccacgtcggcctgctgtgcgcccaggcgtcgccgaaccttcggccgcccatgtggaaggtggtggagatgctgagcggcagggatcacaaggcggtggcgcttccccggcccacccagcctcccttcatcaacgtcaaggggtccagcggcaagagcgacagctccggcgggtcggcgtccaactccgacaagtcgcccttctcgctgaaccagctgtcagtcagtggggtgcaggccaggtaaaagctagctagctagctgcggatatcatgtgtttgggctagcggcattttttttcaagttttgtaagtcgtggcgtggatatatcataggtttgacttcgattttctggcttcgttgatctggtaacatactctgattattgctagtatgtgcaagtctttggaagaaagattcatgtttgc

SEQ ID NO: 35423 - protein, 423 aa, Zea mays subsp. mays
  peptide (1)..(423): Ceres Seq. ID no. 12455052
WIGASIMQIQTIERLKLQNDASHRCHRGGIGLVGNGGHGHSVHLDKDEVQIKGRSPPCRHGRRRVVRRDDPRHRGVAAELQVPGAARGDGRVQPDEQARAGRLRLRVQGRAGGRAGGGGEAALLQHAAVGGAVLQRGEAGEPGAAQEPGQAAGLQRGGAREPARLRVPLQHQPRPLPLRRVQEERAGLGAEVRDRAGHGGGPLLPAQRLGGPDHTPRHQGQQRPAGRQVQAEDRRLRPRQELHGRPEPPQHRPRRNFWVHGSGVHRPRAAHREGRHLQLRRAGPRDRHRPEEPQLGGVICRRPLTHGTDMETLHRGHPDGAAGPEPPRAVLGGGRPPGVPRRPAVRPGVAEPSAAHVEGGGDAERQGSQGGGASPAHPASLHQRQGVQRQERQLRRVGVQLRQVALLAEPAVSQWGAGQVKAS

SEQ ID NO: 35424 - protein, 417 aa, Zea mays subsp. mays
  peptide (1)..(417): Ceres Seq. ID no. 12455053
MQIQTIERLKLQNDASHRCHRGGIGLVGNGGHGHSVHLDKDEVQIKGRSPPCRHGRRRVVRRDDPRHRGVAAELQVPGAARGDGRVQPDEQARAGRLRLRVQGRAGGRAGGGGEAALLQHAAVGGAVLQRGEAGEPGAAQEPGQAAGLQRGGAREPARLRVPLQHQPRPLPLRRVQEERAGLGAEVRDRAGHGGGPLLPAQRLGGPDHTPRHQGQQRPAGRQVQAEDRRLRPRQELHGRPEPPQHRPRRNFWVHGSGVHRPRAAHREGRHLQLRRAGPRDRHRPEEPQLGGVICRRPLTHGTDMETLHRGHPDGAAGPEPPRAVLGGGRPPGVPRRPAVRPGVAEPSAAHVEGGGDAERQGSQGGGASPAHPASLHQRQGVQRQERQLRRVGVQLRQVALLAEPAVSQWGAGQVKAS

SEQ ID NO: 35425 - protein, 401 aa, Zea mays subsp. mays
  peptide (1)..(401): Ceres Seq. ID no. 12455054
  misc_feature (2)..(380): NCBI GI NO: 15223169 NR Description: putative protein kinase; protein id: At1g70520.1
  misc_feature (5)..(393): NCBI GI NO: 10178148 NR Description: receptor-like serine/threonine kinase
  misc_feature (58)..(393): NCBI GI NO: 15242677 NR Description: receptor-like protein kinase; protein id:At5g40380
  misc_feature (8)..(401): NCBI GI NO: 34913832 NR Description: putative protein kinase
  misc_feature (49)..(365): NCBI GI NO: 15223170 NR Description: putative protein kinase; protein id: At1g70530.1
  misc_feature (53)..(365): NCBI GI NO: 2465925 NR Description: receptor-like serine/threonine kinase
  misc_feature (53)..(365): NCBI GI NO: 8778283 NR Description: F14D16.24 [Arabidopsis thaliana]
  misc_feature (1)..(375): NCBI GI NO: 34393282 NR Description: putative serine/threonine kinase receptor precursor
  misc_feature (5)..(401): NCBI GI NO: 15233389 NR Description: serine/threonine kinase-like protein
  misc_feature (5)..(397): NCBI GI NO: 38345599 NR Description: OSJNBa0093O08.1
MTRRIAVIVVASVLSAMAVMGIAFIWTRMRSRSRDDLLRADMGDDGSSGEMIRAIAASQLSFKYQELRAATDEFSQTNKLGQGGYGSVYRGVLADGREVAVKRLFFNTRQWAEQFFNEVKLVSQVQHKNLVKLLGCSVEGPESLLVYEYLCNTSLDHYLFDAFKKNALDWERRFEIVLGTAEGLSYLHSASEVRIIHRDIKASNVLLDDRFRPKIADFGLARNFMDDQSHLSTGLAGTFGYMAPEYIVHGQLTEKADIYSYGVLVLEIVTGRKSHNSVASSAEGLSLMALIWRHYTAGTLTELLDPNLREQCSEEDALRVFHVGLLCAQASPNLRPPMWKVVEMLSGRDHKAVALPRPTQPPFINVKGSSGKSDSSGGSASNSDKSPFSLNQLSVSGVQAR

SEQ ID NO: 35426 - DNA, 1019 bp, Zea mays subsp. mays
  misc_feature (1)..(1019): Ceres Seq. ID no. 13503150
aaaaaacaaaacatatctatatatctgcaacgtcaaatcaacacaggctgttgtttgcttcttttggtaaaggctttagctgcggcagatccaccggcggcgccccgagaatcgaagatgccggtgaaggtgttcggatcgccgacgtcggcggaggtcgcccgcgtcctggcctgcctgttcgagaaggacgtcgagttccagctcatccgcgtcgactccttccgcggcaccaagcgcctgccccagtacctcaagctccagccgcacggcgaggcgctcaccttcgaggacggcaacgtcaccctcgtcgagtcgaggaagatcctgcgccacatcgccgacaagtacaagaaccaggggtacagggacctgttcggcccgggcgcgctggagcgggcctccatcgagcagtggctgcagacggaggcgcagagcttcgacgtccccagcgccgacatggtctacagcctcgcctacctgccgcccgacatgcagctcgacggcaggggcgtcggcggcctcccggcggcgacggggacgatgaacccggcgcaccggcagaaggtggaggagatgctgcagctgttcgagaagagccgcaggcagctgggcaagctgctggacatctacgagcagcgccttggcgaggaggccttcctggccggaggcaagttcacgctcgccgacctgtcccacctgcccaacgccgaccgcctcgccggcgacccgcggtccgcacgcctcatggagtcgcgcaggaacgtcagcaagtggtgggacaccgtatcccgccgcgactcttgggtcagggtcaaggagttgcagcgcccgccgtccgcggaggcgcccttctgatgtcgatcgatcgcaaattaaggcggtggcctttgctcaagcctacgtgttcggtttctgcataattttttaataaataaacgccactggcccctctacgtcattggcgattgttcattgtgtaataaatcgttcaagagcatatgatgcttcttgccgtg

SEQ ID NO: 35427 - protein, 306 aa, Zea mays subsp. mays
  peptide (1)..(306): Ceres Seq. ID no. 13503151
  misc_feature (169)..(221): Pfam Name: 20 copies Pfam Description: Collagen triple helix repeat
  misc_feature (112)..(279): NCBI GI NO: 11385473 NR Description: glutathione S-transferase GST 11 [Zea mays]
  misc_feature (128)..(264): NCBI GI NO: 11385473 NR Description: glutathione S-transferase GST 11 [Zea mays]
  misc_feature (35)..(296): NCBI GI NO: 23018055 NR Description: hypothetical protein [Thermobifida fusca]
KTKHIYISATSNQHRLLFASFGKGFSCGRSTGGAPRIEDAGEGVRIADVGGGRPRPGLPVREGRRVPAHPRRLLPRHQAPAPVPQAPAARRGAHLRGRQRHPRRVEEDPAPHRRQVQEPGVQGPVRPGRAGAGLHRAVAADGGAELRRPQRRHGLQPRLPAARHAARRQGRRRPPGGDGDDEPGAPAEGGGDAAAVREEPQAAGQAAGHLRAAPWRGGLPGRRQVHARRPVPPAQRRPPRRRPAVRTPHGVAQERQQVVGHRIPPRLLGQGQGVAAPAVRGGALLMSIDRKLRRWPLLKPTCSVSA

SEQ ID NO: 35428 - protein, 285 aa, Zea mays subsp. mays
  peptide (1)..(285): Ceres Seq. ID no. 13503152
  misc_feature (40)..(285): NCBI GI NO: 11385479 NR Description: glutathione S-transferase GST 14 [Zea mays]
  misc_feature (40)..(162): NCBI GI NO: 37536564 NR Description: putative glutathione S-transferase
  misc_feature (169)..(285): NCBI GI NO: 37536564 NR Description: putative glutathione S-transferase
  misc_feature (42)..(173): NCBI GI NO: 22758271 NR Description: Putative glutathione S-transferase
  misc_feature (174)..(281): NCBI GI NO: 22758271 NR Description: Putative glutathione S-transferase
  misc_feature (42)..(121): NCBI GI NO: 11385473 NR Description: glutathione S-transferase GST 11 [Zea mays]
  misc_feature (42)..(199): NCBI GI NO: 11385469 NR Description: glutathione S-transferase GST 9 [Zea mays]
  misc_feature (203)..(281): NCBI GI NO: 11385469 NR Description: glutathione S-transferase GST 9 [Zea mays]
  misc_feature (42)..(162): NCBI GI NO: 11385475 NR Description: glutathione S-transferase GST 12 [Zea mays]
  misc_feature (42)..(162): NCBI GI NO: 11385477 NR Description: glutathione S-transferase GST 13 [Zea mays]
KKQNISIYLQRQINTGCCLLLLVKALAAADPPAAPRESKMPVKVFGSPTSAEVARVLACLFEKDVEFQLIRVDSFRGTKRLPQYLKLQPHGEALTFEDGNVTLVESRKILRHIADKYKNQGYRDLFGPGALERASIEQWLQTEAQSFDVPSADMVYSLAYLPPDMQLDGRGVGGLPAATGTMNPAHRQKVEEMLQLFEKSRRQLGKLLDIYEQRLGEEAFLAGGKFTLADLSHLPNADRLAGDPRSARLMESRRNVSKWWDTVSRRDSWVRVKELQRPPSAEAPF

SEQ ID NO: 35429 - protein, 246 aa, Zea mays subsp. mays
  peptide (1)..(246): Ceres Seq. ID no. 13503153
  misc_feature (1)..(246): NCBI GI NO: 11385479 NR Description: glutathione S-transferase GST 14 [Zea mays]
  misc_feature (1)..(123): NCBI GI NO: 37536564 NR Description: putative glutathione S-transferase
  misc_feature (130)..(246): NCBI GI NO: 37536564 NR Description: putative glutathione S-transferase
  misc_feature (3)..(134): NCBI GI NO: 22758271 NR Description: Putative glutathione S-transferase
  misc_feature (135)..(242): NCBI GI NO: 22758271 NR Description: Putative glutathione S-transferase
  misc_feature (3)..(82): NCBI GI NO: 11385473 NR Description: glutathione S-transferase GST 11 [Zea mays]
  misc_feature (3)..(160): NCBI GI NO: 11385469 NR Description: glutathione S-transferase GST 9 [Zea mays]
  misc_feature (164)..(242): NCBI GI NO: 11385469 NR Description: glutathione S-transferase GST 9 [Zea mays]
  misc_feature (3)..(123): NCBI GI NO: 11385475 NR Description: glutathione S-transferase GST 12 [Zea mays]
  misc_feature (3)..(123): NCBI GI NO: 11385477 NR Description: glutathione S-transferase GST 13 [Zea mays]
MPVKVFGSPTSAEVARVLACLFEKDVEFQLIRVDSFRGTKRLPQYLKLQPHGEALTFEDGNVTLVESRKILRHIADKYKNQGYRDLFGPGALERASIEQWLQTEAQSFDVPSADMVYSLAYLPPDMQLDGRGVGGLPAATGTMNPAHRQKVEEMLQLFEKSRRQLGKLLDIYEQRLGEEAFLAGGKFTLADLSHLPNADRLAGDPRSARLMESRRNVSKWWDTVSRRDSWVRVKELQRPPSAEAPF

SEQ ID NO: 35430 - DNA, 582 bp, Zea mays subsp. mays
  misc_feature (1)..(582): Ceres Seq. ID no. 13570601
  misc_feature (579)..(579): n is a, c, t, g, unknown, or other
attcacgcacctagggttttcgcgccgccgccgccgccgccgctggggccgcgccgcagcccatcgtgttgaaggtcgacttgcattgcgccggctgcgccaacaaggtccgcaaggccatcaagcgcgcaccaggcgtggagtcggtgacgccggacatggcggcgggcaaggtggtcgtgaccggtccggcggacgcggtgcagctcaaggagcgcatcgaggctagggccaagaagcccgtgcagatcgtctccgccggcgccggttcgcccaagaaggacaaggagaagaaagctgacggcggcgagaaaaatgcggccaaagagaagggcggccgatgcagagaagaagaaggccgacaagaagaagggaggcggtgatggaggagagaaaaatgccgacaagaagaagggcggcggcggcggcgataagaaggccgacaaggagaagggcactggcaaacccaaggaggaagaggaggaggaggagamgcccaaggaacccaaggaggagacggktacgctcaagatccaactgcactgsgacggstgcatggaccgcatcaagcgccgcatntgc

SEQ ID NO: 35431 - protein, 89 aa, Zea mays subsp. mays
  peptide (1)..(89): Ceres Seq. ID no. 13570602
  misc_feature (16)..(52): NCBI GI NO: 37534752 NR Description: putative metal-binding protein
  misc_feature (1)..(88): NCBI GI NO: 29367499 NR Description: unknown [Oryza sativa (japonica cultivar-group)]
  misc_feature (1)..(87): NCBI GI NO: 37534752 NR Description: putative metal-binding protein
  misc_feature (60)..(60): Xaa is any aa, unknown or other
  misc_feature (69)..(69): Xaa is any aa, unknown or other
  misc_feature (77)..(77): Xaa is any aa, unknown or other
  misc_feature (79)..(79): Xaa is any aa, unknown or other
  misc_feature (88)..(88): Xaa is any aa, unknown or other
MRPKRRAADAEKKKADKKKGGGDGGEKNADKKKGGGGGDKKADKEKGTGKPKEEEEEEEXPKEPKEETXTLKIQLHXDXCMDRIKRRXC

SEQ ID NO: 35432 - protein, 79 aa, Zea mays subsp. mays
  peptide (1)..(79): Ceres Seq. ID no. 13570603
  misc_feature (1)..(51): Pfam Name: Pfam Description:  HlyD family secretion protein
  misc_feature (1)..(66): NCBI GI NO: 28972568 NR Description: mKIAA1019 protein [Mus musculus]
  misc_feature (1)..(66): NCBI GI NO: 26333861 NR Description: unnamed protein product [Mus musculus]
  misc_feature (1)..(66): NCBI GI NO: 338290 NR Description: son3 protein
  misc_feature (1)..(66): NCBI GI NO: 9910308 NR Description: Son cell proliferation protein
  misc_feature (1)..(66): NCBI GI NO: 30488 NR Description: DBP-5 protein [Homo sapiens]
  misc_feature (1)..(66): NCBI GI NO: 284068 NR Description: DNA-binding protein 5 - human
  misc_feature (1)..(66): NCBI GI NO: 36546 NR Description: son-a [Homo sapiens]
  misc_feature (1)..(66): NCBI GI NO: 17046381 NR Description: SON DNA binding protein isoform E [Homo sapiens]
  misc_feature (1)..(66): NCBI GI NO: 21040318 NR Description: SON DNA-binding protein isoform E
  misc_feature (1)..(66): NCBI GI NO: 17046373 NR Description: SON DNA binding protein isoform A [Homo sapiens]
  misc_feature (52)..(52): Xaa is any aa, unknown or other
  misc_feature (61)..(61): Xaa is any aa, unknown or other
  misc_feature (69)..(69): Xaa is any aa, unknown or other
  misc_feature (71)..(71): Xaa is any aa, unknown or other
MQRRRRPTRRREAVMEERKMPTRRRAAAAAIRRPTRRRALANPRRKRRRRRXPRNPRRRRXRSRSNCTXTXAWTASSAA

SEQ ID NO: 35433 - protein, 75 aa, Zea mays subsp. mays
  peptide (1)..(75): Ceres Seq. ID no. 13570604
  misc_feature (8)..(75): Pfam Name: Pfam Description:  HlyD family secretion protein
  misc_feature (7)..(75): NCBI GI NO: 28972568 NR Description: mKIAA1019 protein [Mus musculus]
  misc_feature (7)..(75): NCBI GI NO: 26333861 NR Description: unnamed protein product [Mus musculus]
  misc_feature (7)..(75): NCBI GI NO: 338290 NR Description: son3 protein
  misc_feature (7)..(75): NCBI GI NO: 9910308 NR Description: Son cell proliferation protein
  misc_feature (7)..(75): NCBI GI NO: 30488 NR Description: DBP-5 protein [Homo sapiens]
  misc_feature (7)..(75): NCBI GI NO: 284068 NR Description: DNA-binding protein 5 - human
  misc_feature (7)..(75): NCBI GI NO: 36546 NR Description: son-a [Homo sapiens]
  misc_feature (7)..(75): NCBI GI NO: 17046381 NR Description: SON DNA binding protein isoform E [Homo sapiens]
  misc_feature (7)..(75): NCBI GI NO: 21040318 NR Description: SON DNA-binding protein isoform E
  misc_feature (7)..(75): NCBI GI NO: 17046373 NR Description: SON DNA binding protein isoform A [Homo sapiens]
FTHLGFSRRRRRRRWGRAAAHRVEGRLALRRLRQQGPQGHQARTRRGVGDAGHGGGQGGRDRSGGRGAAQGAHRG

SEQ ID NO: 35434 - DNA, 2974 bp, Zea mays subsp. mays
  misc_feature (1)..(2974): Ceres Seq. ID no. 13569654
  misc_feature (2612)..(2612): n is a, c, t, g, unknown, or other
  misc_feature (2654)..(2654): n is a, c, t, g, unknown, or other
  misc_feature (2680)..(2680): n is a, c, t, g, unknown, or other
  misc_feature (2697)..(2697): n is a, c, t, g, unknown, or other
  misc_feature (2703)..(2703): n is a, c, t, g, unknown, or other
  misc_feature (2717)..(2717): n is a, c, t, g, unknown, or other
  misc_feature (2731)..(2731): n is a, c, t, g, unknown, or other
  misc_feature (2761)..(2761): n is a, c, t, g, unknown, or other
  misc_feature (2762)..(2762): n is a, c, t, g, unknown, or other
  misc_feature (2770)..(2770): n is a, c, t, g, unknown, or other
  misc_feature (2771)..(2771): n is a, c, t, g, unknown, or other
  misc_feature (2823)..(2823): n is a, c, t, g, unknown, or other
  misc_feature (2856)..(2856): n is a, c, t, g, unknown, or other
  misc_feature (2872)..(2872): n is a, c, t, g, unknown, or other
  misc_feature (2873)..(2873): n is a, c, t, g, unknown, or other
  misc_feature (2914)..(2914): n is a, c, t, g, unknown, or other
  misc_feature (2917)..(2917): n is a, c, t, g, unknown, or other
  misc_feature (2929)..(2929): n is a, c, t, g, unknown, or other
  misc_feature (2962)..(2962): n is a, c, t, g, unknown, or other
tcctaatcaaaaaaactaaaaaaaaagccaaaatggcggggggaggtcgtcgtctcccctccctgcgatcccctccatccgcgacgccatctcggccacttcatgatcactagggtttcgctcttctacccataagccctcgtcccgatgcgctggtggaagcgctcctcctccccctcctgccccgcctcctcatcctcagcatcgacccccgcttcccccgcccgcgcctccaccccccgtctcatcggcggttggggtagcggccctagctcacgccgcgatggcagcggggccagcaacgatccgcagccgcggctgatcagagcgcggcggatgcgctacgtcgtcgatgacctcgaggtcggggtctccgcgctcggcgtggactctccggcgaggagggacgcggcggcgggggtttgcgcttgagacagtgagctccgcgccgatctcgtggtctccgagcaacatggaggtggcgccggcgagatcctcgtcgacccccgtgctgctgccgcatccgctgccccttccaggcgagggggaatcgccgtgccgcgggccggggaggccgcttccgccaccggtgccaaggatgctcgacggggaggggaaagggcctgcagcggacgctcccggtgttttagagactgggagccaaaggatgacgccgttactcgcacggagagtggcggtccaaactctaccaaaggctcatgagcacaacgactttcggttaaatgggactacctgttgtcagcggagaaaggcttttaaagagaagttccaggataagaactgtgatgaaactttgaacttcagattgaacattcctgctaaaagtgctccaagcagtgggttttcaagccctgtacaaagtcctcgaagactgagtaatgtagatttctcatctgctgcaatctctatccaagataccaatgtatggtcagcacgatctctctggtcttctgatgcgatgggatcttcacctccttgtgattcacctgacaagtttgcaggtggtcaggagcgttctcctctctctagtccactgagaagtccagttttaaaatcaagaaacccaagtgcacctccatcaccaatgcatccaaagttgttcccggagaaccatgtttctcgccctgatggcaatggaagtgctagttttcacccattaccgctccctcctgcttctgtaagcccaaagcagacaaatgctagccaccagttagttccaaaagctgagatgccttcggtggctggtcaatggcagaaaggaaaactcttgggtagtggcacctttggatgcgtgtatgaggccaccaataggcacactggagctctttgtgccatgaaagaggtgaatataattccagatgatgctaaatcagtcgagtctctgaagcaattggaacaggaaattaagtttcttagtcaatttaagcatgaaaatattgtgcagtactatggcagtgaaactatcgaagatagattctacatatacctggagtatgttcatcctggttcaatccataagtatgttcatcaacactgtggatcgctgacagaagcagtcatccgtaacttcacacgtcatattctcaagggtcttgcttttttacatagccaaaagattatgcatagggatatcaaaggggcaaatttgttagttgatattaacggtgtagtgaaattggctgacttcggaatggcaaagcatttgagtactgcagctcctaatctttcattgaagggaacaccatactggatggctcctgaggttgttcgggctacactcgataaaagtgcaggttatgatcttctgttgatatttggagccttggctgcacaatcattgagatgtttacaggaaagccaccttggagtggtcttgaagggccggctgcaatgtttaaggtgttgcgcacggacccaccaattccagataacctgtcccctgaagggaaggattttctgagatgctgcttcaagagaaaccctactgagcgaccaacagcaaacaagttgctcgaacacccatttatccaaactttgaaccactacagcccacatagcgttgtacattcattttcgggaattaaatctccagatactgtgcacagcagtgcaagagataaagtaccctggaaaagtgattcatatatgagagggaaacatgcaaatggtgaaacaagcagtgctcggtcgtcagagtcattggcttatcggttgatgacacccctacccaacttgggaaccaatagtttgtcacctccacctttgagttcggcctccagttctggctctgcagcacatacaccgaacagtatgcatttttcagtcccataccatcagcctagtcctttgccaaagcctaacgggaaggaagcaataaatttggtttcccattgaataacagcatgccacctatcacaacatctgggcaaagtccacataaacagcgcaagtgtatccgtccctagcgtctgacccttgtactgccagtaatagctaacaattttctgggtcgtgtaaaaataatttccatgtaagggcttgttcggttattcctaatacacatggattggatgggattggaaaaaattganaagaagtttgacttgtttgggattcaaacccatccaatcccnctcaatccacatggattaagagctanccgaacaagccctaaanagatcnccgtgatatgatcncagggaaatgctgntaaatgagggagctttgtgaaatctgttgnnccgtttgnnttctgggaaactgattggattgcccatgtaacatatttttattagggtgtanctgtaggtgaaactaatggtcaagattgtgccnacaaataggacattanngttgtagctgtagcgtgttgttgatgctgtgtaatgatcanacntgatgtaatcantattgatttttttttggggaaggtaataatgcncgtcaattggcg

SEQ ID NO: 35435 - protein, 542 aa, Zea mays subsp. mays
  peptide (1)..(542): Ceres Seq. ID no. 13569655
  misc_feature (307)..(457): Pfam Name: Pfam Description:  Protein kinase domain
  misc_feature (23)..(457): NCBI GI NO: 17027283 NR Description: putative protein kinase
  misc_feature (458)..(491): NCBI GI NO: 17027283 NR Description: putative protein kinase
  misc_feature (30)..(491): NCBI GI NO: 33146554 NR Description: putative MAP3K protein kinase
  misc_feature (30)..(491): NCBI GI NO: 34915394 NR Description: putative MAP3K protein kinase
  misc_feature (18)..(505): NCBI GI NO: 15982852 NR Description: AT5g66850/MUD21_11 [Arabidopsis thaliana]
  misc_feature (18)..(505): NCBI GI NO: 18425121 NR Description: MAP protein kinase [Arabidopsis thaliana]
  misc_feature (306)..(505): NCBI GI NO: 25387031 NR Description: mitogen-activated protein kinase MAP3K
  misc_feature (306)..(505): NCBI GI NO: 9758135 NR Description: MAP protein kinase [Arabidopsis thaliana]
  misc_feature (227)..(480): NCBI GI NO: 38345839 NR Description: OSJNBa0084K11.3
  misc_feature (174)..(479): NCBI GI NO: 30695537 NR Description: mitogen-activated protein kinase kinase  kinase
MTSRSGSPRSAWTLRRGGTRRRGFALETVSSAPISWSPSNMEVAPARSSSTPVLLPHPLPLPGEGESPCRGPGRPLPPPVPRMLDGEGKGPAADAPGVLETGSQRMTPLLARRVAVQTLPKAHEHNDFRLNGTTCCQRRKAFKEKFQDKNCDETLNFRLNIPAKSAPSSGFSSPVQSPRRLSNVDFSSAAISIQDTNVWSARSLWSSDAMGSSPPCDSPDKFAGGQERSPLSSPLRSPVLKSRNPSAPPSPMHPKLFPENHVSRPDGNGSASFHPLPLPPASVSPKQTNASHQLVPKAEMPSVAGQWQKGKLLGSGTFGCVYEATNRHTGALCAMKEVNIIPDDAKSVESLKQLEQEIKFLSQFKHENIVQYYGSETIEDRFYIYLEYVHPGSIHKYVHQHCGSLTEAVIRNFTRHILKGLAFLHSQKIMHRDIKGANLLVDINGVVKLADFGMAKHLSTAAPNLSLKGTPYWMAPEVVRATLDKSAGYDLLLIFGALAAQSLRCLQESHLGVVLKGRLQCLRCCARTHQFQITCPLKGRIF

SEQ ID NO: 35436 - protein, 502 aa, Zea mays subsp. mays
  peptide (1)..(502): Ceres Seq. ID no. 13569656
  misc_feature (267)..(417): Pfam Name: Pfam Description:  Protein kinase domain
  misc_feature (1)..(417): NCBI GI NO: 17027283 NR Description: putative protein kinase
  misc_feature (418)..(451): NCBI GI NO: 17027283 NR Description: putative protein kinase
  misc_feature (1)..(451): NCBI GI NO: 33146554 NR Description: putative MAP3K protein kinase
  misc_feature (1)..(451): NCBI GI NO: 34915394 NR Description: putative MAP3K protein kinase
  misc_feature (1)..(465): NCBI GI NO: 15982852 NR Description: AT5g66850/MUD21_11 [Arabidopsis thaliana]
  misc_feature (1)..(465): NCBI GI NO: 18425121 NR Description: MAP protein kinase [Arabidopsis thaliana]
  misc_feature (266)..(465): NCBI GI NO: 25387031 NR Description: mitogen-activated protein kinase MAP3K
  misc_feature (266)..(465): NCBI GI NO: 9758135 NR Description: MAP protein kinase [Arabidopsis thaliana]
  misc_feature (187)..(440): NCBI GI NO: 38345839 NR Description: OSJNBa0084K11.3
  misc_feature (134)..(439): NCBI GI NO: 30695537 NR Description: mitogen-activated protein kinase kinase  kinase
MEVAPARSSSTPVLLPHPLPLPGEGESPCRGPGRPLPPPVPRMLDGEGKGPAADAPGVLETGSQRMTPLLARRVAVQTLPKAHEHNDFRLNGTTCCQRRKAFKEKFQDKNCDETLNFRLNIPAKSAPSSGFSSPVQSPRRLSNVDFSSAAISIQDTNVWSARSLWSSDAMGSSPPCDSPDKFAGGQERSPLSSPLRSPVLKSRNPSAPPSPMHPKLFPENHVSRPDGNGSASFHPLPLPPASVSPKQTNASHQLVPKAEMPSVAGQWQKGKLLGSGTFGCVYEATNRHTGALCAMKEVNIIPDDAKSVESLKQLEQEIKFLSQFKHENIVQYYGSETIEDRFYIYLEYVHPGSIHKYVHQHCGSLTEAVIRNFTRHILKGLAFLHSQKIMHRDIKGANLLVDINGVVKLADFGMAKHLSTAAPNLSLKGTPYWMAPEVVRATLDKSAGYDLLLIFGALAAQSLRCLQESHLGVVLKGRLQCLRCCARTHQFQITCPLKGRIF

SEQ ID NO: 35437 - protein, 460 aa, Zea mays subsp. mays
  peptide (1)..(460): Ceres Seq. ID no. 13569657
  misc_feature (225)..(375): Pfam Name: Pfam Description:  Protein kinase domain
  misc_feature (1)..(375): NCBI GI NO: 17027283 NR Description: putative protein kinase
  misc_feature (376)..(409): NCBI GI NO: 17027283 NR Description: putative protein kinase
  misc_feature (1)..(409): NCBI GI NO: 33146554 NR Description: putative MAP3K protein kinase
  misc_feature (1)..(409): NCBI GI NO: 34915394 NR Description: putative MAP3K protein kinase
  misc_feature (1)..(423): NCBI GI NO: 15982852 NR Description: AT5g66850/MUD21_11 [Arabidopsis thaliana]
  misc_feature (1)..(423): NCBI GI NO: 18425121 NR Description: MAP protein kinase [Arabidopsis thaliana]
  misc_feature (224)..(423): NCBI GI NO: 25387031 NR Description: mitogen-activated protein kinase MAP3K
  misc_feature (224)..(423): NCBI GI NO: 9758135 NR Description: MAP protein kinase [Arabidopsis thaliana]
  misc_feature (145)..(398): NCBI GI NO: 38345839 NR Description: OSJNBa0084K11.3
  misc_feature (92)..(397): NCBI GI NO: 30695537 NR Description: mitogen-activated protein kinase kinase  kinase
MLDGEGKGPAADAPGVLETGSQRMTPLLARRVAVQTLPKAHEHNDFRLNGTTCCQRRKAFKEKFQDKNCDETLNFRLNIPAKSAPSSGFSSPVQSPRRLSNVDFSSAAISIQDTNVWSARSLWSSDAMGSSPPCDSPDKFAGGQERSPLSSPLRSPVLKSRNPSAPPSPMHPKLFPENHVSRPDGNGSASFHPLPLPPASVSPKQTNASHQLVPKAEMPSVAGQWQKGKLLGSGTFGCVYEATNRHTGALCAMKEVNIIPDDAKSVESLKQLEQEIKFLSQFKHENIVQYYGSETIEDRFYIYLEYVHPGSIHKYVHQHCGSLTEAVIRNFTRHILKGLAFLHSQKIMHRDIKGANLLVDINGVVKLADFGMAKHLSTAAPNLSLKGTPYWMAPEVVRATLDKSAGYDLLLIFGALAAQSLRCLQESHLGVVLKGRLQCLRCCARTHQFQITCPLKGRIF

SEQ ID NO: 35438 - DNA, 453 bp, Zea mays subsp. mays
  misc_feature (1)..(453): Ceres Seq. ID no. 11030669
caagggatttgatggtgttgaagatgttattgcagatacgaaggcacacaaggtggtcgttaaggggaaaaaggcagctgctgacccaatgaaggtggtggaacgggtgcagaagaagacaggccgcaaggtagagcttctctcaccaatgccaccaccgaaagaagagaagaaggaagaggagaaaaaggaagaacctgagccaccaaaaaccgagaagaaagaggaggcaacggtgctcgctgtggtgctcaaggtgcatatgcattgtgaggcttgcacacaagtgatcaagaagagaatcctcaagatgaaaggcgtgcaatctgtagaggcagacctcaaggcttctcaagtcactgtgaagggtgtgttcgaggaggccaagctgtctgattatgtgtataggcgcactggtaagcacgctgctatcgtcaagtctgagccggttgc

SEQ ID NO: 35439 - protein, 150 aa, Zea mays subsp. mays
  peptide (1)..(150): Ceres Seq. ID no. 11030670
  misc_feature (1)..(149): NCBI GI NO: 38344582 NR Description: OSJNBa0053B21.14
  misc_feature (1)..(149): NCBI GI NO: 9758294 NR Description: contains similarity to ATFP3~gene_id:MLE2.16
  misc_feature (1)..(149): NCBI GI NO: 18424719 NR Description: copper chaperone
  misc_feature (1)..(149): NCBI GI NO: 4097547 NR Description: ATFP3 [Arabidopsis thaliana]
  misc_feature (3)..(146): NCBI GI NO: 37532382 NR Description: putative ATFP3
  misc_feature (1)..(107): NCBI GI NO: 15241256 NR Description: copper chaperone
  misc_feature (4)..(149): NCBI GI NO: 34394290 NR Description: putative heavy-metal-associated domain-containingprotein
  misc_feature (1)..(145): NCBI GI NO: 15233023 NR Description: hypothetical protein; protein id: At3g02960.1
  misc_feature (5)..(149): NCBI GI NO: 21594005 NR Description: unknown [Arabidopsis thaliana]
  misc_feature (5)..(145): NCBI GI NO: 18420811 NR Description: expressed protein; protein id: At5g24580
KGFDGVEDVIADTKAHKVVVKGKKAAADPMKVVERVQKKTGRKVELLSPMPPPKEEKKEEEKKEEPEPPKTEKKEEATVLAVVLKVHMHCEACTQVIKKRILKMKGVQSVEADLKASQVTVKGVFEEAKLSDYVYRRTGKHAAIVKSEPV

SEQ ID NO: 35440 - protein, 121 aa, Zea mays subsp. mays
  peptide (1)..(121): Ceres Seq. ID no. 11030671
  misc_feature (1)..(120): NCBI GI NO: 38344582 NR Description: OSJNBa0053B21.14
  misc_feature (1)..(120): NCBI GI NO: 9758294 NR Description: contains similarity to ATFP3~gene_id:MLE2.16
  misc_feature (1)..(120): NCBI GI NO: 18424719 NR Description: copper chaperone
  misc_feature (1)..(120): NCBI GI NO: 4097547 NR Description: ATFP3 [Arabidopsis thaliana]
  misc_feature (1)..(117): NCBI GI NO: 37532382 NR Description: putative ATFP3
  misc_feature (1)..(78): NCBI GI NO: 15241256 NR Description: copper chaperone
  misc_feature (1)..(120): NCBI GI NO: 34394290 NR Description: putative heavy-metal-associated domain-containingprotein
  misc_feature (1)..(116): NCBI GI NO: 15233023 NR Description: hypothetical protein; protein id: At3g02960.1
  misc_feature (1)..(120): NCBI GI NO: 21594005 NR Description: unknown [Arabidopsis thaliana]
  misc_feature (1)..(116): NCBI GI NO: 18420811 NR Description: expressed protein; protein id: At5g24580
MKVVERVQKKTGRKVELLSPMPPPKEEKKEEEKKEEPEPPKTEKKEEATVLAVVLKVHMHCEACTQVIKKRILKMKGVQSVEADLKASQVTVKGVFEEAKLSDYVYRRTGKHAAIVKSEPV

SEQ ID NO: 35441 - protein, 101 aa, Zea mays subsp. mays
  peptide (1)..(101): Ceres Seq. ID no. 11030672
  misc_feature (1)..(100): NCBI GI NO: 38344582 NR Description: OSJNBa0053B21.14
  misc_feature (1)..(100): NCBI GI NO: 9758294 NR Description: contains similarity to ATFP3~gene_id:MLE2.16
  misc_feature (1)..(100): NCBI GI NO: 18424719 NR Description: copper chaperone
  misc_feature (1)..(100): NCBI GI NO: 4097547 NR Description: ATFP3 [Arabidopsis thaliana]
  misc_feature (1)..(97): NCBI GI NO: 37532382 NR Description: putative ATFP3
  misc_feature (1)..(58): NCBI GI NO: 15241256 NR Description: copper chaperone
  misc_feature (1)..(100): NCBI GI NO: 34394290 NR Description: putative heavy-metal-associated domain-containingprotein
  misc_feature (1)..(96): NCBI GI NO: 15233023 NR Description: hypothetical protein; protein id: At3g02960.1
  misc_feature (1)..(100): NCBI GI NO: 21594005 NR Description: unknown [Arabidopsis thaliana]
  misc_feature (1)..(96): NCBI GI NO: 18420811 NR Description: expressed protein; protein id: At5g24580
MPPPKEEKKEEEKKEEPEPPKTEKKEEATVLAVVLKVHMHCEACTQVIKKRILKMKGVQSVEADLKASQVTVKGVFEEAKLSDYVYRRTGKHAAIVKSEPV

SEQ ID NO: 35442 - DNA, 2270 bp, Zea mays subsp. mays
  misc_feature (1)..(2270): Ceres Seq. ID no. 12454959
ccatcgccagggcgtcggatcggagcgagctcattctcaactcgactcaagagctctgcctcctccatctccccttctctggcctccggagccacgctgagagatggaggcgaatcccaagaacaccttcacgatcaaagtggaggacgggaagcccgggaaggacggccggctggcggtcggaccggtgttccggagcgttctggccaaggatgggttcccgcagcttgagcctgacatgaagacatcatgggacgtgttcagggtagcagcagtcaagtatgccgacaaccggatgctcggatggcgtccgttcaaagatggagtgccagggccctacttgtggaaatcatacaaggagatctacgacgaggtgctgcaagcaggctctgcgttgcagaagctgggagtgcagccaggttcccgggtggggatctacggagcgaactgtcctcagtggatagtggcaatgcaggcttgcaatggctatagtctagtctgtgtcccactgtacgatactttaggtgcgggagctgtcgactacatcatcgatcatgccgagatcgatgttgtcttcatacaggacaagaaaataaaagagatactgtccccaaactgcaagtctgccaagagactgaaagcattggtggcgttcacttcggcgacaactgaacagaacaaagaagcggatcaaattgggatcaaaatgtatgcctgggacgatttcttgaaagtggggaaggataatcctcgtcaaccttgccctccgcaagcaagtgacatctgcactgtcatgtacacgagtgggacaagcggacagcccaaaggtgtgatgctgacccatgaaagccacgccatgtatgtgaaaggggtggacctcttcatggaccagtttgatgataagatgacaacagatgatgtcttcctgtcgtttctcccgcttgctcacatccttgaccgcatgatcgaagagtatttctttcacaaaggggcctcaattggctactaccacggagatctgaatgccttgagggacgacattgtggagctgaagccgactttactggttggggtgccccgagtgtacgaaaggatttatgaaggtatcttgaaggccattgcggaactcagacctctaagaagggtcatctttaatgctttgtacaaccgcaaactggcaagcatgaaagcaggctactcgcacaaaaccgcttcacctttcgcggacatgctggtttttcgcaaggtcaaggcaaggcttggaggtcgtcttcgcttactgatttcaggaggggctccgttgagtaatgagatcgaggagttcatgagagtgaccacctgtgcatacttcatccaaggctatggtttaacagaaacactgggacctagcactgtctgctacatcgacgacatggccctggtcggaagcgctggtgtgcctgccacctacaccgaaattcggctggaagaagtgcccgagatgggctatgatccactcggcgtcccttcgcgtggtgaaatctgcatccgggggaaatccctcttcgctgggtactacaaaagtccagaactcacaaacgaagccatcgttgatgggtggtttcatacaggtgacattggagagatgaccccagacgggatcttgaaggtttgacagaaaaaagaacatatttaagctgtcacaaggggagtatgttgcggttgagtacctggagaaagtatatggcttccctccactcgttgaagatatctgggtatacggggacagtttcagatcaagtttagttgcagtagtcaatccacaccaagaaaacacaatgaagtgggcagagtccaatggctacaagggttcttttgatgaaatctgcaaacttgaaggactcaaagagtacatcctgaaagagctggcagccgttgcgcagaagaacaagctacgaggcttcgagtacatcaaaggcgtagtgttggatcctgtgccttttgacatcgagagggatttggtgactgcaacaatgaagaagaagagaaagaatatgctgaactattaccagtctgagattgacacaatatacaaaaagctggaggcgcagaagagtgctgccagagctaagtgaagagatgtgccctattcgaccatcagctgaaaacaagggaaacgacaccgttgtaaatttcacattaatattgcgaagtaacaactcagggctatgagtaaggaataaaatgtatattgtgcctttgtctatagtatcggatgattcccaaatctc

SEQ ID NO: 35443 - protein, 516 aa, Zea mays subsp. mays
  peptide (1)..(516): Ceres Seq. ID no. 12454960
  misc_feature (8)..(516): NCBI GI NO: 15226536 NR Description: putative acyl-CoA synthetase; protein id:At2g47240
  misc_feature (9)..(516): NCBI GI NO: 15236634 NR Description: acyl-CoA synthetase - like protein
  misc_feature (9)..(516): NCBI GI NO: 7437845 NR Description: probable long-chain-fatty-acid-CoA ligase (EC6
  misc_feature (9)..(516): NCBI GI NO: 15217631 NR Description: acyl-CoA synthetase, putative
  misc_feature (9)..(516): NCBI GI NO: 15237023 NR Description: putative acyl-CoA synthetase; protein id:At4g11030
  misc_feature (9)..(516): NCBI GI NO: 20805871 NR Description: long chain acyl-CoA synthetase 5
  misc_feature (13)..(516): NCBI GI NO: 22330132 NR Description: acyl CoA synthetase, putative
  misc_feature (13)..(516): NCBI GI NO: 7437844 NR Description: probable long-chain-fatty-acid-CoA ligase (EC6
  misc_feature (254)..(516): NCBI GI NO: 7437841 NR Description: probable long-chain-fatty-acid-CoA ligase (EC6
  misc_feature (9)..(149): NCBI GI NO: 7437841 NR Description: probable long-chain-fatty-acid-CoA ligase (EC6
MEANPKNTFTIKVEDGKPGKDGRLAVGPVFRSVLAKDGFPQLEPDMKTSWDVFRVAAVKYADNRMLGWRPFKDGVPGPYLWKSYKEIYDEVLQAGSALQKLGVQPGSRVGIYGANCPQWIVAMQACNGYSLVCVPLYDTLGAGAVDYIIDHAEIDVVFIQDKKIKEILSPNCKSAKRLKALVAFTSATTEQNKEADQIGIKMYAWDDFLKVGKDNPRQPCPPQASDICTVMYTSGTSGQPKGVMLTHESHAMYVKGVDLFMDQFDDKMTTDDVFLSFLPLAHILDRMIEEYFFHKGASIGYYHGDLNALRDDIVELKPTLLVGVPRVYERIYEGILKAIAELRPLRRVIFNALYNRKLASMKAGYSHKTASPFADMLVFRKVKARLGGRLRLLISGGAPLSNEIEEFMRVTTCAYFIQGYGLTETLGPSTVCYIDDMALVGSAGVPATYTEIRLEEVPEMGYDPLGVPSRGEICIRGKSLFAGYYKSPELTNEAIVDGWFHTGDIGEMTPDGILKV

SEQ ID NO: 35444 - protein, 471 aa, Zea mays subsp. mays
  peptide (1)..(471): Ceres Seq. ID no. 12454961
  misc_feature (1)..(471): NCBI GI NO: 15226536 NR Description: putative acyl-CoA synthetase; protein id:At2g47240
  misc_feature (1)..(471): NCBI GI NO: 15236634 NR Description: acyl-CoA synthetase - like protein
  misc_feature (1)..(471): NCBI GI NO: 7437845 NR Description: probable long-chain-fatty-acid-CoA ligase (EC6
  misc_feature (1)..(471): NCBI GI NO: 15217631 NR Description: acyl-CoA synthetase, putative
  misc_feature (1)..(471): NCBI GI NO: 15237023 NR Description: putative acyl-CoA synthetase; protein id:At4g11030
  misc_feature (1)..(471): NCBI GI NO: 20805871 NR Description: long chain acyl-CoA synthetase 5
  misc_feature (1)..(471): NCBI GI NO: 22330132 NR Description: acyl CoA synthetase, putative
  misc_feature (1)..(471): NCBI GI NO: 7437844 NR Description: probable long-chain-fatty-acid-CoA ligase (EC6
  misc_feature (209)..(471): NCBI GI NO: 7437841 NR Description: probable long-chain-fatty-acid-CoA ligase (EC6
  misc_feature (1)..(104): NCBI GI NO: 7437841 NR Description: probable long-chain-fatty-acid-CoA ligase (EC6
MKTSWDVFRVAAVKYADNRMLGWRPFKDGVPGPYLWKSYKEIYDEVLQAGSALQKLGVQPGSRVGIYGANCPQWIVAMQACNGYSLVCVPLYDTLGAGAVDYIIDHAEIDVVFIQDKKIKEILSPNCKSAKRLKALVAFTSATTEQNKEADQIGIKMYAWDDFLKVGKDNPRQPCPPQASDICTVMYTSGTSGQPKGVMLTHESHAMYVKGVDLFMDQFDDKMTTDDVFLSFLPLAHILDRMIEEYFFHKGASIGYYHGDLNALRDDIVELKPTLLVGVPRVYERIYEGILKAIAELRPLRRVIFNALYNRKLASMKAGYSHKTASPFADMLVFRKVKARLGGRLRLLISGGAPLSNEIEEFMRVTTCAYFIQGYGLTETLGPSTVCYIDDMALVGSAGVPATYTEIRLEEVPEMGYDPLGVPSRGEICIRGKSLFAGYYKSPELTNEAIVDGWFHTGDIGEMTPDGILKV

SEQ ID NO: 35445 - protein, 452 aa, Zea mays subsp. mays
  peptide (1)..(452): Ceres Seq. ID no. 12454962
  misc_feature (1)..(452): NCBI GI NO: 15226536 NR Description: putative acyl-CoA synthetase; protein id:At2g47240
  misc_feature (1)..(452): NCBI GI NO: 15236634 NR Description: acyl-CoA synthetase - like protein
  misc_feature (1)..(452): NCBI GI NO: 7437845 NR Description: probable long-chain-fatty-acid-CoA ligase (EC6
  misc_feature (1)..(452): NCBI GI NO: 15217631 NR Description: acyl-CoA synthetase, putative
  misc_feature (1)..(452): NCBI GI NO: 15237023 NR Description: putative acyl-CoA synthetase; protein id:At4g11030
  misc_feature (1)..(452): NCBI GI NO: 20805871 NR Description: long chain acyl-CoA synthetase 5
  misc_feature (1)..(452): NCBI GI NO: 22330132 NR Description: acyl CoA synthetase, putative
  misc_feature (1)..(452): NCBI GI NO: 7437844 NR Description: probable long-chain-fatty-acid-CoA ligase (EC6
  misc_feature (190)..(452): NCBI GI NO: 7437841 NR Description: probable long-chain-fatty-acid-CoA ligase (EC6
  misc_feature (1)..(85): NCBI GI NO: 7437841 NR Description: probable long-chain-fatty-acid-CoA ligase (EC6
MLGWRPFKDGVPGPYLWKSYKEIYDEVLQAGSALQKLGVQPGSRVGIYGANCPQWIVAMQACNGYSLVCVPLYDTLGAGAVDYIIDHAEIDVVFIQDKKIKEILSPNCKSAKRLKALVAFTSATTEQNKEADQIGIKMYAWDDFLKVGKDNPRQPCPPQASDICTVMYTSGTSGQPKGVMLTHESHAMYVKGVDLFMDQFDDKMTTDDVFLSFLPLAHILDRMIEEYFFHKGASIGYYHGDLNALRDDIVELKPTLLVGVPRVYERIYEGILKAIAELRPLRRVIFNALYNRKLASMKAGYSHKTASPFADMLVFRKVKARLGGRLRLLISGGAPLSNEIEEFMRVTTCAYFIQGYGLTETLGPSTVCYIDDMALVGSAGVPATYTEIRLEEVPEMGYDPLGVPSRGEICIRGKSLFAGYYKSPELTNEAIVDGWFHTGDIGEMTPDGILKV

SEQ ID NO: 35446 - DNA, 1698 bp, Zea mays subsp. mays
  misc_feature (1)..(1698): Ceres Seq. ID no. 13494587
cctttttccccttcacagccccgtactactatccccgctaccgctagccgccgcgctgctcatctggtggcggctcgcctccctccccccatccgccgccgccggctcctcctctagctccctccttaccccgagctttaagctcgtgctacctgcctacctatccgtagggagagagagagagaggggagaaggttcggtcggtcggtcgggggctctcggatctcgccgctgcctccccgtttcttcgttgggatctcgctcgcttcgcgcccatggccgccgtcgcgacgccaccggcccccgcgcccgccgctccggcaccggcaccggcaccggctgctgctccggctcccgtcaccgtcgcccctgccgcggaccaaaccacggatctgctgcagaagttgtcgctggattcgcagcccaaggcggcgggtgcgacagagcctgctgctgctgccgctgccgccaaggagggtgctgtgacaaaccagccgctgagtgtggccatcccgccagagcggtctatcacgccggtgcttcaggactttatggatcccaacctgttctatctaccagcgtattactatggaggctacgacagttccatgagcgagtgggatgattatccaagatatctaaattcagatggagtggagattgccccagcagtgtatggagatatttatggatatgggtatgctccttacggggcatactctccggccacttccccagttccaacggttgatggtcagatgtttggcgcacagcattaccagtatccaaccacgtattttcagcctcctacaccaattccttctaccactcaaagcaacctccagtcttccaacaatcctgaaaagccagcagctaaagcagatcctgccaaggcaaccgctaatggtgttccaaatggtactggtcacactcacagttacagtggaactgtaccaagccaacaaagttcagcactgacgcctgatggaacttatagggcgcccttgctaggtggagttccttctgctggttacctagacacgacatattatgggtatgacagcacaggggcacaatttgcatggtatgatggctctgcttatgcaaatggacagcaaagaacaaccacaactaatcgttttccatcctcgtcattcagtggtaatggttcatctgcaatatatcagaacaagagctccaccacgcagcagatgggtatgcagaatagaagacctacaactacatcagcagctcctacctatcccaataggatgtaccctagcccccgaccgtacaccccagtatgggaattcagtaaaaactggtcttccctacgggagtaacggttatgattccaggatatatggtcgatgtggtcttggtaatggtatggataacaggtacaggcccagggcatgtagtggatactatggttatggcaatgagagtcaggatggaacaattgagttaaacagaggtcctagatctggccggttcaagaaccagaaattgtacggtcatactgtcactattgctgtgaaagggcagtctctcccttctagtgaaagcaagaatgatagtgctgtgcctgatagagcaaagtacaatagagatgacttccctgttcagtacgatgctgcaaagttctttgtcattaaatcgtacagcgaggatgacatccacaagagcgtaaagtac

SEQ ID NO: 35447 - protein, 355 aa, Zea mays subsp. mays
  peptide (1)..(355): Ceres Seq. ID no. 13494588
  misc_feature (1)..(81): Pfam Name: Peptidase family S21 Pfam Description: Assemblin
  misc_feature (1)..(341): NCBI GI NO: 22773231 NR Description: Putative RNA-binding protein
  misc_feature (34)..(340): NCBI GI NO: 18087662 NR Description: putative RNA-binding protein [Oryza sativa]
  misc_feature (29)..(334): NCBI GI NO: 30682679 NR Description: expressed protein [Arabidopsis thaliana]
  misc_feature (29)..(334): NCBI GI NO: 25084169 NR Description: Unknown protein [Arabidopsis thaliana]
  misc_feature (29)..(334): NCBI GI NO: 30682683 NR Description: expressed protein [Arabidopsis thaliana]
  misc_feature (82)..(336): NCBI GI NO: 18405397 NR Description: expressed protein [Arabidopsis thaliana]
  misc_feature (29)..(204): NCBI GI NO: 25372787 NR Description: Rubisco subunit binding-protein beta subunit
  misc_feature (80)..(243): NCBI GI NO: 34395023 NR Description: high-glucose-regulated protein 8-like
  misc_feature (30)..(191): NCBI GI NO: 30682433 NR Description: expressed protein [Arabidopsis thaliana]
  misc_feature (30)..(191): NCBI GI NO: 30682438 NR Description: expressed protein [Arabidopsis thaliana]
MAAVATPPAPAPAAPAPAPAPAAAPAPVTVAPAADQTTDLLQKLSLDSQPKAAGATEPAAAAAAAKEGAVTNQPLSVAIPPERSITPVLQDFMDPNLFYLPAYYYGGYDSSMSEWDDYPRYLNSDGVEIAPAVYGDIYGYGYAPYGAYSPATSPVPTVDGQMFGAQHYQYPTTYFQPPTPIPSTTQSNLQSSNNPEKPAAKADPAKATANGVPNGTGHTHSYSGTVPSQQSSALTPDGTYRAPLLGGVPSAGYLDTTYYGYDSTGAQFAWYDGSAYANGQQRTTTTNRFPSSSFSGNGSSAIYQNKSSTTQQMGMQNRRPTTTSAAPTYPNRMYPSPRPYTPVWEFSKNWSSLRE

SEQ ID NO: 35448 - protein, 263 aa, Zea mays subsp. mays
  peptide (1)..(263): Ceres Seq. ID no. 13494589
  misc_feature (1)..(249): NCBI GI NO: 22773231 NR Description: Putative RNA-binding protein
  misc_feature (1)..(248): NCBI GI NO: 18087662 NR Description: putative RNA-binding protein [Oryza sativa]
  misc_feature (1)..(242): NCBI GI NO: 30682679 NR Description: expressed protein [Arabidopsis thaliana]
  misc_feature (1)..(242): NCBI GI NO: 25084169 NR Description: Unknown protein [Arabidopsis thaliana]
  misc_feature (1)..(242): NCBI GI NO: 30682683 NR Description: expressed protein [Arabidopsis thaliana]
  misc_feature (1)..(244): NCBI GI NO: 18405397 NR Description: expressed protein [Arabidopsis thaliana]
  misc_feature (1)..(112): NCBI GI NO: 25372787 NR Description: Rubisco subunit binding-protein beta subunit
  misc_feature (1)..(151): NCBI GI NO: 34395023 NR Description: high-glucose-regulated protein 8-like
  misc_feature (1)..(99): NCBI GI NO: 30682433 NR Description: expressed protein [Arabidopsis thaliana]
  misc_feature (1)..(99): NCBI GI NO: 30682438 NR Description: expressed protein [Arabidopsis thaliana]
MDPNLFYLPAYYYGGYDSSMSEWDDYPRYLNSDGVEIAPAVYGDIYGYGYAPYGAYSPATSPVPTVDGQMFGAQHYQYPTTYFQPPTPIPSTTQSNLQSSNNPEKPAAKADPAKATANGVPNGTGHTHSYSGTVPSQQSSALTPDGTYRAPLLGGVPSAGYLDTTYYGYDSTGAQFAWYDGSAYANGQQRTTTTNRFPSSSFSGNGSSAIYQNKSSTTQQMGMQNRRPTTTSAAPTYPNRMYPSPRPYTPVWEFSKNWSSLRE

SEQ ID NO: 35449 - protein, 244 aa, Zea mays subsp. mays
  peptide (1)..(244): Ceres Seq. ID no. 13494590
  misc_feature (1)..(230): NCBI GI NO: 22773231 NR Description: Putative RNA-binding protein
  misc_feature (1)..(229): NCBI GI NO: 18087662 NR Description: putative RNA-binding protein [Oryza sativa]
  misc_feature (1)..(223): NCBI GI NO: 30682679 NR Description: expressed protein [Arabidopsis thaliana]
  misc_feature (1)..(223): NCBI GI NO: 25084169 NR Description: Unknown protein [Arabidopsis thaliana]
  misc_feature (1)..(223): NCBI GI NO: 30682683 NR Description: expressed protein [Arabidopsis thaliana]
  misc_feature (1)..(225): NCBI GI NO: 18405397 NR Description: expressed protein [Arabidopsis thaliana]
  misc_feature (1)..(93): NCBI GI NO: 25372787 NR Description: Rubisco subunit binding-protein beta subunit
  misc_feature (1)..(132): NCBI GI NO: 34395023 NR Description: high-glucose-regulated protein 8-like
  misc_feature (1)..(80): NCBI GI NO: 30682433 NR Description: expressed protein [Arabidopsis thaliana]
  misc_feature (1)..(80): NCBI GI NO: 30682438 NR Description: expressed protein [Arabidopsis thaliana]
MSEWDDYPRYLNSDGVEIAPAVYGDIYGYGYAPYGAYSPATSPVPTVDGQMFGAQHYQYPTTYFQPPTPIPSTTQSNLQSSNNPEKPAAKADPAKATANGVPNGTGHTHSYSGTVPSQQSSALTPDGTYRAPLLGGVPSAGYLDTTYYGYDSTGAQFAWYDGSAYANGQQRTTTTNRFPSSSFSGNGSSAIYQNKSSTTQQMGMQNRRPTTTSAAPTYPNRMYPSPRPYTPVWEFSKNWSSLRE

SEQ ID NO: 35450 - DNA, 2052 bp, Zea mays subsp. mays
  misc_feature (1)..(2052): Ceres Seq. ID no. 12391582
aaatgagctcgctctcctgctcctacaggctgcagttgcgctgtgcctgtgcttccagttccatcgctttcccctcctccccagtccccactcccagatgcgatttccctctccaccgccacagcgcctagcttagccagccagccggcggccatcgccgccgcaatggcgaccgcgtcggaggacgaggccgcctcggaccgctgcagcggcagctacagccccagcgccgacgtcagcgagtccgaaacctccagtgactgctccgcgcccaccacgcgccgcttcgcctcctcctcctcggcctccgccaccgtctcccgcctcgcgtcctcctcctcgtcgctccccaccccggcatcggccaccgccttctacctctccaagccaacccccgacctctccgagatcgacatgatgaaggagcgcttcgcgaagctcctgctcggcgaggacatgtcgggcagcgggaagggcgtctgcaccgcgctcgccatctccaatgccatcaccaacctctccgccaccgtgttcggcgagctgtggaggctggagccgctcgcgacggcgaggaaggcgatgtggacgcgggagatggagtggctgctctccgtcgctgactccatcgtcgagctcaccccctccatccaggagctccccgaaggcggcggccagttcgaggtcatggtcccgcgcccgcgcagcgacctctacatgaacctccccgcgctcaagaagctcgacgccatgctcctcgcgatgattgacgggttcaaggatacggagttctggtacgtggacagaggggttatggtcgaggatagcgggggtccgttcccgtcctcatcctcgtcgtcttgtggccggccgtcagtgcggcaggaggacaagtggtggttgccctgcccaagagtgccgcccaaggggctgtccgtggacgcgaggaggaagctgcagcaaagcagggattgtgcaaaccagatactcaaggcggccatggcgattaacagcgatgtgctcgccgagatggaaatccccgaagtgtacctggagacactgcccaagaacggtaaatcttgcttgggtgagataatttatcgatacataacagctgagcagttctcaccagaatgtctcctagattgcttggatctatcatctgagcaccacacacttgaagtggcaaacagaatagaaggtgccatccatgtttggaaactgaaaggccaaaaaaagtcgacgcctcaagccaaatcaaagatatcttggggtggaaaagtgaagggtcttgttggagataaggagaagaaccacactttgtctgaaagagctgatggtctattgcagagcttaaggttgagatatccaggcctgccacaaacttcccttgacatgaacaagatacagtataacaaggatgtcgggcagtccatacttgaaagctactcaagggttctggagagcttggcatttaacataattgcaagaattgatgatgtgatctatgttgatgacgctacaaacagatcagctgctgccgagtctgtttcgatcttcaatcgtggcacaggcgtgccagttcagaagagaatctctccaagcccattctctattcagaattcgccgtatggctctccgttcgcaacacccactttctgctcctccaccccagttacaggcagtcctggaagggtacagcccccattaaacaaaaatattctaggaactcaagaaatcaaggtcgaaaagctcttttctggtgatctagagaaggtctggacatatgcaggaaacttgagcgctaggaaagacgctggagatgctcctgagagagactgaagggcgatggaggaaggtagacatgtaccgacagccgacagatcctgtaattgctagtagctagatcttcctgtacagaagcagcatgagtttttttttgttctttttgtagcgagccgatcattgtgtgctctgcttacaatgaatggatgtcacctgatctgaacagagaaacttgtagtttcagctgtagtttttttgtctggattggtt

SEQ ID NO: 35451 - protein, 557 aa, Zea mays subsp. mays
  peptide (1)..(557): Ceres Seq. ID no. 12391583
  misc_feature (10)..(455): Pfam Name: DUF315 Pfam Description: Domain of unknown function
  misc_feature (1)..(557): NCBI GI NO: 15233845 NR Description: putative protein; protein id: At4g38430
  misc_feature (1)..(556): NCBI GI NO: 15810309 NR Description: unknown protein [Arabidopsis thaliana]
  misc_feature (16)..(518): NCBI GI NO: 15241663 NR Description: putative protein; protein id: At5g02010.1
  misc_feature (36)..(512): NCBI GI NO: 15239292 NR Description: putative protein; protein id: At5g05940.1
  misc_feature (5)..(514): NCBI GI NO: 34908302 NR Description: P0005H10.23
  misc_feature (1)..(515): NCBI GI NO: 15228166 NR Description: putative protein; protein id: At3g55660.1
  misc_feature (1)..(454): NCBI GI NO: 37536670 NR Description: hypothetical protein
  misc_feature (1)..(449): NCBI GI NO: 15236138 NR Description: putative protein; protein id: At4g00460.1
  misc_feature (81)..(454): NCBI GI NO: 38345761 NR Description: OSJNBa0065O17.14
  misc_feature (2)..(449): NCBI GI NO: 15223455 NR Description: hypothetical protein; protein id: At1g01700.1
MATASEDEAASDRCSGSYSPSADVSESETSSDCSAPTTRRFASSSSASATVSRLASSSSSLPTPASATAFYLSKPTPDLSEIDMMKERFAKLLLGEDMSGSGKGVCTALAISNAITNLSATVFGELWRLEPLATARKAMWTREMEWLLSVADSIVELTPSIQELPEGGGQFEVMVPRPRSDLYMNLPALKKLDAMLLAMIDGFKDTEFWYVDRGVMVEDSGGPFPSSSSSSCGRPSVRQEDKWWLPCPRVPPKGLSVDARRKLQQSRDCANQILKAAMAINSDVLAEMEIPEVYLETLPKNGKSCLGEIIYRYITAEQFSPECLLDCLDLSSEHHTLEVANRIEGAIHVWKLKGQKKSTPQAKSKISWGGKVKGLVGDKEKNHTLSERADGLLQSLRLRYPGLPQTSLDMNKIQYNKDVGQSILESYSRVLESLAFNIIARIDDVIYVDDATNRSAAAESVSIFNRGTGVPVQKRISPSPFSIQNSPYGSPFATPTFCSSTPVTGSPGRVQPPLNKNILGTQEIKVEKLFSGDLEKVWTYAGNLSARKDAGDAPERD

SEQ ID NO: 35452 - protein, 474 aa, Zea mays subsp. mays
  peptide (1)..(474): Ceres Seq. ID no. 12391584
  misc_feature (1)..(372): Pfam Name: DUF315 Pfam Description: Domain of unknown function
  misc_feature (1)..(474): NCBI GI NO: 15233845 NR Description: putative protein; protein id: At4g38430
  misc_feature (1)..(473): NCBI GI NO: 15810309 NR Description: unknown protein [Arabidopsis thaliana]
  misc_feature (1)..(435): NCBI GI NO: 15241663 NR Description: putative protein; protein id: At5g02010.1
  misc_feature (1)..(429): NCBI GI NO: 15239292 NR Description: putative protein; protein id: At5g05940.1
  misc_feature (1)..(431): NCBI GI NO: 34908302 NR Description: P0005H10.23
  misc_feature (1)..(432): NCBI GI NO: 15228166 NR Description: putative protein; protein id: At3g55660.1
  misc_feature (1)..(371): NCBI GI NO: 37536670 NR Description: hypothetical protein
  misc_feature (1)..(366): NCBI GI NO: 15236138 NR Description: putative protein; protein id: At4g00460.1
  misc_feature (1)..(371): NCBI GI NO: 38345761 NR Description: OSJNBa0065O17.14
  misc_feature (1)..(366): NCBI GI NO: 15223455 NR Description: hypothetical protein; protein id: At1g01700.1
MMKERFAKLLLGEDMSGSGKGVCTALAISNAITNLSATVFGELWRLEPLATARKAMWTREMEWLLSVADSIVELTPSIQELPEGGGQFEVMVPRPRSDLYMNLPALKKLDAMLLAMIDGFKDTEFWYVDRGVMVEDSGGPFPSSSSSSCGRPSVRQEDKWWLPCPRVPPKGLSVDARRKLQQSRDCANQILKAAMAINSDVLAEMEIPEVYLETLPKNGKSCLGEIIYRYITAEQFSPECLLDCLDLSSEHHTLEVANRIEGAIHVWKLKGQKKSTPQAKSKISWGGKVKGLVGDKEKNHTLSERADGLLQSLRLRYPGLPQTSLDMNKIQYNKDVGQSILESYSRVLESLAFNIIARIDDVIYVDDATNRSAAAESVSIFNRGTGVPVQKRISPSPFSIQNSPYGSPFATPTFCSSTPVTGSPGRVQPPLNKNILGTQEIKVEKLFSGDLEKVWTYAGNLSARKDAGDAPERD

SEQ ID NO: 35453 - protein, 473 aa, Zea mays subsp. mays
  peptide (1)..(473): Ceres Seq. ID no. 12391585
  misc_feature (1)..(371): Pfam Name: DUF315 Pfam Description: Domain of unknown function
  misc_feature (1)..(473): NCBI GI NO: 15233845 NR Description: putative protein; protein id: At4g38430
  misc_feature (1)..(472): NCBI GI NO: 15810309 NR Description: unknown protein [Arabidopsis thaliana]
  misc_feature (1)..(434): NCBI GI NO: 15241663 NR Description: putative protein; protein id: At5g02010.1
  misc_feature (1)..(428): NCBI GI NO: 15239292 NR Description: putative protein; protein id: At5g05940.1
  misc_feature (1)..(430): NCBI GI NO: 34908302 NR Description: P0005H10.23
  misc_feature (1)..(431): NCBI GI NO: 15228166 NR Description: putative protein; protein id: At3g55660.1
  misc_feature (1)..(370): NCBI GI NO: 37536670 NR Description: hypothetical protein
  misc_feature (1)..(365): NCBI GI NO: 15236138 NR Description: putative protein; protein id: At4g00460.1
  misc_feature (1)..(370): NCBI GI NO: 38345761 NR Description: OSJNBa0065O17.14
  misc_feature (1)..(365): NCBI GI NO: 15223455 NR Description: hypothetical protein; protein id: At1g01700.1
MKERFAKLLLGEDMSGSGKGVCTALAISNAITNLSATVFGELWRLEPLATARKAMWTREMEWLLSVADSIVELTPSIQELPEGGGQFEVMVPRPRSDLYMNLPALKKLDAMLLAMIDGFKDTEFWYVDRGVMVEDSGGPFPSSSSSSCGRPSVRQEDKWWLPCPRVPPKGLSVDARRKLQQSRDCANQILKAAMAINSDVLAEMEIPEVYLETLPKNGKSCLGEIIYRYITAEQFSPECLLDCLDLSSEHHTLEVANRIEGAIHVWKLKGQKKSTPQAKSKISWGGKVKGLVGDKEKNHTLSERADGLLQSLRLRYPGLPQTSLDMNKIQYNKDVGQSILESYSRVLESLAFNIIARIDDVIYVDDATNRSAAAESVSIFNRGTGVPVQKRISPSPFSIQNSPYGSPFATPTFCSSTPVTGSPGRVQPPLNKNILGTQEIKVEKLFSGDLEKVWTYAGNLSARKDAGDAPERD

SEQ ID NO: 35454 - DNA, 1131 bp, Zea mays subsp. mays
  misc_feature (1)..(1131): Ceres Seq. ID no. 12419222
aagtcgcctccgcgcctccgcatataggcagcgtcgcccctctccgctttcccgaattagcgccaccgccacctccgcctccgatcccgcctctcccgggaacgaagccgagccgcccgaatcgccctccacccatccacccacccatatagccgggccccggaccgctctccaccggctcgcgcccccgacccctccgccgtccgccgccgcatcgcgtgggagggggaggaggaggaggaggaggaggccatggccgctgccgtagcttgcaggcgcgcggcgctcctgcacgggcaccagcagtggccgcagcggtgggcggccgcgccctgcccccgctccatctcgcagctcgtcaagaccaacggccgccgcgccttcctcgtagacaccctcgccctggtcaggaagctggagtcgcagggcgtgccccaccaagcaggcggaggcgatcacctccgccatcacggaggtcctcaacgacagcctcgagagcatctccgagtccttcgtctccaaggccgagatgcagaagagtgagatgctgcaggagtccaatatctccaagttcaagtcccaagtgcagagctcgcaggaaaaccatttctctttactacagcgggagactgagaaacttcgcggagatattgataagatgaggagtgaactgaagtatgagatcgacaaggtcaccgcagaacagcgattggatctgaatcttgaaagagggcgcatacgtgatgagcttgccaagcagaatgaggaaaccactgagcttaccacaaagcttgacaaggaaatccactcactgaaggcccagttggaggcagcaaagtacgatgtcatcaagtactgcataggtaccattgtttcgatctcagccgtcggcctcgccgtcctccgcatcgtgatgtgaaggcagcaaagcaaatacgttctttggttttacccatattcgtcgcccgtccgtggaaacccgcaagaagagaataggttctaattctgttcctagtttttaaaggggacaaaacgtgctcaggggagggggacacttggtagtagggagatgttgctcaaacttgtaaaaatagattgcccgtggaagaaatgcatccgaaatgattctcc

SEQ ID NO: 35455 - protein, 129 aa, Zea mays subsp. mays
  peptide (1)..(129): Ceres Seq. ID no. 12419223
  misc_feature (1)..(129): NCBI GI NO: 18398123 NR Description: expressed protein; protein id: At2g16460
  misc_feature (1)..(129): NCBI GI NO: 18409266 NR Description: putative protein; protein id: At3g51090
  misc_feature (1)..(129): NCBI GI NO: 11357624 NR Description: hypothetical protein F24M12
  misc_feature (1)..(23): NCBI GI NO: 25411710 NR Description: hypothetical protein At2g16460
  misc_feature (1)..(128): NCBI GI NO: 14318473 NR Description: Hypothetical ORF; Yfl046wp
  misc_feature (1)..(129): NCBI GI NO: 40743676 NR Description: hypothetical protein AN5773.2
  misc_feature (1)..(129): NCBI GI NO: 19115424 NR Description: hypothetical conserved protein
  misc_feature (1)..(125): NCBI GI NO: 19114462 NR Description: hypothetical protein; with coiled-coil region
  misc_feature (1)..(91): NCBI GI NO: 10197624 NR Description: MDS025 [Homo sapiens]
  misc_feature (1)..(91): NCBI GI NO: 20149663 NR Description: hypothetical protein MDS025 [Homo sapiens]
MQKSEMLQESNISKFKSQVQSSQENHFSLLQRETEKLRGDIDKMRSELKYEIDKVTAEQRLDLNLERGRIRDELAKQNEETTELTTKLDKEIHSLKAQLEAAKYDVIKYCIGTIVSISAVGLAVLRIVM

SEQ ID NO: 35456 - protein, 124 aa, Zea mays subsp. mays
  peptide (1)..(124): Ceres Seq. ID no. 12419224
  misc_feature (1)..(124): NCBI GI NO: 18398123 NR Description: expressed protein; protein id: At2g16460
  misc_feature (1)..(124): NCBI GI NO: 18409266 NR Description: putative protein; protein id: At3g51090
  misc_feature (1)..(124): NCBI GI NO: 11357624 NR Description: hypothetical protein F24M12
  misc_feature (1)..(18): NCBI GI NO: 25411710 NR Description: hypothetical protein At2g16460
  misc_feature (1)..(123): NCBI GI NO: 14318473 NR Description: Hypothetical ORF; Yfl046wp
  misc_feature (1)..(124): NCBI GI NO: 40743676 NR Description: hypothetical protein AN5773.2
  misc_feature (1)..(124): NCBI GI NO: 19115424 NR Description: hypothetical conserved protein
  misc_feature (1)..(120): NCBI GI NO: 19114462 NR Description: hypothetical protein; with coiled-coil region
  misc_feature (1)..(86): NCBI GI NO: 10197624 NR Description: MDS025 [Homo sapiens]
  misc_feature (1)..(86): NCBI GI NO: 20149663 NR Description: hypothetical protein MDS025 [Homo sapiens]
MLQESNISKFKSQVQSSQENHFSLLQRETEKLRGDIDKMRSELKYEIDKVTAEQRLDLNLERGRIRDELAKQNEETTELTTKLDKEIHSLKAQLEAAKYDVIKYCIGTIVSISAVGLAVLRIVM

SEQ ID NO: 35457 - protein, 96 aa, Zea mays subsp. mays
  peptide (1)..(96): Ceres Seq. ID no. 12419225
  misc_feature (27)..(61): NCBI GI NO: 18398123 NR Description: expressed protein; protein id: At2g16460
  misc_feature (30)..(61): NCBI GI NO: 18409266 NR Description: putative protein; protein id: At3g51090
  misc_feature (30)..(61): NCBI GI NO: 11357624 NR Description: hypothetical protein F24M12
  misc_feature (27)..(61): NCBI GI NO: 25411710 NR Description: hypothetical protein At2g16460
MAAAVACRRAALLHGHQQWPQRWAAAPCPRSISQLVKTNGRRAFLVDTLALVRKLESQGVPHQAGGGDHLRHHGGPQRQPREHLRVLRLQGRDAEE

SEQ ID NO: 35458 - DNA, 2328 bp, Zea mays subsp. mays
  misc_feature (1)..(2328): Ceres Seq. ID no. 12391602
atcgttttccgtcctccagtccgtcaatccagtccccatccccacggcgccgacgactcgggggcttcccccccttggacttggcccgggtgggagtagcacgtcggggaagggaagcaagcgtccgcgagtaaggacagaaaaccgaagggaggagtggagaggaggagcttgcttggagcgggtggacgggtggtgtgtatatagttaagcgggcgggcgggcagccaatgccgtcgggcgcgcagggctaggagcatgggcggagggggcgcgatcgtgcacggcttccgccgctggttccaccgccggagcgaaggctccacctccaactccaaccagccgtccctcgccggcgagggggaagcggacgacggctcatccgatctcgaggtcatcgaggacccggatctcctcggcctccgcgccatccgcgtgcccaagcgcaagatgccgctgcccgtcgagagccacaggaagaactcagtagaaatggagttcttcacagagtacggagaggcaagccagtaccagatccaagaagtcattggtaaagggagctacggagtagttgctgcagctgtggacacccgcaccggtgagcgggttgctatcaagaagatcaatgatgtgtttgagcacgtctcggatgccacacgcatactgcgggagatcaagctcctccggttgcttcgtcacccagacatagtcgagattaagcacatcatgctccctccttctcggagggagttccaagacatctatgttgtttttgagctcatggagtcggatctccatcaagtgatcagggcgaatgatgacctcacccctgaacatcaccagtttttcctgtaccaacttcttcgagctctcaagtacatacatgccgctaatgtattccatcgtgatctaaagcccaagaatatactggctaactcggactgcaaactgaaaatatgtgactttggacttgcccgtgcatcattcaatgatgccccttcagctatattttggacagactatgtggcaacaaggtggtaccgggcacctgaactatgtggttcctttttctccaaatacactcctgcaattgatatttggagcattgggtgcatatttgctgaacttctcactggaaggccactatttcctgggaagaatgttgtacaccaattagatattataacagatcttcttgggactccatcatctgagaccttatcccggattcgaaatgagaaggccaggagatatttgagctgcatgcggaaaaaatatcccgtgccctttactcataaatttcgacatgctgatcctttggctcttcgtcttctagagcgtttgcttgcatttgatcctaaagaccggcctagtgcagaagaggctctagctgatccatactttgcatcccttgctaatgtagaacgtgagccatcaagacacccgatttctaaacttgagtttgaatttgaaagaaagaagctggccaaagatgatgttagagaactgatctatcgagagattttggagtatcatccacagatgctggaggagtacatgaaaggcggagaacagattagcttcctctatccaagcggagtcgaccgcttcaaactgcagttcgctcatcttgaggagcattacagcaaaggagaaagaggttccccactgcaaagaaagcatgcttccttaccaagggaaagagtggttgtatccaaggatggcaatactgaacaacaaattaatgaccaggagagaagcgcagattctgttgcccgcactaccgtgagccctccaaggtcagaggatgctgacatggatgatgtgaaacccacaagcttaagctctcggagctacctgaagagtgcaagcataagcgcttccaagtgcgtcgttgtcagaaataaacacccagagccagaggatgatggaatacctgaggagatggaaggcaccgtcgatggattgtctgaaaaggtctccaggatgcactcctaaggcaggactgtccatggcgacagcaatctcgacacaagatttctgtctggtgcactgtaatgccgacgacacactgtttggatcttgtgtacacccacagctagttcaactaagatgtagcactagttcgtccatggaggaagcagaatggacgatgaagtgtggtcagcctgtcgaccatgaggtgttttcttccaatggagtctagggtatgtttgagttctacaacggcttgtgccgtacgaagtgtcagcagtgtacgaggaggaggatatcgttgtcagtacacattttgcctgtctagaaaattatgagtactttctccgatcg

SEQ ID NO: 35459 - protein, 579 aa, Zea mays subsp. mays
  peptide (1)..(579): Ceres Seq. ID no. 12391603
  misc_feature (91)..(382): Pfam Name: Pfam Description:  Protein kinase domain
  misc_feature (1)..(579): NCBI GI NO: 38174819 NR Description: putative MAP kinase
  misc_feature (79)..(579): NCBI GI NO: 5815410 NR Description: blast and wounding induced mitogen-activatedprotein kinase
  misc_feature (79)..(579): NCBI GI NO: 6689924 NR Description: MAP kinase homolog [Oryza sativa]
  misc_feature (34)..(579): NCBI GI NO: 9294059 NR Description: MAP kinase [Arabidopsis thaliana]
  misc_feature (1)..(579): NCBI GI NO: 15220976 NR Description: mitogen-activated protein kinase, putative
  misc_feature (69)..(579): NCBI GI NO: 18401750 NR Description: putative MAP kinase; protein id: At3g18040
  misc_feature (1)..(579): NCBI GI NO: 25406284 NR Description: probable MAP kinase F25P22.9
  misc_feature (69)..(579): NCBI GI NO: 7106544 NR Description: ATMPK9 [Arabidopsis thaliana]
  misc_feature (1)..(523): NCBI GI NO: 7106542 NR Description: ATMPK8 [Arabidopsis thaliana]
  misc_feature (79)..(517): NCBI GI NO: 6689926 NR Description: MAP kinase homolog [Oryza sativa]
MGGGGAIVHGFRRWFHRRSEGSTSNSNQPSLAGEGEADDGSSDLEVIEDPDLLGLRAIRVPKRKMPLPVESHRKNSVEMEFFTEYGEASQYQIQEVIGKGSYGVVAAAVDTRTGERVAIKKINDVFEHVSDATRILREIKLLRLLRHPDIVEIKHIMLPPSRREFQDIYVVFELMESDLHQVIRANDDLTPEHHQFFLYQLLRALKYIHAANVFHRDLKPKNILANSDCKLKICDFGLARASFNDAPSAIFWTDYVATRWYRAPELCGSFFSKYTPAIDIWSIGCIFAELLTGRPLFPGKNVVHQLDIITDLLGTPSSETLSRIRNEKARRYLSCMRKKYPVPFTHKFRHADPLALRLLERLLAFDPKDRPSAEEALADPYFASLANVEREPSRHPISKLEFEFERKKLAKDDVRELIYREILEYHPQMLEEYMKGGEQISFLYPSGVDRFKLQFAHLEEHYSKGERGSPLQRKHASLPRERVVVSKDGNTEQQINDQERSADSVARTTVSPPRSEDADMDDVKPTSLSSRSYLKSASISASKCVVVRNKHPEPEDDGIPEEMEGTVDGLSEKVSRMHS

SEQ ID NO: 35460 - protein, 515 aa, Zea mays subsp. mays
  peptide (1)..(515): Ceres Seq. ID no. 12391604
  misc_feature (27)..(318): Pfam Name: Pfam Description:  Protein kinase domain
  misc_feature (1)..(515): NCBI GI NO: 38174819 NR Description: putative MAP kinase
  misc_feature (15)..(515): NCBI GI NO: 5815410 NR Description: blast and wounding induced mitogen-activatedprotein kinase
  misc_feature (15)..(515): NCBI GI NO: 6689924 NR Description: MAP kinase homolog [Oryza sativa]
  misc_feature (1)..(515): NCBI GI NO: 9294059 NR Description: MAP kinase [Arabidopsis thaliana]
  misc_feature (1)..(515): NCBI GI NO: 15220976 NR Description: mitogen-activated protein kinase, putative
  misc_feature (5)..(515): NCBI GI NO: 18401750 NR Description: putative MAP kinase; protein id: At3g18040
  misc_feature (1)..(515): NCBI GI NO: 25406284 NR Description: probable MAP kinase F25P22.9
  misc_feature (5)..(515): NCBI GI NO: 7106544 NR Description: ATMPK9 [Arabidopsis thaliana]
  misc_feature (1)..(459): NCBI GI NO: 7106542 NR Description: ATMPK8 [Arabidopsis thaliana]
  misc_feature (15)..(453): NCBI GI NO: 6689926 NR Description: MAP kinase homolog [Oryza sativa]
MPLPVESHRKNSVEMEFFTEYGEASQYQIQEVIGKGSYGVVAAAVDTRTGERVAIKKINDVFEHVSDATRILREIKLLRLLRHPDIVEIKHIMLPPSRREFQDIYVVFELMESDLHQVIRANDDLTPEHHQFFLYQLLRALKYIHAANVFHRDLKPKNILANSDCKLKICDFGLARASFNDAPSAIFWTDYVATRWYRAPELCGSFFSKYTPAIDIWSIGCIFAELLTGRPLFPGKNVVHQLDIITDLLGTPSSETLSRIRNEKARRYLSCMRKKYPVPFTHKFRHADPLALRLLERLLAFDPKDRPSAEEALADPYFASLANVEREPSRHPISKLEFEFERKKLAKDDVRELIYREILEYHPQMLEEYMKGGEQISFLYPSGVDRFKLQFAHLEEHYSKGERGSPLQRKHASLPRERVVVSKDGNTEQQINDQERSADSVARTTVSPPRSEDADMDDVKPTSLSSRSYLKSASISASKCVVVRNKHPEPEDDGIPEEMEGTVDGLSEKVSRMHS

SEQ ID NO: 35461 - protein, 501 aa, Zea mays subsp. mays
  peptide (1)..(501): Ceres Seq. ID no. 12391605
  misc_feature (13)..(304): Pfam Name: Pfam Description:  Protein kinase domain
  misc_feature (1)..(501): NCBI GI NO: 38174819 NR Description: putative MAP kinase
  misc_feature (1)..(501): NCBI GI NO: 5815410 NR Description: blast and wounding induced mitogen-activatedprotein kinase
  misc_feature (1)..(501): NCBI GI NO: 6689924 NR Description: MAP kinase homolog [Oryza sativa]
  misc_feature (1)..(501): NCBI GI NO: 9294059 NR Description: MAP kinase [Arabidopsis thaliana]
  misc_feature (1)..(501): NCBI GI NO: 15220976 NR Description: mitogen-activated protein kinase, putative
  misc_feature (1)..(501): NCBI GI NO: 18401750 NR Description: putative MAP kinase; protein id: At3g18040
  misc_feature (1)..(501): NCBI GI NO: 25406284 NR Description: probable MAP kinase F25P22.9
  misc_feature (1)..(501): NCBI GI NO: 7106544 NR Description: ATMPK9 [Arabidopsis thaliana]
  misc_feature (1)..(445): NCBI GI NO: 7106542 NR Description: ATMPK8 [Arabidopsis thaliana]
  misc_feature (1)..(439): NCBI GI NO: 6689926 NR Description: MAP kinase homolog [Oryza sativa]
MEFFTEYGEASQYQIQEVIGKGSYGVVAAAVDTRTGERVAIKKINDVFEHVSDATRILREIKLLRLLRHPDIVEIKHIMLPPSRREFQDIYVVFELMESDLHQVIRANDDLTPEHHQFFLYQLLRALKYIHAANVFHRDLKPKNILANSDCKLKICDFGLARASFNDAPSAIFWTDYVATRWYRAPELCGSFFSKYTPAIDIWSIGCIFAELLTGRPLFPGKNVVHQLDIITDLLGTPSSETLSRIRNEKARRYLSCMRKKYPVPFTHKFRHADPLALRLLERLLAFDPKDRPSAEEALADPYFASLANVEREPSRHPISKLEFEFERKKLAKDDVRELIYREILEYHPQMLEEYMKGGEQISFLYPSGVDRFKLQFAHLEEHYSKGERGSPLQRKHASLPRERVVVSKDGNTEQQINDQERSADSVARTTVSPPRSEDADMDDVKPTSLSSRSYLKSASISASKCVVVRNKHPEPEDDGIPEEMEGTVDGLSEKVSRMHS

SEQ ID NO: 35462 - DNA, 971 bp, Zea mays subsp. mays
  misc_feature (1)..(971): Ceres Seq. ID no. 12391568
acacctccttatcgcaacgcgagcagcagttgcattggaggcgaggaggagccacgccggggctcaaggaatggccgctctccgccacctcgctgccggccccacctgccaccaccaccaccacggcgtcgcggcagccaccgcctccctccggctccatcgcctccccctccccttccgcccccttcgctcccgctccggctccttcaccagggtttatgcgatctccagcaatgacatcagggtcggcaccaacgtcgaggtcgacggcgcgccatggaaagttctagagttcctccacgtcaagcctggaaaaggcgctgctttcgtcaggacaaaactgcgtaactatgtaactggcaacacggtcgagaaaaccttccgtgctggaagtacgctacaggaaccatccctttcaaaggagaccaagcaatttacatacaaggatggctcccagttcgtgttcatggatctgacaacatttgaagaaagtcggttaaatgaagcagatgtcggtgacaaacaaaaatggctgaaagaggggatggactgcaatttgttgtactggaatgggaagatcattgatttcgacctcccaatcactgtgaggctgactgtaactgatactgacccaggggcaagtgatagtgcgcaaggaggaacaaagcctgcaaccctggaaactggagctgttgtcactgtgccctcttttgtgaacgtaggcgatgatattctggtggattcaagaactgggcagtatatgaatcgagcataacgaattgaagaggatttcggatttgaggagagtactgcttttttgtttgaccattttagtcccattcacttgtacaaacgccctgggtctttggccccaggaaatttacatttctgctgcatgtgaatcctcactctgattataaccatgtacatctttggtttccagatataaggaaaattgtgttcagattttt

SEQ ID NO: 35463 - protein, 257 aa, Zea mays subsp. mays
  peptide (1)..(257): Ceres Seq. ID no. 12391569
  misc_feature (75)..(257): Pfam Name: EF-P Pfam Description: Elongation factor P
  misc_feature (46)..(257): NCBI GI NO: 18398225 NR Description: putative elongation factor P
  misc_feature (75)..(257): NCBI GI NO: 12322730 NR Description: putative elongation factor P (EF-P); 66839-65711
  misc_feature (75)..(256): NCBI GI NO: 2494275 NR Description: Elongation factor P (EF-P)
  misc_feature (75)..(256): NCBI GI NO: 22298837 NR Description: translation elongation factor EF-P
  misc_feature (75)..(256): NCBI GI NO: 33864569 NR Description: Translation elongation factor EF-P
  misc_feature (75)..(256): NCBI GI NO: 16331453 NR Description: elongation factor P [Synechocystis sp. PCC 6803]
  misc_feature (75)..(256): NCBI GI NO: 33862304 NR Description: Elongation factor P (EF-P)
  misc_feature (75)..(256): NCBI GI NO: 33239478 NR Description: Translation elongation factor P
  misc_feature (75)..(256): NCBI GI NO: 23125000 NR Description: hypothetical protein [Nostoc punctiforme]
  misc_feature (75)..(256): NCBI GI NO: 23042812 NR Description: hypothetical protein
HLLIATRAAVALEARRSHAGAQGMAALRHLAAGPTCHHHHHGVAAATASLRLHRLPLPFRPLRSRSGSFTRVYAISSNDIRVGTNVEVDGAPWKVLEFLHVKPGKGAAFVRTKLRNYVTGNTVEKTFRAGSTLQEPSLSKETKQFTYKDGSQFVFMDLTTFEESRLNEADVGDKQKWLKEGMDCNLLYWNGKIIDFDLPITVRLTVTDTDPGASDSAQGGTKPATLETGAVVTVPSFVNVGDDILVDSRTGQYMNRA

SEQ ID NO: 35464 - protein, 234 aa, Zea mays subsp. mays
  peptide (1)..(234): Ceres Seq. ID no. 12391570
  misc_feature (52)..(234): Pfam Name: EF-P Pfam Description: Elongation factor P
  misc_feature (23)..(234): NCBI GI NO: 18398225 NR Description: putative elongation factor P
  misc_feature (52)..(234): NCBI GI NO: 12322730 NR Description: putative elongation factor P (EF-P); 66839-65711
  misc_feature (52)..(233): NCBI GI NO: 2494275 NR Description: Elongation factor P (EF-P)
  misc_feature (52)..(233): NCBI GI NO: 22298837 NR Description: translation elongation factor EF-P
  misc_feature (52)..(233): NCBI GI NO: 33864569 NR Description: Translation elongation factor EF-P
  misc_feature (52)..(233): NCBI GI NO: 16331453 NR Description: elongation factor P [Synechocystis sp. PCC 6803]
  misc_feature (52)..(233): NCBI GI NO: 33862304 NR Description: Elongation factor P (EF-P)
  misc_feature (52)..(233): NCBI GI NO: 33239478 NR Description: Translation elongation factor P
  misc_feature (52)..(233): NCBI GI NO: 23125000 NR Description: hypothetical protein [Nostoc punctiforme]
  misc_feature (52)..(233): NCBI GI NO: 23042812 NR Description: hypothetical protein
MAALRHLAAGPTCHHHHHGVAAATASLRLHRLPLPFRPLRSRSGSFTRVYAISSNDIRVGTNVEVDGAPWKVLEFLHVKPGKGAAFVRTKLRNYVTGNTVEKTFRAGSTLQEPSLSKETKQFTYKDGSQFVFMDLTTFEESRLNEADVGDKQKWLKEGMDCNLLYWNGKIIDFDLPITVRLTVTDTDPGASDSAQGGTKPATLETGAVVTVPSFVNVGDDILVDSRTGQYMNRA

SEQ ID NO: 35465 - DNA, 1836 bp, Zea mays subsp. mays
  misc_feature (1)..(1836): Ceres Seq. ID no. 12436188
agcaaccaaagcacacccctcctccttgctctgccgtgctcggagttgggagttggagcaccaccaccaccactcttcccctctcctctccctcctcgctcgtcctgttggaagcagcacacacacgagagagaaagagagacacaaggagatggcgctgctgttgctcctgctggccgtgctcggcgtggtgctggcgagcagcctgctgctgcggtggaacgagctgcggtacagccgccgccggggcctgccgccgggcacaatggggtggccgctcttcggcgagaccaccgagttcctcaagcaggggcctagcttcatgaagcagaggaggctcaggtacgggagcctgttccggacgcacatcctgggctgccccacggtggtgtgcatggagcccggagctgaaccggcgggcgctggccagcgagggcgccggcttcgtcccgggctacccgcagtccatgctcgacatcctggggcccaacaacatcgccgccgtgcacggcccgctccaccgcgccatgcggggcgccatgctcgcgctcacgcggccacacatgatccgcgccgcgctcctccccaagatcgacgccttcatgcgcgcccacctccacggctgggccggacgccgcgtcgacatccaggagatgaccaaggagatggctttgctctcgggctctcaggcagatcgctggcatctctgcgggcccacactccgacgccctaaaggcagagctgtacacccttgtacttggcaccttctccctgccaatcaacgtcccaggaaccaactacagcaaagggctccaggcaaggaagaagctcgtggcaatgctgcggcagatgatcgctgaccggaggtcctctggctgcgcccgagacgacatgctggacgcgctgctcagcggcaacgagggtaccagggcgaagctcagcgacgaccagatcatcgaccttctcatcaccctcatatactctgggtacgagactgtgtcgaccacctcgatgatggcggtgaagtacctgtcggacaaccccaaagctctcggacagatcaggaaagagcaccttgacatcaggaaggctaagtcaccggaggatccccttgactggaacgactacaagtccatgaccttcaccaaagctgtcatttatgagactctaaggctagctacagtagtcaacgggctgctgaggaaaactacccatgacgtagaaatgaatgggtatgttattccaaaaggctggagaatttatgtatacacaagggagataaactacgacccgttcctgtacccggaacccatggttttcaacccatggagatggatggagacgaacctggaatcacatccgcacttcatgctgttcggaggaggtgcccgcatgtgcccagggaaggaagtaggaacagttgaaatcgcaacgttccttcactatttcgtgacgcgttacagatgggaggaggagggaaacaacacaatatcgaagttccccagagtggcggctcccaatgggctacatatccgagttcaagattactgaacttcgtgaggcgttttgtgaagtttaggtagggattcagacagatagaaataacccatgcgatgctgatgctgctggcctcttcgaaaggactagaacagccattagtgcctgtaaaatgtgtccatgccgatagtaatgttattatagggaggatataggtatcataggtttattagaaatttgatgtagaaagccaacagatgctcctgtattcttttgctccatcaaaacagaggtatcatttggcttctatgcttttgaatcgaacatggtacagaaccc

SEQ ID NO: 35466 - protein, 243 aa, Zea mays subsp. mays
  peptide (1)..(243): Ceres Seq. ID no. 12436189
  misc_feature (51)..(153): NCBI GI NO: 27127269 NR Description: cytochrome P450
  misc_feature (51)..(133): NCBI GI NO: 18406372 NR Description: cytochrome p450, putative; protein id: At3g30180
  misc_feature (51)..(133): NCBI GI NO: 9294419 NR Description: cytochrome P450 [Arabidopsis thaliana]
  misc_feature (51)..(133): NCBI GI NO: 21536828 NR Description: cytochrome P450 homolog, putative
  misc_feature (51)..(153): NCBI GI NO: 5921933 NR Description: Cytochrome P450 85 (Dwarf protein)
  misc_feature (52)..(153): NCBI GI NO: 30693327 NR Description: cytochrome p450, putative [Arabidopsis thaliana]
  misc_feature (52)..(153): NCBI GI NO: 30693331 NR Description: cytochrome p450, putative [Arabidopsis thaliana]
  misc_feature (55)..(134): NCBI GI NO: 9587211 NR Description: cytochrome P450 [Vigna radiata]
  misc_feature (51)..(134): NCBI GI NO: 20520627 NR Description: putative cytochrome P450
  misc_feature (51)..(134): NCBI GI NO: 38567920 NR Description: OSJNBa0088I22.16
ATKAHPSSLLCRARSWELEHHHHHSSPLLSLLARPVGSSTHTREKERHKEMALLLLLLAVLGVVLASSLLLRWNELRYSRRRGLPPGTMGWPLFGETTEFLKQGPSFMKQRRLRYGSLFRTHILGCPTVVCMEPGAEPAGAGQRGRRLRPGLPAVHARHPGAQQHRRRARPAPPRHAGRHARAHAATHDPRRAPPQDRRLHARPPPRLGRTPRRHPGDDQGDGFALGLSGRSLASLRAHTPTP

SEQ ID NO: 35467 - protein, 237 aa, Zea mays subsp. mays
  peptide (1)..(237): Ceres Seq. ID no. 12436190
  misc_feature (1)..(237): NCBI GI NO: 27127269 NR Description: cytochrome P450
  misc_feature (1)..(237): NCBI GI NO: 18406372 NR Description: cytochrome p450, putative; protein id: At3g30180
  misc_feature (1)..(237): NCBI GI NO: 9294419 NR Description: cytochrome P450 [Arabidopsis thaliana]
  misc_feature (1)..(237): NCBI GI NO: 21536828 NR Description: cytochrome P450 homolog, putative
  misc_feature (1)..(234): NCBI GI NO: 5921933 NR Description: Cytochrome P450 85 (Dwarf protein)
  misc_feature (1)..(237): NCBI GI NO: 30693327 NR Description: cytochrome p450, putative [Arabidopsis thaliana]
  misc_feature (1)..(167): NCBI GI NO: 30693331 NR Description: cytochrome p450, putative [Arabidopsis thaliana]
  misc_feature (1)..(222): NCBI GI NO: 9587211 NR Description: cytochrome P450 [Vigna radiata]
  misc_feature (1)..(234): NCBI GI NO: 20520627 NR Description: putative cytochrome P450
  misc_feature (1)..(234): NCBI GI NO: 38567920 NR Description: OSJNBa0088I22.16
MLRQMIADRRSSGCARDDMLDALLSGNEGTRAKLSDDQIIDLLITLIYSGYETVSTTSMMAVKYLSDNPKALGQIRKEHLDIRKAKSPEDPLDWNDYKSMTFTKAVIYETLRLATVVNGLLRKTTHDVEMNGYVIPKGWRIYVYTREINYDPFLYPEPMVFNPWRWMETNLESHPHFMLFGGGARMCPGKEVGTVEIATFLHYFVTRYRWEEEGNNTISKFPRVAAPNGLHIRVQDY

SEQ ID NO: 35468 - protein, 233 aa, Zea mays subsp. mays
  peptide (1)..(233): Ceres Seq. ID no. 12436191
  misc_feature (1)..(233): NCBI GI NO: 27127269 NR Description: cytochrome P450
  misc_feature (1)..(233): NCBI GI NO: 18406372 NR Description: cytochrome p450, putative; protein id: At3g30180
  misc_feature (1)..(233): NCBI GI NO: 9294419 NR Description: cytochrome P450 [Arabidopsis thaliana]
  misc_feature (1)..(233): NCBI GI NO: 21536828 NR Description: cytochrome P450 homolog, putative
  misc_feature (1)..(230): NCBI GI NO: 5921933 NR Description: Cytochrome P450 85 (Dwarf protein)
  misc_feature (1)..(233): NCBI GI NO: 30693327 NR Description: cytochrome p450, putative [Arabidopsis thaliana]
  misc_feature (1)..(163): NCBI GI NO: 30693331 NR Description: cytochrome p450, putative [Arabidopsis thaliana]
  misc_feature (1)..(218): NCBI GI NO: 9587211 NR Description: cytochrome P450 [Vigna radiata]
  misc_feature (1)..(230): NCBI GI NO: 20520627 NR Description: putative cytochrome P450
  misc_feature (1)..(230): NCBI GI NO: 38567920 NR Description: OSJNBa0088I22.16
MIADRRSSGCARDDMLDALLSGNEGTRAKLSDDQIIDLLITLIYSGYETVSTTSMMAVKYLSDNPKALGQIRKEHLDIRKAKSPEDPLDWNDYKSMTFTKAVIYETLRLATVVNGLLRKTTHDVEMNGYVIPKGWRIYVYTREINYDPFLYPEPMVFNPWRWMETNLESHPHFMLFGGGARMCPGKEVGTVEIATFLHYFVTRYRWEEEGNNTISKFPRVAAPNGLHIRVQDY

SEQ ID NO: 35469 - protein, 193 aa, Zea mays subsp. mays
  peptide (1)..(193): Ceres Seq. ID no. 12436192
  misc_feature (1)..(103): NCBI GI NO: 27127269 NR Description: cytochrome P450
  misc_feature (1)..(83): NCBI GI NO: 18406372 NR Description: cytochrome p450, putative; protein id: At3g30180
  misc_feature (1)..(83): NCBI GI NO: 9294419 NR Description: cytochrome P450 [Arabidopsis thaliana]
  misc_feature (1)..(83): NCBI GI NO: 21536828 NR Description: cytochrome P450 homolog, putative
  misc_feature (1)..(103): NCBI GI NO: 5921933 NR Description: Cytochrome P450 85 (Dwarf protein)
  misc_feature (2)..(103): NCBI GI NO: 30693327 NR Description: cytochrome p450, putative [Arabidopsis thaliana]
  misc_feature (2)..(103): NCBI GI NO: 30693331 NR Description: cytochrome p450, putative [Arabidopsis thaliana]
  misc_feature (5)..(84): NCBI GI NO: 9587211 NR Description: cytochrome P450 [Vigna radiata]
  misc_feature (1)..(84): NCBI GI NO: 20520627 NR Description: putative cytochrome P450
  misc_feature (1)..(84): NCBI GI NO: 38567920 NR Description: OSJNBa0088I22.16
MALLLLLLAVLGVVLASSLLLRWNELRYSRRRGLPPGTMGWPLFGETTEFLKQGPSFMKQRRLRYGSLFRTHILGCPTVVCMEPGAEPAGAGQRGRRLRPGLPAVHARHPGAQQHRRRARPAPPRHAGRHARAHAATHDPRRAPPQDRRLHARPPPRLGRTPRRHPGDDQGDGFALGLSGRSLASLRAHTPTP

SEQ ID NO: 35470 - DNA, 2082 bp, Zea mays subsp. mays
  misc_feature (1)..(2082): Ceres Seq. ID no. 12436164
aagggaaacttttgaaaagctttttcaaaatttggagcaaggcactgaggcgagcgcgggtggccgccggcagcgaggaaggctactgttaggatcatctcgctacaaaatcgggttcccgagatggaggggaaggcggtagccgtcggttgtggtggcgccggcgtcgatccggcggatgatctcaagtacatctccgggctgagcaccattctcgtggccaccatccaggaagtgaaggaccaggtctcccagatggagttcatcttctgcagccagctcttcccgcacatccaggccaagtcgaagcttgtccaggcgcatctcgccgacacgatgaaggccagtgaggttgagtggaggaagacggaggctggcctggtgaagcagctggaggaggtcagccgtggtaagatgctcgcggaggagagattgctgcaactgggcacctctcttgaggagatgaagaggaagcttgtggattcggagcaattggctgcgaggcatgaggcagagaagaaacagcttctggggaggttggaggatgaaacgaggaaaggtgaggtggtatgtcagctccaaagggagattgaggagaaggacgctgaggtggtcagggagagagaggcacatcagcggctgctgcaggaatttgagcaattggctgcgaggcatgaatctgagaagaaacagcttctggggaggttggaggatgagatggggaatggtgaggtggtacgtcagctccagagggagattgaggagaaggccgctgaggtggtcagggagagagaggcacaccagcggctgcagcagcaggttgacctgaaggataagaatctgcttctggagcagagcaagcggagggacttgattgaggattacactcagctgaagacaaactacaagcatttgaagtctcagtacacctttcttcttgggaagattgaccagcatgaaggctccaagcctcctgaggacattcctgcagatagaagaaacactgaaagtcctccaagtaagaggaagttcaaagatttggagcacacaaacaaggagcgcatccaaatccttcccaacacaagggacctgaagaatgactctgctccaggtgccaaagcccaagctgcccaacacgctagttcagtcaggagtccaatcagaaactcacaccttgctgtgccatctcgcccaatgaatccattggcaaatcattctgccaacaattcaaaactacaagcttcaaccagtgtcgccagcccatgtctaaattggagggagacccgtgcacgcaaagaacaaggtgttgctgatccacacgatgatttccttgatacacctctggaagctgtcaagaataccatcaggaaccctgcaactcccgaagaagcacaggcacttgccgcctctcctcaagttatggatttcgacaattcagatgatgaaacccaagatctgaatattgcaactcaagccctccggcacatccccaatatgccagttcccaagcagcaaaacacaatatcggtacatccaccaaagaaagacatcaaatatagagaatcagtgagaaagaaagctgaccgggagaacctgaaaggtgttgagtgcaagcaatgcaagaagttttatgatgctgttcttcctggtggtcgtgcagatggcgatggtgcaggctctacaagcttacgatgtgagcaccacgatggtgtgtcaaggcatcggtacaggtacgcgccgcctctgacgccggaagggttttggaacattggtttcgaatcagaaatgtagcactacatcaagtagcaggaaaccttcagtgtcctcggtcaccccaagatattgtagcaatgactacgacaagttgcatgtcgctgctcaagttgcggaaatagtcattctgtgattaaggttgatggtaggcagtagctactgtgaatatgttggagatagaatgcactgtcagctatttacctttttgtggattacatcaagttgatcattttgtagcgaaccacctttaacataccattggaaagcaattcttttttatagaaaggagacatctgaataacagcttac

SEQ ID NO: 35471 - protein, 555 aa, Zea mays subsp. mays
  peptide (1)..(555): Ceres Seq. ID no. 12436165
  misc_feature (30)..(324): Pfam Name: Pfam Description:  Myosin tail
  misc_feature (68)..(555): NCBI GI NO: 30693587 NR Description: predicted protein [Arabidopsis thaliana]
  misc_feature (68)..(555): NCBI GI NO: 11357299 NR Description: gamma response I protein
  misc_feature (68)..(555): NCBI GI NO: 11357298 NR Description: gamma response I protein - Arabidopsis thaliana
  misc_feature (20)..(282): NCBI GI NO: 30693587 NR Description: predicted protein [Arabidopsis thaliana]
  misc_feature (20)..(282): NCBI GI NO: 11357298 NR Description: gamma response I protein - Arabidopsis thaliana
  misc_feature (20)..(282): NCBI GI NO: 11357299 NR Description: gamma response I protein
  misc_feature (73)..(460): NCBI GI NO: 437639 NR Description: [Plasmodium falciparum 3' end.], gene product
  misc_feature (73)..(460): NCBI GI NO: 23619293 NR Description: reticulocyte binding protein 2 homolog a
  misc_feature (73)..(460): NCBI GI NO: 13345187 NR Description: reticulocyte binding protein 2 homolog A
  misc_feature (65)..(308): NCBI GI NO: 34785442 NR Description: Unknown (protein for IMAGE:5605410) [Danio rerio]
MEGKAVAVGCGGAGVDPADDLKYISGLSTILVATIQEVKDQVSQMEFIFCSQLFPHIQAKSKLVQAHLADTMKASEVEWRKTEAGLVKQLEEVSRGKMLAEERLLQLGTSLEEMKRKLVDSEQLAARHEAEKKQLLGRLEDETRKGEVVCQLQREIEEKDAEVVREREAHQRLLQEFEQLAARHESEKKQLLGRLEDEMGNGEVVRQLQREIEEKAAEVVREREAHQRLQQQVDLKDKNLLLEQSKRRDLIEDYTQLKTNYKHLKSQYTFLLGKIDQHEGSKPPEDIPADRRNTESPPSKRKFKDLEHTNKERIQILPNTRDLKNDSAPGAKAQAAQHASSVRSPIRNSHLAVPSRPMNPLANHSANNSKLQASTSVASPCLNWRETRARKEQGVADPHDDFLDTPLEAVKNTIRNPATPEEAQALAASPQVMDFDNSDDETQDLNIATQALRHIPNMPVPKQQNTISVHPPKKDIKYRESVRKKADRENLKGVECKQCKKFYDAVLPGGRADGDGAGSTSLRCEHHDGVSRHRYRYAPPLTPEGFWNIGFESEM

SEQ ID NO: 35472 - protein, 511 aa, Zea mays subsp. mays
  peptide (1)..(511): Ceres Seq. ID no. 12436166
  misc_feature (1)..(280): Pfam Name: Pfam Description:  Myosin tail
  misc_feature (24)..(511): NCBI GI NO: 30693587 NR Description: predicted protein [Arabidopsis thaliana]
  misc_feature (24)..(511): NCBI GI NO: 11357299 NR Description: gamma response I protein
  misc_feature (24)..(511): NCBI GI NO: 11357298 NR Description: gamma response I protein - Arabidopsis thaliana
  misc_feature (1)..(238): NCBI GI NO: 30693587 NR Description: predicted protein [Arabidopsis thaliana]
  misc_feature (1)..(238): NCBI GI NO: 11357298 NR Description: gamma response I protein - Arabidopsis thaliana
  misc_feature (1)..(238): NCBI GI NO: 11357299 NR Description: gamma response I protein
  misc_feature (29)..(416): NCBI GI NO: 437639 NR Description: [Plasmodium falciparum 3' end.], gene product
  misc_feature (29)..(416): NCBI GI NO: 23619293 NR Description: reticulocyte binding protein 2 homolog a
  misc_feature (29)..(416): NCBI GI NO: 13345187 NR Description: reticulocyte binding protein 2 homolog A
  misc_feature (21)..(264): NCBI GI NO: 34785442 NR Description: Unknown (protein for IMAGE:5605410) [Danio rerio]
MEFIFCSQLFPHIQAKSKLVQAHLADTMKASEVEWRKTEAGLVKQLEEVSRGKMLAEERLLQLGTSLEEMKRKLVDSEQLAARHEAEKKQLLGRLEDETRKGEVVCQLQREIEEKDAEVVREREAHQRLLQEFEQLAARHESEKKQLLGRLEDEMGNGEVVRQLQREIEEKAAEVVREREAHQRLQQQVDLKDKNLLLEQSKRRDLIEDYTQLKTNYKHLKSQYTFLLGKIDQHEGSKPPEDIPADRRNTESPPSKRKFKDLEHTNKERIQILPNTRDLKNDSAPGAKAQAAQHASSVRSPIRNSHLAVPSRPMNPLANHSANNSKLQASTSVASPCLNWRETRARKEQGVADPHDDFLDTPLEAVKNTIRNPATPEEAQALAASPQVMDFDNSDDETQDLNIATQALRHIPNMPVPKQQNTISVHPPKKDIKYRESVRKKADRENLKGVECKQCKKFYDAVLPGGRADGDGAGSTSLRCEHHDGVSRHRYRYAPPLTPEGFWNIGFESEM

SEQ ID NO: 35473 - protein, 484 aa, Zea mays subsp. mays
  peptide (1)..(484): Ceres Seq. ID no. 12436167
  misc_feature (1)..(253): Pfam Name: Pfam Description:  Myosin tail
  misc_feature (1)..(484): NCBI GI NO: 30693587 NR Description: predicted protein [Arabidopsis thaliana]
  misc_feature (1)..(484): NCBI GI NO: 11357299 NR Description: gamma response I protein
  misc_feature (1)..(484): NCBI GI NO: 11357298 NR Description: gamma response I protein - Arabidopsis thaliana
  misc_feature (1)..(211): NCBI GI NO: 30693587 NR Description: predicted protein [Arabidopsis thaliana]
  misc_feature (1)..(211): NCBI GI NO: 11357298 NR Description: gamma response I protein - Arabidopsis thaliana
  misc_feature (1)..(211): NCBI GI NO: 11357299 NR Description: gamma response I protein
  misc_feature (2)..(389): NCBI GI NO: 437639 NR Description: [Plasmodium falciparum 3' end.], gene product
  misc_feature (2)..(389): NCBI GI NO: 23619293 NR Description: reticulocyte binding protein 2 homolog a
  misc_feature (2)..(389): NCBI GI NO: 13345187 NR Description: reticulocyte binding protein 2 homolog A
  misc_feature (1)..(237): NCBI GI NO: 34785442 NR Description: Unknown (protein for IMAGE:5605410) [Danio rerio]
MKASEVEWRKTEAGLVKQLEEVSRGKMLAEERLLQLGTSLEEMKRKLVDSEQLAARHEAEKKQLLGRLEDETRKGEVVCQLQREIEEKDAEVVREREAHQRLLQEFEQLAARHESEKKQLLGRLEDEMGNGEVVRQLQREIEEKAAEVVREREAHQRLQQQVDLKDKNLLLEQSKRRDLIEDYTQLKTNYKHLKSQYTFLLGKIDQHEGSKPPEDIPADRRNTESPPSKRKFKDLEHTNKERIQILPNTRDLKNDSAPGAKAQAAQHASSVRSPIRNSHLAVPSRPMNPLANHSANNSKLQASTSVASPCLNWRETRARKEQGVADPHDDFLDTPLEAVKNTIRNPATPEEAQALAASPQVMDFDNSDDETQDLNIATQALRHIPNMPVPKQQNTISVHPPKKDIKYRESVRKKADRENLKGVECKQCKKFYDAVLPGGRADGDGAGSTSLRCEHHDGVSRHRYRYAPPLTPEGFWNIGFESEM

SEQ ID NO: 35474 - DNA, 2211 bp, Zea mays subsp. mays
  misc_feature (1)..(2211): Ceres Seq. ID no. 12550712
  misc_feature (1132)..(1132): n is a, c, t, g, unknown, or other
acacacaaaccgccgccgccgctaccttcaccactgcggactgcaccagctgcccgccgactactccgtttctcttcctagtacattgccgcgtcgaaggcgaggtcctcagcagcgccggcggactccgctcgcacgccatactcagcctactccgtcttcccctgtctagcagacaccctcttcccctctccactcccaatcttatcgtcgcctccctcgacgtcgctgctgcctccacttcaccatggcgcttcacgccccggtcctcgttctgaaggactcgctgaagcgggagtctggcgcgaaggttcaccaagccaacatccaggcggccaaggctgtcgctgacatcatacgcactacattgggtcccagatccatgctgaaaatgcttctggatgctagtggaggtattgtggttactaatgatggtaatgccattttgagggaaatagacattgcacaccctgctgccaagtctatgatcgaactaagtcgtacacaggatgaagaagttggtgatggcactacatctgtcattgttctagctggagagatgctacatgttgcacaggcattcatcgacaagaactaccatccaactgttatttgccgagcatataccaaagcgcttgatgatgctattgctgtacttgacaaaattgcaatggctgttgatgtgaatgatcgtggggcaatgctaggccttgtgaagagctccattggtacgaaattcactggccagtttggtgaccttattgctgaccttgctattgatgctactacaacagcaggtgttgaccttggtcagggtatgcgtgaagttgatatcaagaaatacattaaagttgaaaaggttcctggtggtcagttggaggattctagagtccttaaaggagttatgatcaataaggatgtcgtggctcctgggaaaatgaggagaaagatagtaaacccccgtatcatcctgttggactgccctgttgagtataagaaaggagaaaatcagaccaacgctgagttgatgaaggaagaagattggcaggttctgttagagatggaggaagaatacataaagaacctgtgcggtcaaattctaaaattcaagcctgatttagtcataactganaaagggctcagtgatctcgctatccattatttgagcaaggctggggttagtgcaatccgtagacttaggaaaactgacaacaacaggattgctaaagcttgtggagcagttatagtgaacaggcctgaggagctccaagaatctgatgttggaacaagagctggcctgttcgaggttaagaagataggtgatgagttcttttcctttattgttgactgtaaagatcccaaggcatgtactgttctgttgaggggagcaagcaaggatgtattgaatgaagttgagagaaacctgcaggatgccatgtccgttgcaaggaacattttgaaaaatccaaaactccttcctggaggtggcgctacagagctgactgtatcagcaacactgaagcaaaagagttcttcagttgaaggtgtggaaaagtggccctatgaagctgctgctctagcatttgaggcaattccaaggactttggcccaaaattgcggtttgaatgttattaggataatgacacaacttcaaggaaagcatgctaatggtgaaaatgcgtgggttggcattgatggaaggactggtgatattgtcgatatgaaagagcgaaagatctgggattcctacagtgttaaagcacaaacgttcaagacagcaattgaggctgcttgcatgcttttgagaatcgatgacattgtcagcggtatcaagaagaagcaggctcctggagcctcagctcccaaagcaaccccaaattgaaactgagggcgatgctgacaatgagcagatgattccagagtagaggctgtggcgaacctgcactggcaaagttatttactagtgtcaaggtagcacttcgagcagagttcattttggtggttagccttagcttaaagatgcaccttgttttatatagtttgatgagtggtacgagggttttgggatccaggttttgagtgtggttgctgctcgttttgatttggactgatgaaaaagcagtgaaactagcctttatttatggctaactttgcctgttgtatgccgcaaatctactttttttcttggcaacgtctcgtttcgcacgatcc

SEQ ID NO: 35475 - protein, 544 aa, Zea mays subsp. mays
  peptide (1)..(544): Ceres Seq. ID no. 12550713
  misc_feature (33)..(173): Pfam Name: Pfam Description:  TCP-1/cpn60 chaperonin family
  misc_feature (3)..(542): NCBI GI NO: 15240317 NR Description: chaperonin gamma chain - like protein
  misc_feature (152)..(542): NCBI GI NO: 7441904 NR Description: probable chaperonin-containing TCP-1 complex gammachain F9D12
  misc_feature (31)..(173): NCBI GI NO: 7441904 NR Description: probable chaperonin-containing TCP-1 complex gammachain F9D12
  misc_feature (3)..(538): NCBI GI NO: 28881229 NR Description: probable chaperonin of the TCP1 ring complex
  misc_feature (4)..(539): NCBI GI NO: 631730 NR Description: matricin - mouse
  misc_feature (4)..(531): NCBI GI NO: 40018616 NR Description: chaperonin containing TCP1, subunit 3 (gamma)
  misc_feature (3)..(543): NCBI GI NO: 17066724 NR Description: CCT chaperonin gamma subunit
  misc_feature (4)..(531): NCBI GI NO: 6753320 NR Description: chaperonin subunit 3 (gamma) [Mus musculus]
  misc_feature (6)..(543): NCBI GI NO: 1079280 NR Description: chaperonin containing TCP-1 complex gamma chain -African clawed frog
  misc_feature (6)..(543): NCBI GI NO: 39850250 NR Description: Unknown (protein for MGC:76259)
  misc_feature (295)..(295): Xaa is any aa, unknown or other
MALHAPVLVLKDSLKRESGAKVHQANIQAAKAVADIIRTTLGPRSMLKMLLDASGGIVVTNDGNAILREIDIAHPAAKSMIELSRTQDEEVGDGTTSVIVLAGEMLHVAQAFIDKNYHPTVICRAYTKALDDAIAVLDKIAMAVDVNDRGAMLGLVKSSIGTKFTGQFGDLIADLAIDATTTAGVDLGQGMREVDIKKYIKVEKVPGGQLEDSRVLKGVMINKDVVAPGKMRRKIVNPRIILLDCPVEYKKGENQTNAELMKEEDWQVLLEMEEEYIKNLCGQILKFKPDLVITXKGLSDLAIHYLSKAGVSAIRRLRKTDNNRIAKACGAVIVNRPEELQESDVGTRAGLFEVKKIGDEFFSFIVDCKDPKACTVLLRGASKDVLNEVERNLQDAMSVARNILKNPKLLPGGGATELTVSATLKQKSSSVEGVEKWPYEAAALAFEAIPRTLAQNCGLNVIRIMTQLQGKHANGENAWVGIDGRTGDIVDMKERKIWDSYSVKAQTFKTAIEAACMLLRIDDIVSGIKKKQAPGASAPKATPN

SEQ ID NO: 35476 - protein, 499 aa, Zea mays subsp. mays
  peptide (1)..(499): Ceres Seq. ID no. 12550714
  misc_feature (1)..(128): Pfam Name: Pfam Description:  TCP-1/cpn60 chaperonin family
  misc_feature (1)..(497): NCBI GI NO: 15240317 NR Description: chaperonin gamma chain - like protein
  misc_feature (107)..(497): NCBI GI NO: 7441904 NR Description: probable chaperonin-containing TCP-1 complex gammachain F9D12
  misc_feature (1)..(128): NCBI GI NO: 7441904 NR Description: probable chaperonin-containing TCP-1 complex gammachain F9D12
  misc_feature (1)..(493): NCBI GI NO: 28881229 NR Description: probable chaperonin of the TCP1 ring complex
  misc_feature (1)..(494): NCBI GI NO: 631730 NR Description: matricin - mouse
  misc_feature (1)..(486): NCBI GI NO: 40018616 NR Description: chaperonin containing TCP1, subunit 3 (gamma)
  misc_feature (1)..(498): NCBI GI NO: 17066724 NR Description: CCT chaperonin gamma subunit
  misc_feature (1)..(486): NCBI GI NO: 6753320 NR Description: chaperonin subunit 3 (gamma) [Mus musculus]
  misc_feature (1)..(498): NCBI GI NO: 1079280 NR Description: chaperonin containing TCP-1 complex gamma chain -African clawed frog
  misc_feature (1)..(498): NCBI GI NO: 39850250 NR Description: Unknown (protein for MGC:76259)
  misc_feature (250)..(250): Xaa is any aa, unknown or other
MLKMLLDASGGIVVTNDGNAILREIDIAHPAAKSMIELSRTQDEEVGDGTTSVIVLAGEMLHVAQAFIDKNYHPTVICRAYTKALDDAIAVLDKIAMAVDVNDRGAMLGLVKSSIGTKFTGQFGDLIADLAIDATTTAGVDLGQGMREVDIKKYIKVEKVPGGQLEDSRVLKGVMINKDVVAPGKMRRKIVNPRIILLDCPVEYKKGENQTNAELMKEEDWQVLLEMEEEYIKNLCGQILKFKPDLVITXKGLSDLAIHYLSKAGVSAIRRLRKTDNNRIAKACGAVIVNRPEELQESDVGTRAGLFEVKKIGDEFFSFIVDCKDPKACTVLLRGASKDVLNEVERNLQDAMSVARNILKNPKLLPGGGATELTVSATLKQKSSSVEGVEKWPYEAAALAFEAIPRTLAQNCGLNVIRIMTQLQGKHANGENAWVGIDGRTGDIVDMKERKIWDSYSVKAQTFKTAIEAACMLLRIDDIVSGIKKKQAPGASAPKATPN

SEQ ID NO: 35477 - protein, 496 aa, Zea mays subsp. mays
  peptide (1)..(496): Ceres Seq. ID no. 12550715
  misc_feature (1)..(125): Pfam Name: Pfam Description:  TCP-1/cpn60 chaperonin family
  misc_feature (1)..(494): NCBI GI NO: 15240317 NR Description: chaperonin gamma chain - like protein
  misc_feature (104)..(494): NCBI GI NO: 7441904 NR Description: probable chaperonin-containing TCP-1 complex gammachain F9D12
  misc_feature (1)..(125): NCBI GI NO: 7441904 NR Description: probable chaperonin-containing TCP-1 complex gammachain F9D12
  misc_feature (1)..(490): NCBI GI NO: 28881229 NR Description: probable chaperonin of the TCP1 ring complex
  misc_feature (1)..(491): NCBI GI NO: 631730 NR Description: matricin - mouse
  misc_feature (1)..(483): NCBI GI NO: 40018616 NR Description: chaperonin containing TCP1, subunit 3 (gamma)
  misc_feature (1)..(495): NCBI GI NO: 17066724 NR Description: CCT chaperonin gamma subunit
  misc_feature (1)..(483): NCBI GI NO: 6753320 NR Description: chaperonin subunit 3 (gamma) [Mus musculus]
  misc_feature (1)..(495): NCBI GI NO: 1079280 NR Description: chaperonin containing TCP-1 complex gamma chain -African clawed frog
  misc_feature (1)..(495): NCBI GI NO: 39850250 NR Description: Unknown (protein for MGC:76259)
  misc_feature (247)..(247): Xaa is any aa, unknown or other
MLLDASGGIVVTNDGNAILREIDIAHPAAKSMIELSRTQDEEVGDGTTSVIVLAGEMLHVAQAFIDKNYHPTVICRAYTKALDDAIAVLDKIAMAVDVNDRGAMLGLVKSSIGTKFTGQFGDLIADLAIDATTTAGVDLGQGMREVDIKKYIKVEKVPGGQLEDSRVLKGVMINKDVVAPGKMRRKIVNPRIILLDCPVEYKKGENQTNAELMKEEDWQVLLEMEEEYIKNLCGQILKFKPDLVITXKGLSDLAIHYLSKAGVSAIRRLRKTDNNRIAKACGAVIVNRPEELQESDVGTRAGLFEVKKIGDEFFSFIVDCKDPKACTVLLRGASKDVLNEVERNLQDAMSVARNILKNPKLLPGGGATELTVSATLKQKSSSVEGVEKWPYEAAALAFEAIPRTLAQNCGLNVIRIMTQLQGKHANGENAWVGIDGRTGDIVDMKERKIWDSYSVKAQTFKTAIEAACMLLRIDDIVSGIKKKQAPGASAPKATPN

SEQ ID NO: 35478 - DNA, 1079 bp, Zea mays subsp. mays; identical to SEQ ID NO: 29539
  misc_feature (1)..(1079): Ceres Seq. ID no. 12402905

SEQ ID NO: 35479 - protein, 295 aa, Zea mays subsp. mays; identical to SEQ ID NO: 29540
  peptide (1)..(295): Ceres Seq. ID no. 12402906
  misc_feature (8)..(295): Pfam Name: Pfam Description:  Acetamidase/Formamidase family
  misc_feature (1)..(295): NCBI GI NO: 34909818 NR Description: putative formamidase
  misc_feature (1)..(295): NCBI GI NO: 14334654 NR Description: putative formamidase [Arabidopsis thaliana]
  misc_feature (1)..(295): NCBI GI NO: 18420071 NR Description: formamidase - like protein; protein id:At4g37560
  misc_feature (1)..(295): NCBI GI NO: 18420069 NR Description: formamidase - like protein; protein id:At4g37550
  misc_feature (1)..(295): NCBI GI NO: 21592429 NR Description: formamidase-like protein [Arabidopsis thaliana]
  misc_feature (1)..(202): NCBI GI NO: 7488106 NR Description: probable formamidase (EC 3
  misc_feature (210)..(295): NCBI GI NO: 7488106 NR Description: probable formamidase (EC 3
  misc_feature (4)..(295): NCBI GI NO: 19115927 NR Description: formamidase-like protein
  misc_feature (1)..(294): NCBI GI NO: 32421387 NR Description: hypothetical protein [Neurospora crassa]
  misc_feature (7)..(295): NCBI GI NO: 3913682 NR Description: Formamidase (Formamide amidohydrolase)

SEQ ID NO: 35480 - protein, 247 aa, Zea mays subsp. mays; identical to SEQ ID NO: 29541
  peptide (1)..(247): Ceres Seq. ID no. 12402907
  misc_feature (1)..(247): Pfam Name: Pfam Description:  Acetamidase/Formamidase family
  misc_feature (1)..(247): NCBI GI NO: 34909818 NR Description: putative formamidase
  misc_feature (1)..(247): NCBI GI NO: 14334654 NR Description: putative formamidase [Arabidopsis thaliana]
  misc_feature (1)..(247): NCBI GI NO: 18420071 NR Description: formamidase - like protein; protein id:At4g37560
  misc_feature (1)..(247): NCBI GI NO: 18420069 NR Description: formamidase - like protein; protein id:At4g37550
  misc_feature (1)..(247): NCBI GI NO: 21592429 NR Description: formamidase-like protein [Arabidopsis thaliana]
  misc_feature (1)..(154): NCBI GI NO: 7488106 NR Description: probable formamidase (EC 3
  misc_feature (162)..(247): NCBI GI NO: 7488106 NR Description: probable formamidase (EC 3
  misc_feature (1)..(247): NCBI GI NO: 19115927 NR Description: formamidase-like protein
  misc_feature (1)..(246): NCBI GI NO: 32421387 NR Description: hypothetical protein [Neurospora crassa]
  misc_feature (1)..(247): NCBI GI NO: 3913682 NR Description: Formamidase (Formamide amidohydrolase)

SEQ ID NO: 35481 - protein, 227 aa, Zea mays subsp. mays; identical to SEQ ID NO: 29542
  peptide (1)..(227): Ceres Seq. ID no. 12402908
  misc_feature (1)..(227): Pfam Name: Pfam Description:  Acetamidase/Formamidase family
  misc_feature (1)..(227): NCBI GI NO: 34909818 NR Description: putative formamidase
  misc_feature (1)..(227): NCBI GI NO: 14334654 NR Description: putative formamidase [Arabidopsis thaliana]
  misc_feature (1)..(227): NCBI GI NO: 18420071 NR Description: formamidase - like protein; protein id:At4g37560
  misc_feature (1)..(227): NCBI GI NO: 18420069 NR Description: formamidase - like protein; protein id:At4g37550
  misc_feature (1)..(227): NCBI GI NO: 21592429 NR Description: formamidase-like protein [Arabidopsis thaliana]
  misc_feature (1)..(134): NCBI GI NO: 7488106 NR Description: probable formamidase (EC 3
  misc_feature (142)..(227): NCBI GI NO: 7488106 NR Description: probable formamidase (EC 3
  misc_feature (1)..(227): NCBI GI NO: 19115927 NR Description: formamidase-like protein
  misc_feature (1)..(226): NCBI GI NO: 32421387 NR Description: hypothetical protein [Neurospora crassa]
  misc_feature (1)..(227): NCBI GI NO: 3913682 NR Description: Formamidase (Formamide amidohydrolase)

SEQ ID NO: 35482 - DNA, 1325 bp, Zea mays subsp. mays
  misc_feature (1)..(1325): Ceres Seq. ID no. 13587551
saacatcctaatcgaaaacatagttgtgttctatatagttcctctcactgctatcgctgctgttacaaccctggaaaacctggaggcgaagctgcccttcctgaagccagtggtggagcaaccagcaatcaagacggtttggaggcctaccttccccagattgcactcattgtgttcctcgcattgctacctactcttcttatgtttctctcgaaacaagaggggatcccttcgcagggccatgcagtcagggcggcatcgggaaagtatttctatttcatcgttttcaacgtcttcctttgctatacgcttggaagcacattgttcaaatctttgacgaccattatcaatcaccctgctgagattgtgaatatgcttgccaagagcctgcctggaagcgcaacgttcttcctcacgtttgtcgcgctgaagttcttggttggctatggccttgagctctctcgcctggttcctctcatcattttccacctgaaaaggaagtacctatgcaagacggaggaagaagtgagagcggcatgggctccagtggatctgggatataacaccaggataccaaatgacatgctcatcgcaacagttgttctgtgctactcagtcattgcgcctttgattattccgttcggtgttgcatactttgccctcggttggcttatagcaagaaatcagatcctgagagtttacgttcctagctacgaaagctacggacgaatgtggccacacatgcacacgaggatcatcgcggctctgatggtttaccagaccaccatgatcggcttcatctccctgaagaagttcgcctacgcgtccgttctcgtgcccctgcttccagccagcataatcttcgcctacgtctgccacatgcgcttctacccggcgttcgccaagactcccctggaggtggtggtgcggcacgacctgaaggagactccgaacatggaggccatctacaccgcgtacataccgccgtgcttgaagcctgataagctcgaagatctggacgctttcgaggacgcccagtcgcgcgccacctccagagtcccgtctatttagctgtgcacatcgttgacttccgcggaagacttgaagaaattctgttcacttgtcattacattcgtgtgggatttctgatggatttcaatgcttccacgttgaaccctctggacttgtttcaggataggaatctgatgtgaagaatgtacatatgctcgatctgtgtgtctgctgagcgtgtgtggatgtggactsctgtaggtaggtagatsctgtggatattggagggttctaagttgtcttcatttccatcc

SEQ ID NO: 35483 - protein, 356 aa, Zea mays subsp. mays
  peptide (1)..(356): Ceres Seq. ID no. 15220816
  misc_feature (47)..(338): Pfam Name: Pfam Description:  Domain of unknown function DUF221
  misc_feature (47)..(356): NCBI GI NO: 34393395 NR Description: putative ERD4 protein
  misc_feature (47)..(348): NCBI GI NO: 18397470 NR Description: ERD4 protein [Arabidopsis thaliana]
  misc_feature (47)..(348): NCBI GI NO: 15375406 NR Description: ERD4 protein [Arabidopsis thaliana]
  misc_feature (129)..(355): NCBI GI NO: 17863981 NR Description: unknown [Davidia involucrata]
  misc_feature (47)..(329): NCBI GI NO: 37537172 NR Description: unknown protein
  misc_feature (47)..(352): NCBI GI NO: 7487651 NR Description: hypothetical protein T4I9
  misc_feature (47)..(352): NCBI GI NO: 15236212 NR Description: ERD4 protein-related [Arabidopsis thaliana]
  misc_feature (47)..(329): NCBI GI NO: 15222569 NR Description: ERD4 protein-related [Arabidopsis thaliana]
  misc_feature (47)..(344): NCBI GI NO: 15234725 NR Description: ERD4 protein-related [Arabidopsis thaliana]
  misc_feature (47)..(332): NCBI GI NO: 15233100 NR Description: ERD4 protein-related [Arabidopsis thaliana]
  misc_feature (1)..(1): Xaa is any aa, unknown or other
XHPNRKHSCVLYSSSHCYRCCYNPGKPGGEAALPEASGGATSNQDGLEAYLPQIALIVFLALLPTLLMFLSKQEGIPSQGHAVRAASGKYFYFIVFNVFLCYTLGSTLFKSLTTIINHPAEIVNMLAKSLPGSATFFLTFVALKFLVGYGLELSRLVPLIIFHLKRKYLCKTEEEVRAAWAPVDLGYNTRIPNDMLIATVVLCYSVIAPLIIPFGVAYFALGWLIARNQILRVYVPSYESYGRMWPHMHTRIIAALMVYQTTMIGFISLKKFAYASVLVPLLPASIIFAYVCHMRFYPAFAKTPLEVVVRHDLKETPNMEAIYTAYIPPCLKPDKLEDLDAFEDAQSRATSRVPSI

SEQ ID NO: 35484 - protein, 289 aa, Zea mays subsp. mays
  peptide (1)..(289): Ceres Seq. ID no. 15220817
  misc_feature (1)..(271): Pfam Name: Pfam Description:  Domain of unknown function DUF221
  misc_feature (1)..(289): NCBI GI NO: 34393395 NR Description: putative ERD4 protein
  misc_feature (1)..(281): NCBI GI NO: 18397470 NR Description: ERD4 protein [Arabidopsis thaliana]
  misc_feature (1)..(281): NCBI GI NO: 15375406 NR Description: ERD4 protein [Arabidopsis thaliana]
  misc_feature (62)..(288): NCBI GI NO: 17863981 NR Description: unknown [Davidia involucrata]
  misc_feature (1)..(262): NCBI GI NO: 37537172 NR Description: unknown protein
  misc_feature (1)..(285): NCBI GI NO: 7487651 NR Description: hypothetical protein T4I9
  misc_feature (1)..(285): NCBI GI NO: 15236212 NR Description: ERD4 protein-related [Arabidopsis thaliana]
  misc_feature (1)..(262): NCBI GI NO: 15222569 NR Description: ERD4 protein-related [Arabidopsis thaliana]
  misc_feature (1)..(277): NCBI GI NO: 15234725 NR Description: ERD4 protein-related [Arabidopsis thaliana]
  misc_feature (1)..(265): NCBI GI NO: 15233100 NR Description: ERD4 protein-related [Arabidopsis thaliana]
MFLSKQEGIPSQGHAVRAASGKYFYFIVFNVFLCYTLGSTLFKSLTTIINHPAEIVNMLAKSLPGSATFFLTFVALKFLVGYGLELSRLVPLIIFHLKRKYLCKTEEEVRAAWAPVDLGYNTRIPNDMLIATVVLCYSVIAPLIIPFGVAYFALGWLIARNQILRVYVPSYESYGRMWPHMHTRIIAALMVYQTTMIGFISLKKFAYASVLVPLLPASIIFAYVCHMRFYPAFAKTPLEVVVRHDLKETPNMEAIYTAYIPPCLKPDKLEDLDAFEDAQSRATSRVPSI

SEQ ID NO: 35485 - protein, 232 aa, Zea mays subsp. mays
  peptide (1)..(232): Ceres Seq. ID no. 15220818
  misc_feature (1)..(214): Pfam Name: Pfam Description:  Domain of unknown function DUF221
  misc_feature (1)..(232): NCBI GI NO: 34393395 NR Description: putative ERD4 protein
  misc_feature (1)..(224): NCBI GI NO: 18397470 NR Description: ERD4 protein [Arabidopsis thaliana]
  misc_feature (1)..(224): NCBI GI NO: 15375406 NR Description: ERD4 protein [Arabidopsis thaliana]
  misc_feature (5)..(231): NCBI GI NO: 17863981 NR Description: unknown [Davidia involucrata]
  misc_feature (1)..(205): NCBI GI NO: 37537172 NR Description: unknown protein
  misc_feature (1)..(228): NCBI GI NO: 7487651 NR Description: hypothetical protein T4I9
  misc_feature (1)..(228): NCBI GI NO: 15236212 NR Description: ERD4 protein-related [Arabidopsis thaliana]
  misc_feature (1)..(205): NCBI GI NO: 15222569 NR Description: ERD4 protein-related [Arabidopsis thaliana]
  misc_feature (1)..(220): NCBI GI NO: 15234725 NR Description: ERD4 protein-related [Arabidopsis thaliana]
  misc_feature (1)..(208): NCBI GI NO: 15233100 NR Description: ERD4 protein-related [Arabidopsis thaliana]
MLAKSLPGSATFFLTFVALKFLVGYGLELSRLVPLIIFHLKRKYLCKTEEEVRAAWAPVDLGYNTRIPNDMLIATVVLCYSVIAPLIIPFGVAYFALGWLIARNQILRVYVPSYESYGRMWPHMHTRIIAALMVYQTTMIGFISLKKFAYASVLVPLLPASIIFAYVCHMRFYPAFAKTPLEVVVRHDLKETPNMEAIYTAYIPPCLKPDKLEDLDAFEDAQSRATSRVPSI

SEQ ID NO: 35486 - DNA, 1499 bp, Zea mays subsp. mays; identical to SEQ ID NO: 32380
  misc_feature (1)..(1499): Ceres Seq. ID no. 13580175

SEQ ID NO: 35487 - protein, 348 aa, Zea mays subsp. mays; identical to SEQ ID NO: 32381
  peptide (1)..(348): Ceres Seq. ID no. 13580176
  misc_feature (193)..(288): Pfam Name: Pfam Description:  Putative tRNA binding domain
  misc_feature (1)..(348): NCBI GI NO: 34907808 NR Description: similar to methionyl-tRNA synthetase
  misc_feature (1)..(348): NCBI GI NO: 18405465 NR Description: methionyl-tRNA synthetase -related
  misc_feature (1)..(348): NCBI GI NO: 25408718 NR Description: probable methionyl-tRNA synthetase
  misc_feature (96)..(348): NCBI GI NO: 15236350 NR Description: methionyl-tRNA synthetase - like protein
  misc_feature (16)..(347): NCBI GI NO: 4140277 NR Description: aminoacyl-tRNA synthetase cofactor
  misc_feature (89)..(348): NCBI GI NO: 12230649 NR Description: Probable methionyl-tRNA synthetase
  misc_feature (117)..(338): NCBI GI NO: 28302254 NR Description: Similar to small inducible cytokine subfamily E
  misc_feature (121)..(348): NCBI GI NO: 34860578 NR Description: endothelial monocyte activating polypeptide 2
  misc_feature (19)..(327): NCBI GI NO: 19115568 NR Description: putative Cofactor for methionyl-and glutamyl-tRNAsynthetases and
  misc_feature (157)..(348): NCBI GI NO: 26352830 NR Description: unnamed protein product [Mus musculus]

SEQ ID NO: 35488 - protein, 275 aa, Zea mays subsp. mays; identical to SEQ ID NO: 32382
  peptide (1)..(275): Ceres Seq. ID no. 13580177
  misc_feature (120)..(215): Pfam Name: Pfam Description:  Putative tRNA binding domain
  misc_feature (1)..(275): NCBI GI NO: 34907808 NR Description: similar to methionyl-tRNA synthetase
  misc_feature (1)..(275): NCBI GI NO: 18405465 NR Description: methionyl-tRNA synthetase -related
  misc_feature (1)..(275): NCBI GI NO: 25408718 NR Description: probable methionyl-tRNA synthetase
  misc_feature (23)..(275): NCBI GI NO: 15236350 NR Description: methionyl-tRNA synthetase - like protein
  misc_feature (1)..(274): NCBI GI NO: 4140277 NR Description: aminoacyl-tRNA synthetase cofactor
  misc_feature (16)..(275): NCBI GI NO: 12230649 NR Description: Probable methionyl-tRNA synthetase
  misc_feature (44)..(265): NCBI GI NO: 28302254 NR Description: Similar to small inducible cytokine subfamily E
  misc_feature (48)..(275): NCBI GI NO: 34860578 NR Description: endothelial monocyte activating polypeptide 2
  misc_feature (1)..(254): NCBI GI NO: 19115568 NR Description: putative Cofactor for methionyl-and glutamyl-tRNAsynthetases and
  misc_feature (84)..(275): NCBI GI NO: 26352830 NR Description: unnamed protein product [Mus musculus]

SEQ ID NO: 35489 - DNA, 2012 bp, Zea mays subsp. mays
  misc_feature (1)..(2012): Ceres Seq. ID no. 12391571
aaagaacgaagaaaccaagcagctaccatcatcatcagtccagcaacaatggcggcggcggaaccggtaccagtaccagtaccagtaccggcggcagctggcgggaccaacaataagatcaagacggtggtgctggtgcaggagaaccgctccttcgaccacatgctggggtggatgaagtcgctgaacccggacatcgacggcgtgacgggggccgagaccaaccacgtggacgcctccgacccggcctcccgcgccgtccgcttcagcgacggcgccgagtacgtggacccggacccgggccactccatgcaggccatctacgagcaggtgtacgggacgcccttcgtcgacgccgccacgacgcccgccaccccgccgggcgtcgccccctccatgtccggcttcgcgcagcaggccgagaaggagaggcccggcatgtccgccaccgtcatggccggcttccgccccgacgccgtgcccgtgtaccgggacctggtgcgggagttcgccgtgtgcgaccgctggttcgcgtccaacccggcgtccacgcagcccaaccggctgttcgtgcactccgccacctcccacggcctcgtcagcaacgacagcagggcgctggtggcgggcctcccgcagcggaccatcttcgacgcgctccacgacgagggcctctccttcggcgtctactaccagtacccgccgtccacgctattctaccggagcctccgccagctcaagtacgccgccagcttccacgccttcgacctccacttcgcgcgccactgccgggagggcaggctgcccagctacgtcgtcgtggagcagcgctacttcgacctccgcctcctcccggggaacgacgaccatccgtcccacgacgtggccgagggccagcgcttcgtcaaggaggtctacgaggcgctgcgctcgggcccgcagtggccccagacgctcctcgtcgtcacctacgacgagcacggcggcttctacgaccacgtgcccacgcccgcgggggccggcgtcgtgcccagccccgacggcatcgtcagcgccaagcccttctccttcgccttcgaccgcctcggcgtccgcgtcccggcgctgctcgtgtcgccctggatcgagcccgggaccgtgctgcacgggccaccgtcgggaccctgcccgacgtccgagttcgagcactcctccatcccggcaaccgtcaagaagctcttcaacctcaggagcttcctcaccaggcgcgacgcctgggccggcaccttcgactgcgtcctcacgcgcgacacgccgcgcaccgactgcccacgtacgtcactagtacttgctcatcagtagctagcgtgtaggaaggaacggacagacatggaactgatgatgatgatgtgcatgcagtcaccctgcccgagccagtgaagctgcggcggacggcggcggcggagcatgccccgctgtccgagttccaggaggagctggtgcagctcgccgcggtgctcaacggcgaccacaccaaggagtcgtacccgcaagggctcgtcgagggcatgacggtggcggaggcggccaggtactgcgtcgacgccttcaaggccttcttggacgagtgcgagaaatgcaaggaccgcggcgaggacggctcccacatccccacggtgaagccgacgacgacggggaaggagaaggacaagagcaagagcagcttcgcttccaagtcgctgtcctgccttccctgctgtgtccgtccctcttcctcgtgacctccctctccttctacacgcgatgcgcccacgactccaggcatcacaagttcccattcagaatcggtcgggtagtgaattttacagtgtgatacctcacttgtgtagattgattcattcctagtcatatgcatttgcattccgcattatattgattaaatattctaacgcataatagaaaggtggagtagatacagagaatcggtccgttcgcttgtcttgtttaatggaagtttaatggattgtttagtg

SEQ ID NO: 35490 - protein, 446 aa, Zea mays subsp. mays
  peptide (1)..(446): Ceres Seq. ID no. 12391572
  misc_feature (40)..(426): Pfam Name: Pfam Description:  Phosphoesterase family
  misc_feature (31)..(439): NCBI GI NO: 27573343 NR Description: putative phosphoesterase
  misc_feature (29)..(439): NCBI GI NO: 18396577 NR Description: expressed protein; protein id: At3g03530
  misc_feature (31)..(439): NCBI GI NO: 15228577 NR Description: unknown protein; protein id: At3g03520
  misc_feature (31)..(439): NCBI GI NO: 17529016 NR Description: unknown protein [Arabidopsis thaliana]
  misc_feature (40)..(439): NCBI GI NO: 15225806 NR Description: putative phospholipase C; protein id: At2g26870.1
  misc_feature (34)..(439): NCBI GI NO: 18396579 NR Description: putative phospholipase; protein id: At3g03540.1
  misc_feature (14)..(437): NCBI GI NO: 20161866 NR Description: B1139B11.7
  misc_feature (40)..(437): NCBI GI NO: 21703147 NR Description: At1g07230/F10K1_4 [Arabidopsis thaliana]
  misc_feature (40)..(437): NCBI GI NO: 15222342 NR Description: unknown protein; protein id: At1g07230.1
  misc_feature (37)..(439): NCBI GI NO: 34894016 NR Description: P0672D08.18
KERRNQAATIIISPATMAAAEPVPVPVPVPAAAGGTNNKIKTVVLVQENRSFDHMLGWMKSLNPDIDGVTGAETNHVDASDPASRAVRFSDGAEYVDPDPGHSMQAIYEQVYGTPFVDAATTPATPPGVAPSMSGFAQQAEKERPGMSATVMAGFRPDAVPVYRDLVREFAVCDRWFASNPASTQPNRLFVHSATSHGLVSNDSRALVAGLPQRTIFDALHDEGLSFGVYYQYPPSTLFYRSLRQLKYAASFHAFDLHFARHCREGRLPSYVVVEQRYFDLRLLPGNDDHPSHDVAEGQRFVKEVYEALRSGPQWPQTLLVVTYDEHGGFYDHVPTPAGAGVVPSPDGIVSAKPFSFAFDRLGVRVPALLVSPWIEPGTVLHGPPSGPCPTSEFEHSSIPATVKKLFNLRSFLTRRDAWAGTFDCVLTRDTPRTDCPRTSLVLAHQ

SEQ ID NO: 35491 - protein, 430 aa, Zea mays subsp. mays
  peptide (1)..(430): Ceres Seq. ID no. 12391573
  misc_feature (24)..(410): Pfam Name: Pfam Description:  Phosphoesterase family
  misc_feature (15)..(423): NCBI GI NO: 27573343 NR Description: putative phosphoesterase
  misc_feature (13)..(423): NCBI GI NO: 18396577 NR Description: expressed protein; protein id: At3g03530
  misc_feature (15)..(423): NCBI GI NO: 15228577 NR Description: unknown protein; protein id: At3g03520
  misc_feature (15)..(423): NCBI GI NO: 17529016 NR Description: unknown protein [Arabidopsis thaliana]
  misc_feature (24)..(423): NCBI GI NO: 15225806 NR Description: putative phospholipase C; protein id: At2g26870.1
  misc_feature (18)..(423): NCBI GI NO: 18396579 NR Description: putative phospholipase; protein id: At3g03540.1
  misc_feature (1)..(421): NCBI GI NO: 20161866 NR Description: B1139B11.7
  misc_feature (24)..(421): NCBI GI NO: 21703147 NR Description: At1g07230/F10K1_4 [Arabidopsis thaliana]
  misc_feature (24)..(421): NCBI GI NO: 15222342 NR Description: unknown protein; protein id: At1g07230.1
  misc_feature (21)..(423): NCBI GI NO: 34894016 NR Description: P0672D08.18
MAAAEPVPVPVPVPAAAGGTNNKIKTVVLVQENRSFDHMLGWMKSLNPDIDGVTGAETNHVDASDPASRAVRFSDGAEYVDPDPGHSMQAIYEQVYGTPFVDAATTPATPPGVAPSMSGFAQQAEKERPGMSATVMAGFRPDAVPVYRDLVREFAVCDRWFASNPASTQPNRLFVHSATSHGLVSNDSRALVAGLPQRTIFDALHDEGLSFGVYYQYPPSTLFYRSLRQLKYAASFHAFDLHFARHCREGRLPSYVVVEQRYFDLRLLPGNDDHPSHDVAEGQRFVKEVYEALRSGPQWPQTLLVVTYDEHGGFYDHVPTPAGAGVVPSPDGIVSAKPFSFAFDRLGVRVPALLVSPWIEPGTVLHGPPSGPCPTSEFEHSSIPATVKKLFNLRSFLTRRDAWAGTFDCVLTRDTPRTDCPRTSLVLAHQ

SEQ ID NO: 35492 - protein, 392 aa, Zea mays subsp. mays
  peptide (1)..(392): Ceres Seq. ID no. 12391574
  misc_feature (1)..(372): Pfam Name: Pfam Description:  Phosphoesterase family
  misc_feature (1)..(385): NCBI GI NO: 27573343 NR Description: putative phosphoesterase
  misc_feature (1)..(385): NCBI GI NO: 18396577 NR Description: expressed protein; protein id: At3g03530
  misc_feature (1)..(385): NCBI GI NO: 15228577 NR Description: unknown protein; protein id: At3g03520
  misc_feature (1)..(385): NCBI GI NO: 17529016 NR Description: unknown protein [Arabidopsis thaliana]
  misc_feature (1)..(385): NCBI GI NO: 15225806 NR Description: putative phospholipase C; protein id: At2g26870.1
  misc_feature (1)..(385): NCBI GI NO: 18396579 NR Description: putative phospholipase; protein id: At3g03540.1
  misc_feature (1)..(383): NCBI GI NO: 20161866 NR Description: B1139B11.7
  misc_feature (1)..(383): NCBI GI NO: 21703147 NR Description: At1g07230/F10K1_4 [Arabidopsis thaliana]
  misc_feature (1)..(383): NCBI GI NO: 15222342 NR Description: unknown protein; protein id: At1g07230.1
  misc_feature (1)..(385): NCBI GI NO: 34894016 NR Description: P0672D08.18
MLGWMKSLNPDIDGVTGAETNHVDASDPASRAVRFSDGAEYVDPDPGHSMQAIYEQVYGTPFVDAATTPATPPGVAPSMSGFAQQAEKERPGMSATVMAGFRPDAVPVYRDLVREFAVCDRWFASNPASTQPNRLFVHSATSHGLVSNDSRALVAGLPQRTIFDALHDEGLSFGVYYQYPPSTLFYRSLRQLKYAASFHAFDLHFARHCREGRLPSYVVVEQRYFDLRLLPGNDDHPSHDVAEGQRFVKEVYEALRSGPQWPQTLLVVTYDEHGGFYDHVPTPAGAGVVPSPDGIVSAKPFSFAFDRLGVRVPALLVSPWIEPGTVLHGPPSGPCPTSEFEHSSIPATVKKLFNLRSFLTRRDAWAGTFDCVLTRDTPRTDCPRTSLVLAHQ

SEQ ID NO: 35493 - DNA, 1083 bp, Zea mays subsp. mays
  misc_feature (1)..(1083): Ceres Seq. ID no. 12455027
  misc_feature (812)..(812): n is a, c, t, g, unknown, or other
attactctagcaaaccacgtcgtcgtaagatcagaacgtacgtgatgatggtgctacgttcgcagggaacgtgagaaggaacgagagggtccagctagactccaagatgccggccatcgacgcctccaagcttccctggaccagcctcggcaagagcccagagtcacggagagccatgatccagagcacgctcacgaccaacccgacactatcgctcgccgaaaccatcgtctgcaacacgttccaggaggtcgagtccgtggcgctggcccgcctccccgtaccggcggtcgccatcggcccgctggaggcgcccaagtcggtgtcgtcggcggcggcggccggccatttctgggcgcaagacgaggcctgcctccgctggctcgacgcgcaggctcccggctcggtcgtgtacgtggcgttcgggagcctgacgttgttcgacgcggaacggctccaggagctggcagacgggctggcgctcacggggcggccgttcctgtgggtggtccggccgaacttcgccgacggcgtcggcgagcgctggctcgacgggttccggcgccgcgttggagaaggcaggggcctggtcgtcggctgggctccccagcagcgcgtgctcgcgcacccctcggtggcgtgcttcgtcacgcactgcgggtggaactccaccatggaaggggtgcggcacggcgtcccgttcctttgctggccctacttcgccgaccagttcctgaaccagagctacatctgcgacctgtggggcgtcgggttgaaggtgtgcgccgacgccgacgagaggggcgttgtcnccaaggaggagatcagggacaaggtggcgcggctgcttggggacgaggcgatcaaggcgaggacggtggccttgaagagcgcagcgtgcgccagcgtcgcggacggagggtcctcgcaccaggatttgctcaagttagtgaatctgctgagagagaaatagcctacagcatgtcagaaatgtttttcagaagttgagtggttatatattcatcagtagcacagacgtgaagaaaataaaagtagatgtgcagacatgcattgtttcaggcg

SEQ ID NO: 35494 - protein, 288 aa, Zea mays subsp. mays
  peptide (1)..(288): Ceres Seq. ID no. 12455028
  misc_feature (1)..(287): NCBI GI NO: 21326126 NR Description: putative glucosyl transferase [Sorghum bicolor]
  misc_feature (1)..(288): NCBI GI NO: 21326127 NR Description: putative glucosyl transferase [Sorghum bicolor]
  misc_feature (1)..(288): NCBI GI NO: 13236653 NR Description: putative glucosyltransferase [Oryza sativa]
  misc_feature (1)..(287): NCBI GI NO: 21326128 NR Description: putative glucosyl transferase [Sorghum bicolor]
  misc_feature (1)..(288): NCBI GI NO: 13236650 NR Description: putative glucosyltransferase [Oryza sativa]
  misc_feature (1)..(288): NCBI GI NO: 21326124 NR Description: putative glucosyl transferase [Sorghum bicolor]
  misc_feature (1)..(287): NCBI GI NO: 21326123 NR Description: putative glucosyl transferase [Sorghum bicolor]
  misc_feature (1)..(287): NCBI GI NO: 13236659 NR Description: putative glucosyltransferase [Oryza sativa]
  misc_feature (1)..(286): NCBI GI NO: 21326125 NR Description: putative glucosyl transferase [Sorghum bicolor]
  misc_feature (1)..(287): NCBI GI NO: 13236656 NR Description: putative glucosyltransferase [Oryza sativa]
  misc_feature (236)..(236): Xaa is any aa, unknown or other
MPAIDASKLPWTSLGKSPESRRAMIQSTLTTNPTLSLAETIVCNTFQEVESVALARLPVPAVAIGPLEAPKSVSSAAAAGHFWAQDEACLRWLDAQAPGSVVYVAFGSLTLFDAERLQELADGLALTGRPFLWVVRPNFADGVGERWLDGFRRRVGEGRGLVVGWAPQQRVLAHPSVACFVTHCGWNSTMEGVRHGVPFLCWPYFADQFLNQSYICDLWGVGLKVCADADERGVVXKEEIRDKVARLLGDEAIKARTVALKSAACASVADGGSSHQDLLKLVNLLREK

SEQ ID NO: 35495 - protein, 265 aa, Zea mays subsp. mays
  peptide (1)..(265): Ceres Seq. ID no. 12455029
  misc_feature (1)..(264): NCBI GI NO: 21326126 NR Description: putative glucosyl transferase [Sorghum bicolor]
  misc_feature (1)..(265): NCBI GI NO: 21326127 NR Description: putative glucosyl transferase [Sorghum bicolor]
  misc_feature (1)..(265): NCBI GI NO: 13236653 NR Description: putative glucosyltransferase [Oryza sativa]
  misc_feature (1)..(264): NCBI GI NO: 21326128 NR Description: putative glucosyl transferase [Sorghum bicolor]
  misc_feature (1)..(265): NCBI GI NO: 13236650 NR Description: putative glucosyltransferase [Oryza sativa]
  misc_feature (1)..(265): NCBI GI NO: 21326124 NR Description: putative glucosyl transferase [Sorghum bicolor]
  misc_feature (1)..(264): NCBI GI NO: 21326123 NR Description: putative glucosyl transferase [Sorghum bicolor]
  misc_feature (1)..(264): NCBI GI NO: 13236659 NR Description: putative glucosyltransferase [Oryza sativa]
  misc_feature (1)..(263): NCBI GI NO: 21326125 NR Description: putative glucosyl transferase [Sorghum bicolor]
  misc_feature (1)..(264): NCBI GI NO: 13236656 NR Description: putative glucosyltransferase [Oryza sativa]
  misc_feature (213)..(213): Xaa is any aa, unknown or other
MIQSTLTTNPTLSLAETIVCNTFQEVESVALARLPVPAVAIGPLEAPKSVSSAAAAGHFWAQDEACLRWLDAQAPGSVVYVAFGSLTLFDAERLQELADGLALTGRPFLWVVRPNFADGVGERWLDGFRRRVGEGRGLVVGWAPQQRVLAHPSVACFVTHCGWNSTMEGVRHGVPFLCWPYFADQFLNQSYICDLWGVGLKVCADADERGVVXKEEIRDKVARLLGDEAIKARTVALKSAACASVADGGSSHQDLLKLVNLLREK

SEQ ID NO: 35496 - DNA, 635 bp, Zea mays subsp. mays
  misc_feature (1)..(635): Ceres Seq. ID no. 12378559
gtgagtgctcgcggctttcccgtcttgtcccttctctctcttctctccttctccttgcttcagaaacgcaccagagagctctcggaccggattgaagtgcgccgcccgtgagctctcggccgacgctgggaacttgagcagactgggcgagcaccaggaaatttgcgccgtgggagcggtggatggacctccgggaggcgtccgtctgccacgcccacgacgagctgctggcgctgagctccgccgcggcggcagccacggcggccgaggacttcctccggtggcagttccccgagtccccgcgcgggaaagggtggtggtcggcggcgcggcagctcgtggaagacgcctggcgcagcctcggcgaggccaagaacgcggcgaggctcatggacaacgtcgtgctctgcgagttcttcaccacctggatgattctgacgcacgcttaactgaaggcgcaatgctgatggcgacgcccctgcctctttttgcaacttgttattgctccagtacttgtgcttcaatttcattcgatttctgtgtgcacatttgaataagtggttctttgctggtacaaatggaaatgacctgatccgcctgtgtcgataagattgtaataagtggttctttgctcc

SEQ ID NO: 35497 - protein, 88 aa, Zea mays subsp. mays
  peptide (1)..(88): Ceres Seq. ID no. 12378560
  misc_feature (1)..(85): NCBI GI NO: 34895982 NR Description: P0011G08.33
MDLREASVCHAHDELLALSSAAAAATAAEDFLRWQFPESPRGKGWWSAARQLVEDAWRSLGEAKNAARLMDNVVLCEFFTTWMILTHA

SEQ ID NO: 35498 - DNA, 1718 bp, Zea mays subsp. mays
  misc_feature (1)..(1718): Ceres Seq. ID no. 12391622
atgcgaacaccttgcagtgagtgacacacctcctgctcttccatacgcctccagtagtccagtgcagcctgagctgagctgcactgaggtacgagtagctcacgacaccactcggtgataaactaatggcgtcggcctccgccgctcccgcgccggacagggaggagattgtgttcctggacgtggagacgtcaaccccgccgtgcgtgctcctcgagttcggtgccgtagtcgtgtgctcgcgcaggctcgtggacgtctcctccttcgccacgctcgtgcggcccgcgaacctcgacgcgctcccggacccgaccgcgcggagcaacggcatcacgcgcggcaccctcgctgacgcgccgccgttccgcgacgtcgccgacatggtctacgacgtcctgcacggtgggtgtaggtgtagctagtgctgcgcctgcgcgcccccgcggcctcactcgaccacatgcatgggagggtgtgggcagggcacaacatcgtgcacttcgattccatgataatcatggacgcgttcgccgagattgggcgaccccctcctcaacccaaggccatgatcgacacccttccgttgcttacccagtgtttcgggccgagagcaggggacatgaagctggcaagcttggcaaactattttggtctagggaagcaaaggcacaggagcctggatgatgtgaaaatgaatattgacgttttcaagaactgtgctacagtcctgttcctggaggaaagccttcgaggtgtgcgtgtgcctaccgttcagaacatgtcgtcggggggtgcaacaatcagaacccaaggaataacaagtgatcctgcaccgaacagggataatcccaacgagtcgttgctggtgggatcgtccactgtgcatgtggaggaaatgatgctagacaccactgtcactgtgcagacggatacaaggagctcaggtgccttttctgggttcgttgagctagacgacgtttcaacggagagtatcaagatctcagctccgctgttcctacgcccgttcggtccgagagcaatcgtccagcacaagggttccccgctccagctcatctgtccaggtctggaagtcctctgggtcaacacaaaggggttcccaaacagcccacatcgaccaaaggtgggcataaaggtcgacatacctgagaaccttagtaaggtactagggttttgcgacgatctagcgcagagctcgtcgtcgtcgccaggaccaggagcaatatgcagtaattccagatggaaatccctgattgagagagacgcggatcggcgtccaacggtctggctgaagattcctacctttggcagtggcgacaccgcagcctgccggacacatgtatacgaaaaggagtgcgacggtgtcgttccaaggcttgtttccgaaagggtcgatccatcggaactggcctcgatgcttcaagggaacaaggtggtggatgcgttcgtctcggtggaaacattcgaccactaccaaagcgctggcattcggttggttgccaataggctggatgtgcacttcaaaaggcaacagcaggcctagctagttccttatggtgctctccggtcaggccgaggctggattgaaggggattgacccatccaattctcctgtgattctcttgttaccgaatcgatccaggactatataaataagtaagtttatgtcgtctccgtatgtgcttgcaaaacttccg

SEQ ID NO: 35499 - protein, 366 aa, Zea mays subsp. mays
  peptide (1)..(366): Ceres Seq. ID no. 12391623
  misc_feature (122)..(361): NCBI GI NO: 37534222 NR Description: putative exonuclease
  misc_feature (1)..(133): NCBI GI NO: 37534222 NR Description: putative exonuclease
  misc_feature (195)..(359): NCBI GI NO: 37534220 NR Description: putative exonuclease
  misc_feature (1)..(95): NCBI GI NO: 37534220 NR Description: putative exonuclease
  misc_feature (139)..(359): NCBI GI NO: 30697522 NR Description: exonuclease protein family [Arabidopsis thaliana]
  misc_feature (1)..(149): NCBI GI NO: 30697522 NR Description: exonuclease protein family [Arabidopsis thaliana]
  misc_feature (113)..(356): NCBI GI NO: 15240840 NR Description: exonuclease-like protein; protein id: At5g07710.1
  misc_feature (1)..(96): NCBI GI NO: 15240840 NR Description: exonuclease-like protein; protein id: At5g07710.1
  misc_feature (139)..(359): NCBI GI NO: 9757860 NR Description: exonuclease-like protein [Arabidopsis thaliana]
  misc_feature (1)..(96): NCBI GI NO: 9757860 NR Description: exonuclease-like protein [Arabidopsis thaliana]
MHGRVWAGHNIVHFDSMIIMDAFAEIGRPPPQPKAMIDTLPLLTQCFGPRAGDMKLASLANYFGLGKQRHRSLDDVKMNIDVFKNCATVLFLEESLRGVRVPTVQNMSSGGATIRTQGITSDPAPNRDNPNESLLVGSSTVHVEEMMLDTTVTVQTDTRSSGAFSGFVELDDVSTESIKISAPLFLRPFGPRAIVQHKGSPLQLICPGLEVLWVNTKGFPNSPHRPKVGIKVDIPENLSKVLGFCDDLAQSSSSSPGPGAICSNSRWKSLIERDADRRPTVWLKIPTFGSGDTAACRTHVYEKECDGVVPRLVSERVDPSELASMLQGNKVVDAFVSVETFDHYQSAGIRLVANRLDVHFKRQQQA

SEQ ID NO: 35500 - protein, 350 aa, Zea mays subsp. mays
  peptide (1)..(350): Ceres Seq. ID no. 12391624
  misc_feature (106)..(345): NCBI GI NO: 37534222 NR Description: putative exonuclease
  misc_feature (1)..(117): NCBI GI NO: 37534222 NR Description: putative exonuclease
  misc_feature (179)..(343): NCBI GI NO: 37534220 NR Description: putative exonuclease
  misc_feature (1)..(79): NCBI GI NO: 37534220 NR Description: putative exonuclease
  misc_feature (123)..(343): NCBI GI NO: 30697522 NR Description: exonuclease protein family [Arabidopsis thaliana]
  misc_feature (1)..(133): NCBI GI NO: 30697522 NR Description: exonuclease protein family [Arabidopsis thaliana]
  misc_feature (97)..(340): NCBI GI NO: 15240840 NR Description: exonuclease-like protein; protein id: At5g07710.1
  misc_feature (1)..(80): NCBI GI NO: 15240840 NR Description: exonuclease-like protein; protein id: At5g07710.1
  misc_feature (123)..(343): NCBI GI NO: 9757860 NR Description: exonuclease-like protein [Arabidopsis thaliana]
  misc_feature (1)..(80): NCBI GI NO: 9757860 NR Description: exonuclease-like protein [Arabidopsis thaliana]
MIIMDAFAEIGRPPPQPKAMIDTLPLLTQCFGPRAGDMKLASLANYFGLGKQRHRSLDDVKMNIDVFKNCATVLFLEESLRGVRVPTVQNMSSGGATIRTQGITSDPAPNRDNPNESLLVGSSTVHVEEMMLDTTVTVQTDTRSSGAFSGFVELDDVSTESIKISAPLFLRPFGPRAIVQHKGSPLQLICPGLEVLWVNTKGFPNSPHRPKVGIKVDIPENLSKVLGFCDDLAQSSSSSPGPGAICSNSRWKSLIERDADRRPTVWLKIPTFGSGDTAACRTHVYEKECDGVVPRLVSERVDPSELASMLQGNKVVDAFVSVETFDHYQSAGIRLVANRLDVHFKRQQQA

SEQ ID NO: 35501 - protein, 347 aa, Zea mays subsp. mays
  peptide (1)..(347): Ceres Seq. ID no. 12391625
  misc_feature (103)..(342): NCBI GI NO: 37534222 NR Description: putative exonuclease
  misc_feature (1)..(114): NCBI GI NO: 37534222 NR Description: putative exonuclease
  misc_feature (176)..(340): NCBI GI NO: 37534220 NR Description: putative exonuclease
  misc_feature (1)..(76): NCBI GI NO: 37534220 NR Description: putative exonuclease
  misc_feature (120)..(340): NCBI GI NO: 30697522 NR Description: exonuclease protein family [Arabidopsis thaliana]
  misc_feature (1)..(130): NCBI GI NO: 30697522 NR Description: exonuclease protein family [Arabidopsis thaliana]
  misc_feature (94)..(337): NCBI GI NO: 15240840 NR Description: exonuclease-like protein; protein id: At5g07710.1
  misc_feature (1)..(77): NCBI GI NO: 15240840 NR Description: exonuclease-like protein; protein id: At5g07710.1
  misc_feature (120)..(340): NCBI GI NO: 9757860 NR Description: exonuclease-like protein [Arabidopsis thaliana]
  misc_feature (1)..(77): NCBI GI NO: 9757860 NR Description: exonuclease-like protein [Arabidopsis thaliana]
MDAFAEIGRPPPQPKAMIDTLPLLTQCFGPRAGDMKLASLANYFGLGKQRHRSLDDVKMNIDVFKNCATVLFLEESLRGVRVPTVQNMSSGGATIRTQGITSDPAPNRDNPNESLLVGSSTVHVEEMMLDTTVTVQTDTRSSGAFSGFVELDDVSTESIKISAPLFLRPFGPRAIVQHKGSPLQLICPGLEVLWVNTKGFPNSPHRPKVGIKVDIPENLSKVLGFCDDLAQSSSSSPGPGAICSNSRWKSLIERDADRRPTVWLKIPTFGSGDTAACRTHVYEKECDGVVPRLVSERVDPSELASMLQGNKVVDAFVSVETFDHYQSAGIRLVANRLDVHFKRQQQA

SEQ ID NO: 35502 - DNA, 863 bp, Zea mays subsp. mays
  misc_feature (1)..(863): Ceres Seq. ID no. 12419219
  misc_feature (814)..(814): n is a, c, t, g, unknown, or other
  misc_feature (857)..(857): n is a, c, t, g, unknown, or other
  misc_feature (488)..(488): n is a, c, t, g, unknown, or other
  misc_feature (858)..(858): n is a, c, t, g, unknown, or other
accaaaccgcttcgcttgctcctcagctccctgtcgcacacaccttacgccgggtaggcaggagcaggactcccactgtcccaccgagccagaggccctccgatccgagcgagcaggggcgccaccgtctccaatggctcggccacagcaacggtaccgcggcgtgcggcaacgccactggggctcctgggtctccgatatccgccaccctctcctgaagacgaggatctggctgggcaccttcgagacggccgaggacgcggcgcgcgcctacgacgaggcggcgcgcatcatgtgcggccctcgcgtgcgcaccaacttccccgaggacgccgccgccgacggacaggggcagccggccgcgacggcgcttctctcccccgcgctcgtcgccaagctccaccgctttcaaccttgcgtccgtgcaggcggcgcgcggcagggccgatgactccgcggcagccgccgcctcggcgcccgccgtgctngcacgcatcgcgccgatgcctgccagcaatgccagcatgcgaatcgcccccttgacgtcggcggctgtggctgcggggcactggagcggcgactttctcgaggagcagtacgtggaccagatgatcgaggagcttctagactccaacttctctgtggagatctactagtttcacccgactcctctgctccgtctcatctctctgtttggtttcgtcagctcagctcagctagggagtgtagtgagttagtagtgagttagtacagtagtatcattagccatgccaggatgaacttgaggtttctttggttagactcttgagcagtntgatgtgtatacggtagcgtcgtcagagcataaaattttttcnnctgcc

SEQ ID NO: 35503 - protein, 149 aa, Zea mays subsp. mays
  peptide (1)..(149): Ceres Seq. ID no. 12419220
  misc_feature (49)..(108): Pfam Name: Pfam Description:  AP2 domain
  misc_feature (45)..(135): NCBI GI NO: 18650662 NR Description: ethylene response factor 1
  misc_feature (45)..(135): NCBI GI NO: 15238727 NR Description: ethylene-responsive element - like protein
  misc_feature (45)..(135): NCBI GI NO: 131754 NR Description: PPLZ02 PROTEIN
  misc_feature (51)..(149): NCBI GI NO: 38343976 NR Description: OSJNBb0022F16.15
  misc_feature (50)..(108): NCBI GI NO: 15218134 NR Description: putative ethylene responsive element
  misc_feature (50)..(133): NCBI GI NO: 15238976 NR Description: putative protein; protein id: At5g11190.1
  misc_feature (19)..(125): NCBI GI NO: 37572971 NR Description: AP2-domain DRE binding factor DBF1
  misc_feature (50)..(108): NCBI GI NO: 21553845 NR Description: putative ethylene responsive element
  misc_feature (50)..(133): NCBI GI NO: 15239413 NR Description: AP2 domain containing protein
  misc_feature (41)..(133): NCBI GI NO: 21908036 NR Description: DRE binding factor 1 [Zea mays]
PNRFACSSAPCRTHLTPGRQEQDSHCPTEPEALRSERAGAPPSPMARPQQRYRGVRQRHWGSWVSDIRHPLLKTRIWLGTFETAEDAARAYDEAARIMCGPRVRTNFPEDAAADGQGQPAATALLSPALVAKLHRFQPCVRAGGARQGR

SEQ ID NO: 35504 - protein, 105 aa, Zea mays subsp. mays
  peptide (1)..(105): Ceres Seq. ID no. 12419221
  misc_feature (5)..(64): Pfam Name: Pfam Description:  AP2 domain
  misc_feature (1)..(91): NCBI GI NO: 18650662 NR Description: ethylene response factor 1
  misc_feature (1)..(91): NCBI GI NO: 15238727 NR Description: ethylene-responsive element - like protein
  misc_feature (1)..(91): NCBI GI NO: 131754 NR Description: PPLZ02 PROTEIN
  misc_feature (7)..(105): NCBI GI NO: 38343976 NR Description: OSJNBb0022F16.15
  misc_feature (6)..(64): NCBI GI NO: 15218134 NR Description: putative ethylene responsive element
  misc_feature (6)..(89): NCBI GI NO: 15238976 NR Description: putative protein; protein id: At5g11190.1
  misc_feature (1)..(81): NCBI GI NO: 37572971 NR Description: AP2-domain DRE binding factor DBF1
  misc_feature (6)..(64): NCBI GI NO: 21553845 NR Description: putative ethylene responsive element
  misc_feature (6)..(89): NCBI GI NO: 15239413 NR Description: AP2 domain containing protein
  misc_feature (1)..(89): NCBI GI NO: 21908036 NR Description: DRE binding factor 1 [Zea mays]
MARPQQRYRGVRQRHWGSWVSDIRHPLLKTRIWLGTFETAEDAARAYDEAARIMCGPRVRTNFPEDAAADGQGQPAATALLSPALVAKLHRFQPCVRAGGARQGR

SEQ ID NO: 35505 - DNA, 1161 bp, Zea mays subsp. mays
  misc_feature (1)..(1161): Ceres Seq. ID no. 13587719
catcgagacacacacagaacttctcctgtcggcctactaatacagctagctagctgccctcttaggtatactgtgatggccacaaccttgtcctccacagtagtagttgcacttggtgcacctctcttcttgctccttgtaacgtgtggctcgtgcgcgaggccggtgagctttaacgcctccgacctcaccgccgatcccggctgggatgctgccagggccacctggtacggtgcgcccaccggcgccggccctgatgacgacggtggtgcctgtggattcaagaacgtgaatctgccgccgttctcggcaatgacgtcgtgcggcaacgagcccctgttcaaggacggcaagggctgcggctcctgctaccagatacgatgccaaaaccacccggcctgctccggcaacccagagacggtgatcatcactgacatgaactactaccccgtggccaagtaccacttcgacctcagcggcacggcgttcggcgccatggccaagcccggccgcaacgacgagctccgccacgccggcatcatcgacatccagttcaagagggtgccctgcaactaccccgggcagaaggtgacgttccacgtcgaggagggctccaaccccgtctacttcgcggtgctggtcgagttcgaagacggcgacggcgacgcggtgcaggtggacctcatggaggccaactctgcgtcgtggacgccgatgcgcgagtcctggggatccatctggaggctcgactccggccaccgcctcaccgcgccattctccctgcgcattacgaacgagtccggcaagacgctggtggctgaccatgtcatccccgccaactgggtgcccaacacctactaccgttctatcgtccagtattagccgctcccagctgctgcgccggccggataataatatacaattctgtgtcattgtgctttactattagtttggtattagtattgtatttctgcatgggactgatgaggcacagagctgaagtgaggtgcctcactccattgctaatttgctactaggtgttaagttggtgtgcggcttcagggagttgaagactgggaagtggaggaagcagtgctttttcccgcccattgtcgtgaatgcatgtaccagtgcgattaagattatataaattatattgac

SEQ ID NO: 35506 - protein, 293 aa, Zea mays subsp. mays
  peptide (1)..(293): Ceres Seq. ID no. 13587720
  misc_feature (197)..(278): Pfam Name: Pfam Description:  Pollen allergen
  misc_feature (26)..(293): NCBI GI NO: 14193773 NR Description: beta-expansin 7 [Zea mays]
  misc_feature (26)..(293): NCBI GI NO: 37536760 NR Description: beta-expansin EXPB3
  misc_feature (28)..(293): NCBI GI NO: 14330330 NR Description: beta expansin B3 [Festuca pratensis]
  misc_feature (26)..(293): NCBI GI NO: 37536756 NR Description: beta-expansin EXPB6
  misc_feature (57)..(293): NCBI GI NO: 8118432 NR Description: beta-expansin [Oryza sativa]
  misc_feature (26)..(293): NCBI GI NO: 14330328 NR Description: beta expansin B2 [Festuca pratensis]
  misc_feature (56)..(293): NCBI GI NO: 37536762 NR Description: beta-expansin EXPB4
  misc_feature (58)..(293): NCBI GI NO: 8118425 NR Description: beta-expansin [Oryza sativa]
  misc_feature (57)..(293): NCBI GI NO: 14193775 NR Description: beta-expansin 8 [Zea mays]
  misc_feature (26)..(293): NCBI GI NO: 14193771 NR Description: beta-expansin 6 [Zea mays]
HRDTHRTSPVGLLIQLASCPLRYTVMATTLSSTVVVALGAPLFLLLVTCGSCARPVSFNASDLTADPGWDAARATWYGAPTGAGPDDDGGACGFKNVNLPPFSAMTSCGNEPLFKDGKGCGSCYQIRCQNHPACSGNPETVIITDMNYYPVAKYHFDLSGTAFGAMAKPGRNDELRHAGIIDIQFKRVPCNYPGQKVTFHVEEGSNPVYFAVLVEFEDGDGDAVQVDLMEANSASWTPMRESWGSIWRLDSGHRLTAPFSLRITNESGKTLVADHVIPANWVPNTYYRSIVQY

SEQ ID NO: 35507 - protein, 268 aa, Zea mays subsp. mays
  peptide (1)..(268): Ceres Seq. ID no. 13587721
  misc_feature (172)..(253): Pfam Name: Pfam Description:  Pollen allergen
  misc_feature (1)..(268): NCBI GI NO: 14193773 NR Description: beta-expansin 7 [Zea mays]
  misc_feature (1)..(268): NCBI GI NO: 37536760 NR Description: beta-expansin EXPB3
  misc_feature (3)..(268): NCBI GI NO: 14330330 NR Description: beta expansin B3 [Festuca pratensis]
  misc_feature (1)..(268): NCBI GI NO: 37536756 NR Description: beta-expansin EXPB6
  misc_feature (32)..(268): NCBI GI NO: 8118432 NR Description: beta-expansin [Oryza sativa]
  misc_feature (1)..(268): NCBI GI NO: 14330328 NR Description: beta expansin B2 [Festuca pratensis]
  misc_feature (31)..(268): NCBI GI NO: 37536762 NR Description: beta-expansin EXPB4
  misc_feature (33)..(268): NCBI GI NO: 8118425 NR Description: beta-expansin [Oryza sativa]
  misc_feature (32)..(268): NCBI GI NO: 14193775 NR Description: beta-expansin 8 [Zea mays]
  misc_feature (1)..(268): NCBI GI NO: 14193771 NR Description: beta-expansin 6 [Zea mays]
MATTLSSTVVVALGAPLFLLLVTCGSCARPVSFNASDLTADPGWDAARATWYGAPTGAGPDDDGGACGFKNVNLPPFSAMTSCGNEPLFKDGKGCGSCYQIRCQNHPACSGNPETVIITDMNYYPVAKYHFDLSGTAFGAMAKPGRNDELRHAGIIDIQFKRVPCNYPGQKVTFHVEEGSNPVYFAVLVEFEDGDGDAVQVDLMEANSASWTPMRESWGSIWRLDSGHRLTAPFSLRITNESGKTLVADHVIPANWVPNTYYRSIVQY

SEQ ID NO: 35508 - protein, 189 aa, Zea mays subsp. mays
  peptide (1)..(189): Ceres Seq. ID no. 13587722
  misc_feature (93)..(174): Pfam Name: Pfam Description:  Pollen allergen
  misc_feature (1)..(189): NCBI GI NO: 14193773 NR Description: beta-expansin 7 [Zea mays]
  misc_feature (1)..(189): NCBI GI NO: 37536760 NR Description: beta-expansin EXPB3
  misc_feature (1)..(189): NCBI GI NO: 14330330 NR Description: beta expansin B3 [Festuca pratensis]
  misc_feature (1)..(189): NCBI GI NO: 37536756 NR Description: beta-expansin EXPB6
  misc_feature (1)..(189): NCBI GI NO: 8118432 NR Description: beta-expansin [Oryza sativa]
  misc_feature (1)..(189): NCBI GI NO: 14330328 NR Description: beta expansin B2 [Festuca pratensis]
  misc_feature (1)..(189): NCBI GI NO: 37536762 NR Description: beta-expansin EXPB4
  misc_feature (1)..(189): NCBI GI NO: 8118425 NR Description: beta-expansin [Oryza sativa]
  misc_feature (1)..(189): NCBI GI NO: 14193775 NR Description: beta-expansin 8 [Zea mays]
  misc_feature (1)..(189): NCBI GI NO: 14193771 NR Description: beta-expansin 6 [Zea mays]
MTSCGNEPLFKDGKGCGSCYQIRCQNHPACSGNPETVIITDMNYYPVAKYHFDLSGTAFGAMAKPGRNDELRHAGIIDIQFKRVPCNYPGQKVTFHVEEGSNPVYFAVLVEFEDGDGDAVQVDLMEANSASWTPMRESWGSIWRLDSGHRLTAPFSLRITNESGKTLVADHVIPANWVPNTYYRSIVQY

SEQ ID NO: 35509 - DNA, 2645 bp, Zea mays subsp. mays
  misc_feature (1)..(2645): Ceres Seq. ID no. 12390337
agaacccaaccccaatccaacggctgcgagagctctcgtcgcgccgccgccgccacctgacagtctcctctcccctgcgcgcgcacgacgagcgccgggcaggaacagccgccaactccctccaacttccttaaaccctagcgacagcagcaggcaaccagcgccgacgaggaggaggagcgcggagtagaggggctccggcgaccgcgtcggagatggcagcgagccacggcgcggggacgctcaagtccacctccatcaacggggtcaagctctactcgctcaccggcggccgctatgtcgccccctgggtcgtcgcgaagaagaagcgcgccctccgaaaggacaaagagtatcagcggaggctggatttgatccacgacctgaggttcgagacagccaccaccaagatcaagctgacgcccgatgaccagtacctgatcgcctcaggtatttaccccccgcaagttaaagtctacgagttgaaggaattgtcgatgaagttcgagcggcacatgatctcagaaattgtagatttccagatccttggtgatgactattccaaactcgcgtttttgtgtgctgatcgttctgtaaatttgcacgctaagtatggaagccattatagcctgagaattccaagagtgggaagggacatggcctacgattgctggtcctgcgacttgctatgtgctgcttcatcaccagatctgtacaggataaacctagagcagggacgattccttgcttctctttcctccgaatcaccagcaataaatgcggttacacgaagtaagatccatgggcttgttgcttgcggtggtgaggatggtgcggttgagtgttttgatatgaggaaaaaaacttctgttggcagaattaatattccagctgttagttctgaagattattctcaggaggtcacgtctttgcaatttgatgaagatcaaggatactttatggcagtggggaccagtacaggaaagatatcaatatatgatttacgcatgtcttctcctctgagagttaaggatcacatgtatggtagcccaatattaaatatcaaatggcaccagacacttaattctactgaacctaaactgatcactgctgataagcacatagtgagaatctgggatcctaatacaggaaataacatgactagcattgaaccagatggtggtgctatcaatgatgtctgtgtcttccggaatagtggtttagtgctattagccctggacaatagccagatacctgcccacttcattcctgcgctcggccctgctccaaagtggtgttcacatcttgataacttaactgaggagatggaagagaaaccagatacaacgctgtttgatgagtacaagttcttgactaaagaagagatggagcgactgaaccttactcaatacattggcagcagtgctgtaagagcatatttacatggatttattgtacgttatgaactatacaagaagcaacgggcagcagttgctcctgttgagtacgagacaattaaggatgagataaagaaaaagaaattagaagctcagagaaaatctcgtataacgcaagtcgtcaaaataccgaaggttaacaggcagattatggacagtataagggaagatgaaatagatcttgatatggagaatgttgataaatcaagtattaagaagaagaaaagaaaactagaactgaataaggccattttggatgatgatcggttcaaagaaatgtttgagaataaggattttgaaattgacgaagaatcaaaagaatacctcgcacttcatcctcaggcagccacaaaggagcctcgcctgattgaagaacattttgatagtgttagcgaggacgaccaacaatctgatggtaacgcatctgacactctagcggaatctgacagtgatgatgtcatgcataattcaaagcgtataaggttatacgaggtcaaggatgaacaccatgcggaagcatttttgaacagcgtctctctttcaaacgaggatgccgctccccttgaggataggatagctgccctggaaaggaaacagaactccaaagcacttgatgcggtcaagtacgggcctggtggctcacgagagatttcgtttttctctaaaagccggagaaggcacaaggaagagtcgtctagcgacgacgaacccaagggtgtcaaaaagagagctgtgcagccgctgggcttgaagcagggaaaagccgagttctatatgtttggcggaaatcgtggcagaggtagaggcggtagtggcagaggtagaagcgggcaaggaagaggtggaggtggaggtggaggaggaagaggtggaggtggaagaggtggaggtaggggcaggggcaggggcagaggatgaatggggcctgtaacattgaccccgttcggccgttcctgcctttgcaggggttttggtaagcttgaaaatggatggatcctgcacatgcagtgggtagaaagtgtgttccttcacaacataggcaagagctagagtaactgaggattgctgcttcagaatttttgggaagagaaatttgttagaagacaatattacatatcttttggtctaccttgtaacggattgttgcattctggtgggtgtctatgggtacggtatagcatttttttc

SEQ ID NO: 35510 - protein, 719 aa, Zea mays subsp. mays
  peptide (1)..(719): Ceres Seq. ID no. 12390338
  misc_feature (627)..(715): Pfam Name: Pfam Description:  Bindin
  misc_feature (4)..(716): NCBI GI NO: 11357620 NR Description: hypothetical protein F24I3
  misc_feature (4)..(716): NCBI GI NO: 15230179 NR Description: putative protein; protein id: At3g56990
  misc_feature (10)..(719): NCBI GI NO: 28502998 NR Description: Similar to hypothetical protein FLJ14075
  misc_feature (10)..(719): NCBI GI NO: 37362218 NR Description: hypothetical protein FLJ14075-like protein
  misc_feature (10)..(566): NCBI GI NO: 33416707 NR Description: Unknown (protein for MGC:69094) [Xenopus laevis]
  misc_feature (10)..(566): NCBI GI NO: 13477303 NR Description: Similar to hypothetical protein FLJ14075
  misc_feature (10)..(566): NCBI GI NO: 38049298 NR Description: similar to FLJ14075 protein [Mus musculus]
  misc_feature (10)..(335): NCBI GI NO: 34863207 NR Description: similar to hypothetical protein FLJ14075
  misc_feature (396)..(566): NCBI GI NO: 34863207 NR Description: similar to hypothetical protein FLJ14075
  misc_feature (330)..(394): NCBI GI NO: 34863207 NR Description: similar to hypothetical protein FLJ14075
MAASHGAGTLKSTSINGVKLYSLTGGRYVAPWVVAKKKRALRKDKEYQRRLDLIHDLRFETATTKIKLTPDDQYLIASGIYPPQVKVYELKELSMKFERHMISEIVDFQILGDDYSKLAFLCADRSVNLHAKYGSHYSLRIPRVGRDMAYDCWSCDLLCAASSPDLYRINLEQGRFLASLSSESPAINAVTRSKIHGLVACGGEDGAVECFDMRKKTSVGRINIPAVSSEDYSQEVTSLQFDEDQGYFMAVGTSTGKISIYDLRMSSPLRVKDHMYGSPILNIKWHQTLNSTEPKLITADKHIVRIWDPNTGNNMTSIEPDGGAINDVCVFRNSGLVLLALDNSQIPAHFIPALGPAPKWCSHLDNLTEEMEEKPDTTLFDEYKFLTKEEMERLNLTQYIGSSAVRAYLHGFIVRYELYKKQRAAVAPVEYETIKDEIKKKKLEAQRKSRITQVVKIPKVNRQIMDSIREDEIDLDMENVDKSSIKKKKRKLELNKAILDDDRFKEMFENKDFEIDEESKEYLALHPQAATKEPRLIEEHFDSVSEDDQQSDGNASDTLAESDSDDVMHNSKRIRLYEVKDEHHAEAFLNSVSLSNEDAAPLEDRIAALERKQNSKALDAVKYGPGGSREISFFSKSRRRHKEESSSDDEPKGVKKRAVQPLGLKQGKAEFYMFGGNRGRGRGGSGRGRSGQGRGGGGGGGGRGGGGRGGGRGRGRGRG

SEQ ID NO: 35511 - protein, 625 aa, Zea mays subsp. mays
  peptide (1)..(625): Ceres Seq. ID no. 12390339
  misc_feature (533)..(621): Pfam Name: Pfam Description:  Bindin
  misc_feature (1)..(622): NCBI GI NO: 11357620 NR Description: hypothetical protein F24I3
  misc_feature (1)..(622): NCBI GI NO: 15230179 NR Description: putative protein; protein id: At3g56990
  misc_feature (1)..(625): NCBI GI NO: 28502998 NR Description: Similar to hypothetical protein FLJ14075
  misc_feature (1)..(625): NCBI GI NO: 37362218 NR Description: hypothetical protein FLJ14075-like protein
  misc_feature (1)..(472): NCBI GI NO: 33416707 NR Description: Unknown (protein for MGC:69094) [Xenopus laevis]
  misc_feature (1)..(472): NCBI GI NO: 13477303 NR Description: Similar to hypothetical protein FLJ14075
  misc_feature (1)..(472): NCBI GI NO: 38049298 NR Description: similar to FLJ14075 protein [Mus musculus]
  misc_feature (1)..(241): NCBI GI NO: 34863207 NR Description: similar to hypothetical protein FLJ14075
  misc_feature (302)..(472): NCBI GI NO: 34863207 NR Description: similar to hypothetical protein FLJ14075
  misc_feature (236)..(300): NCBI GI NO: 34863207 NR Description: similar to hypothetical protein FLJ14075
MKFERHMISEIVDFQILGDDYSKLAFLCADRSVNLHAKYGSHYSLRIPRVGRDMAYDCWSCDLLCAASSPDLYRINLEQGRFLASLSSESPAINAVTRSKIHGLVACGGEDGAVECFDMRKKTSVGRINIPAVSSEDYSQEVTSLQFDEDQGYFMAVGTSTGKISIYDLRMSSPLRVKDHMYGSPILNIKWHQTLNSTEPKLITADKHIVRIWDPNTGNNMTSIEPDGGAINDVCVFRNSGLVLLALDNSQIPAHFIPALGPAPKWCSHLDNLTEEMEEKPDTTLFDEYKFLTKEEMERLNLTQYIGSSAVRAYLHGFIVRYELYKKQRAAVAPVEYETIKDEIKKKKLEAQRKSRITQVVKIPKVNRQIMDSIREDEIDLDMENVDKSSIKKKKRKLELNKAILDDDRFKEMFENKDFEIDEESKEYLALHPQAATKEPRLIEEHFDSVSEDDQQSDGNASDTLAESDSDDVMHNSKRIRLYEVKDEHHAEAFLNSVSLSNEDAAPLEDRIAALERKQNSKALDAVKYGPGGSREISFFSKSRRRHKEESSSDDEPKGVKKRAVQPLGLKQGKAEFYMFGGNRGRGRGGSGRGRSGQGRGGGGGGGGRGGGGRGGGRGRGRGRG

SEQ ID NO: 35512 - protein, 619 aa, Zea mays subsp. mays
  peptide (1)..(619): Ceres Seq. ID no. 12390340
  misc_feature (527)..(615): Pfam Name: Pfam Description:  Bindin
  misc_feature (1)..(616): NCBI GI NO: 11357620 NR Description: hypothetical protein F24I3
  misc_feature (1)..(616): NCBI GI NO: 15230179 NR Description: putative protein; protein id: At3g56990
  misc_feature (1)..(619): NCBI GI NO: 28502998 NR Description: Similar to hypothetical protein FLJ14075
  misc_feature (1)..(619): NCBI GI NO: 37362218 NR Description: hypothetical protein FLJ14075-like protein
  misc_feature (1)..(466): NCBI GI NO: 33416707 NR Description: Unknown (protein for MGC:69094) [Xenopus laevis]
  misc_feature (1)..(466): NCBI GI NO: 13477303 NR Description: Similar to hypothetical protein FLJ14075
  misc_feature (1)..(466): NCBI GI NO: 38049298 NR Description: similar to FLJ14075 protein [Mus musculus]
  misc_feature (1)..(235): NCBI GI NO: 34863207 NR Description: similar to hypothetical protein FLJ14075
  misc_feature (296)..(466): NCBI GI NO: 34863207 NR Description: similar to hypothetical protein FLJ14075
  misc_feature (230)..(294): NCBI GI NO: 34863207 NR Description: similar to hypothetical protein FLJ14075
MISEIVDFQILGDDYSKLAFLCADRSVNLHAKYGSHYSLRIPRVGRDMAYDCWSCDLLCAASSPDLYRINLEQGRFLASLSSESPAINAVTRSKIHGLVACGGEDGAVECFDMRKKTSVGRINIPAVSSEDYSQEVTSLQFDEDQGYFMAVGTSTGKISIYDLRMSSPLRVKDHMYGSPILNIKWHQTLNSTEPKLITADKHIVRIWDPNTGNNMTSIEPDGGAINDVCVFRNSGLVLLALDNSQIPAHFIPALGPAPKWCSHLDNLTEEMEEKPDTTLFDEYKFLTKEEMERLNLTQYIGSSAVRAYLHGFIVRYELYKKQRAAVAPVEYETIKDEIKKKKLEAQRKSRITQVVKIPKVNRQIMDSIREDEIDLDMENVDKSSIKKKKRKLELNKAILDDDRFKEMFENKDFEIDEESKEYLALHPQAATKEPRLIEEHFDSVSEDDQQSDGNASDTLAESDSDDVMHNSKRIRLYEVKDEHHAEAFLNSVSLSNEDAAPLEDRIAALERKQNSKALDAVKYGPGGSREISFFSKSRRRHKEESSSDDEPKGVKKRAVQPLGLKQGKAEFYMFGGNRGRGRGGSGRGRSGQGRGGGGGGGGRGGGGRGGGRGRGRGRG

SEQ ID NO: 35513 - DNA, 1384 bp, Zea mays subsp. mays
  misc_feature (1)..(1384): Ceres Seq. ID no. 12435980
aaggaaacgtcacgtcaccaccacacacctcttcggctcttcctcttctcctccgtatagcggcgggcctccgtcgccccccttccaccccgttttgccgccccgcaggccacagcccaaaatcctcctcgtcgctggtgccctctccgcggcctcctccgccagccatggccgccgctgggcccgggctctactccgacatcgggaagaaggcaagaggtctcctgtacaaggactaccacactgaccggaagttcacgctcaccacttacgccgccaacggagctttcaaggcgcgtgtcaccatggacatgaagcaccgcgtcgtccgcgccatgatcgcgggtagcatgggagacggtgatggcgcacccgtgcatgtccaggataagaccgagtcggccattactgctgcaagcacaaggaaagatgaagctatctttaataaaatccagggccagctgaagcacaacaatgtgactgtggatgtgaaagcaacttcagaatcaaaagtgacaactacaatcacagttcacgagctagccacaccaggcctgaaggcatttttatgcattcctttcccgtacaagaaatctgcaaaggctgaactccagtacttgcaccaccatgctggtgttgctgcaagtgttggcctaaatgcaaaccctgtcgttaagctttctggtgtattcggaactaaaactgtttctgttggtgctgatgttgcatttgatacttcatccgggaacttaaccaaatacaatgctggactgagctactccacgtctgacttcgttgctgcagctactttgaacaacaaaggagacaagatcgccgcttcctactaccattcggtaagtccaaccacagctgttggaggagagctgagccacagcttctcgaccaacgggagcaccatcaccttcgggacgcagcatgccctggaccgtctgaccactgtgaaggcacgattcaacaactgcggcatggcaagcgcactgatccaacacaagtggaggcccaagtctttggtcaccatctccatggaggtggacaccaaggccatcgagaagagctccaagattgagctctccctcgtcctgaagccctgaggtcaccgccagcttctagttttgggatatactaggtctattttttttatctgcagctgaagtctccagcaaacaagtaaacctgtcaactttggtgccgatcccacaaactcaagttcacggtctctttggtggaaaactatgcggttttgtataccactggttgatgatgtttggagaaagttcagtatggctcaccagtcaccactgtctctcagattttaactgtttgatttgtcgattctttattcatacagatcgcaatttttttc

SEQ ID NO: 35514 - protein, 369 aa, Zea mays subsp. mays
  peptide (1)..(369): Ceres Seq. ID no. 12435981
  misc_feature (133)..(361): Pfam Name: Pfam Description:  Eukaryotic porin
  misc_feature (133)..(369): NCBI GI NO: 5929932 NR Description: voltage-dependent anion channel protein 2
  misc_feature (56)..(95): NCBI GI NO: 5929932 NR Description: voltage-dependent anion channel protein 2
  misc_feature (134)..(369): NCBI GI NO: 5929928 NR Description: voltage-dependent anion channel protein 1a
  misc_feature (60)..(94): NCBI GI NO: 5929928 NR Description: voltage-dependent anion channel protein 1a
  misc_feature (133)..(369): NCBI GI NO: 18076158 NR Description: voltage-dependent anion channel
  misc_feature (133)..(369): NCBI GI NO: 2130108 NR Description: porin VDAC2 - wheat (fragment)
  misc_feature (61)..(95): NCBI GI NO: 2130108 NR Description: porin VDAC2 - wheat (fragment)
  misc_feature (135)..(368): NCBI GI NO: 34912192 NR Description: voltage-dependent anion channel
  misc_feature (61)..(94): NCBI GI NO: 34912192 NR Description: voltage-dependent anion channel
  misc_feature (134)..(369): NCBI GI NO: 1172553 NR Description: Outer mitochondrial membrane protein porin
GNVTSPPHTSSALPLLLRIAAGLRRPPSTPFCRPAGHSPKSSSSLVPSPRPPPPAMAAAGPGLYSDIGKKARGLLYKDYHTDRKFTLTTYAANGAFKARVTMDMKHRVVRAMIAGSMGDGDGAPVHVQDKTESAITAASTRKDEAIFNKIQGQLKHNNVTVDVKATSESKVTTTITVHELATPGLKAFLCIPFPYKKSAKAELQYLHHHAGVAASVGLNANPVVKLSGVFGTKTVSVGADVAFDTSSGNLTKYNAGLSYSTSDFVAAATLNNKGDKIAASYYHSVSPTTAVGGELSHSFSTNGSTITFGTQHALDRLTTVKARFNNCGMASALIQHKWRPKSLVTISMEVDTKAIEKSSKIELSLVLKP

SEQ ID NO: 35515 - protein, 314 aa, Zea mays subsp. mays
  peptide (1)..(314): Ceres Seq. ID no. 12435982
  misc_feature (78)..(306): Pfam Name: Pfam Description:  Eukaryotic porin
  misc_feature (78)..(314): NCBI GI NO: 5929932 NR Description: voltage-dependent anion channel protein 2
  misc_feature (1)..(40): NCBI GI NO: 5929932 NR Description: voltage-dependent anion channel protein 2
  misc_feature (79)..(314): NCBI GI NO: 5929928 NR Description: voltage-dependent anion channel protein 1a
  misc_feature (5)..(39): NCBI GI NO: 5929928 NR Description: voltage-dependent anion channel protein 1a
  misc_feature (78)..(314): NCBI GI NO: 18076158 NR Description: voltage-dependent anion channel
  misc_feature (78)..(314): NCBI GI NO: 2130108 NR Description: porin VDAC2 - wheat (fragment)
  misc_feature (6)..(40): NCBI GI NO: 2130108 NR Description: porin VDAC2 - wheat (fragment)
  misc_feature (80)..(313): NCBI GI NO: 34912192 NR Description: voltage-dependent anion channel
  misc_feature (6)..(39): NCBI GI NO: 34912192 NR Description: voltage-dependent anion channel
  misc_feature (79)..(314): NCBI GI NO: 1172553 NR Description: Outer mitochondrial membrane protein porin
MAAAGPGLYSDIGKKARGLLYKDYHTDRKFTLTTYAANGAFKARVTMDMKHRVVRAMIAGSMGDGDGAPVHVQDKTESAITAASTRKDEAIFNKIQGQLKHNNVTVDVKATSESKVTTTITVHELATPGLKAFLCIPFPYKKSAKAELQYLHHHAGVAASVGLNANPVVKLSGVFGTKTVSVGADVAFDTSSGNLTKYNAGLSYSTSDFVAAATLNNKGDKIAASYYHSVSPTTAVGGELSHSFSTNGSTITFGTQHALDRLTTVKARFNNCGMASALIQHKWRPKSLVTISMEVDTKAIEKSSKIELSLVLKP

SEQ ID NO: 35516 - protein, 268 aa, Zea mays subsp. mays
  peptide (1)..(268): Ceres Seq. ID no. 12435983
  misc_feature (32)..(260): Pfam Name: Pfam Description:  Eukaryotic porin
  misc_feature (32)..(268): NCBI GI NO: 5929932 NR Description: voltage-dependent anion channel protein 2
  misc_feature (33)..(268): NCBI GI NO: 5929928 NR Description: voltage-dependent anion channel protein 1a
  misc_feature (32)..(268): NCBI GI NO: 18076158 NR Description: voltage-dependent anion channel
  misc_feature (32)..(268): NCBI GI NO: 2130108 NR Description: porin VDAC2 - wheat (fragment)
  misc_feature (34)..(267): NCBI GI NO: 34912192 NR Description: voltage-dependent anion channel
  misc_feature (33)..(268): NCBI GI NO: 1172553 NR Description: Outer mitochondrial membrane protein porin
  misc_feature (33)..(268): NCBI GI NO: 2130109 NR Description: porin VDAC3 - wheat
  misc_feature (32)..(268): NCBI GI NO: 2130107 NR Description: porin (clone Tavdac1) - wheat
  misc_feature (33)..(267): NCBI GI NO: 1172557 NR Description: Outer plastidial membrane protein porin
  misc_feature (30)..(268): NCBI GI NO: 36957170 NR Description: VDAC1.1 [Lotus corniculatus var. japonicus]
MDMKHRVVRAMIAGSMGDGDGAPVHVQDKTESAITAASTRKDEAIFNKIQGQLKHNNVTVDVKATSESKVTTTITVHELATPGLKAFLCIPFPYKKSAKAELQYLHHHAGVAASVGLNANPVVKLSGVFGTKTVSVGADVAFDTSSGNLTKYNAGLSYSTSDFVAAATLNNKGDKIAASYYHSVSPTTAVGGELSHSFSTNGSTITFGTQHALDRLTTVKARFNNCGMASALIQHKWRPKSLVTISMEVDTKAIEKSSKIELSLVLKP

SEQ ID NO: 35517 - DNA, 436 bp, Zea mays subsp. mays
  misc_feature (1)..(436): Ceres Seq. ID no. 2816405
gcgccctcctgcttctacccccggcagcggcaggggcaggaggagacgacggtcgccaccggcgccctgcaccggcggatgtcggatcgggagctccgccccctgcgctccatcagaatcacaggggacggtcgatgcctgttcaggtccgtcgcctacggcgcctgcctgaggagaggaaagcatgcgcccagcgacagcgcccagaaggaactggccgacgagctccgagccaaagtagctgatgagttcgtcaagcgaagaggagacaccgaatggttccttgaaggcagctttgagagttatgtgagacagatgagaaagcctcatgcttggggaggggaacctgagctgttcatgtgttcccacgttctcaggatgcccatcaccgtctacatgtatacgggcagctccgacggcccaaggatcatagcgg

SEQ ID NO: 35518 - protein, 145 aa, Zea mays subsp. mays
  peptide (1)..(145): Ceres Seq. ID no. 2816406
  misc_feature (42)..(140): Pfam Name: Pfam Description:  OTU-like cysteine protease
  misc_feature (38)..(140): NCBI GI NO: 18410816 NR Description: auxin-regulated protein; protein id: At3g57810
  misc_feature (51)..(140): NCBI GI NO: 11280708 NR Description: hypothetical protein T10K17
  misc_feature (40)..(80): NCBI GI NO: 34907704 NR Description: P0035F12.12
  misc_feature (39)..(140): NCBI GI NO: 34902010 NR Description: unknown protein
APSCFYPRQRQGQEETTVATGALHRRMSDRELRPLRSIRITGDGRCLFRSVAYGACLRRGKHAPSDSAQKELADELRAKVADEFVKRRGDTEWFLEGSFESYVRQMRKPHAWGGEPELFMCSHVLRMPITVYMYTGSSDGPRIIA

SEQ ID NO: 35519 - protein, 119 aa, Zea mays subsp. mays
  peptide (1)..(119): Ceres Seq. ID no. 2816407
  misc_feature (16)..(114): Pfam Name: Pfam Description:  OTU-like cysteine protease
  misc_feature (12)..(114): NCBI GI NO: 18410816 NR Description: auxin-regulated protein; protein id: At3g57810
  misc_feature (25)..(114): NCBI GI NO: 11280708 NR Description: hypothetical protein T10K17
  misc_feature (14)..(54): NCBI GI NO: 34907704 NR Description: P0035F12.12
  misc_feature (13)..(114): NCBI GI NO: 34902010 NR Description: unknown protein
MSDRELRPLRSIRITGDGRCLFRSVAYGACLRRGKHAPSDSAQKELADELRAKVADEFVKRRGDTEWFLEGSFESYVRQMRKPHAWGGEPELFMCSHVLRMPITVYMYTGSSDGPRIIA

SEQ ID NO: 35520 - protein, 80 aa, Zea mays subsp. mays
  peptide (1)..(80): Ceres Seq. ID no. 2816408
ALLLLPPAAAGAGGDDGRHRRPAPADVGSGAPPPALHQNHRGRSMPVQVRRLRRLPEERKACAQRQRPEGTGRRAPSQSS

SEQ ID NO: 35521 - DNA, 1385 bp, Zea mays subsp. mays
  misc_feature (1)..(1385): Ceres Seq. ID no. 12391575
aacacttctcttttgaggaccagtccaccgtccactcccagagtccaaaaccctacgatccgcgccaccatgccgcgcctcgccgccgccgccgccgccgtctcacgccgcgccggcgaggccctgcgccgcggcgcgtttgggggactgcggcctctctcctccctgcaaccgttaaacgccgcctccagcgacgaggtgctcgttgaaggaaagacaagtgcgcgcgctgccgtgctcaaccgccctggctacctcaacgccctcaccaccaccatgggagctaggctcaataaattttatcaatcatgggaggacaacccagacattggctttgtcatgatgaagggcagcggccgagcattctgtgctggtggggatgttgttagattacatgaacttatcactgaaggcaagctggaggaatgtaaggattttttcaagactttgtacatgttcatttattttctgggcacatacttgaaaccacatgttgccattcttgatggcattactatgggtggtggtggaggtgtttccatccctggaacattccgtgttgcaactgataggacagtctttgcaactccagaagttcatattggattccatcctgatgctgcagcctccttttatttgtcgcatctaactggccatgttggggaatatgtggccttgactggtgaaaagcttaatggaacagatatgattgctcttggcctcgctacacactatttcatgagtggccatctggatctgatcgatgaacgacttgcaaagttagtaactgatgatccatcagttattgattcgtcccttgcacaatattgagacatggtttatccgtacaaaaatagcattgttcataggctggaggtgattgataaatgcttcagccatgacacagttgaagagattgttgatgccttggaaagtgaagcagccagctcaaatgaagaatggtgtatcttggcgctgaaacgattgaaagaggcctctccgttagctttgaaggtctcactgcgatcgatacgcgagggtagatatcagacacttgatgagtgccttgtccgtgagtaccgcatgtccatgaatggaatctcaaagcaattttctcatgaattctgcgagggagtcagagcacgactagtcgacaaggacttcactcctaagtgggatcctcctgcccttgagtatgttacgaatgacatggttgacgcatacttcgcacctcttggcgattcggagcctgagttgaagctgcctatagaatcgcgagaggcatttgtatgatcacaaatcattccaagaaccggatcattgcaaggaccggactgggacctgataaacgtgttataatctgtgtagccattatttttggcagc

SEQ ID NO: 35522 - protein, 276 aa, Zea mays subsp. mays
  peptide (1)..(276): Ceres Seq. ID no. 12391576
  misc_feature (79)..(247): Pfam Name: Pfam Description:  Enoyl-CoA hydratase/isomerase family
  misc_feature (17)..(276): NCBI GI NO: 37536724 NR Description: putative enoyl-CoA-hydratase
  misc_feature (36)..(276): NCBI GI NO: 22329062 NR Description: enoyl-CoA hydratase - like protein
  misc_feature (47)..(276): NCBI GI NO: 30695218 NR Description: enoyl-CoA hydratase/isomerase family
  misc_feature (84)..(213): NCBI GI NO: 11357284 NR Description: enoyl-CoA-hydratase-like protein
  misc_feature (193)..(276): NCBI GI NO: 11357284 NR Description: enoyl-CoA-hydratase-like protein
  misc_feature (47)..(93): NCBI GI NO: 11357284 NR Description: enoyl-CoA-hydratase-like protein
  misc_feature (36)..(276): NCBI GI NO: 7484947 NR Description: enoyl-CoA hydratase homolog F11C18
  misc_feature (62)..(276): NCBI GI NO: 15239206 NR Description: 3-hydroxyisobutyryl-coenzyme A hydrolase
  misc_feature (62)..(276): NCBI GI NO: 15224549 NR Description: 3-hydroxyisobutyryl-coenzyme A hydrolase
  misc_feature (66)..(276): NCBI GI NO: 15224539 NR Description: 3-hydroxyisobutyryl-coenzyme A hydrolase
NTSLLRTSPPSTPRVQNPTIRATMPRLAAAAAAVSRRAGEALRRGAFGGLRPLSSLQPLNAASSDEVLVEGKTSARAAVLNRPGYLNALTTTMGARLNKFYQSWEDNPDIGFVMMKGSGRAFCAGGDVVRLHELITEGKLEECKDFFKTLYMFIYFLGTYLKPHVAILDGITMGGGGGVSIPGTFRVATDRTVFATPEVHIGFHPDAAASFYLSHLTGHVGEYVALTGEKLNGTDMIALGLATHYFMSGHLDLIDERLAKLVTDDPSVIDSSLAQY

SEQ ID NO: 35523 - protein, 253 aa, Zea mays subsp. mays
  peptide (1)..(253): Ceres Seq. ID no. 12391577
  misc_feature (56)..(224): Pfam Name: Pfam Description:  Enoyl-CoA hydratase/isomerase family
  misc_feature (1)..(253): NCBI GI NO: 37536724 NR Description: putative enoyl-CoA-hydratase
  misc_feature (13)..(253): NCBI GI NO: 22329062 NR Description: enoyl-CoA hydratase - like protein
  misc_feature (24)..(253): NCBI GI NO: 30695218 NR Description: enoyl-CoA hydratase/isomerase family
  misc_feature (61)..(190): NCBI GI NO: 11357284 NR Description: enoyl-CoA-hydratase-like protein
  misc_feature (170)..(253): NCBI GI NO: 11357284 NR Description: enoyl-CoA-hydratase-like protein
  misc_feature (24)..(70): NCBI GI NO: 11357284 NR Description: enoyl-CoA-hydratase-like protein
  misc_feature (13)..(253): NCBI GI NO: 7484947 NR Description: enoyl-CoA hydratase homolog F11C18
  misc_feature (39)..(253): NCBI GI NO: 15239206 NR Description: 3-hydroxyisobutyryl-coenzyme A hydrolase
  misc_feature (39)..(253): NCBI GI NO: 15224549 NR Description: 3-hydroxyisobutyryl-coenzyme A hydrolase
  misc_feature (43)..(253): NCBI GI NO: 15224539 NR Description: 3-hydroxyisobutyryl-coenzyme A hydrolase
MPRLAAAAAAVSRRAGEALRRGAFGGLRPLSSLQPLNAASSDEVLVEGKTSARAAVLNRPGYLNALTTTMGARLNKFYQSWEDNPDIGFVMMKGSGRAFCAGGDVVRLHELITEGKLEECKDFFKTLYMFIYFLGTYLKPHVAILDGITMGGGGGVSIPGTFRVATDRTVFATPEVHIGFHPDAAASFYLSHLTGHVGEYVALTGEKLNGTDMIALGLATHYFMSGHLDLIDERLAKLVTDDPSVIDSSLAQY

SEQ ID NO: 35524 - protein, 184 aa, Zea mays subsp. mays
  peptide (1)..(184): Ceres Seq. ID no. 12391578
  misc_feature (1)..(155): Pfam Name: Pfam Description:  Enoyl-CoA hydratase/isomerase family
  misc_feature (1)..(184): NCBI GI NO: 37536724 NR Description: putative enoyl-CoA-hydratase
  misc_feature (1)..(184): NCBI GI NO: 22329062 NR Description: enoyl-CoA hydratase - like protein
  misc_feature (1)..(184): NCBI GI NO: 30695218 NR Description: enoyl-CoA hydratase/isomerase family
  misc_feature (1)..(121): NCBI GI NO: 11357284 NR Description: enoyl-CoA-hydratase-like protein
  misc_feature (101)..(184): NCBI GI NO: 11357284 NR Description: enoyl-CoA-hydratase-like protein
  misc_feature (1)..(184): NCBI GI NO: 7484947 NR Description: enoyl-CoA hydratase homolog F11C18
  misc_feature (1)..(184): NCBI GI NO: 15239206 NR Description: 3-hydroxyisobutyryl-coenzyme A hydrolase
  misc_feature (1)..(184): NCBI GI NO: 15224549 NR Description: 3-hydroxyisobutyryl-coenzyme A hydrolase
  misc_feature (1)..(184): NCBI GI NO: 15224539 NR Description: 3-hydroxyisobutyryl-coenzyme A hydrolase
  misc_feature (1)..(184): NCBI GI NO: 6014701 NR Description: enoyl-CoA-hydratase [Avicennia marina]
MGARLNKFYQSWEDNPDIGFVMMKGSGRAFCAGGDVVRLHELITEGKLEECKDFFKTLYMFIYFLGTYLKPHVAILDGITMGGGGGVSIPGTFRVATDRTVFATPEVHIGFHPDAAASFYLSHLTGHVGEYVALTGEKLNGTDMIALGLATHYFMSGHLDLIDERLAKLVTDDPSVIDSSLAQY

SEQ ID NO: 35525 - DNA, 1328 bp, Zea mays subsp. mays
  misc_feature (1)..(1328): Ceres Seq. ID no. 12419342
atgtttttattttgctttggtttgtcactcttttttctcttactattttgatttaaagttttgagctactagcagttgaggatgaactaatttttatattttttgataaagtgctgatatcgatttaccattaatttttctatggatgaggtatgccagttattttgttaagctaatgctgcttctcgtgcaggtcaaagtaaagagaaggggagatgacaaaaaatatattgccaaggttttagctaggggtgttgaatgcgatcttgcgttgctatctgttgagaatgaagagttctggagaggaacagaggcacttcattttggtcgtttgccatgccttcaggattcagtaactgttgtgggatatcctcttggtggagacactatatctgtaacaaaaggcgttgtgtcgcgcattgaggtcactccatatgcacatggaacatcagatcttcttggcattcaaattacgcagccataaatcctggaaacagtgggggaccagcctttaatgatcaaggggagtgcattggtgtggcatttcaggtgtacaggtcagatgaagctgaaaatattggatatgttattccaactacagttgtatcccatttcttaaatgactatcagaaaaatggaaagtacacaggatttccatgtttgggtgtcttacttcagaaattggaaaatccggcattgcgtgaaagcttaaaagtaccttcaagcgagggtgttcttgttcgtcgggtggaacctactgctccagcaagcagtgttttgcgaaagggagatgtaattgttagctttgatggtatcgcagtaggatgtgaagcaacagtaccatttcggtccacagaacggattgctttccgctatctcacaagccaaaagtatgcaggcgatattgcccagctaggaatcattcgtgatggcaattccatgaaagtccagactattttgcagccaagaaaacatttagtgccgtttcatgttgaggggggacaaccttcttatctgattgttgctggccttgtcttcacacctttaacagaaccatttatagaggaggaatgcgaagatacactagggctgaaattgttagcaaaagcacgttactctctagcaacctttgagggggaggaaattgttattgtgtcgcaggttttggcgcacgaggtcaacattgggtatgagcacatgggcaatcaacaagtcatgaaactaaacggaaccacaataaagaatatccatcaccttgctcatcttgtggacacctgtaaagacaagttcctgacgttcgaattcgaagacgacttccttgttgtttt

SEQ ID NO: 35526 - protein, 129 aa, Zea mays subsp. mays
  peptide (1)..(129): Ceres Seq. ID no. 12419343
  misc_feature (1)..(128): NCBI GI NO: 18407488 NR Description: DegP2 protease; protein id: At2g47940
  misc_feature (1)..(128): NCBI GI NO: 25409077 NR Description: probable serine proteinase
  misc_feature (1)..(128): NCBI GI NO: 18421957 NR Description: DegP protease; protein id: At5g40200
  misc_feature (1)..(128): NCBI GI NO: 18421592 NR Description: DegP protease; protein id: At5g36950
  misc_feature (1)..(128): NCBI GI NO: 18408329 NR Description: DegP protease; protein id: At1g65640.1
  misc_feature (1)..(128): NCBI GI NO: 18408327 NR Description: DegP protease; protein id: At1g65630.1
  misc_feature (1)..(42): NCBI GI NO: 2190549 NR Description: F5I14.17 gene product [Arabidopsis thaliana]
  misc_feature (1)..(36): NCBI GI NO: 18421999 NR Description: DegP protease; protein id: At5g40560.1
  misc_feature (66)..(128): NCBI GI NO: 18421999 NR Description: DegP protease; protein id: At5g40560.1
  misc_feature (1)..(36): NCBI GI NO: 9758082 NR Description: contains similarity to serineprotease~gene_id:MNF13
MKVQTILQPRKHLVPFHVEGGQPSYLIVAGLVFTPLTEPFIEEECEDTLGLKLLAKARYSLATFEGEEIVIVSQVLAHEVNIGYEHMGNQQVMKLNGTTIKNIHHLAHLVDTCKDKFLTFEFEDDFLVV

SEQ ID NO: 35527 - protein, 112 aa, Zea mays subsp. mays
  peptide (1)..(112): Ceres Seq. ID no. 12419344
  misc_feature (16)..(109): Pfam Name: Pfam Description:  Trypsin
  misc_feature (16)..(109): NCBI GI NO: 18407488 NR Description: DegP2 protease; protein id: At2g47940
  misc_feature (16)..(109): NCBI GI NO: 25409077 NR Description: probable serine proteinase
  misc_feature (16)..(109): NCBI GI NO: 18421957 NR Description: DegP protease; protein id: At5g40200
  misc_feature (17)..(109): NCBI GI NO: 18421592 NR Description: DegP protease; protein id: At5g36950
  misc_feature (17)..(108): NCBI GI NO: 18408329 NR Description: DegP protease; protein id: At1g65640.1
  misc_feature (17)..(109): NCBI GI NO: 18408327 NR Description: DegP protease; protein id: At1g65630.1
  misc_feature (17)..(108): NCBI GI NO: 2190549 NR Description: F5I14.17 gene product [Arabidopsis thaliana]
  misc_feature (15)..(108): NCBI GI NO: 18421999 NR Description: DegP protease; protein id: At5g40560.1
  misc_feature (15)..(108): NCBI GI NO: 9758082 NR Description: contains similarity to serineprotease~gene_id:MNF13
  misc_feature (17)..(109): NCBI GI NO: 18401167 NR Description: DegP protease; protein id: At3g16540.1
MRYASYFVKLMLLLVQVKVKRRGDDKKYIAKVLARGVECDLALLSVENEEFWRGTEALHFGRLPCLQDSVTVVGYPLGGDTISVTKGVVSRIEVTPYAHGTSDLLGIQITQP

SEQ ID NO: 35528 - protein, 102 aa, Zea mays subsp. mays
  peptide (1)..(102): Ceres Seq. ID no. 12419345
  misc_feature (6)..(99): Pfam Name: Pfam Description:  Trypsin
  misc_feature (6)..(99): NCBI GI NO: 18407488 NR Description: DegP2 protease; protein id: At2g47940
  misc_feature (6)..(99): NCBI GI NO: 25409077 NR Description: probable serine proteinase
  misc_feature (6)..(99): NCBI GI NO: 18421957 NR Description: DegP protease; protein id: At5g40200
  misc_feature (7)..(99): NCBI GI NO: 18421592 NR Description: DegP protease; protein id: At5g36950
  misc_feature (7)..(98): NCBI GI NO: 18408329 NR Description: DegP protease; protein id: At1g65640.1
  misc_feature (7)..(99): NCBI GI NO: 18408327 NR Description: DegP protease; protein id: At1g65630.1
  misc_feature (7)..(98): NCBI GI NO: 2190549 NR Description: F5I14.17 gene product [Arabidopsis thaliana]
  misc_feature (5)..(98): NCBI GI NO: 18421999 NR Description: DegP protease; protein id: At5g40560.1
  misc_feature (5)..(98): NCBI GI NO: 9758082 NR Description: contains similarity to serineprotease~gene_id:MNF13
  misc_feature (7)..(99): NCBI GI NO: 18401167 NR Description: DegP protease; protein id: At3g16540.1
MLLLVQVKVKRRGDDKKYIAKVLARGVECDLALLSVENEEFWRGTEALHFGRLPCLQDSVTVVGYPLGGDTISVTKGVVSRIEVTPYAHGTSDLLGIQITQP

SEQ ID NO: 35529 - DNA, 1234 bp, Zea mays subsp. mays
  misc_feature (1)..(1234): Ceres Seq. ID no. 13494778
gtctcccggcgcctgttccccgcggcaccgcggctacacataccctctccccatcccatttcccagatcccaccaacgcagcgcagggatcgagtagcccaccaccccaccccgcgacgctaaccgacgcaatggcgacgctcaccgttccttcctccgtcccggccgtcgccgaggactgcgagcagctccacaaggccttcgaaggttggggcaccaacgagaaactgatcatctccatcctggcccaccgcaacgccgcgcaggcccgcgcgatccgccgcggctatgccgaggcctacgggaaggagctgctccgcgctctcggcgacgagatccacggcaagttcgagagggcggtgatcctgtggacgctggaccccgcggagagggacgcggtgctggcgaacgaggaggcgaagaagagccaccccggcggccgcgcgctggtggagatcgcgtgcgcgcgcacgcccgcgcagctctttgcggtcaagcaggcgtaccatgaccggtttaagcgatcgctcgaggaggacgttgccgcgcatgtcaccggcgacttccgaaagcttttagtgcctcttgttagtgcgtaccgctatgatggcccagaggtgaacacatctttggctcattctgaagccaaaatacttcatgagaagatccataagaaggcttacagtgatgaggagatcattagaattctcaccacacggagcaaagctcagctacttgcaacattcaatagctacaaggatcagttcactcatgcaatcaacaaggatctgaaagctgaccccaaggatgagtttctttcaacactgcgggcgatcatccggtgcttcacctgccctgacagatacttcgagaaagtcattcgactggctcttggaggcatgggcactgatgaggatgacctcaccagggtcgtaactactcgcgccgaggtcgacctgaagctgataaaggaggcttatcagaagagaaacagtgtgccgctggagcgtgctgtggccaaagatacaactagagattatgaggatattatgcttgccctccttggggcggagtgaggaggcgtgcctcaactcgatctcatctgctcctacttgtttgatggggccaaaaaactgcatcgacgtggtatccacatggccgtggttttgaataataataaatttgtaacacgtagcctgcattagcagcgcgttttaaataaaggaacttcctg

SEQ ID NO: 35530 - protein, 357 aa, Zea mays subsp. mays
  peptide (1)..(357): Ceres Seq. ID no. 13494779
  misc_feature (56)..(123): Pfam Name: Pfam Description:  Annexin
  misc_feature (44)..(357): NCBI GI NO: 7441507 NR Description: annexin P35 - maize
  misc_feature (44)..(357): NCBI GI NO: 6272285 NR Description: annexin p33 [Zea mays]
  misc_feature (44)..(357): NCBI GI NO: 7441506 NR Description: annexin P33 - maize
  misc_feature (44)..(355): NCBI GI NO: 7484723 NR Description: fiber annexin - upland cotton
  misc_feature (45)..(355): NCBI GI NO: 15214410 NR Description: annexin [Gossypium hirsutum]
  misc_feature (45)..(355): NCBI GI NO: 33357398 NR Description: Chain A, Annexin Gh1 From Cotton
  misc_feature (46)..(356): NCBI GI NO: 7441511 NR Description: annexin 2 - upland cotton (fragment)
  misc_feature (44)..(355): NCBI GI NO: 2459926 NR Description: annexin [Lavatera thuringiaca]
  misc_feature (44)..(355): NCBI GI NO: 3928134 NR Description: annexin P38 [Capsicum annuum]
  misc_feature (44)..(355): NCBI GI NO: 4580920 NR Description: vacuole-associated annexin VCaB42
LPAPVPRGTAATHTLSPSHFPDPTNAAQGSSSPPPHPATLTDAMATLTVPSSVPAVAEDCEQLHKAFEGWGTNEKLIISILAHRNAAQARAIRRGYAEAYGKELLRALGDEIHGKFERAVILWTLDPAERDAVLANEEAKKSHPGGRALVEIACARTPAQLFAVKQAYHDRFKRSLEEDVAAHVTGDFRKLLVPLVSAYRYDGPEVNTSLAHSEAKILHEKIHKKAYSDEEIIRILTTRSKAQLLATFNSYKDQFTHAINKDLKADPKDEFLSTLRAIIRCFTCPDRYFEKVIRLALGGMGTDEDDLTRVVTTRAEVDLKLIKEAYQKRNSVPLERAVAKDTTRDYEDIMLALLGAE

SEQ ID NO: 35531 - protein, 314 aa, Zea mays subsp. mays
  peptide (1)..(314): Ceres Seq. ID no. 13494780
  misc_feature (13)..(80): Pfam Name: Pfam Description:  Annexin
  misc_feature (1)..(314): NCBI GI NO: 7441507 NR Description: annexin P35 - maize
  misc_feature (1)..(314): NCBI GI NO: 6272285 NR Description: annexin p33 [Zea mays]
  misc_feature (1)..(314): NCBI GI NO: 7441506 NR Description: annexin P33 - maize
  misc_feature (1)..(312): NCBI GI NO: 7484723 NR Description: fiber annexin - upland cotton
  misc_feature (2)..(312): NCBI GI NO: 15214410 NR Description: annexin [Gossypium hirsutum]
  misc_feature (2)..(312): NCBI GI NO: 33357398 NR Description: Chain A, Annexin Gh1 From Cotton
  misc_feature (3)..(313): NCBI GI NO: 7441511 NR Description: annexin 2 - upland cotton (fragment)
  misc_feature (1)..(312): NCBI GI NO: 2459926 NR Description: annexin [Lavatera thuringiaca]
  misc_feature (1)..(312): NCBI GI NO: 3928134 NR Description: annexin P38 [Capsicum annuum]
  misc_feature (1)..(312): NCBI GI NO: 4580920 NR Description: vacuole-associated annexin VCaB42
MATLTVPSSVPAVAEDCEQLHKAFEGWGTNEKLIISILAHRNAAQARAIRRGYAEAYGKELLRALGDEIHGKFERAVILWTLDPAERDAVLANEEAKKSHPGGRALVEIACARTPAQLFAVKQAYHDRFKRSLEEDVAAHVTGDFRKLLVPLVSAYRYDGPEVNTSLAHSEAKILHEKIHKKAYSDEEIIRILTTRSKAQLLATFNSYKDQFTHAINKDLKADPKDEFLSTLRAIIRCFTCPDRYFEKVIRLALGGMGTDEDDLTRVVTTRAEVDLKLIKEAYQKRNSVPLERAVAKDTTRDYEDIMLALLGAE

SEQ ID NO: 35532 - DNA, 2267 bp, Zea mays subsp. mays
  misc_feature (1)..(2267): Ceres Seq. ID no. 12435965
tagaaagcaatcgcccgcggtattatccatccaccacgctgcatctgcttctcacgccgcctcgccttcctcttccacccctcgccgtccgtcgtcctcagcgcttgtacgcttgcctcaaaacccctggcgccgtgctaaaaccctagccctcgaattccttcccctgcccgcgcggagcagacgagcctgagcccgtcctcctcgtccatggcgtcctcaggggccgccgctaacctctgggtactgcttggtctcggcatcgcgggcgttctcctggcggcgcggcgactgaggcgccctgcgcgccccgatcacggcgccttcgtcgcccgcctcgagctcctcccgccgccccagcctccgccgccgcaggcgccccacccgctcaccggactctgcttcgccatcgctgacgcattgcatgtcagtggttatattacaagtttcggcagtcttgaatgggcaaagacacacaatgcagaagtgctaacatcttcagtggtttcagctcttgttgatggtggtgctatttgtgttgggaaaactgttattgatgagatggcatacagtatccatggtgagaatagatattttgatacaccaacaaatcctgccgctccagatcgagtaccaggaggatgttcaagtggatcagctgttgcagttgctggtggaatggtagattttgccctgggtattgactcgattggaggtgtaaggatacctggtgcttattgtggtgtcttagcattcaggccttcgcatgctgtggtttccaatagtggtgtcattcctgttgcacctagcctggacactataggttggtttgcaaaggatccaagtgttttgcatcgtgttgggcatcttcttcttagacttccttatgctggtattcgccaaccgagaattttttacatagcagatgattgctttgaactttcaaagatacctgctaggagacttactcaggtggtgacaaaatctgtggagaagctctttggaagacaagtccggcatgtgaatctcgaaaattatttgagttcaagaatatccagcctgggtaactattcaaatgggcataagaatggggattcaaagttccctctgttgctagcactttgtaactccatgatatcacttcacaagcaggaattcaaagataagcatatggagtggataaattcagttaagcctgctgtggatgcacgcatagtcagtgatttgtctgaggatggtgattcagatattgatggctgccaaaatgtgaggaaagaagcgcgctctgctctaagtggacttcttaaggatgatgggattctggtgattccaactgctttggggtgccccccgaagcttaacgctaaggaactctcgtctgaaagctacaattctcagacactacgccttttgtctttagctagcatgtcagggtgttgccaggtttccattcctttgggtacacatgataagtgccccatttcagtttcgttgattgctaggcatggtggtgatcggtttttgttggacaccacacaaaccatgtatacaaccatccaagagcaagtggagatactagcgaaatctagtgtttcaagtaaacaggcgatgaatgaagaagcagctgaagctgctaaagagaaaggtaatgctgcatttaaggaaaaacaatggcaaaaggcagtaaatttctacactgaagcaataaagttaaatggaaaagtggctacatactacagcaacagagctgctgcctttctagaactaactagctaccgtcaggctgaggcagattgcacaagtgccatcgaacttgattccaagagcgtgaaagcttatttacggagaggcactgcaagggagatgctaggttattataaggaggccgttgatgatttcaaccacgcccttgttctagaaccaatgaacaagacggctggtgttgccatcaacaggttaaagaagctgtttccttgaatatgaagctgcatgaagatatgataacctcatattttgtgcacacacaaggggtgggattgaagtacctgagttcaaccgacggatgctgatcacagtttgagctagtgggaacggatttcaacactgagatcaggttaagggtcaatttagcggtttctctccccacccaaagttttggaaaagcaaaataaagaaggttttttgggaaccggaaagcagtttacgggtgtccgccatccccaccatgtataatatagtttcgccaattatttgttcagacgctttgc

SEQ ID NO: 35533 - protein, 588 aa, Zea mays subsp. mays
  peptide (1)..(588): Ceres Seq. ID no. 12435966
  misc_feature (12)..(439): Pfam Name: Pfam Description:  Amidase
  misc_feature (1)..(588): NCBI GI NO: 13937285 NR Description: chloroplast protein-translocon-like protein
  misc_feature (1)..(585): NCBI GI NO: 30684733 NR Description: chloroplast outer membrane translocon subunit
  misc_feature (1)..(587): NCBI GI NO: 7453538 NR Description: Toc64 [Pisum sativum]
  misc_feature (1)..(585): NCBI GI NO: 30682691 NR Description: subunit of TOC complex -related
  misc_feature (1)..(559): NCBI GI NO: 9955529 NR Description: putative subunit of TOC complex
  misc_feature (35)..(445): NCBI GI NO: 18390964 NR Description: expressed protein; protein id: At1g08980
  misc_feature (35)..(366): NCBI GI NO: 38344119 NR Description: OSJNBb0050O03.16
  misc_feature (329)..(585): NCBI GI NO: 9955529 NR Description: putative subunit of TOC complex
  misc_feature (35)..(254): NCBI GI NO: 25402505 NR Description: hypothetical protein
  misc_feature (46)..(266): NCBI GI NO: 22978544 NR Description: hypothetical protein [Ralstonia metallidurans]
MASSGAAANLWVLLGLGIAGVLLAARRLRRPARPDHGAFVARLELLPPPQPPPPQAPHPLTGLCFAIADALHVSGYITSFGSLEWAKTHNAEVLTSSVVSALVDGGAICVGKTVIDEMAYSIHGENRYFDTPTNPAAPDRVPGGCSSGSAVAVAGGMVDFALGIDSIGGVRIPGAYCGVLAFRPSHAVVSNSGVIPVAPSLDTIGWFAKDPSVLHRVGHLLLRLPYAGIRQPRIFYIADDCFELSKIPARRLTQVVTKSVEKLFGRQVRHVNLENYLSSRISSLGNYSNGHKNGDSKFPLLLALCNSMISLHKQEFKDKHMEWINSVKPAVDARIVSDLSEDGDSDIDGCQNVRKEARSALSGLLKDDGILVIPTALGCPPKLNAKELSSESYNSQTLRLLSLASMSGCCQVSIPLGTHDKCPISVSLIARHGGDRFLLDTTQTMYTTIQEQVEILAKSSVSSKQAMNEEAAEAAKEKGNAAFKEKQWQKAVNFYTEAIKLNGKVATYYSNRAAAFLELTSYRQAEADCTSAIELDSKSVKAYLRRGTAREMLGYYKEAVDDFNHALVLEPMNKTAGVAINRLKKLFP

SEQ ID NO: 35534 - protein, 471 aa, Zea mays subsp. mays
  peptide (1)..(471): Ceres Seq. ID no. 12435967
  misc_feature (1)..(322): Pfam Name: Pfam Description:  Amidase
  misc_feature (1)..(471): NCBI GI NO: 13937285 NR Description: chloroplast protein-translocon-like protein
  misc_feature (1)..(468): NCBI GI NO: 30684733 NR Description: chloroplast outer membrane translocon subunit
  misc_feature (1)..(470): NCBI GI NO: 7453538 NR Description: Toc64 [Pisum sativum]
  misc_feature (1)..(468): NCBI GI NO: 30682691 NR Description: subunit of TOC complex -related
  misc_feature (1)..(442): NCBI GI NO: 9955529 NR Description: putative subunit of TOC complex
  misc_feature (1)..(328): NCBI GI NO: 18390964 NR Description: expressed protein; protein id: At1g08980
  misc_feature (1)..(249): NCBI GI NO: 38344119 NR Description: OSJNBb0050O03.16
  misc_feature (212)..(468): NCBI GI NO: 9955529 NR Description: putative subunit of TOC complex
  misc_feature (1)..(137): NCBI GI NO: 25402505 NR Description: hypothetical protein
  misc_feature (1)..(149): NCBI GI NO: 22978544 NR Description: hypothetical protein [Ralstonia metallidurans]
MAYSIHGENRYFDTPTNPAAPDRVPGGCSSGSAVAVAGGMVDFALGIDSIGGVRIPGAYCGVLAFRPSHAVVSNSGVIPVAPSLDTIGWFAKDPSVLHRVGHLLLRLPYAGIRQPRIFYIADDCFELSKIPARRLTQVVTKSVEKLFGRQVRHVNLENYLSSRISSLGNYSNGHKNGDSKFPLLLALCNSMISLHKQEFKDKHMEWINSVKPAVDARIVSDLSEDGDSDIDGCQNVRKEARSALSGLLKDDGILVIPTALGCPPKLNAKELSSESYNSQTLRLLSLASMSGCCQVSIPLGTHDKCPISVSLIARHGGDRFLLDTTQTMYTTIQEQVEILAKSSVSSKQAMNEEAAEAAKEKGNAAFKEKQWQKAVNFYTEAIKLNGKVATYYSNRAAAFLELTSYRQAEADCTSAIELDSKSVKAYLRRGTAREMLGYYKEAVDDFNHALVLEPMNKTAGVAINRLKKLFP

SEQ ID NO: 35535 - protein, 432 aa, Zea mays subsp. mays
  peptide (1)..(432): Ceres Seq. ID no. 12435968
  misc_feature (1)..(283): Pfam Name: Pfam Description:  Amidase
  misc_feature (1)..(432): NCBI GI NO: 13937285 NR Description: chloroplast protein-translocon-like protein
  misc_feature (1)..(429): NCBI GI NO: 30684733 NR Description: chloroplast outer membrane translocon subunit
  misc_feature (1)..(431): NCBI GI NO: 7453538 NR Description: Toc64 [Pisum sativum]
  misc_feature (1)..(429): NCBI GI NO: 30682691 NR Description: subunit of TOC complex -related
  misc_feature (1)..(403): NCBI GI NO: 9955529 NR Description: putative subunit of TOC complex
  misc_feature (1)..(289): NCBI GI NO: 18390964 NR Description: expressed protein; protein id: At1g08980
  misc_feature (1)..(210): NCBI GI NO: 38344119 NR Description: OSJNBb0050O03.16
  misc_feature (173)..(429): NCBI GI NO: 9955529 NR Description: putative subunit of TOC complex
  misc_feature (1)..(98): NCBI GI NO: 25402505 NR Description: hypothetical protein
  misc_feature (1)..(110): NCBI GI NO: 22978544 NR Description: hypothetical protein [Ralstonia metallidurans]
MVDFALGIDSIGGVRIPGAYCGVLAFRPSHAVVSNSGVIPVAPSLDTIGWFAKDPSVLHRVGHLLLRLPYAGIRQPRIFYIADDCFELSKIPARRLTQVVTKSVEKLFGRQVRHVNLENYLSSRISSLGNYSNGHKNGDSKFPLLLALCNSMISLHKQEFKDKHMEWINSVKPAVDARIVSDLSEDGDSDIDGCQNVRKEARSALSGLLKDDGILVIPTALGCPPKLNAKELSSESYNSQTLRLLSLASMSGCCQVSIPLGTHDKCPISVSLIARHGGDRFLLDTTQTMYTTIQEQVEILAKSSVSSKQAMNEEAAEAAKEKGNAAFKEKQWQKAVNFYTEAIKLNGKVATYYSNRAAAFLELTSYRQAEADCTSAIELDSKSVKAYLRRGTAREMLGYYKEAVDDFNHALVLEPMNKTAGVAINRLKKLFP

SEQ ID NO: 35536 - DNA, 700 bp, Zea mays subsp. mays; identical to SEQ ID NO: 23668
  misc_feature (1)..(700): Ceres Seq. ID no. 13494781

SEQ ID NO: 35537 - protein, 233 aa, Zea mays subsp. mays; identical to SEQ ID NO: 23669
  peptide (1)..(233): Ceres Seq. ID no. 13494782
  misc_feature (59)..(126): Pfam Name: Pfam Description:  CRAL/TRIO, N-terminus
  misc_feature (58)..(232): NCBI GI NO: 7488694 NR Description: phosphatidylinositol-phosphatidylcholine transfer protein SEC14 homolog Ssh1
  misc_feature (58)..(232): NCBI GI NO: 15238794 NR Description: sec14 cytosolic factor, putative
  misc_feature (58)..(232): NCBI GI NO: 14532536 NR Description: AT5g47730/MCA23_5 [Arabidopsis thaliana]
  misc_feature (58)..(232): NCBI GI NO: 15222786 NR Description: sec14 cytosolic factor, putative
  misc_feature (85)..(232): NCBI GI NO: 25295905 NR Description: protein F14J16.8 [imported] - Arabidopsis thaliana
  misc_feature (69)..(223): NCBI GI NO: 4506867 NR Description: SEC14 (S. cerevisiae)-like 1 [Homo sapiens]

SEQ ID NO: 35538 - protein, 176 aa, Zea mays subsp. mays; identical to SEQ ID NO: 23670
  peptide (1)..(176): Ceres Seq. ID no. 13494783
  misc_feature (2)..(69): Pfam Name: Pfam Description:  CRAL/TRIO, N-terminus
  misc_feature (1)..(175): NCBI GI NO: 7488694 NR Description: phosphatidylinositol-phosphatidylcholine transfer protein SEC14 homolog Ssh1
  misc_feature (1)..(175): NCBI GI NO: 15238794 NR Description: sec14 cytosolic factor, putative
  misc_feature (1)..(175): NCBI GI NO: 14532536 NR Description: AT5g47730/MCA23_5 [Arabidopsis thaliana]
  misc_feature (1)..(175): NCBI GI NO: 15222786 NR Description: sec14 cytosolic factor, putative
  misc_feature (28)..(175): NCBI GI NO: 25295905 NR Description: protein F14J16.8 [imported] - Arabidopsis thaliana
  misc_feature (12)..(166): NCBI GI NO: 4506867 NR Description: SEC14 (S. cerevisiae)-like 1 [Homo sapiens]

SEQ ID NO: 35539 - protein, 161 aa, Zea mays subsp. mays; identical to SEQ ID NO: 23671
  peptide (1)..(161): Ceres Seq. ID no. 13494784
  misc_feature (1)..(54): Pfam Name: Pfam Description:  CRAL/TRIO, N-terminus
  misc_feature (1)..(160): NCBI GI NO: 7488694 NR Description: phosphatidylinositol-phosphatidylcholine transfer protein SEC14 homolog Ssh1
  misc_feature (1)..(160): NCBI GI NO: 15238794 NR Description: sec14 cytosolic factor, putative
  misc_feature (1)..(160): NCBI GI NO: 14532536 NR Description: AT5g47730/MCA23_5 [Arabidopsis thaliana]
  misc_feature (1)..(160): NCBI GI NO: 15222786 NR Description: sec14 cytosolic factor, putative
  misc_feature (13)..(160): NCBI GI NO: 25295905 NR Description: protein F14J16.8 [imported] - Arabidopsis thaliana
  misc_feature (1)..(151): NCBI GI NO: 4506867 NR Description: SEC14 (S. cerevisiae)-like 1 [Homo sapiens]

SEQ ID NO: 35540 - DNA, 1410 bp, Zea mays subsp. mays
  misc_feature (1)..(1410): Ceres Seq. ID no. 12419029
accgctacccaaccgccgccgcggttctcgctgccagcgacggacgggccacaccgcgcaggggctcagccccgccacccaccttaaccccgccgtcgggaggcgtcgtccccggcccggcccggcccggccctcgccctctactgcaactggactggcgcgtagacctgtccccgccacgagatcgttccgccctatgtcggtgaagatgctctttgcatagctcaagctgcaatctgatggactctgatgacaagaagtttggaaatggaccaagggagctcactggtgctgttgatttgatcagccactacaaactgctgccacaccatgatttcttttgcaagaaacctttgccgctggcaatatcagatacacattatcttcacaatgttgtgggagacactgaaattcgcaaaggagaaggaatggagttagatcaacttgttcataatgcatatctgagggataaacctgcttatattcagccctttgatatggaaactctggggcaagcgttccaacttcgagaaacagctcttgtggatttgccttctactgaaaaaggtataccgactatttcgggtaaaccaaaaagtgagtccaaggacaaagagaagaagcataaaaggcacaaagacaaagacaaggaacataagaagcacaaacatcggcataaggatcggagtaaggacaaagataaagacaaagacaaggataagaaaaaagataaaagtggccatcatgaaaagaagaggaagcatgagggaacagaagattcagtagatgtgcataagcacaagaagagtaagcacaagagctccaaaaccgatgagatggggaatggagttagttaacacttcctagctctacctccaatccttgtaatttgctgttaaaacttaaaaggagacagacggtctctgctatcaaaaccctgtgcagaatagtgggtatcatgaatgggagctcttatttttgcagagtccattgtgaagagaattgaatttgttaatataggtctaatccttccaactgtgcaaatcaactgtgttcctccctgaagcattggttgtagggtgcgcttgaaaggatgtgcaatgagattgtttcgatgtaacgtgcatgagtacactgagtagctgtggatggttatacagtttgtggtctagggatgtgcagtgagggcagggaattgggaataatttcgtgcccccatcgaccttgatttgtagggtaggatgatttactgtttaaccactagcaaatgttagtagccagttccatgttcatttactccacggcaactgtgctttcgtgtgccaataaccggagttgatccacatgtaatgaattggtgtcaaattgacgatcctgtgtttcaaagtatggttattggatcgtgttgcc

SEQ ID NO: 35541 - protein, 205 aa, Zea mays subsp. mays
  peptide (1)..(205): Ceres Seq. ID no. 12419030
  misc_feature (107)..(204): Pfam Name: Pfam Description:  SART-1 family
  misc_feature (1)..(201): NCBI GI NO: 15239764 NR Description: putative protein; protein id: At5g19480.1
  misc_feature (1)..(201): NCBI GI NO: 38454176 NR Description: At5g12230 [Arabidopsis thaliana]
  misc_feature (1)..(201): NCBI GI NO: 15239910 NR Description: unknown protein; protein id: At5g12230.1
  misc_feature (72)..(197): NCBI GI NO: 29246869 NR Description: GLP_191_32543_34384 [Giardia lamblia ATCC 50803]
  misc_feature (117)..(205): NCBI GI NO: 24644016 NR Description: CG1078-PA [Drosophila melanogaster]
  misc_feature (117)..(198): NCBI GI NO: 39592010 NR Description: Hypothetical protein CBG23181
  misc_feature (117)..(196): NCBI GI NO: 23508991 NR Description: hypothetical protein [Plasmodium falciparum 3D7]
  misc_feature (117)..(194): NCBI GI NO: 17558380 NR Description: Putative nuclear protein
  misc_feature (117)..(199): NCBI GI NO: 23612468 NR Description: heat shock protein 86 family protein
  misc_feature (114)..(199): NCBI GI NO: 21040255 NR Description: splicing factor, arginine/serine-rich 12
MDSDDKKFGNGPRELTGAVDLISHYKLLPHHDFFCKKPLPLAISDTHYLHNVVGDTEIRKGEGMELDQLVHNAYLRDKPAYIQPFDMETLGQAFQLRETALVDLPSTEKGIPTISGKPKSESKDKEKKHKRHKDKDKEHKKHKHRHKDRSKDKDKDKDKDKKKDKSGHHEKKRKHEGTEDSVDVHKHKKSKHKSSKTDEMGNGVS

SEQ ID NO: 35542 - protein, 142 aa, Zea mays subsp. mays
  peptide (1)..(142): Ceres Seq. ID no. 12419031
  misc_feature (44)..(141): Pfam Name: Pfam Description:  SART-1 family
  misc_feature (1)..(138): NCBI GI NO: 15239764 NR Description: putative protein; protein id: At5g19480.1
  misc_feature (1)..(138): NCBI GI NO: 38454176 NR Description: At5g12230 [Arabidopsis thaliana]
  misc_feature (1)..(138): NCBI GI NO: 15239910 NR Description: unknown protein; protein id: At5g12230.1
  misc_feature (9)..(134): NCBI GI NO: 29246869 NR Description: GLP_191_32543_34384 [Giardia lamblia ATCC 50803]
  misc_feature (54)..(142): NCBI GI NO: 24644016 NR Description: CG1078-PA [Drosophila melanogaster]
  misc_feature (54)..(135): NCBI GI NO: 39592010 NR Description: Hypothetical protein CBG23181
  misc_feature (54)..(133): NCBI GI NO: 23508991 NR Description: hypothetical protein [Plasmodium falciparum 3D7]
  misc_feature (54)..(131): NCBI GI NO: 17558380 NR Description: Putative nuclear protein
  misc_feature (54)..(136): NCBI GI NO: 23612468 NR Description: heat shock protein 86 family protein
  misc_feature (51)..(136): NCBI GI NO: 21040255 NR Description: splicing factor, arginine/serine-rich 12
MELDQLVHNAYLRDKPAYIQPFDMETLGQAFQLRETALVDLPSTEKGIPTISGKPKSESKDKEKKHKRHKDKDKEHKKHKHRHKDRSKDKDKDKDKDKKKDKSGHHEKKRKHEGTEDSVDVHKHKKSKHKSSKTDEMGNGVS

SEQ ID NO: 35543 - protein, 119 aa, Zea mays subsp. mays
  peptide (1)..(119): Ceres Seq. ID no. 12419032
  misc_feature (21)..(118): Pfam Name: Pfam Description:  SART-1 family
  misc_feature (1)..(115): NCBI GI NO: 15239764 NR Description: putative protein; protein id: At5g19480.1
  misc_feature (1)..(115): NCBI GI NO: 38454176 NR Description: At5g12230 [Arabidopsis thaliana]
  misc_feature (1)..(115): NCBI GI NO: 15239910 NR Description: unknown protein; protein id: At5g12230.1
  misc_feature (1)..(111): NCBI GI NO: 29246869 NR Description: GLP_191_32543_34384 [Giardia lamblia ATCC 50803]
  misc_feature (31)..(119): NCBI GI NO: 24644016 NR Description: CG1078-PA [Drosophila melanogaster]
  misc_feature (31)..(112): NCBI GI NO: 39592010 NR Description: Hypothetical protein CBG23181
  misc_feature (31)..(110): NCBI GI NO: 23508991 NR Description: hypothetical protein [Plasmodium falciparum 3D7]
  misc_feature (31)..(108): NCBI GI NO: 17558380 NR Description: Putative nuclear protein
  misc_feature (31)..(113): NCBI GI NO: 23612468 NR Description: heat shock protein 86 family protein
  misc_feature (28)..(113): NCBI GI NO: 21040255 NR Description: splicing factor, arginine/serine-rich 12
METLGQAFQLRETALVDLPSTEKGIPTISGKPKSESKDKEKKHKRHKDKDKEHKKHKHRHKDRSKDKDKDKDKDKKKDKSGHHEKKRKHEGTEDSVDVHKHKKSKHKSSKTDEMGNGVS

SEQ ID NO: 35544 - DNA, 733 bp, Zea mays subsp. mays
  misc_feature (1)..(733): Ceres Seq. ID no. 12551453
cataaagatctcgacctcgccccttcgaccgcaagccatcccgctccctcggtaagcttccaagcggagtccggcggcgtcgagtcgaatggcgggcaagtcgcacacgcgcaaggcgttcctcctgtgcaactacgtcctcatgggcgccgcttccagctgcatcttcctcacgctgtcgctgcgcctgctgccgtccccgtgcggcctcctcctgctcttcctccacgccctcaccgccgtcttctccgcggccggctgctcgggctccttcacggcgcccgccacgcccgcgcagtggcacaacgcgcacaccgcgggggccgcgctcaccgccatcttccagggggccgtcgcgctgctcgcgttcacccgcacctccgacttcctggccgagcttcagtcctacgtccgcgacgaggacggcgccgtcatcctcaagatggtcgggggcctcggcaccgccatcttcgtcctcgagtgggccgcgctcgcgctcgccttctccctccgcctcgatgacgacgacgacgacgacctccaggccaagaaccggcggccgtaccatgtctgatcgtccgctggtgttagctccttcagaatgatatatgaacaagattcgttgattctttgccgtctgttagtatgtactattgcttttttttggtactactgtgcctgttcaaccaaaattgttaaatgccaaagcaaatatacattgctttttgttgcc

SEQ ID NO: 35545 - protein, 173 aa, Zea mays subsp. mays
  peptide (1)..(173): Ceres Seq. ID no. 12551454
HKDLDLAPSTASHPAPSVSFQAESGGVESNGGQVAHAQGVPPVQLRPHGRRFQLHLPHAVAAPAAVPVRPPPALPPRPHRRLLRGRLLGLLHGARHARAVAQRAHRGGRAHRHLPGGRRAARVHPHLRLPGRASVLRPRRGRRRHPQDGRGPRHRHLRPRVGRARARLLPPPR

SEQ ID NO: 35546 - protein, 161 aa, Zea mays subsp. mays
  peptide (1)..(161): Ceres Seq. ID no. 12551455
  misc_feature (2)..(161): NCBI GI NO: 34907616 NR Description: contains EST C27797(C52876)~unknown protein
  misc_feature (1)..(142): NCBI GI NO: 38345379 NR Description: OSJNBa0067K08.8
  misc_feature (4)..(156): NCBI GI NO: 15239379 NR Description: putative protein; protein id: At5g36710.1
  misc_feature (4)..(156): NCBI GI NO: 15239407 NR Description: putative protein; protein id: At5g36800.1
  misc_feature (1)..(142): NCBI GI NO: 21703131 NR Description: AT5g16250/T21H19_170 [Arabidopsis thaliana]
  misc_feature (1)..(142): NCBI GI NO: 15237310 NR Description: putative protein; protein id: At5g16250
  misc_feature (1)..(142): NCBI GI NO: 21553926 NR Description: unknown [Arabidopsis thaliana]
  misc_feature (6)..(142): NCBI GI NO: 18396262 NR Description: expressed protein; protein id: At3g02640
MAGKSHTRKAFLLCNYVLMGAASSCIFLTLSLRLLPSPCGLLLLFLHALTAVFSAAGCSGSFTAPATPAQWHNAHTAGAALTAIFQGAVALLAFTRTSDFLAELQSYVRDEDGAVILKMVGGLGTAIFVLEWAALALAFSLRLDDDDDDDLQAKNRRPYHV

SEQ ID NO: 35547 - protein, 143 aa, Zea mays subsp. mays
  peptide (1)..(143): Ceres Seq. ID no. 12551456
  misc_feature (1)..(143): NCBI GI NO: 34907616 NR Description: contains EST C27797(C52876)~unknown protein
  misc_feature (1)..(124): NCBI GI NO: 38345379 NR Description: OSJNBa0067K08.8
  misc_feature (1)..(138): NCBI GI NO: 15239379 NR Description: putative protein; protein id: At5g36710.1
  misc_feature (1)..(138): NCBI GI NO: 15239407 NR Description: putative protein; protein id: At5g36800.1
  misc_feature (1)..(124): NCBI GI NO: 21703131 NR Description: AT5g16250/T21H19_170 [Arabidopsis thaliana]
  misc_feature (1)..(124): NCBI GI NO: 15237310 NR Description: putative protein; protein id: At5g16250
  misc_feature (1)..(124): NCBI GI NO: 21553926 NR Description: unknown [Arabidopsis thaliana]
  misc_feature (1)..(124): NCBI GI NO: 18396262 NR Description: expressed protein; protein id: At3g02640
MGAASSCIFLTLSLRLLPSPCGLLLLFLHALTAVFSAAGCSGSFTAPATPAQWHNAHTAGAALTAIFQGAVALLAFTRTSDFLAELQSYVRDEDGAVILKMVGGLGTAIFVLEWAALALAFSLRLDDDDDDDLQAKNRRPYHV

SEQ ID NO: 35548 - DNA, 1361 bp, Zea mays subsp. mays
  misc_feature (1)..(1361): Ceres Seq. ID no. 12391506
attaccaaaccaacagtttccagttcagcggtaggaacagaccgtcacggcgtcatccgccaaaggataatccatttgctcacacaggcgcaaacgctgagcgcctgagcctgctctcgcggtctaggagatggcgttgatcacgaatgtctctgactatgaggagcttgcagagcagaagctgcctaagatggtttatgacttctatgccgggggtgcagaagaccagtggacactcaaggagaataagggggcattctccaagattctggttcgaccacgggtgctgattgatgtgtctcatattgacatgtctacaagtatattgggttacaaaatttccatgcctattatggtggctcccactgctttgcacaaactggcccaccaagaaggagaggttgcttctgcccaggcagcagctgctgcaggaactataatgacgttgtcttcatggtcatcttgcagcattgaggaagttagctcaagtgcaccaggactccgtttcttccaactttcagtattcaaggatagggatatcgtgcaacagcttgtcagaagggctgaaaatgctggctacaaggcaatcgccgtcactgtcgacgctccacgccttggtcgcagggaagccgacgtcaggaacagattcacgctgcctgaaaatgtggtgttgaagtgctttgaaggactggatctcagcaagatggacaagactaagggttcaggccttgctgcttacgccactagccagattgacagctctctttcttggaaggatatcaagtggctacagacgattaccgggctgcctatcttagtgaaaggagtcataacagcagaagatgctcgaattgctatcgaatgcggtgtcgccggcattatcgtgtccaaccacgggggacgccagctagactatcttcctgcaaccatcagctgcctggaagaggtcgtgagagaagtgaagggccgccgtgtgcctgtgttcctcgacggcggcatccgccgtggcactgacgtgttcaaggccttggcgctgggagcctcaggagtgtttattggaaggcccgtactgttcgccctcgccgtggacggcagggcaggggtgaggaatgcgctgcggatgctgagggatgagctcgagatcaccatggcgctgagcggctgctcgtcgctgaaagatatcacccgcgatcgcgttatcactgagagcgacatgatccgtcgctctcggatgtaggcttcgattcgtttgctgttgtgttgtgttgtgccctggcatgactgtcttattcgaaactgaccggaccatcagattggttttgacttttgacctattggctaatgatgtgttaggttttctc

SEQ ID NO: 35549 - protein, 368 aa, Zea mays subsp. mays
  peptide (1)..(368): Ceres Seq. ID no. 12391507
  misc_feature (14)..(358): Pfam Name: Pfam Description:  FMN-dependent dehydrogenase
  misc_feature (4)..(368): NCBI GI NO: 27549566 NR Description: glycolate oxidase [Zantedeschia aethiopica]
  misc_feature (4)..(366): NCBI GI NO: 15231850 NR Description: glycolate oxidase, putative; protein id:At3g14420
  misc_feature (4)..(366): NCBI GI NO: 16226772 NR Description: AT3g14420/MOA2_2 [Arabidopsis thaliana]
  misc_feature (4)..(361): NCBI GI NO: 15236857 NR Description: glycolate oxidase - like protein
  misc_feature (4)..(364): NCBI GI NO: 15229497 NR Description: glycolate oxidase; protein id: At3g14415.1
  misc_feature (4)..(368): NCBI GI NO: 1773330 NR Description: glycolate oxidase [Mesembryanthemum crystallinum]
  misc_feature (4)..(364): NCBI GI NO: 228403 NR Description: glycolate oxidase
  misc_feature (4)..(361): NCBI GI NO: 999542 NR Description: Chain A, Glycolate Oxidase (E
  misc_feature (4)..(361): NCBI GI NO: 121530 NR Description:
  misc_feature (4)..(361): NCBI GI NO: 2554675 NR Description: Three-Dimensional Structure Of Glycolate OxidaseWith Bound Active-Site Inhibitors
MALITNVSDYEELAEQKLPKMVYDFYAGGAEDQWTLKENKGAFSKILVRPRVLIDVSHIDMSTSILGYKISMPIMVAPTALHKLAHQEGEVASAQAAAAAGTIMTLSSWSSCSIEEVSSSAPGLRFFQLSVFKDRDIVQQLVRRAENAGYKAIAVTVDAPRLGRREADVRNRFTLPENVVLKCFEGLDLSKMDKTKGSGLAAYATSQIDSSLSWKDIKWLQTITGLPILVKGVITAEDARIAIECGVAGIIVSNHGGRQLDYLPATISCLEEVVREVKGRRVPVFLDGGIRRGTDVFKALALGASGVFIGRPVLFALAVDGRAGVRNALRMLRDELEITMALSGCSSLKDITRDRVITESDMIRRSRM

SEQ ID NO: 35550 - protein, 348 aa, Zea mays subsp. mays
  peptide (1)..(348): Ceres Seq. ID no. 12391508
  misc_feature (1)..(338): Pfam Name: Pfam Description:  FMN-dependent dehydrogenase
  misc_feature (1)..(348): NCBI GI NO: 27549566 NR Description: glycolate oxidase [Zantedeschia aethiopica]
  misc_feature (1)..(346): NCBI GI NO: 15231850 NR Description: glycolate oxidase, putative; protein id:At3g14420
  misc_feature (1)..(346): NCBI GI NO: 16226772 NR Description: AT3g14420/MOA2_2 [Arabidopsis thaliana]
  misc_feature (1)..(341): NCBI GI NO: 15236857 NR Description: glycolate oxidase - like protein
  misc_feature (1)..(344): NCBI GI NO: 15229497 NR Description: glycolate oxidase; protein id: At3g14415.1
  misc_feature (1)..(348): NCBI GI NO: 1773330 NR Description: glycolate oxidase [Mesembryanthemum crystallinum]
  misc_feature (1)..(344): NCBI GI NO: 228403 NR Description: glycolate oxidase
  misc_feature (1)..(341): NCBI GI NO: 999542 NR Description: Chain A, Glycolate Oxidase (E
  misc_feature (1)..(341): NCBI GI NO: 121530 NR Description:
  misc_feature (1)..(341): NCBI GI NO: 2554675 NR Description: Three-Dimensional Structure Of Glycolate OxidaseWith Bound Active-Site Inhibitors
MVYDFYAGGAEDQWTLKENKGAFSKILVRPRVLIDVSHIDMSTSILGYKISMPIMVAPTALHKLAHQEGEVASAQAAAAAGTIMTLSSWSSCSIEEVSSSAPGLRFFQLSVFKDRDIVQQLVRRAENAGYKAIAVTVDAPRLGRREADVRNRFTLPENVVLKCFEGLDLSKMDKTKGSGLAAYATSQIDSSLSWKDIKWLQTITGLPILVKGVITAEDARIAIECGVAGIIVSNHGGRQLDYLPATISCLEEVVREVKGRRVPVFLDGGIRRGTDVFKALALGASGVFIGRPVLFALAVDGRAGVRNALRMLRDELEITMALSGCSSLKDITRDRVITESDMIRRSRM

SEQ ID NO: 35551 - protein, 308 aa, Zea mays subsp. mays
  peptide (1)..(308): Ceres Seq. ID no. 12391509
  misc_feature (1)..(298): Pfam Name: Pfam Description:  FMN-dependent dehydrogenase
  misc_feature (1)..(308): NCBI GI NO: 27549566 NR Description: glycolate oxidase [Zantedeschia aethiopica]
  misc_feature (1)..(306): NCBI GI NO: 15231850 NR Description: glycolate oxidase, putative; protein id:At3g14420
  misc_feature (1)..(306): NCBI GI NO: 16226772 NR Description: AT3g14420/MOA2_2 [Arabidopsis thaliana]
  misc_feature (1)..(301): NCBI GI NO: 15236857 NR Description: glycolate oxidase - like protein
  misc_feature (1)..(304): NCBI GI NO: 15229497 NR Description: glycolate oxidase; protein id: At3g14415.1
  misc_feature (1)..(308): NCBI GI NO: 1773330 NR Description: glycolate oxidase [Mesembryanthemum crystallinum]
  misc_feature (1)..(304): NCBI GI NO: 228403 NR Description: glycolate oxidase
  misc_feature (1)..(301): NCBI GI NO: 999542 NR Description: Chain A, Glycolate Oxidase (E
  misc_feature (1)..(301): NCBI GI NO: 121530 NR Description:
  misc_feature (1)..(301): NCBI GI NO: 2554675 NR Description: Three-Dimensional Structure Of Glycolate OxidaseWith Bound Active-Site Inhibitors
MSTSILGYKISMPIMVAPTALHKLAHQEGEVASAQAAAAAGTIMTLSSWSSCSIEEVSSSAPGLRFFQLSVFKDRDIVQQLVRRAENAGYKAIAVTVDAPRLGRREADVRNRFTLPENVVLKCFEGLDLSKMDKTKGSGLAAYATSQIDSSLSWKDIKWLQTITGLPILVKGVITAEDARIAIECGVAGIIVSNHGGRQLDYLPATISCLEEVVREVKGRRVPVFLDGGIRRGTDVFKALALGASGVFIGRPVLFALAVDGRAGVRNALRMLRDELEITMALSGCSSLKDITRDRVITESDMIRRSRM

SEQ ID NO: 35552 - DNA, 1161 bp, Zea mays subsp. mays
  misc_feature (1)..(1161): Ceres Seq. ID no. 12364133
  misc_feature (226)..(226): n is a, c, t, g, unknown, or other
attagcaaagcgtacatccctccaacaaaccttgagttgagagaggagagaggagacagcaagcgacacaacacagaggtaaccggctcacgcctgtctcggtggccgtgggcaatcatggccactgtgggacagtctggggccctgaggagggtcaccgtgcactacgccaactcgcccacaggcagcacggtggcagaagtgagctttgacgaccttgacgacnagctgctcctgtttgtgctcgccgatcttcttcctggccaggaaggtttacaccagtcgatcttggaaggaacatacaacaaccaggagaaccacatgagaggtgcagcacccagtgcaccatatggttattcacggccagaggagtaccgtgcagagagcagcactgctgcagcagcagcaactggttctaggaattcaggcatggatgaacagatcgcctcggacttcgagtacgccaagcagctgcagcaggagatggaggacctcagcgtcaaagacgaagacgacaacgatatcagctgcgtgccgtctccatctgactctgacgatgagcacgagcatcatgacgaagaggaagaggctgacaggcaggaggacggtgatggtgatgatgatccagacaacatgacttatgagcaaggacaggcacttgtagaatctgtggggactgagtacagaggtctatccgatgagctcatctcctacctgcagccatggaagtacaaggcagtcaaggcttcagggctcttctcccggaaaacaaaccatgaagactgcccgatctgcctgtccactttcagaaaccgggaaaccatgataacgttgccgtgcaggcatcactaccacgcagcttgtgtcaccagatggctcaaggtcaacaagacatgccctgtatgcaaatacgaactgtttggaccttcctaggatccgaccacgtcgacgatggagctgagaggataatgatgatgacgacgacaacgacagatggttgtgtcatctgctctctttttttagcgccaagaaaactggaaatgaaaaagggaaatcaatccgaaaggagaatagaaattaggaagtataggtagaatatctctcttgccagtgactgtgcgatgaattaagcatacctcgtgctatttatgagaaaaaggg

SEQ ID NO: 35553 - protein, 310 aa, Zea mays subsp. mays
  peptide (1)..(310): Ceres Seq. ID no. 12364134
  misc_feature (262)..(302): Pfam Name: RING finger Pfam Description: Zinc finger, C3HC4 type
  misc_feature (40)..(310): NCBI GI NO: 34898016 NR Description: ESTs C26000
  misc_feature (82)..(308): NCBI GI NO: 38567912 NR Description: OSJNBa0088I22.8
  misc_feature (165)..(310): NCBI GI NO: 22331928 NR Description: putative protein; protein id: At3g63530.1
  misc_feature (38)..(306): NCBI GI NO: 21536693 NR Description: unknown [Arabidopsis thaliana]
  misc_feature (38)..(306): NCBI GI NO: 18402411 NR Description: expressed protein; protein id: At3g19910
  misc_feature (123)..(310): NCBI GI NO: 10334499 NR Description: hypothetical protein [Cicer arietinum]
  misc_feature (127)..(302): NCBI GI NO: 15232746 NR Description: zinc-finger protein-like protein
  misc_feature (223)..(306): NCBI GI NO: 15236782 NR Description: putative protein; protein id: At4g26580.1
  misc_feature (208)..(303): NCBI GI NO: 11358785 NR Description: RING-H2 finger protein RHG1a
  misc_feature (223)..(306): NCBI GI NO: 34911538 NR Description: P0421H07.18
  misc_feature (76)..(76): Xaa is any aa, unknown or other
ISKAYIPPTNLELREERGDSKRHNTEVTGSRLSRWPWAIMATVGQSGALRRVTVHYANSPTGSTVAEVSFDDLDDXLLLFVLADLLPGQEGLHQSILEGTYNNQENHMRGAAPSAPYGYSRPEEYRAESSTAAAAATGSRNSGMDEQIASDFEYAKQLQQEMEDLSVKDEDDNDISCVPSPSDSDDEHEHHDEEEEADRQEDGDGDDDPDNMTYEQGQALVESVGTEYRGLSDELISYLQPWKYKAVKASGLFSRKTNHEDCPICLSTFRNRETMITLPCRHHYHAACVTRWLKVNKTCPVCKYELFGPS

SEQ ID NO: 35554 - protein, 271 aa, Zea mays subsp. mays
  peptide (1)..(271): Ceres Seq. ID no. 12364135
  misc_feature (223)..(263): Pfam Name: RING finger Pfam Description: Zinc finger, C3HC4 type
  misc_feature (1)..(271): NCBI GI NO: 34898016 NR Description: ESTs C26000
  misc_feature (43)..(269): NCBI GI NO: 38567912 NR Description: OSJNBa0088I22.8
  misc_feature (126)..(271): NCBI GI NO: 22331928 NR Description: putative protein; protein id: At3g63530.1
  misc_feature (1)..(267): NCBI GI NO: 21536693 NR Description: unknown [Arabidopsis thaliana]
  misc_feature (1)..(267): NCBI GI NO: 18402411 NR Description: expressed protein; protein id: At3g19910
  misc_feature (84)..(271): NCBI GI NO: 10334499 NR Description: hypothetical protein [Cicer arietinum]
  misc_feature (88)..(263): NCBI GI NO: 15232746 NR Description: zinc-finger protein-like protein
  misc_feature (184)..(267): NCBI GI NO: 15236782 NR Description: putative protein; protein id: At4g26580.1
  misc_feature (169)..(264): NCBI GI NO: 11358785 NR Description: RING-H2 finger protein RHG1a
  misc_feature (184)..(267): NCBI GI NO: 34911538 NR Description: P0421H07.18
  misc_feature (37)..(37): Xaa is any aa, unknown or other
MATVGQSGALRRVTVHYANSPTGSTVAEVSFDDLDDXLLLFVLADLLPGQEGLHQSILEGTYNNQENHMRGAAPSAPYGYSRPEEYRAESSTAAAAATGSRNSGMDEQIASDFEYAKQLQQEMEDLSVKDEDDNDISCVPSPSDSDDEHEHHDEEEEADRQEDGDGDDDPDNMTYEQGQALVESVGTEYRGLSDELISYLQPWKYKAVKASGLFSRKTNHEDCPICLSTFRNRETMITLPCRHHYHAACVTRWLKVNKTCPVCKYELFGPS

SEQ ID NO: 35555 - protein, 203 aa, Zea mays subsp. mays
  peptide (1)..(203): Ceres Seq. ID no. 12364136
  misc_feature (155)..(195): Pfam Name: RING finger Pfam Description: Zinc finger, C3HC4 type
  misc_feature (1)..(203): NCBI GI NO: 34898016 NR Description: ESTs C26000
  misc_feature (1)..(201): NCBI GI NO: 38567912 NR Description: OSJNBa0088I22.8
  misc_feature (58)..(203): NCBI GI NO: 22331928 NR Description: putative protein; protein id: At3g63530.1
  misc_feature (1)..(199): NCBI GI NO: 21536693 NR Description: unknown [Arabidopsis thaliana]
  misc_feature (1)..(199): NCBI GI NO: 18402411 NR Description: expressed protein; protein id: At3g19910
  misc_feature (16)..(203): NCBI GI NO: 10334499 NR Description: hypothetical protein [Cicer arietinum]
  misc_feature (20)..(195): NCBI GI NO: 15232746 NR Description: zinc-finger protein-like protein
  misc_feature (116)..(199): NCBI GI NO: 15236782 NR Description: putative protein; protein id: At4g26580.1
  misc_feature (101)..(196): NCBI GI NO: 11358785 NR Description: RING-H2 finger protein RHG1a
  misc_feature (116)..(199): NCBI GI NO: 34911538 NR Description: P0421H07.18
MRGAAPSAPYGYSRPEEYRAESSTAAAAATGSRNSGMDEQIASDFEYAKQLQQEMEDLSVKDEDDNDISCVPSPSDSDDEHEHHDEEEEADRQEDGDGDDDPDNMTYEQGQALVESVGTEYRGLSDELISYLQPWKYKAVKASGLFSRKTNHEDCPICLSTFRNRETMITLPCRHHYHAACVTRWLKVNKTCPVCKYELFGPS

SEQ ID NO: 35556 - DNA, 1914 bp, Zea mays subsp. mays
  misc_feature (1)..(1914): Ceres Seq. ID no. 12454931
aaggcccaactccactcatcgccactgcgccgaaacccaaagcggggaggaggagcggaaaagaaaaggaaaatgggaggagcggaagcaagtccgagcaagtcagaggatccgccggcctatctccgcctataaaatgccgtcccaccccccaccttcctagcagctgctctccaccaagagctgctggcaccaccaaaccaatcgctggatttgtccagagtatttccggtttcaccgccctagatctgacccgagacgccgcgtcttcgctgagatggcgattactgtgaggcggtcgacgatggtgcgcccggcgcgggagacgccgcggcagcggctgtggaactccaacctcgacctcgtggtgccgcgcttccacacgcccagtgtctacttctaccgccgcgacggccccgtgccggatgcggaggggttcttcgacggcgagcggatgcggcgcgcgctggcagaggcgctcgtgccgttctatccaatggcgggccgcctcgcgcgggacgaggacggtagggtcgagatcgactgcaatggcgagggagtgctcttcgtcgaggccgacgcgcccgatgcctctgtcgatgactacggtgacttcgcgcccaccatggagctcaagcgcctcatcccgaccgtcgattacaccgacgacatctcggccttctcgctactcgtgctccaggtgacttatttcaaatgtggaggcgtctcccttggtgttggcatgcaacaccatgcagcggatggcatgtctggcttgcacttcattaactcatggtctgacctctgccgtggagctcaaatttctgtcatgcccttcattgaccgcacccttcttcgtgctcgtgatccaccaactccatcttttcaacatatcgagtaccagcctgccccagctatgttgtcctccacaacccagttccttgcttccaagtcaaagccacctgccactgctgtggacattttcaagctcactcgctcagaccttggccggctgcgctcacagcttcctgcaggggaaggtgcaccccggttcagcacatatgcagtgctagcggcacatgtctggaaatgtgtctcccttgcacgcagcctacctcctgaacaacccaccaagttgtattgcgccactgatggccgtcaacggctacagcctccactaccagatgggtactttggcaatgtcatcttcaccgcgacaccacttgctgaggcgggcaaggtgaccagtgagctggcagaaggagcagcagtcatccagggagcactggataggatggacaacgactactgccgctcagcgttagactacctggatcttcaaccggatctgtcagcacttgtgcgtggagcgcataccttccgctgcccgaacctagggctcaccagctgggtgcgccttcctatccatgatgctgacttcggatggggccggcctgtgttcatggggccaggtggcattgcgtatgaaggtctggcgtttgtcctcccaagtgcaaatggcgacggcagcctgtccattgctatctcgttgcaggctgagcacatggagaagttccggaagctaatcggcggtgccaactgttgaaggaggatgtcatagggcgagagggattatgctccgcccaaattctcagataaaatactgaagtttcaagtgaacccagtggctgcactttcactttgaagacttgcagaggaaattcatggtcacttcattttgtgaggttaattatagagaaagggtagaaattatatgaagaaacatagtaaaaaatcattgttaggaacaaactccaatagcaggctctacttgtacgtcgcagacataagctgagactgatctgcgattgcaacagattatactcttctatcaggttgactgaagttccctcg

SEQ ID NO: 35557 - protein, 442 aa, Zea mays subsp. mays
  peptide (1)..(442): Ceres Seq. ID no. 12454932
  misc_feature (1)..(437): Pfam Name: Pfam Description:  Transferase family
  misc_feature (1)..(437): NCBI GI NO: 38345030 NR Description: OSJNBa0029H02.14
  misc_feature (1)..(437): NCBI GI NO: 32400295 NR Description: hydroxyanthranilate hydroxycinnamoyltransferase 3
  misc_feature (1)..(437): NCBI GI NO: 32400291 NR Description: hydroxyanthranilate hydroxycinnamoyltransferase 1
  misc_feature (1)..(437): NCBI GI NO: 32400293 NR Description: hydroxyanthranilate hydroxycinnamoyltransferase 2
  misc_feature (1)..(437): NCBI GI NO: 27475616 NR Description: hydroxycinnamoyl transferase [Nicotiana tabacum]
  misc_feature (1)..(437): NCBI GI NO: 21536883 NR Description: anthranilate N-benzoyltransferase
  misc_feature (1)..(437): NCBI GI NO: 15239747 NR Description: anthranilate N-benzoyltransferase
  misc_feature (1)..(154): NCBI GI NO: 10241667 NR Description: putative N-hydroxycinnamoyl/benzoyl transferase
  misc_feature (303)..(437): NCBI GI NO: 10241667 NR Description: putative N-hydroxycinnamoyl/benzoyl transferase
  misc_feature (138)..(437): NCBI GI NO: 32400297 NR Description: hydroxyanthranilate hydroxycinnamoyltransferase 4
MAITVRRSTMVRPARETPRQRLWNSNLDLVVPRFHTPSVYFYRRDGPVPDAEGFFDGERMRRALAEALVPFYPMAGRLARDEDGRVEIDCNGEGVLFVEADAPDASVDDYGDFAPTMELKRLIPTVDYTDDISAFSLLVLQVTYFKCGGVSLGVGMQHHAADGMSGLHFINSWSDLCRGAQISVMPFIDRTLLRARDPPTPSFQHIEYQPAPAMLSSTTQFLASKSKPPATAVDIFKLTRSDLGRLRSQLPAGEGAPRFSTYAVLAAHVWKCVSLARSLPPEQPTKLYCATDGRQRLQPPLPDGYFGNVIFTATPLAEAGKVTSELAEGAAVIQGALDRMDNDYCRSALDYLDLQPDLSALVRGAHTFRCPNLGLTSWVRLPIHDADFGWGRPVFMGPGGIAYEGLAFVLPSANGDGSLSIAISLQAEHMEKFRKLIGGANC

SEQ ID NO: 35558 - protein, 433 aa, Zea mays subsp. mays
  peptide (1)..(433): Ceres Seq. ID no. 12454933
  misc_feature (1)..(428): Pfam Name: Pfam Description:  Transferase family
  misc_feature (1)..(428): NCBI GI NO: 38345030 NR Description: OSJNBa0029H02.14
  misc_feature (1)..(428): NCBI GI NO: 32400295 NR Description: hydroxyanthranilate hydroxycinnamoyltransferase 3
  misc_feature (1)..(428): NCBI GI NO: 32400291 NR Description: hydroxyanthranilate hydroxycinnamoyltransferase 1
  misc_feature (1)..(428): NCBI GI NO: 32400293 NR Description: hydroxyanthranilate hydroxycinnamoyltransferase 2
  misc_feature (1)..(428): NCBI GI NO: 27475616 NR Description: hydroxycinnamoyl transferase [Nicotiana tabacum]
  misc_feature (1)..(428): NCBI GI NO: 21536883 NR Description: anthranilate N-benzoyltransferase
  misc_feature (1)..(428): NCBI GI NO: 15239747 NR Description: anthranilate N-benzoyltransferase
  misc_feature (1)..(145): NCBI GI NO: 10241667 NR Description: putative N-hydroxycinnamoyl/benzoyl transferase
  misc_feature (294)..(428): NCBI GI NO: 10241667 NR Description: putative N-hydroxycinnamoyl/benzoyl transferase
  misc_feature (129)..(428): NCBI GI NO: 32400297 NR Description: hydroxyanthranilate hydroxycinnamoyltransferase 4
MVRPARETPRQRLWNSNLDLVVPRFHTPSVYFYRRDGPVPDAEGFFDGERMRRALAEALVPFYPMAGRLARDEDGRVEIDCNGEGVLFVEADAPDASVDDYGDFAPTMELKRLIPTVDYTDDISAFSLLVLQVTYFKCGGVSLGVGMQHHAADGMSGLHFINSWSDLCRGAQISVMPFIDRTLLRARDPPTPSFQHIEYQPAPAMLSSTTQFLASKSKPPATAVDIFKLTRSDLGRLRSQLPAGEGAPRFSTYAVLAAHVWKCVSLARSLPPEQPTKLYCATDGRQRLQPPLPDGYFGNVIFTATPLAEAGKVTSELAEGAAVIQGALDRMDNDYCRSALDYLDLQPDLSALVRGAHTFRCPNLGLTSWVRLPIHDADFGWGRPVFMGPGGIAYEGLAFVLPSANGDGSLSIAISLQAEHMEKFRKLIGGANC

SEQ ID NO: 35559 - protein, 383 aa, Zea mays subsp. mays
  peptide (1)..(383): Ceres Seq. ID no. 12454934
  misc_feature (1)..(378): Pfam Name: Pfam Description:  Transferase family
  misc_feature (1)..(378): NCBI GI NO: 38345030 NR Description: OSJNBa0029H02.14
  misc_feature (1)..(378): NCBI GI NO: 32400295 NR Description: hydroxyanthranilate hydroxycinnamoyltransferase 3
  misc_feature (1)..(378): NCBI GI NO: 32400291 NR Description: hydroxyanthranilate hydroxycinnamoyltransferase 1
  misc_feature (1)..(378): NCBI GI NO: 32400293 NR Description: hydroxyanthranilate hydroxycinnamoyltransferase 2
  misc_feature (1)..(378): NCBI GI NO: 27475616 NR Description: hydroxycinnamoyl transferase [Nicotiana tabacum]
  misc_feature (1)..(378): NCBI GI NO: 21536883 NR Description: anthranilate N-benzoyltransferase
  misc_feature (1)..(378): NCBI GI NO: 15239747 NR Description: anthranilate N-benzoyltransferase
  misc_feature (1)..(95): NCBI GI NO: 10241667 NR Description: putative N-hydroxycinnamoyl/benzoyl transferase
  misc_feature (244)..(378): NCBI GI NO: 10241667 NR Description: putative N-hydroxycinnamoyl/benzoyl transferase
  misc_feature (79)..(378): NCBI GI NO: 32400297 NR Description: hydroxyanthranilate hydroxycinnamoyltransferase 4
MRRALAEALVPFYPMAGRLARDEDGRVEIDCNGEGVLFVEADAPDASVDDYGDFAPTMELKRLIPTVDYTDDISAFSLLVLQVTYFKCGGVSLGVGMQHHAADGMSGLHFINSWSDLCRGAQISVMPFIDRTLLRARDPPTPSFQHIEYQPAPAMLSSTTQFLASKSKPPATAVDIFKLTRSDLGRLRSQLPAGEGAPRFSTYAVLAAHVWKCVSLARSLPPEQPTKLYCATDGRQRLQPPLPDGYFGNVIFTATPLAEAGKVTSELAEGAAVIQGALDRMDNDYCRSALDYLDLQPDLSALVRGAHTFRCPNLGLTSWVRLPIHDADFGWGRPVFMGPGGIAYEGLAFVLPSANGDGSLSIAISLQAEHMEKFRKLIGGANC

SEQ ID NO: 35560 - DNA, 387 bp, Zea mays subsp. mays
  misc_feature (1)..(387): Ceres Seq. ID no. 13622708
gatagatgcccgaccaatctaatagcgccgcaacgcgaagcgcgaagccgcgaagcctcacctacagttccttcgcgcaccggcaccgcggcggcagttcagcatggtggcagcatccgtagccgagcgggcctatgaggcggcgacgcggtccgcgctggtggcgctggagcgcaacctcatcccggacgcggtgacccggcgcctgacgcggctcctgctcgcgcagcgcctccgccagggctacctcccctccgcgccgctccagctgcagcagctcctccagttcgtccactctcttgaagagatgcccattgccattgaaacagacaaagctaaagcccaacactatgagttgccaactacatttttcaagctagtgctggg

SEQ ID NO: 35561 - protein, 94 aa, Zea mays subsp. mays
  peptide (1)..(94): Ceres Seq. ID no. 13622709
  misc_feature (6)..(93): NCBI GI NO: 7486449 NR Description: hypothetical protein F4I10
  misc_feature (6)..(93): NCBI GI NO: 18418151 NR Description: expressed protein [Arabidopsis thaliana]
  misc_feature (6)..(93): NCBI GI NO: 21593795 NR Description: coclaurine N-methyltransferase
  misc_feature (6)..(93): NCBI GI NO: 26451688 NR Description: unknown protein [Arabidopsis thaliana]
  misc_feature (6)..(93): NCBI GI NO: 30689611 NR Description: expressed protein [Arabidopsis thaliana]
  misc_feature (1)..(93): NCBI GI NO: 21242125 NR Description: conserved hypothetical protein
  misc_feature (7)..(93): NCBI GI NO: 16754879 NR Description: coclaurine N-methyltransferase [Coptis japonica]
  misc_feature (14)..(92): NCBI GI NO: 33413898 NR Description: S-adenosyl-L-methionine: coclaurine N-methyltransferase
  misc_feature (22)..(93): NCBI GI NO: 39997416 NR Description: cyclopropane-fatty-acyl-phospholipid synthase
MVAASVAERAYEAATRSALVALERNLIPDAVTRRLTRLLLAQRLRQGYLPSAPLQLQQLLQFVHSLEEMPIAIETDKAKAQHYELPTTFFKLVL

SEQ ID NO: 35562 - DNA, 442 bp, Zea mays subsp. mays
  misc_feature (1)..(442): Ceres Seq. ID no. 2817268
aatggcagaattccaattttctctccacaccaggccacgccacacacaggatagcgagcgggagcgacggcggcggcggaggagctagggttttgatccggcctcgccggctaggctgcgccgccccgacgccgaagccatggacagggagcttctagagacgtttgacgtggccaagaaggcggccgacgcggcggcaggggacggcaactcgccggaggctggccgctgcctcgacgcgctgcggcggctgcgcgacattcgcgtcaacaccgacatcctcgtctcgacgcaggttggcaaacgccttcgaccccttactaagcatcctcactcaggcattcaagcagttgctgcagacctttttgggtactggaaaaaggttgtccttgaagagtcaggaaagaaaaatggcggctcagagaatgaaagatcaagtgac

SEQ ID NO: 35563 - protein, 101 aa, Zea mays subsp. mays
  peptide (1)..(101): Ceres Seq. ID no. 2817269
  misc_feature (1)..(100): NCBI GI NO: 28876018 NR Description: putative transcription elongation factor
  misc_feature (1)..(100): NCBI GI NO: 23617251 NR Description: putative transcription elongation factor
  misc_feature (1)..(89): NCBI GI NO: 15224901 NR Description: putative elongation factor; protein id: At2g38560
  misc_feature (1)..(89): NCBI GI NO: 18377737 NR Description: putative elongation factor [Arabidopsis thaliana]
MDRELLETFDVAKKAADAAAGDGNSPEAGRCLDALRRLRDIRVNTDILVSTQVGKRLRPLTKHPHSGIQAVAADLFGYWKKVVLEESGKKNGGSENERSSD

SEQ ID NO: 35564 - protein, 51 aa, Zea mays subsp. mays
  peptide (1)..(51): Ceres Seq. ID no. 2817270
WQNSNFLSTPGHATHRIASGSDGGGGGARVLIRPRRLGCAAPTPKPWTGSF

SEQ ID NO: 35565 - DNA, 488 bp, Zea mays subsp. mays
  misc_feature (1)..(488): Ceres Seq. ID no. 2817291
actacacgccaaccaaacgccacccgataataaaaacacgagcggcagcagcgatgcttcaggttcgcgcgtccccggccttcctcccctccacctcctccccgccatcgtcgtcgcaggcgccaccgcgttcccgctctcggggaagagccagcggcgccgcggcgggctggtcgcggtgccgcaggcgagccgcgtggctaggcggtccgtgatggcagcggcgggggcagccgcagccgccccggcggcggccaagctcgaggacgccgacgcgctcatcgactctgtggagaccttcatcttcgactgcgacggtgtgatctggaagggcgacaagctgatcgacggcgtgctggagactctcgacctgctccgatcaaagggcaagcggctggtgttcgtgaccaacaactccaccaagtcgaggaagcagtacggcaggaagttcgagacgctggggctgagcgtcgacgaggaagagatct

SEQ ID NO: 35566 - protein, 162 aa, Zea mays subsp. mays
  peptide (1)..(162): Ceres Seq. ID no. 2817292
  misc_feature (97)..(161): Pfam Name: Pfam Description:  haloacid dehalogenase-like hydrolase
  misc_feature (41)..(161): NCBI GI NO: 38345235 NR Description: OSJNBa0084K20.14
  misc_feature (72)..(161): NCBI GI NO: 8953699 NR Description: 4-nitrophenylphosphatase-like
  misc_feature (72)..(161): NCBI GI NO: 15239406 NR Description: p-nitrophenylphosphatase-like protein
  misc_feature (72)..(161): NCBI GI NO: 8885622 NR Description: N-glyceraldehyde-2-phosphotransferase-like
  misc_feature (72)..(161): NCBI GI NO: 26450878 NR Description: putative p-nitrophenylphosphatase
  misc_feature (81)..(161): NCBI GI NO: 21593203 NR Description: 4-nitrophenylphosphatase-like protein
  misc_feature (81)..(161): NCBI GI NO: 10177912 NR Description: 4-nitrophenylphosphatase-like protein
  misc_feature (81)..(161): NCBI GI NO: 15238800 NR Description: 4-nitrophenylphosphatase-like protein
  misc_feature (65)..(161): NCBI GI NO: 15982558 NR Description: phosphoglycolate phosphatase precursor
  misc_feature (94)..(161): NCBI GI NO: 32403122 NR Description: hypothetical protein [Neurospora crassa]
LHANQTPPDNKNTSGSSDASGSRVPGLPPLHLLPAIVVAGATAFPLSGKSQRRRGGLVAVPQASRVARRSVMAAAGAAAAAPAAAKLEDADALIDSVETFIFDCDGVIWKGDKLIDGVLETLDLLRSKGKRLVFVTNNSTKSRKQYGRKFETLGLSVDEEEI

SEQ ID NO: 35567 - protein, 91 aa, Zea mays subsp. mays
  peptide (1)..(91): Ceres Seq. ID no. 2817293
  misc_feature (26)..(90): Pfam Name: Pfam Description:  haloacid dehalogenase-like hydrolase
  misc_feature (1)..(90): NCBI GI NO: 38345235 NR Description: OSJNBa0084K20.14
  misc_feature (1)..(90): NCBI GI NO: 8953699 NR Description: 4-nitrophenylphosphatase-like
  misc_feature (1)..(90): NCBI GI NO: 15239406 NR Description: p-nitrophenylphosphatase-like protein
  misc_feature (1)..(90): NCBI GI NO: 8885622 NR Description: N-glyceraldehyde-2-phosphotransferase-like
  misc_feature (1)..(90): NCBI GI NO: 26450878 NR Description: putative p-nitrophenylphosphatase
  misc_feature (10)..(90): NCBI GI NO: 21593203 NR Description: 4-nitrophenylphosphatase-like protein
  misc_feature (10)..(90): NCBI GI NO: 10177912 NR Description: 4-nitrophenylphosphatase-like protein
  misc_feature (10)..(90): NCBI GI NO: 15238800 NR Description: 4-nitrophenylphosphatase-like protein
  misc_feature (1)..(90): NCBI GI NO: 15982558 NR Description: phosphoglycolate phosphatase precursor
  misc_feature (23)..(90): NCBI GI NO: 32403122 NR Description: hypothetical protein [Neurospora crassa]
MAAAGAAAAAPAAAKLEDADALIDSVETFIFDCDGVIWKGDKLIDGVLETLDLLRSKGKRLVFVTNNSTKSRKQYGRKFETLGLSVDEEEI

SEQ ID NO: 35568 - DNA, 2115 bp, Zea mays subsp. mays
  misc_feature (1)..(2115): Ceres Seq. ID no. 13635237
atgtgtgggattctggcggtgctgggcgtcgttgaggtctccctcgccaagcgctcccgcatcattgagctctcgcgcaggttacggcaccgagggcctgattggagtggtttgcactgtcatgaggattgttaccttgcacaccagcggttggctattatcgatcctacatctggagaccagcctttgtacaatgaggataaaacagttgttgtaacggtgaacggcgaaatttacaatcatgaagaattgaaagctaagttgaaaactcatgagttccaaactggcagtgattgtgaagttatagcccatctttacgaagaatatggcgaagaatttgtggatatgttggatggaatgttctcctttgttcttcttgatacacgtgataaaagcttcatcgcagctcgtgatgctattggcatctgccctttatacatgggatggggtcttgatggatcagtctggttttcttcagagatgaaggcattgagtgatgattgtgaacgcttcataacatttcccccagggcatctctactccagcaagacaggtggtctaaggagatggtacaacccaccatggttttcagagactgtcccttcaaccccttacaatgctctcttcctccgggagatgtttgagaaggctgttattaagaggctgatgactgatgtgccatttggtgtgcttttatctggtggactcgactcttctttggttgcatctgttgcttcgcggcacttaaacgaaacaaaggttgacaggcagtggggaaataaattgcatactttctgtataggcttgaagggttctcctgatcttaaagctgctagagaagttgctgattacctcagcactgtacatcatgagttccacttcacagtgcaggaggggattgatgccttggaagaagtcatctaccatattgagacatatgatgttacaacaatcagagcaagtaccccaatgtttttgatgtcacgcaaaatcaaatctttgggtgtgaagatggttatttctggcgaaggttcagatgaaatttttggtggttacctttattttcacaaggcaccaaacaagaaagaattcctagaggaaacatgtcggaagataaaagcactacatctgtatgactgcttgagagctaacaaagcaacttctgcctggggtgttgaggctcgtgttccattccttgacaaaagtttcatcagtgtagcaatggacattgatcctgaatggaacatgataaaacgtgacctcggtcgaattgagaagtgggtcatgaggaaggcgttcgacgacgacgagcacccttacctgcccaagcatattctctacaggcagaaagaacagttcagtgacggcgttggctacaactggatcgatggcctcaaatccttcactgaacagcaggtgacggatgagatgatgaacaacgccgcccagatgttcccctacaacacgcccgtcaacaaggaggcctactactaccggatgatattcgagaggctcttccctcaggactcggcgagggagacggtgccgtggggcccgagcatcgcctgcagcacgcccgcggccatcgagtgggtggagcagtggaaggcctccaacgacccctccggccgcttcatctcctcccacgactccgccgccaccgaccacacggcggtaagccggcggtggccaacggcggcggcacggccggcgaacggcacggtcaacggcaaggacgtgccagtgccgatcgcggtctgacgagagtacgtgctcgcgcacctccctgctagcttctaccgggctgcagcctgcagcatgcactgtgcgagcacagccgatcagcgccaataaactggaggataagaacgactggtagctgtgtgtgtgtgtgtcgtgcgtgcccaccggccatatcccggtgcggcagcacgtgctattgttacgtgttgtactgccaccagcgtacgtgtctgtgtgtctcgatcatatctgtacgtttttagatttagaagagaaaaaaaaagtatgcccgtgtctgtatgtctggatcatatctgtacgttcttagatttagaagaaagaagaaaaagaatatatacgtgtctctatgtc

SEQ ID NO: 35569 - protein, 586 aa, Zea mays subsp. mays
  peptide (1)..(586): Ceres Seq. ID no. 13635238
  misc_feature (193)..(516): Pfam Name: Pfam Description:  Asparagine synthase
  misc_feature (1)..(555): NCBI GI NO: 3182921 NR Description: Asparagine synthetase
  misc_feature (1)..(570): NCBI GI NO: 22208544 NR Description: asparagine synthetase 2 [Striga hermonthica]
  misc_feature (1)..(561): NCBI GI NO: 25293864 NR Description: asparagine synthase (glutamine-hydrolyzing) (EC6
  misc_feature (1)..(561): NCBI GI NO: 15238108 NR Description: asparagine synthetase ASN3 [Arabidopsis thaliana]
  misc_feature (1)..(574): NCBI GI NO: 30698086 NR Description: asparagine synthetase (gb|AAC72837.1)
  misc_feature (1)..(574): NCBI GI NO: 3859536 NR Description: asparagine synthetase [Arabidopsis thaliana]
  misc_feature (1)..(574): NCBI GI NO: 30698088 NR Description: asparagine synthetase (gb|AAC72837.1)
  misc_feature (1)..(555): NCBI GI NO: 6049843 NR Description: asparagine synthetase [Helianthus annuus]
  misc_feature (1)..(552): NCBI GI NO: 3132675 NR Description: asparagine synthetase [Elaeagnus umbellata]
  misc_feature (1)..(552): NCBI GI NO: 26246639 NR Description: Asparagine synthetase B
MCGILAVLGVVEVSLAKRSRIIELSRRLRHRGPDWSGLHCHEDCYLAHQRLAIIDPTSGDQPLYNEDKTVVVTVNGEIYNHEELKAKLKTHEFQTGSDCEVIAHLYEEYGEEFVDMLDGMFSFVLLDTRDKSFIAARDAIGICPLYMGWGLDGSVWFSSEMKALSDDCERFITFPPGHLYSSKTGGLRRWYNPPWFSETVPSTPYNALFLREMFEKAVIKRLMTDVPFGVLLSGGLDSSLVASVASRHLNETKVDRQWGNKLHTFCIGLKGSPDLKAAREVADYLSTVHHEFHFTVQEGIDALEEVIYHIETYDVTTIRASTPMFLMSRKIKSLGVKMVISGEGSDEIFGGYLYFHKAPNKKEFLEETCRKIKALHLYDCLRANKATSAWGVEARVPFLDKSFISVAMDIDPEWNMIKRDLGRIEKWVMRKAFDDDEHPYLPKHILYRQKEQFSDGVGYNWIDGLKSFTEQQVTDEMMNNAAQMFPYNTPVNKEAYYYRMIFERLFPQDSARETVPWGPSIACSTPAAIEWVEQWKASNDPSGRFISSHDSAATDHTAVSRRWPTAAARPANGTVNGKDVPVPIAV

SEQ ID NO: 35570 - protein, 471 aa, Zea mays subsp. mays
  peptide (1)..(471): Ceres Seq. ID no. 13635239
  misc_feature (78)..(401): Pfam Name: Pfam Description:  Asparagine synthase
  misc_feature (1)..(440): NCBI GI NO: 3182921 NR Description: Asparagine synthetase
  misc_feature (1)..(455): NCBI GI NO: 22208544 NR Description: asparagine synthetase 2 [Striga hermonthica]
  misc_feature (1)..(446): NCBI GI NO: 25293864 NR Description: asparagine synthase (glutamine-hydrolyzing) (EC6
  misc_feature (1)..(446): NCBI GI NO: 15238108 NR Description: asparagine synthetase ASN3 [Arabidopsis thaliana]
  misc_feature (1)..(459): NCBI GI NO: 30698086 NR Description: asparagine synthetase (gb|AAC72837.1)
  misc_feature (1)..(459): NCBI GI NO: 3859536 NR Description: asparagine synthetase [Arabidopsis thaliana]
  misc_feature (1)..(459): NCBI GI NO: 30698088 NR Description: asparagine synthetase (gb|AAC72837.1)
  misc_feature (1)..(440): NCBI GI NO: 6049843 NR Description: asparagine synthetase [Helianthus annuus]
  misc_feature (1)..(437): NCBI GI NO: 3132675 NR Description: asparagine synthetase [Elaeagnus umbellata]
  misc_feature (1)..(437): NCBI GI NO: 26246639 NR Description: Asparagine synthetase B
MLDGMFSFVLLDTRDKSFIAARDAIGICPLYMGWGLDGSVWFSSEMKALSDDCERFITFPPGHLYSSKTGGLRRWYNPPWFSETVPSTPYNALFLREMFEKAVIKRLMTDVPFGVLLSGGLDSSLVASVASRHLNETKVDRQWGNKLHTFCIGLKGSPDLKAAREVADYLSTVHHEFHFTVQEGIDALEEVIYHIETYDVTTIRASTPMFLMSRKIKSLGVKMVISGEGSDEIFGGYLYFHKAPNKKEFLEETCRKIKALHLYDCLRANKATSAWGVEARVPFLDKSFISVAMDIDPEWNMIKRDLGRIEKWVMRKAFDDDEHPYLPKHILYRQKEQFSDGVGYNWIDGLKSFTEQQVTDEMMNNAAQMFPYNTPVNKEAYYYRMIFERLFPQDSARETVPWGPSIACSTPAAIEWVEQWKASNDPSGRFISSHDSAATDHTAVSRRWPTAAARPANGTVNGKDVPVPIAV

SEQ ID NO: 35571 - protein, 467 aa, Zea mays subsp. mays
  peptide (1)..(467): Ceres Seq. ID no. 13635240
  misc_feature (74)..(397): Pfam Name: Pfam Description:  Asparagine synthase
  misc_feature (1)..(436): NCBI GI NO: 3182921 NR Description: Asparagine synthetase
  misc_feature (1)..(451): NCBI GI NO: 22208544 NR Description: asparagine synthetase 2 [Striga hermonthica]
  misc_feature (1)..(442): NCBI GI NO: 25293864 NR Description: asparagine synthase (glutamine-hydrolyzing) (EC6
  misc_feature (1)..(442): NCBI GI NO: 15238108 NR Description: asparagine synthetase ASN3 [Arabidopsis thaliana]
  misc_feature (1)..(455): NCBI GI NO: 30698086 NR Description: asparagine synthetase (gb|AAC72837.1)
  misc_feature (1)..(455): NCBI GI NO: 3859536 NR Description: asparagine synthetase [Arabidopsis thaliana]
  misc_feature (1)..(455): NCBI GI NO: 30698088 NR Description: asparagine synthetase (gb|AAC72837.1)
  misc_feature (1)..(436): NCBI GI NO: 6049843 NR Description: asparagine synthetase [Helianthus annuus]
  misc_feature (1)..(433): NCBI GI NO: 3132675 NR Description: asparagine synthetase [Elaeagnus umbellata]
  misc_feature (1)..(433): NCBI GI NO: 26246639 NR Description: Asparagine synthetase B
MFSFVLLDTRDKSFIAARDAIGICPLYMGWGLDGSVWFSSEMKALSDDCERFITFPPGHLYSSKTGGLRRWYNPPWFSETVPSTPYNALFLREMFEKAVIKRLMTDVPFGVLLSGGLDSSLVASVASRHLNETKVDRQWGNKLHTFCIGLKGSPDLKAAREVADYLSTVHHEFHFTVQEGIDALEEVIYHIETYDVTTIRASTPMFLMSRKIKSLGVKMVISGEGSDEIFGGYLYFHKAPNKKEFLEETCRKIKALHLYDCLRANKATSAWGVEARVPFLDKSFISVAMDIDPEWNMIKRDLGRIEKWVMRKAFDDDEHPYLPKHILYRQKEQFSDGVGYNWIDGLKSFTEQQVTDEMMNNAAQMFPYNTPVNKEAYYYRMIFERLFPQDSARETVPWGPSIACSTPAAIEWVEQWKASNDPSGRFISSHDSAATDHTAVSRRWPTAAARPANGTVNGKDVPVPIAV

SEQ ID NO: 35572 - DNA, 1895 bp, Zea mays subsp. mays
  misc_feature (1)..(1895): Ceres Seq. ID no. 12567136
acccgtcctccacttgcccttctccgccaacagactgtccccggccgctgccattgccgattgctcacatccgcgttcgtgttcgcatccgcatcagggtcacctgcgccggcgagccatttgaaagggaggagtagcagactctcagaggtggacatgacgctgttgtgcgtgccgctggtggggcggacggtggaggagatgattacagacgcggcggcggccgccgccaccggcggcgacatggtcgagatccggcttgacttcatccaggggttccgcccgcgtgagcacctaccgcccctgctccgcggctgcccactcccggccctcgtcacctatcgacctgtctgggaaggaggccaatatgaaggtgatgacaccacaagatttgagacactacgtttagcaatggaattaggtgtagactatgttgatattgaattgaaggttgcagacaaatttatgagctttattgctggccataagccagagaaatgtaaacttattgtttcttcacataattatgaatatactccatcatgtgaggaaattacaaatcttgtcgctagtatacaagcagttggagctgatatagtgaaagttgcaacaaccgccaaggacattgtcgatgtatcacggatgttccaagtgatggtacactgccaagtgcctatgattggactcgtaatgagtgaaaaaggtttaatgtcaagagtgttagcgcccaagtttggtggatatcttacatttgggatactgaatgctacaaagacatcagcttctggacaaccaacagttgaggacttactggacatttacaacataaagtgtattgggcctgatacaaagattcttggtcttatagccaacccagtaaaacagagcaagagcccaattttacacaataaatgtcttcagtccattggatataatgctgtttatcttccacttcttggagataatcttgctagttttctggagacatactcatctcctgacttttcaggatttagttgctcacttcctttcaaagtagatgctgtacagtgttgtgatgaacatgatccagttgctaagtcaataggagccataaacactataattagaagaccagatggcaaattagtggggtacaatacggactacattggagctatatctgctattgaggatggcattggaggtccagggtcaaaggatgctgtcatctcaccattggctggtaggcttattgttgttgtaggagctgggggtgctggtaaggcaattgcttatggggcaaaggagaagggtgcgagggtagttatagcaaatcgcacctatgagaaggctgtacgtcttgccaatgcaattggtggtcaggccctgagattagaagacctggaaactttcagacctgaagaagggatgatccttgctaatgcaacatcattggggatgtacccaaatgttgatggtactcctattccaaagaaagccttgggtttctatgatgtggtatttgatgccgtatatgccccaaaagttactcggcttcttcgagaagcagaagaatgtggagttaaagttgttagtggtgtggaaatgtttattagacaagccatgggtcaatttgagcatttcaccggtggtatagaagctcctgaaagcctgatgcgtgagatagcagcaaaatacacctagcaggctaatggcgaaaacctatctttgatgaatatttgcccaaagattttctcgggctgagtgaataaatgttttgcagttatcatgtttgctgttatgttagatttagccgacttgtcacctgcacactgtaagattatgttgccatgctatagtgttcttgtacctgcaatagaagagttgcaagaataaagagtcagcttagaacc

SEQ ID NO: 35573 - protein, 561 aa, Zea mays subsp. mays
  peptide (1)..(561): Ceres Seq. ID no. 12567137
  misc_feature (301)..(545): Pfam Name: Pfam Description:  Shikimate / quinate 5-dehydrogenase
  misc_feature (114)..(561): NCBI GI NO: 34914824 NR Description: putative 3-dehydroquinate dehydratase
  misc_feature (53)..(115): NCBI GI NO: 34914824 NR Description: putative 3-dehydroquinate dehydratase
  misc_feature (53)..(551): NCBI GI NO: 34914828 NR Description: putative 3-dehydroquinate dehydratase / shikimate5-dehydrogenase
  misc_feature (54)..(560): NCBI GI NO: 15230703 NR Description: dehydroquinate dehydratase/shikimate dehydrogenase
  misc_feature (116)..(560): NCBI GI NO: 7436862 NR Description: 3-dehydroquinate dehydratase (EC 4
  misc_feature (41)..(122): NCBI GI NO: 7436862 NR Description: 3-dehydroquinate dehydratase (EC 4
  misc_feature (54)..(561): NCBI GI NO: 629688 NR Description: 3-dehydroquinate dehydratase (EC 4
  misc_feature (54)..(372): NCBI GI NO: 7488788 NR Description: 3-dehydroquinate dehydratase (EC 4
  misc_feature (279)..(561): NCBI GI NO: 15669272 NR Description: shikimate 5-dehydrogenase (aroE)
  misc_feature (279)..(561): NCBI GI NO: 29726767 NR Description: Chain A
TRPPLALLRQQTVPGRCHCRLLTSAFVFASASGSPAPASHLKGRSSRLSEVDMTLLCVPLVGRTVEEMITDAAAAAATGGDMVEIRLDFIQGFRPREHLPPLLRGCPLPALVTYRPVWEGGQYEGDDTTRFETLRLAMELGVDYVDIELKVADKFMSFIAGHKPEKCKLIVSSHNYEYTPSCEEITNLVASIQAVGADIVKVATTAKDIVDVSRMFQVMVHCQVPMIGLVMSEKGLMSRVLAPKFGGYLTFGILNATKTSASGQPTVEDLLDIYNIKCIGPDTKILGLIANPVKQSKSPILHNKCLQSIGYNAVYLPLLGDNLASFLETYSSPDFSGFSCSLPFKVDAVQCCDEHDPVAKSIGAINTIIRRPDGKLVGYNTDYIGAISAIEDGIGGPGSKDAVISPLAGRLIVVVGAGGAGKAIAYGAKEKGARVVIANRTYEKAVRLANAIGGQALRLEDLETFRPEEGMILANATSLGMYPNVDGTPIPKKALGFYDVVFDAVYAPKVTRLLREAEECGVKVVSGVEMFIRQAMGQFEHFTGGIEAPESLMREIAAKYT

SEQ ID NO: 35574 - protein, 509 aa, Zea mays subsp. mays
  peptide (1)..(509): Ceres Seq. ID no. 12567138
  misc_feature (249)..(493): Pfam Name: Pfam Description:  Shikimate / quinate 5-dehydrogenase
  misc_feature (62)..(509): NCBI GI NO: 34914824 NR Description: putative 3-dehydroquinate dehydratase
  misc_feature (1)..(63): NCBI GI NO: 34914824 NR Description: putative 3-dehydroquinate dehydratase
  misc_feature (1)..(499): NCBI GI NO: 34914828 NR Description: putative 3-dehydroquinate dehydratase / shikimate5-dehydrogenase
  misc_feature (2)..(508): NCBI GI NO: 15230703 NR Description: dehydroquinate dehydratase/shikimate dehydrogenase
  misc_feature (64)..(508): NCBI GI NO: 7436862 NR Description: 3-dehydroquinate dehydratase (EC 4
  misc_feature (1)..(70): NCBI GI NO: 7436862 NR Description: 3-dehydroquinate dehydratase (EC 4
  misc_feature (2)..(509): NCBI GI NO: 629688 NR Description: 3-dehydroquinate dehydratase (EC 4
  misc_feature (2)..(320): NCBI GI NO: 7488788 NR Description: 3-dehydroquinate dehydratase (EC 4
  misc_feature (227)..(509): NCBI GI NO: 15669272 NR Description: shikimate 5-dehydrogenase (aroE)
  misc_feature (227)..(509): NCBI GI NO: 29726767 NR Description: Chain A
MTLLCVPLVGRTVEEMITDAAAAAATGGDMVEIRLDFIQGFRPREHLPPLLRGCPLPALVTYRPVWEGGQYEGDDTTRFETLRLAMELGVDYVDIELKVADKFMSFIAGHKPEKCKLIVSSHNYEYTPSCEEITNLVASIQAVGADIVKVATTAKDIVDVSRMFQVMVHCQVPMIGLVMSEKGLMSRVLAPKFGGYLTFGILNATKTSASGQPTVEDLLDIYNIKCIGPDTKILGLIANPVKQSKSPILHNKCLQSIGYNAVYLPLLGDNLASFLETYSSPDFSGFSCSLPFKVDAVQCCDEHDPVAKSIGAINTIIRRPDGKLVGYNTDYIGAISAIEDGIGGPGSKDAVISPLAGRLIVVVGAGGAGKAIAYGAKEKGARVVIANRTYEKAVRLANAIGGQALRLEDLETFRPEEGMILANATSLGMYPNVDGTPIPKKALGFYDVVFDAVYAPKVTRLLREAEECGVKVVSGVEMFIRQAMGQFEHFTGGIEAPESLMREIAAKYT

SEQ ID NO: 35575 - protein, 494 aa, Zea mays subsp. mays
  peptide (1)..(494): Ceres Seq. ID no. 12567139
  misc_feature (234)..(478): Pfam Name: Pfam Description:  Shikimate / quinate 5-dehydrogenase
  misc_feature (47)..(494): NCBI GI NO: 34914824 NR Description: putative 3-dehydroquinate dehydratase
  misc_feature (1)..(48): NCBI GI NO: 34914824 NR Description: putative 3-dehydroquinate dehydratase
  misc_feature (1)..(484): NCBI GI NO: 34914828 NR Description: putative 3-dehydroquinate dehydratase / shikimate5-dehydrogenase
  misc_feature (1)..(493): NCBI GI NO: 15230703 NR Description: dehydroquinate dehydratase/shikimate dehydrogenase
  misc_feature (49)..(493): NCBI GI NO: 7436862 NR Description: 3-dehydroquinate dehydratase (EC 4
  misc_feature (1)..(55): NCBI GI NO: 7436862 NR Description: 3-dehydroquinate dehydratase (EC 4
  misc_feature (1)..(494): NCBI GI NO: 629688 NR Description: 3-dehydroquinate dehydratase (EC 4
  misc_feature (1)..(305): NCBI GI NO: 7488788 NR Description: 3-dehydroquinate dehydratase (EC 4
  misc_feature (212)..(494): NCBI GI NO: 15669272 NR Description: shikimate 5-dehydrogenase (aroE)
  misc_feature (212)..(494): NCBI GI NO: 29726767 NR Description: Chain A
MITDAAAAAATGGDMVEIRLDFIQGFRPREHLPPLLRGCPLPALVTYRPVWEGGQYEGDDTTRFETLRLAMELGVDYVDIELKVADKFMSFIAGHKPEKCKLIVSSHNYEYTPSCEEITNLVASIQAVGADIVKVATTAKDIVDVSRMFQVMVHCQVPMIGLVMSEKGLMSRVLAPKFGGYLTFGILNATKTSASGQPTVEDLLDIYNIKCIGPDTKILGLIANPVKQSKSPILHNKCLQSIGYNAVYLPLLGDNLASFLETYSSPDFSGFSCSLPFKVDAVQCCDEHDPVAKSIGAINTIIRRPDGKLVGYNTDYIGAISAIEDGIGGPGSKDAVISPLAGRLIVVVGAGGAGKAIAYGAKEKGARVVIANRTYEKAVRLANAIGGQALRLEDLETFRPEEGMILANATSLGMYPNVDGTPIPKKALGFYDVVFDAVYAPKVTRLLREAEECGVKVVSGVEMFIRQAMGQFEHFTGGIEAPESLMREIAAKYT

SEQ ID NO: 35576 - DNA, 1422 bp, Zea mays subsp. mays; identical to SEQ ID NO: 31289
  misc_feature (1)..(1422): Ceres Seq. ID no. 13492589

SEQ ID NO: 35577 - protein, 149 aa, Zea mays subsp. mays; identical to SEQ ID NO: 31290
  peptide (1)..(149): Ceres Seq. ID no. 13492590
  misc_feature (1)..(142): NCBI GI NO: 21741991 NR Description: OSJNBa0060P14.12
  misc_feature (1)..(86): NCBI GI NO: 34907580 NR Description: B1078G07.31
  misc_feature (1)..(77): NCBI GI NO: 37535590 NR Description: hypothetical protein
  misc_feature (1)..(77): NCBI GI NO: 37535236 NR Description: hypothetical protein
  misc_feature (1)..(77): NCBI GI NO: 34915330 NR Description: hypothetical protein~similar to Oryza sativachromosome 10
  misc_feature (50)..(89): NCBI GI NO: 38344751 NR Description: OSJNBa0089K21.9
  misc_feature (1)..(77): NCBI GI NO: 34394471 NR Description: unknown protein
  misc_feature (1)..(70): NCBI GI NO: 15224652 NR Description: hypothetical protein [Arabidopsis thaliana]
  misc_feature (1)..(66): NCBI GI NO: 25371570 NR Description: hypothetical protein AT4g02210
  misc_feature (1)..(66): NCBI GI NO: 15293059 NR Description: unknown protein [Arabidopsis thaliana]

SEQ ID NO: 35578 - protein, 125 aa, Zea mays subsp. mays; identical to SEQ ID NO: 31291
  peptide (1)..(125): Ceres Seq. ID no. 13492591
  misc_feature (1)..(82): NCBI GI NO: 21741991 NR Description: OSJNBa0060P14.12
  misc_feature (11)..(74): NCBI GI NO: 34907580 NR Description: B1078G07.31
  misc_feature (1)..(80): NCBI GI NO: 37535236 NR Description: hypothetical protein
  misc_feature (1)..(80): NCBI GI NO: 34915330 NR Description: hypothetical protein~similar to Oryza sativachromosome 10
  misc_feature (1)..(77): NCBI GI NO: 38344751 NR Description: OSJNBa0089K21.9
  misc_feature (27)..(77): NCBI GI NO: 15224652 NR Description: hypothetical protein [Arabidopsis thaliana]
  misc_feature (15)..(77): NCBI GI NO: 25371570 NR Description: hypothetical protein AT4g02210
  misc_feature (15)..(77): NCBI GI NO: 15293059 NR Description: unknown protein [Arabidopsis thaliana]
  misc_feature (15)..(77): NCBI GI NO: 18411878 NR Description: expressed protein [Arabidopsis thaliana]
  misc_feature (1)..(77): NCBI GI NO: 37535088 NR Description: hypothetical protein

SEQ ID NO: 35579 - protein, 121 aa, Zea mays subsp. mays; identical to SEQ ID NO: 31292
  peptide (1)..(121): Ceres Seq. ID no. 13492592
  misc_feature (1)..(78): NCBI GI NO: 21741991 NR Description: OSJNBa0060P14.12
  misc_feature (7)..(70): NCBI GI NO: 34907580 NR Description: B1078G07.31
  misc_feature (1)..(76): NCBI GI NO: 37535236 NR Description: hypothetical protein
  misc_feature (1)..(76): NCBI GI NO: 34915330 NR Description: hypothetical protein~similar to Oryza sativachromosome 10
  misc_feature (1)..(73): NCBI GI NO: 38344751 NR Description: OSJNBa0089K21.9
  misc_feature (23)..(73): NCBI GI NO: 15224652 NR Description: hypothetical protein [Arabidopsis thaliana]
  misc_feature (11)..(73): NCBI GI NO: 25371570 NR Description: hypothetical protein AT4g02210
  misc_feature (11)..(73): NCBI GI NO: 15293059 NR Description: unknown protein [Arabidopsis thaliana]
  misc_feature (11)..(73): NCBI GI NO: 18411878 NR Description: expressed protein [Arabidopsis thaliana]
  misc_feature (1)..(73): NCBI GI NO: 37535088 NR Description: hypothetical protein

SEQ ID NO: 35580 - DNA, 990 bp, Zea mays subsp. mays
  misc_feature (1)..(990): Ceres Seq. ID no. 14309633
aacgcactctccactccttcgcggcgggggtttaggcgcacggcggcaggccaattaacgccgctgcggcgagcgccgggggggaaatgggcggcgacggcacgagggcgctggaccagacgccgacgtgggccgtggccgccgtctgcgctgtcatcgtcgcggcgtccatactcctcgagggcttcctccaccacctcggtcagttgctcaacaagaagcggaagaaggcgctgtttgacgctctggagaaggttaaatcggagctgatgactctggggttcatatcgcctctgctgaccgtgacgggaaggtacatcgcgcgcatctgcatcccggagggagccgcaaacaccatgctgccctgccgcctgtccggtcactcggtggcggaagagcccaagggccatggccgacggcacctatctgaagatccaaccaaccttttttcctgccgcaaaggcatggtgtcgcttgtttcagccgacggcatgcatcagctgcacattttcgtgttcttcttggccgtcttccatgttaccttcagtttcttcacaatgtccttgggtagagcaaagactcgtatatggaaggtgtgggaaaaggaaacttgctcccctcagtataattatttaaatgacccctcaaagttcaggcttacgcaccaaacatcttttgtgaggcaacatgcaagttgttggagcaaaagcacaatcacgctctattttgtgagcttctttaggcagttcttcagatccgtccgtaagacagaactttgaggggtctgtggcgtgttttgctctggtgcggcatgcctgtgtatcccattgagattctgtacaattgcaaacagagagcggtacctttttagttaattatcagagatgactgtagaaagaaactgattgtggtgaggttgagtggacgaataaatggcgagtctgcctcattggatgcatcatgaaacgggcacttttgaggagggatggt

SEQ ID NO: 35581 - protein, 230 aa, Zea mays subsp. mays
  peptide (1)..(230): Ceres Seq. ID no. 14309634
  misc_feature (4)..(229): Pfam Name: Pfam Description:  Mlo family
  misc_feature (1)..(229): NCBI GI NO: 13784977 NR Description: seven transmembrane protein Mlo2 [Zea mays]
  misc_feature (1)..(229): NCBI GI NO: 37536520 NR Description: putative Mlo (pathogen resistance) protein
  misc_feature (108)..(229): NCBI GI NO: 13784985 NR Description: seven transmembrane protein Mlo6 [Zea mays]
  misc_feature (1)..(110): NCBI GI NO: 13784985 NR Description: seven transmembrane protein Mlo6 [Zea mays]
  misc_feature (1)..(229): NCBI GI NO: 14091580 NR Description: membrane protein Mlo5 [Arabidopsis thaliana]
  misc_feature (1)..(229): NCBI GI NO: 15226140 NR Description: seven transmembrane MLO protein family (MLO5)
  misc_feature (1)..(229): NCBI GI NO: 15217453 NR Description: seven transmembrane MLO protein family (MLO9)
  misc_feature (1)..(229): NCBI GI NO: 33112390 NR Description: MLO-like protein 9 (AtMlo9)
  misc_feature (1)..(229): NCBI GI NO: 25346293 NR Description: hypothetical protein F8D11.2
  misc_feature (1)..(229): NCBI GI NO: 15239213 NR Description: seven transmembrane MLO protein family (MLO10)
MGGDGTRALDQTPTWAVAAVCAVIVAASILLEGFLHHLGQLLNKKRKKALFDALEKVKSELMTLGFISPLLTVTGRYIARICIPEGAANTMLPCRLSGHSVAEEPKGHGRRHLSEDPTNLFSCRKGMVSLVSADGMHQLHIFVFFLAVFHVTFSFFTMSLGRAKTRIWKVWEKETCSPQYNYLNDPSKFRLTHQTSFVRQHASCWSKSTITLYFVSFFRQFFRSVRKTEL

SEQ ID NO: 35582 - protein, 169 aa, Zea mays subsp. mays
  peptide (1)..(169): Ceres Seq. ID no. 14309635
  misc_feature (1)..(168): Pfam Name: Pfam Description:  Mlo family
  misc_feature (1)..(168): NCBI GI NO: 13784977 NR Description: seven transmembrane protein Mlo2 [Zea mays]
  misc_feature (1)..(168): NCBI GI NO: 37536520 NR Description: putative Mlo (pathogen resistance) protein
  misc_feature (47)..(168): NCBI GI NO: 13784985 NR Description: seven transmembrane protein Mlo6 [Zea mays]
  misc_feature (1)..(49): NCBI GI NO: 13784985 NR Description: seven transmembrane protein Mlo6 [Zea mays]
  misc_feature (1)..(168): NCBI GI NO: 14091580 NR Description: membrane protein Mlo5 [Arabidopsis thaliana]
  misc_feature (1)..(168): NCBI GI NO: 15226140 NR Description: seven transmembrane MLO protein family (MLO5)
  misc_feature (1)..(168): NCBI GI NO: 15217453 NR Description: seven transmembrane MLO protein family (MLO9)
  misc_feature (1)..(168): NCBI GI NO: 33112390 NR Description: MLO-like protein 9 (AtMlo9)
  misc_feature (1)..(168): NCBI GI NO: 25346293 NR Description: hypothetical protein F8D11.2
  misc_feature (1)..(168): NCBI GI NO: 15239213 NR Description: seven transmembrane MLO protein family (MLO10)
MTLGFISPLLTVTGRYIARICIPEGAANTMLPCRLSGHSVAEEPKGHGRRHLSEDPTNLFSCRKGMVSLVSADGMHQLHIFVFFLAVFHVTFSFFTMSLGRAKTRIWKVWEKETCSPQYNYLNDPSKFRLTHQTSFVRQHASCWSKSTITLYFVSFFRQFFRSVRKTEL

SEQ ID NO: 35583 - protein, 140 aa, Zea mays subsp. mays
  peptide (1)..(140): Ceres Seq. ID no. 14309636
  misc_feature (1)..(139): Pfam Name: Pfam Description:  Mlo family
  misc_feature (1)..(139): NCBI GI NO: 13784977 NR Description: seven transmembrane protein Mlo2 [Zea mays]
  misc_feature (1)..(139): NCBI GI NO: 37536520 NR Description: putative Mlo (pathogen resistance) protein
  misc_feature (18)..(139): NCBI GI NO: 13784985 NR Description: seven transmembrane protein Mlo6 [Zea mays]
  misc_feature (1)..(20): NCBI GI NO: 13784985 NR Description: seven transmembrane protein Mlo6 [Zea mays]
  misc_feature (1)..(139): NCBI GI NO: 14091580 NR Description: membrane protein Mlo5 [Arabidopsis thaliana]
  misc_feature (1)..(139): NCBI GI NO: 15226140 NR Description: seven transmembrane MLO protein family (MLO5)
  misc_feature (1)..(139): NCBI GI NO: 15217453 NR Description: seven transmembrane MLO protein family (MLO9)
  misc_feature (1)..(139): NCBI GI NO: 33112390 NR Description: MLO-like protein 9 (AtMlo9)
  misc_feature (1)..(139): NCBI GI NO: 25346293 NR Description: hypothetical protein F8D11.2
  misc_feature (1)..(139): NCBI GI NO: 15239213 NR Description: seven transmembrane MLO protein family (MLO10)
MLPCRLSGHSVAEEPKGHGRRHLSEDPTNLFSCRKGMVSLVSADGMHQLHIFVFFLAVFHVTFSFFTMSLGRAKTRIWKVWEKETCSPQYNYLNDPSKFRLTHQTSFVRQHASCWSKSTITLYFVSFFRQFFRSVRKTEL

SEQ ID NO: 35584 - DNA, 438 bp, Zea mays subsp. mays
  misc_feature (1)..(438): Ceres Seq. ID no. 2872073
acacggcgtgccgcggtgggcgaccttttttgcaccgggagataaatcgacagcaccctgacctcaagtcctcaacccgcaggccgcagctgctcccgcccgccgcgcaagcggccaagcgccgccggttcttctcgagcaagagtacatgacttttgagctaagtgtttttcgtgagttctcataaatcattgtcctcataacttgtaatgggtggaagccagtatgatgatgactgggtgttgcccagtgccgatatcactcttgttctggttgggaaacttggctatggcaagagtgcaactggaaatagcatccttggacgggaagcatttgtatcagaatattcacatgccagtgttactaatacttgtcagttgggaagcactaccctgaaggacggccgcaccatcaatgttattgatacaccagggttat

SEQ ID NO: 35585 - protein, 76 aa, Zea mays subsp. mays
  peptide (1)..(76): Ceres Seq. ID no. 2872074
  misc_feature (18)..(75): Pfam Name: Pfam Description:  AIG1 family
  misc_feature (7)..(75): NCBI GI NO: 38346576 NR Description: OSJNBa0064D20.7
  misc_feature (7)..(75): NCBI GI NO: 32479674 NR Description: P0076O17.7
  misc_feature (1)..(75): NCBI GI NO: 4097585 NR Description: NTGP4 [Nicotiana tabacum]
  misc_feature (1)..(75): NCBI GI NO: 18399081 NR Description: expressed protein; protein id: At1g33970
  misc_feature (1)..(75): NCBI GI NO: 24417378 NR Description: unknown [Arabidopsis thaliana]
  misc_feature (1)..(75): NCBI GI NO: 25373414 NR Description: hypothetical protein F12G12
  misc_feature (18)..(75): NCBI GI NO: 15234855 NR Description: AIG1-like protein; protein id: At4g09940.1
  misc_feature (8)..(75): NCBI GI NO: 15217724 NR Description: AIG1-like protein; protein id: At1g33930.1
  misc_feature (18)..(75): NCBI GI NO: 15234852 NR Description: AIG1-like protein; protein id: At4g09930.1
  misc_feature (7)..(75): NCBI GI NO: 15234871 NR Description: AIG1-like protein; protein id: At4g09950.1
MGGSQYDDDWVLPSADITLVLVGKLGYGKSATGNSILGREAFVSEYSHASVTNTCQLGSTTLKDGRTINVIDTPGL

SEQ ID NO: 35586 - protein, 56 aa, Zea mays subsp. mays
  peptide (1)..(56): Ceres Seq. ID no. 2872075
MMMTGCCPVPISLLFWLGNLAMARVQLEIASLDGKHLYQNIHMPVLLILVSWEALP

SEQ ID NO: 35587 - protein, 55 aa, Zea mays subsp. mays
  peptide (1)..(55): Ceres Seq. ID no. 2872076
MMTGCCPVPISLLFWLGNLAMARVQLEIASLDGKHLYQNIHMPVLLILVSWEALP

SEQ ID NO: 35588 - DNA, 1376 bp, Zea mays subsp. mays; identical to SEQ ID NO: 27239
  misc_feature (1)..(1376): Ceres Seq. ID no. 13491083

SEQ ID NO: 35589 - protein, 364 aa, Zea mays subsp. mays; identical to SEQ ID NO: 27240
  peptide (1)..(364): Ceres Seq. ID no. 13491084
  misc_feature (1)..(112): Pfam Name: A Pfam Description: Poly
  misc_feature (1)..(128): NCBI GI NO: 15220913 NR Description: nuclear poly(A) polymerase -related
  misc_feature (1)..(128): NCBI GI NO: 25348464 NR Description: F2H15.20 protein - Arabidopsis thaliana
  misc_feature (1)..(118): NCBI GI NO: 7488023 NR Description: polynucleotide adenylyltransferase homologT16I18
  misc_feature (1)..(118): NCBI GI NO: 30689510 NR Description: poly(A) polymerase -related [Arabidopsis thaliana]
  misc_feature (1)..(118): NCBI GI NO: 30689513 NR Description: poly(A) polymerase -related [Arabidopsis thaliana]
  misc_feature (1)..(118): NCBI GI NO: 32527646 NR Description: poly(A) polymerase [Arabidopsis thaliana]
  misc_feature (1)..(136): NCBI GI NO: 30682917 NR Description: poly(A) polymerase -related [Arabidopsis thaliana]
  misc_feature (1)..(136): NCBI GI NO: 18400958 NR Description: poly(A) polymerase -related [Arabidopsis thaliana]

SEQ ID NO: 35590 - protein, 342 aa, Zea mays subsp. mays; identical to SEQ ID NO: 27241
  peptide (1)..(342): Ceres Seq. ID no. 13491085
  misc_feature (1)..(90): Pfam Name: A Pfam Description: Poly
  misc_feature (1)..(106): NCBI GI NO: 15220913 NR Description: nuclear poly(A) polymerase -related
  misc_feature (1)..(106): NCBI GI NO: 25348464 NR Description: F2H15.20 protein - Arabidopsis thaliana
  misc_feature (1)..(96): NCBI GI NO: 7488023 NR Description: polynucleotide adenylyltransferase homologT16I18
  misc_feature (1)..(96): NCBI GI NO: 30689510 NR Description: poly(A) polymerase -related [Arabidopsis thaliana]
  misc_feature (1)..(96): NCBI GI NO: 30689513 NR Description: poly(A) polymerase -related [Arabidopsis thaliana]
  misc_feature (1)..(96): NCBI GI NO: 32527646 NR Description: poly(A) polymerase [Arabidopsis thaliana]
  misc_feature (1)..(114): NCBI GI NO: 30682917 NR Description: poly(A) polymerase -related [Arabidopsis thaliana]
  misc_feature (1)..(114): NCBI GI NO: 18400958 NR Description: poly(A) polymerase -related [Arabidopsis thaliana]

SEQ ID NO: 35591 - protein, 319 aa, Zea mays subsp. mays; identical to SEQ ID NO: 27242
  peptide (1)..(319): Ceres Seq. ID no. 13491086
  misc_feature (1)..(67): Pfam Name: A Pfam Description: Poly
  misc_feature (1)..(83): NCBI GI NO: 15220913 NR Description: nuclear poly(A) polymerase -related
  misc_feature (1)..(83): NCBI GI NO: 25348464 NR Description: F2H15.20 protein - Arabidopsis thaliana
  misc_feature (1)..(73): NCBI GI NO: 7488023 NR Description: polynucleotide adenylyltransferase homologT16I18
  misc_feature (1)..(73): NCBI GI NO: 30689510 NR Description: poly(A) polymerase -related [Arabidopsis thaliana]
  misc_feature (1)..(73): NCBI GI NO: 30689513 NR Description: poly(A) polymerase -related [Arabidopsis thaliana]
  misc_feature (1)..(73): NCBI GI NO: 32527646 NR Description: poly(A) polymerase [Arabidopsis thaliana]
  misc_feature (1)..(91): NCBI GI NO: 30682917 NR Description: poly(A) polymerase -related [Arabidopsis thaliana]
  misc_feature (1)..(91): NCBI GI NO: 18400958 NR Description: poly(A) polymerase -related [Arabidopsis thaliana]

SEQ ID NO: 35592 - DNA, 1402 bp, Zea mays subsp. mays
  misc_feature (1)..(1402): Ceres Seq. ID no. 12389013
actccctcctcgtcgcttgccacaagtcctcgggcgtccgtcgatcataccgcataccgccggcgcagtcctcgccggcgctggacggggtgaagttttagatcaccagaggggcatttttctctcatcgggcagtagaagttttggatcttatccagctagcctccaatccatcatggatcatgacggcacgaacctggctgtcaatgaggctgtgcgctcggtgcagctgctcaagattgacggctacagcgccaccgctaccatgagcgagttggatttcatcaaatccagaaggaacctcgctggccacgagtgggaggtccttttctatcctcagttcagccgttacggtggctgcatagctttgaagctcgtccttgtcagtgaacccccgagggacaaggacaagctgctgagggcgagcctgagatgccgccttgtatgccctagccagccgcatctccatgcctccatagagaagagcgtgtcccatgtatttaccagtgactctagatgctcgtctgaagttatcctcatcccaaaatatgagctaccatcatcaggttacctcgtgaacgattcactgaccgtggaatgcacggtcaccgtgctacgcgacttggacgccacggctaaggtgctgtccctgccagtgccactgccaccaccctccgacctacaccagcacttcgatgagctgttgcagagcaagaatggagcggacgtcacgttccgtgtctccgggaagtcattcgccgcccacaaggccattctcgccgcaaggtccccggttttcatggctcagttcttcggaggcatgaaggaaagaagctctgctcatgtggagatcagagacatggactctgctgcgttcagttccatgcttcacttcatctataccgacatggtcccagagctcgacggtgcccaggagcctgaggcggcagcgatcatggctcagcacctactggtagctgctgacatgtatgggctgaacaggctgaagctgatatgtgaatgcaagctctctggtggcatcgacatcggcacggcggcttcgacgttggctctcgccgaacagcacgactgctcgctgctcaaagccaagtgtctcgagttcatcaccaggtcgcctgagacacttgaagctgtcctggcaactgatggatacgcgcatctggcggcaagctgtcccttggttctggctgaactactgatggctgcgcgtggaaggaagatctgagctggatgatggttttcgttgacagtcctattattactagtttttaattatcccttcctcgtatgatgagttgctttggcttctcatattttggttatggtttcccaagatgtatggcctaaagcatgatgaactagtgcttgcagttgatttccc

SEQ ID NO: 35593 - protein, 414 aa, Zea mays subsp. mays
  peptide (1)..(414): Ceres Seq. ID no. 12389014
  misc_feature (234)..(347): Pfam Name: Pfam Description:  BTB/POZ domain
  misc_feature (50)..(406): NCBI GI NO: 32488782 NR Description: OSJNBb0060E08.3
  misc_feature (61)..(414): NCBI GI NO: 37534478 NR Description: hypothetical protein
  misc_feature (61)..(406): NCBI GI NO: 37534474 NR Description: hypothetical protein
  misc_feature (68)..(407): NCBI GI NO: 37534558 NR Description: putative speckle-type protein
  misc_feature (70)..(405): NCBI GI NO: 38636858 NR Description: zinc finger POZ domain protein-like
  misc_feature (68)..(407): NCBI GI NO: 37534570 NR Description: putative speckle-type protein
  misc_feature (71)..(406): NCBI GI NO: 37534588 NR Description: putative speckle-type protein
  misc_feature (68)..(407): NCBI GI NO: 37534574 NR Description: putative speckle-type protein
  misc_feature (95)..(406): NCBI GI NO: 37534534 NR Description: putative speckle-type protein
  misc_feature (185)..(412): NCBI GI NO: 37534476 NR Description: hypothetical protein
LPPRRLPQVLGRPSIIPHTAGAVLAGAGRGEVLDHQRGIFLSSGSRSFGSYPASLQSIMDHDGTNLAVNEAVRSVQLLKIDGYSATATMSELDFIKSRRNLAGHEWEVLFYPQFSRYGGCIALKLVLVSEPPRDKDKLLRASLRCRLVCPSQPHLHASIEKSVSHVFTSDSRCSSEVILIPKYELPSSGYLVNDSLTVECTVTVLRDLDATAKVLSLPVPLPPPSDLHQHFDELLQSKNGADVTFRVSGKSFAAHKAILAARSPVFMAQFFGGMKERSSAHVEIRDMDSAAFSSMLHFIYTDMVPELDGAQEPEAAAIMAQHLLVAADMYGLNRLKLICECKLSGGIDIGTAASTLALAEQHDCSLLKAKCLEFITRSPETLEAVLATDGYAHLAASCPLVLAELLMAARGRKI

SEQ ID NO: 35594 - protein, 356 aa, Zea mays subsp. mays
  peptide (1)..(356): Ceres Seq. ID no. 12389015
  misc_feature (176)..(289): Pfam Name: Pfam Description:  BTB/POZ domain
  misc_feature (1)..(348): NCBI GI NO: 32488782 NR Description: OSJNBb0060E08.3
  misc_feature (3)..(356): NCBI GI NO: 37534478 NR Description: hypothetical protein
  misc_feature (3)..(348): NCBI GI NO: 37534474 NR Description: hypothetical protein
  misc_feature (10)..(349): NCBI GI NO: 37534558 NR Description: putative speckle-type protein
  misc_feature (12)..(347): NCBI GI NO: 38636858 NR Description: zinc finger POZ domain protein-like
  misc_feature (10)..(349): NCBI GI NO: 37534570 NR Description: putative speckle-type protein
  misc_feature (13)..(348): NCBI GI NO: 37534588 NR Description: putative speckle-type protein
  misc_feature (10)..(349): NCBI GI NO: 37534574 NR Description: putative speckle-type protein
  misc_feature (37)..(348): NCBI GI NO: 37534534 NR Description: putative speckle-type protein
  misc_feature (127)..(354): NCBI GI NO: 37534476 NR Description: hypothetical protein
MDHDGTNLAVNEAVRSVQLLKIDGYSATATMSELDFIKSRRNLAGHEWEVLFYPQFSRYGGCIALKLVLVSEPPRDKDKLLRASLRCRLVCPSQPHLHASIEKSVSHVFTSDSRCSSEVILIPKYELPSSGYLVNDSLTVECTVTVLRDLDATAKVLSLPVPLPPPSDLHQHFDELLQSKNGADVTFRVSGKSFAAHKAILAARSPVFMAQFFGGMKERSSAHVEIRDMDSAAFSSMLHFIYTDMVPELDGAQEPEAAAIMAQHLLVAADMYGLNRLKLICECKLSGGIDIGTAASTLALAEQHDCSLLKAKCLEFITRSPETLEAVLATDGYAHLAASCPLVLAELLMAARGRKI

SEQ ID NO: 35595 - protein, 326 aa, Zea mays subsp. mays
  peptide (1)..(326): Ceres Seq. ID no. 12389016
  misc_feature (146)..(259): Pfam Name: Pfam Description:  BTB/POZ domain
  misc_feature (1)..(318): NCBI GI NO: 32488782 NR Description: OSJNBb0060E08.3
  misc_feature (1)..(326): NCBI GI NO: 37534478 NR Description: hypothetical protein
  misc_feature (1)..(318): NCBI GI NO: 37534474 NR Description: hypothetical protein
  misc_feature (1)..(319): NCBI GI NO: 37534558 NR Description: putative speckle-type protein
  misc_feature (1)..(317): NCBI GI NO: 38636858 NR Description: zinc finger POZ domain protein-like
  misc_feature (1)..(319): NCBI GI NO: 37534570 NR Description: putative speckle-type protein
  misc_feature (1)..(318): NCBI GI NO: 37534588 NR Description: putative speckle-type protein
  misc_feature (1)..(319): NCBI GI NO: 37534574 NR Description: putative speckle-type protein
  misc_feature (7)..(318): NCBI GI NO: 37534534 NR Description: putative speckle-type protein
  misc_feature (97)..(324): NCBI GI NO: 37534476 NR Description: hypothetical protein
MSELDFIKSRRNLAGHEWEVLFYPQFSRYGGCIALKLVLVSEPPRDKDKLLRASLRCRLVCPSQPHLHASIEKSVSHVFTSDSRCSSEVILIPKYELPSSGYLVNDSLTVECTVTVLRDLDATAKVLSLPVPLPPPSDLHQHFDELLQSKNGADVTFRVSGKSFAAHKAILAARSPVFMAQFFGGMKERSSAHVEIRDMDSAAFSSMLHFIYTDMVPELDGAQEPEAAAIMAQHLLVAADMYGLNRLKLICECKLSGGIDIGTAASTLALAEQHDCSLLKAKCLEFITRSPETLEAVLATDGYAHLAASCPLVLAELLMAARGRKI

SEQ ID NO: 35596 - DNA, 1448 bp, Zea mays subsp. mays; identical to SEQ ID NO: 28766
  misc_feature (1)..(1448): Ceres Seq. ID no. 13494789
  misc_feature (255)..(255): n is a, c, t, g, unknown, or other
  misc_feature (298)..(298): n is a, c, t, g, unknown, or other
  misc_feature (1126)..(1126): n is a, c, t, g, unknown, or other
  misc_feature (879)..(879): n is a, c, t, g, unknown, or other
  misc_feature (178)..(178): n is a, c, t, g, unknown, or other
  misc_feature (311)..(311): n is a, c, t, g, unknown, or other

SEQ ID NO: 35597 - protein, 332 aa, Zea mays subsp. mays; identical to SEQ ID NO: 28767
  peptide (1)..(332): Ceres Seq. ID no. 13494790
  misc_feature (146)..(332): NCBI GI NO: 18412668 NR Description: expressed protein [Arabidopsis thaliana]
  misc_feature (173)..(311): NCBI GI NO: 15241290 NR Description: expressed protein [Arabidopsis thaliana]
  misc_feature (174)..(332): NCBI GI NO: 14532728 NR Description: unknown protein [Arabidopsis thaliana]
  misc_feature (174)..(332): NCBI GI NO: 15236755 NR Description: expressed protein [Arabidopsis thaliana]
  misc_feature (179)..(311): NCBI GI NO: 7487766 NR Description: hypothetical protein T6K21
  misc_feature (179)..(311): NCBI GI NO: 18414994 NR Description: expressed protein [Arabidopsis thaliana]
  misc_feature (179)..(311): NCBI GI NO: 21592868 NR Description: unknown [Arabidopsis thaliana]
  misc_feature (130)..(316): NCBI GI NO: 37537130 NR Description: unknown protein
  misc_feature (123)..(273): NCBI GI NO: 38345382 NR Description: OSJNBa0067K08.11
  misc_feature (207)..(311): NCBI GI NO: 18390404 NR Description: expressed protein [Arabidopsis thaliana]
  misc_feature (60)..(60): Xaa is any aa, unknown or other
  misc_feature (85)..(85): Xaa is any aa, unknown or other
  misc_feature (100)..(100): Xaa is any aa, unknown or other
  misc_feature (104)..(104): Xaa is any aa, unknown or other
  misc_feature (293)..(293): Xaa is any aa, unknown or other

SEQ ID NO: 35598 - protein, 297 aa, Zea mays subsp. mays; identical to SEQ ID NO: 28768
  peptide (1)..(297): Ceres Seq. ID no. 13494791
  misc_feature (111)..(297): NCBI GI NO: 18412668 NR Description: expressed protein [Arabidopsis thaliana]
  misc_feature (138)..(276): NCBI GI NO: 15241290 NR Description: expressed protein [Arabidopsis thaliana]
  misc_feature (139)..(297): NCBI GI NO: 14532728 NR Description: unknown protein [Arabidopsis thaliana]
  misc_feature (139)..(297): NCBI GI NO: 15236755 NR Description: expressed protein [Arabidopsis thaliana]
  misc_feature (144)..(276): NCBI GI NO: 7487766 NR Description: hypothetical protein T6K21
  misc_feature (144)..(276): NCBI GI NO: 21592868 NR Description: unknown [Arabidopsis thaliana]
  misc_feature (144)..(276): NCBI GI NO: 18414994 NR Description: expressed protein [Arabidopsis thaliana]
  misc_feature (95)..(281): NCBI GI NO: 37537130 NR Description: unknown protein
  misc_feature (88)..(238): NCBI GI NO: 38345382 NR Description: OSJNBa0067K08.11
  misc_feature (172)..(276): NCBI GI NO: 18390404 NR Description: expressed protein [Arabidopsis thaliana]
  misc_feature (25)..(25): Xaa is any aa, unknown or other
  misc_feature (50)..(50): Xaa is any aa, unknown or other
  misc_feature (65)..(65): Xaa is any aa, unknown or other
  misc_feature (69)..(69): Xaa is any aa, unknown or other
  misc_feature (258)..(258): Xaa is any aa, unknown or other

SEQ ID NO: 35599 - DNA, 1152 bp, Zea mays subsp. mays
  misc_feature (1)..(1152): Ceres Seq. ID no. 12455003
attaaagaaaaaggaaattttcttgggcgttcttcggcttcattgtcacaaggttcgagttcgtcaccgtctagtacgactgtgcgagggaggaagaggcgaggagaagatgcagatcttcgtgaagaccctgacggggaagaccatcaccctcgaggtggagagcagcgacaccgtcgacaacgtcaaggccaaaatccaggacaaggaagctgcatgggagtcgagctattcgagtccgcggcaagaatggaagcacatcgctgaacctgtcatgcaggtatacaccgagacaacagacggatcttcagtcgagtcgaaggagagcgctctagtgtggcactatttggatgcagaccatgatttcggttccttccaagcgaaggagctaaaggatcatcttgagagggtgctatcaaatgagcccgttgttgtgaagtgtggccattatatcgtagaagtaaagccgcagggagttagcaagggtcgtgctgtcgacaagctgattcaagcactggccaacaacaacgggaaggcacaggatttcctgatgtgcgtcggcaacgacagatctgacgaggacatgttcgaatgcatcaacggtatggcctccaacgatgtctcatcgaccacagtaccggaggtgtttgcctgttcggtcggccagaagcccagcaaagcaaaatactatgtggacgacaccagcgaagtgatcagattgctcagggatgcaacccgcttctcatcgtcgcagcggagggaggacgtcaacgccagccgcgggcgtgtgaccttcagagacgcactcgattacgtggactaggcaccagcagcaattcttagttactcgaaatgattagctgcggagcttgtaaattccgctgtcttctgtctgccaatggttttcgttctagagaattgtagtgtagccgacatcgacatggatcgtcgtcaccgatacacgaacagcggaaatatgagttgaagttcgtcgtttcgaggctcagaattggtacatttatagaattgtagtgtaggcaattttttggtagggaatagtaattggtacatttatagaattgtcaattgtttttcttctaccgctgataatactatagcttcgctaaattaatattattgtttcacttagcg

SEQ ID NO: 35600 - protein, 273 aa, Zea mays subsp. mays
  peptide (1)..(273): Ceres Seq. ID no. 12455004
  misc_feature (68)..(234): Pfam Name: Pfam Description:  Trehalose-phosphatase
  misc_feature (68)..(269): NCBI GI NO: 14596155 NR Description: Unknown protein [Arabidopsis thaliana]
  misc_feature (68)..(269): NCBI GI NO: 15224213 NR Description: putative trehalose-6-phosphate synthase
  misc_feature (73)..(254): NCBI GI NO: 15220891 NR Description: trehalose 6-phosphate synthase, putative
  misc_feature (68)..(269): NCBI GI NO: 15219002 NR Description: trehalose-6-phosphate synthase, putative
  misc_feature (73)..(250): NCBI GI NO: 7488401 NR Description: trehalose-6-phosphate synthase homolog F17O7
  misc_feature (73)..(250): NCBI GI NO: 30698024 NR Description: alpha
  misc_feature (73)..(241): NCBI GI NO: 7488400 NR Description: trehalose-6-phosphate synthase homolog DL4920W -Arabidopsis thaliana
  misc_feature (73)..(241): NCBI GI NO: 18414960 NR Description: trehalose-6-phosphate synthase like protein
  misc_feature (73)..(254): NCBI GI NO: 15221478 NR Description: trehalose-6-phosphate synthase, putative
  misc_feature (69)..(241): NCBI GI NO: 25347119 NR Description: hypothetical protein T23K23.13
LKKKEIFLGVLRLHCHKVRVRHRLVRLCEGGRGEEKMQIFVKTLTGKTITLEVESSDTVDNVKAKIQDKEAAWESSYSSPRQEWKHIAEPVMQVYTETTDGSSVESKESALVWHYLDADHDFGSFQAKELKDHLERVLSNEPVVVKCGHYIVEVKPQGVSKGRAVDKLIQALANNNGKAQDFLMCVGNDRSDEDMFECINGMASNDVSSTTVPEVFACSVGQKPSKAKYYVDDTSEVIRLLRDATRFSSSQRREDVNASRGRVTFRDALDYVD

SEQ ID NO: 35601 - protein, 237 aa, Zea mays subsp. mays
  peptide (1)..(237): Ceres Seq. ID no. 12455005
  misc_feature (32)..(198): Pfam Name: Pfam Description:  Trehalose-phosphatase
  misc_feature (32)..(233): NCBI GI NO: 14596155 NR Description: Unknown protein [Arabidopsis thaliana]
  misc_feature (32)..(233): NCBI GI NO: 15224213 NR Description: putative trehalose-6-phosphate synthase
  misc_feature (37)..(218): NCBI GI NO: 15220891 NR Description: trehalose 6-phosphate synthase, putative
  misc_feature (32)..(233): NCBI GI NO: 15219002 NR Description: trehalose-6-phosphate synthase, putative
  misc_feature (37)..(214): NCBI GI NO: 7488401 NR Description: trehalose-6-phosphate synthase homolog F17O7
  misc_feature (37)..(214): NCBI GI NO: 30698024 NR Description: alpha
  misc_feature (37)..(205): NCBI GI NO: 7488400 NR Description: trehalose-6-phosphate synthase homolog DL4920W -Arabidopsis thaliana
  misc_feature (37)..(205): NCBI GI NO: 18414960 NR Description: trehalose-6-phosphate synthase like protein
  misc_feature (37)..(218): NCBI GI NO: 15221478 NR Description: trehalose-6-phosphate synthase, putative
  misc_feature (33)..(205): NCBI GI NO: 25347119 NR Description: hypothetical protein T23K23.13
MQIFVKTLTGKTITLEVESSDTVDNVKAKIQDKEAAWESSYSSPRQEWKHIAEPVMQVYTETTDGSSVESKESALVWHYLDADHDFGSFQAKELKDHLERVLSNEPVVVKCGHYIVEVKPQGVSKGRAVDKLIQALANNNGKAQDFLMCVGNDRSDEDMFECINGMASNDVSSTTVPEVFACSVGQKPSKAKYYVDDTSEVIRLLRDATRFSSSQRREDVNASRGRVTFRDALDYVD

SEQ ID NO: 35602 - protein, 182 aa, Zea mays subsp. mays
  peptide (1)..(182): Ceres Seq. ID no. 12455006
  misc_feature (1)..(143): Pfam Name: Pfam Description:  Trehalose-phosphatase
  misc_feature (1)..(178): NCBI GI NO: 14596155 NR Description: Unknown protein [Arabidopsis thaliana]
  misc_feature (1)..(178): NCBI GI NO: 15224213 NR Description: putative trehalose-6-phosphate synthase
  misc_feature (1)..(163): NCBI GI NO: 15220891 NR Description: trehalose 6-phosphate synthase, putative
  misc_feature (1)..(178): NCBI GI NO: 15219002 NR Description: trehalose-6-phosphate synthase, putative
  misc_feature (1)..(159): NCBI GI NO: 7488401 NR Description: trehalose-6-phosphate synthase homolog F17O7
  misc_feature (1)..(159): NCBI GI NO: 30698024 NR Description: alpha
  misc_feature (1)..(150): NCBI GI NO: 7488400 NR Description: trehalose-6-phosphate synthase homolog DL4920W -Arabidopsis thaliana
  misc_feature (1)..(150): NCBI GI NO: 18414960 NR Description: trehalose-6-phosphate synthase like protein
  misc_feature (1)..(163): NCBI GI NO: 15221478 NR Description: trehalose-6-phosphate synthase, putative
  misc_feature (1)..(150): NCBI GI NO: 25347119 NR Description: hypothetical protein T23K23.13
MQVYTETTDGSSVESKESALVWHYLDADHDFGSFQAKELKDHLERVLSNEPVVVKCGHYIVEVKPQGVSKGRAVDKLIQALANNNGKAQDFLMCVGNDRSDEDMFECINGMASNDVSSTTVPEVFACSVGQKPSKAKYYVDDTSEVIRLLRDATRFSSSQRREDVNASRGRVTFRDALDYVD

SEQ ID NO: 35603 - DNA, 595 bp, Zea mays subsp. mays
  misc_feature (1)..(595): Ceres Seq. ID no. 2924141
  misc_feature (503)..(503): n is a, c, t, g, unknown, or other
  misc_feature (548)..(548): n is a, c, t, g, unknown, or other
  misc_feature (497)..(497): n is a, c, t, g, unknown, or other
  misc_feature (539)..(539): n is a, c, t, g, unknown, or other
aaaaaacaaagcaagtagctcctcacagtttgtgaaaaagatgatgacgtcattaccttacacttgccaatcacaaagtccttcaccgtacttcgacctgtctctttttaggtatgatgagaagctgatttcagcaattgatcggcatcggcattgcacagagcatccaataaaatttatgtcagtgaggcaaaatgttgtcaaatttaagatcaagccaggttcagattctggtgcttctgacagcagagcaaaaagaatctcgtccttcttgtttcacccatttttcccgcttgcactttcgattcagcagacttatatgcagccaactgttgtcaacatccatttcaggagatagaaaaggtataacggttgccttagttgtatttgtgtcattagtgaacttgcagcattgctggtggcaaagttttggccatatgtgctctagtagatatgctggaacaagatccattgctggcggtgaggatggctagttngatttntcttccaaaacaaagacaaaatgcaaatgggctatnttctctatngatgtgggctcatgggctcatcagtattatcattgtgcttcacagtg

SEQ ID NO: 35604 - protein, 118 aa, Zea mays subsp. mays
  peptide (1)..(118): Ceres Seq. ID no. 2924142
  misc_feature (1)..(118): NCBI GI NO: 34894070 NR Description: putative tDET1 protein
  misc_feature (1)..(118): NCBI GI NO: 28439620 NR Description: deetiolated 1-like protein [Solanum tuberosum]
  misc_feature (1)..(118): NCBI GI NO: 4038594 NR Description: tDET1 protein [Lycopersicon esculentum]
  misc_feature (1)..(118): NCBI GI NO: 30421060 NR Description: deetiolated 1-like protein [Capsicum annuum]
  misc_feature (1)..(118): NCBI GI NO: 15234958 NR Description: Deetiolated1
  misc_feature (3)..(117): NCBI GI NO: 7021956 NR Description: unnamed protein product [Homo sapiens]
  misc_feature (3)..(117): NCBI GI NO: 33416951 NR Description: Unknown (protein for MGC:66486) [Danio rerio]
  misc_feature (3)..(117): NCBI GI NO: 27677500 NR Description: similar to RIKEN cDNA 2610034H20
  misc_feature (3)..(117): NCBI GI NO: 27229232 NR Description: RIKEN cDNA 2610034H20 [Mus musculus]
  misc_feature (3)..(117): NCBI GI NO: 33354283 NR Description: hypothetical protein FLJ10103 [Homo sapiens]
KNKASSSSQFVKKMMTSLPYTCQSQSPSPYFDLSLFRYDEKLISAIDRHRHCTEHPIKFMSVRQNVVKFKIKPGSDSGASDSRAKRISSFLFHPFFPLALSIQQTYMQPTVVNIHFRR

SEQ ID NO: 35605 - protein, 105 aa, Zea mays subsp. mays
  peptide (1)..(105): Ceres Seq. ID no. 2924143
  misc_feature (1)..(105): NCBI GI NO: 34894070 NR Description: putative tDET1 protein
  misc_feature (1)..(105): NCBI GI NO: 28439620 NR Description: deetiolated 1-like protein [Solanum tuberosum]
  misc_feature (1)..(105): NCBI GI NO: 4038594 NR Description: tDET1 protein [Lycopersicon esculentum]
  misc_feature (1)..(105): NCBI GI NO: 30421060 NR Description: deetiolated 1-like protein [Capsicum annuum]
  misc_feature (1)..(105): NCBI GI NO: 15234958 NR Description: Deetiolated1
  misc_feature (1)..(104): NCBI GI NO: 7021956 NR Description: unnamed protein product [Homo sapiens]
  misc_feature (1)..(104): NCBI GI NO: 33416951 NR Description: Unknown (protein for MGC:66486) [Danio rerio]
  misc_feature (1)..(104): NCBI GI NO: 27677500 NR Description: similar to RIKEN cDNA 2610034H20
  misc_feature (1)..(104): NCBI GI NO: 27229232 NR Description: RIKEN cDNA 2610034H20 [Mus musculus]
  misc_feature (1)..(104): NCBI GI NO: 33354283 NR Description: hypothetical protein FLJ10103 [Homo sapiens]
MMTSLPYTCQSQSPSPYFDLSLFRYDEKLISAIDRHRHCTEHPIKFMSVRQNVVKFKIKPGSDSGASDSRAKRISSFLFHPFFPLALSIQQTYMQPTVVNIHFRR

SEQ ID NO: 35606 - protein, 104 aa, Zea mays subsp. mays
  peptide (1)..(104): Ceres Seq. ID no. 2924144
  misc_feature (1)..(104): NCBI GI NO: 34894070 NR Description: putative tDET1 protein
  misc_feature (1)..(104): NCBI GI NO: 28439620 NR Description: deetiolated 1-like protein [Solanum tuberosum]
  misc_feature (1)..(104): NCBI GI NO: 4038594 NR Description: tDET1 protein [Lycopersicon esculentum]
  misc_feature (1)..(104): NCBI GI NO: 30421060 NR Description: deetiolated 1-like protein [Capsicum annuum]
  misc_feature (1)..(104): NCBI GI NO: 15234958 NR Description: Deetiolated1
  misc_feature (1)..(103): NCBI GI NO: 7021956 NR Description: unnamed protein product [Homo sapiens]
  misc_feature (1)..(103): NCBI GI NO: 33416951 NR Description: Unknown (protein for MGC:66486) [Danio rerio]
  misc_feature (1)..(103): NCBI GI NO: 27677500 NR Description: similar to RIKEN cDNA 2610034H20
  misc_feature (1)..(103): NCBI GI NO: 27229232 NR Description: RIKEN cDNA 2610034H20 [Mus musculus]
  misc_feature (1)..(103): NCBI GI NO: 33354283 NR Description: hypothetical protein FLJ10103 [Homo sapiens]
MTSLPYTCQSQSPSPYFDLSLFRYDEKLISAIDRHRHCTEHPIKFMSVRQNVVKFKIKPGSDSGASDSRAKRISSFLFHPFFPLALSIQQTYMQPTVVNIHFRR

SEQ ID NO: 35607 - DNA, 1111 bp, Zea mays subsp. mays
  misc_feature (1)..(1111): Ceres Seq. ID no. 12436364
atcccgtctcgtttcgtctcggtctcgcacctctcacgacggcaccaccccagcgcggcgcgagtggagacgccgctgctccgtgcttcgccgcgcctacctaacccaagacctgctagacctgagtggctgagtgttcgtgttcggtcaaaacccaccgcgcgagcgcctccagagtccaaacccgctacaaatctcgcgctgcgcattctccccgtacgatacggcggcacggcccacgagccaggcggtggcggcagctagctagctgcggagtagcaccagccaccggagggaagtgggcggcgcgatgggggacgagccggacggggaggcggaggagtacctcttcaaggtggtgatcatcggcgacagcgcggtggggaagagcaacctgctgtcccgctacgcgcgcaacgagttcaacccccactccaaggccaccatcggggtggagttccagacgcagagcatggccatcgaaggcaaggaggtcaaggcccagatctgggacaccgccggccaggagcgcttccgcgccgtcacctccgcctactaccgcggcgccttcggcgcgctcctcgtctatgacattacccgccgctccaccttcgacaacgtcggccgctggctccaggagctcaacacacattcggacacgacggtggccaagatgctggtgggcaacaagtgtgacctgggcgacatccgccaggtgcccgtggaggaaggcaaggcgctggccgaggccgagggcctcttcttcatggagacgtcggccctggacgccaccaacgtgaggacggccttcgagatcgtgatcagggagatctacagcaacgtgagccgcaaggtcctgaactcggactcgtacaaggccgagctgtccctcaacagggtgagcatcgacggcgactcaaaagacgagcagaagcaggggagccggttcgggtgctgctagaagtggtcggggggtagcggtacattattggatcgggttggatttgaaccggagatgatgctttttcatttttttttgggtggcgggtgggggcttgcttgtaaactgtaatacaaggtttgactctttgtttgctgttacgttacactc

SEQ ID NO: 35608 - protein, 216 aa, Zea mays subsp. mays
  peptide (1)..(216): Ceres Seq. ID no. 12436365
  misc_feature (15)..(176): Pfam Name: Pfam Description:  Ras family
  misc_feature (1)..(216): NCBI GI NO: 29647488 NR Description: putative GTP-binding protein Rab11e
  misc_feature (1)..(216): NCBI GI NO: 15224226 NR Description: Ras-related GTP-binding protein
  misc_feature (1)..(216): NCBI GI NO: 15225121 NR Description: GTP-binding protein, putative
  misc_feature (10)..(216): NCBI GI NO: 7438404 NR Description: GTP-binding protein Rab11e - common tobacco
  misc_feature (1)..(216): NCBI GI NO: 1370154 NR Description: RAB11G [Lotus japonicus]
  misc_feature (1)..(216): NCBI GI NO: 29893534 NR Description: putative RAS-related protein ARA-1
  misc_feature (1)..(216): NCBI GI NO: 18390575 NR Description: RAS-related GTP-binding protein
  misc_feature (2)..(216): NCBI GI NO: 499068 NR Description: GTPase [Glycine max]
  misc_feature (1)..(216): NCBI GI NO: 21553627 NR Description: putative RAS superfamily GTP-binding protein
  misc_feature (1)..(216): NCBI GI NO: 17380746 NR Description: putative RAS-related protein ARA-1
MGDEPDGEAEEYLFKVVIIGDSAVGKSNLLSRYARNEFNPHSKATIGVEFQTQSMAIEGKEVKAQIWDTAGQERFRAVTSAYYRGAFGALLVYDITRRSTFDNVGRWLQELNTHSDTTVAKMLVGNKCDLGDIRQVPVEEGKALAEAEGLFFMETSALDATNVRTAFEIVIREIYSNVSRKVLNSDSYKAELSLNRVSIDGDSKDEQKQGSRFGCC

SEQ ID NO: 35609 - protein, 162 aa, Zea mays subsp. mays
  peptide (1)..(162): Ceres Seq. ID no. 12436366
  misc_feature (1)..(122): Pfam Name: Pfam Description:  Ras family
  misc_feature (1)..(162): NCBI GI NO: 29647488 NR Description: putative GTP-binding protein Rab11e
  misc_feature (1)..(162): NCBI GI NO: 15224226 NR Description: Ras-related GTP-binding protein
  misc_feature (1)..(162): NCBI GI NO: 15225121 NR Description: GTP-binding protein, putative
  misc_feature (1)..(162): NCBI GI NO: 7438404 NR Description: GTP-binding protein Rab11e - common tobacco
  misc_feature (1)..(162): NCBI GI NO: 1370154 NR Description: RAB11G [Lotus japonicus]
  misc_feature (1)..(162): NCBI GI NO: 29893534 NR Description: putative RAS-related protein ARA-1
  misc_feature (1)..(162): NCBI GI NO: 18390575 NR Description: RAS-related GTP-binding protein
  misc_feature (1)..(162): NCBI GI NO: 499068 NR Description: GTPase [Glycine max]
  misc_feature (1)..(162): NCBI GI NO: 21553627 NR Description: putative RAS superfamily GTP-binding protein
  misc_feature (1)..(162): NCBI GI NO: 17380746 NR Description: putative RAS-related protein ARA-1
MAIEGKEVKAQIWDTAGQERFRAVTSAYYRGAFGALLVYDITRRSTFDNVGRWLQELNTHSDTTVAKMLVGNKCDLGDIRQVPVEEGKALAEAEGLFFMETSALDATNVRTAFEIVIREIYSNVSRKVLNSDSYKAELSLNRVSIDGDSKDEQKQGSRFGCC

SEQ ID NO: 35610 - DNA, 978 bp, Zea mays subsp. mays
  misc_feature (1)..(978): Ceres Seq. ID no. 13622791
accaaccaaccaaccaacccacagttcccatataggcagccatcggctacacagcctcgcctccgtaagcagagtttgtcgttgtggaggcaggaagagagacgacggcggccatggcgacctccttccaggggacgaccaccaagcgcaccgcctgcgacaagacggtgtaccttgtggacaagctcaccgccgacaaccgcatctaccacaaggcctgcttccgctgccaccactgcaagggcaccctcaagctcgccaactacaactccttcgagggagtgctctactgcaggcctcacttcgaccagctgttcaagaggacagggagcttggacaagagcttcgaaggaactccgaaggttgtcaagccagaaagaaacgttgggaatgagaatgctactaaagtctcaagcgcctttgctggcaccagagagaaatgtgttggatgcagcaagacagtctatccaactgagagggtcactgttaacaacactatgtaccacaagagctgcttcaagtgctgccatggagggtgcaccatcagcccttctaactacattgcgcacgaggggaagctgtactgcaagcaccaccacatccagctgatcaaggaaaggggaacttcagccagcttgagaatgaccacgagaagacatcacaggctgggtcactggaggaggatgaacatgagtattgatcactgagcacaaccacagatgaataatgaatcctcttgcatttccctagagcactatgtatttctgtggcgtggttcgatttcagttttaccaatggaggtcatgtgtgttcagagaacaatgatattgttgtcttgtatctgcatgtaaacgttgttatctttgagtcagatactctacctggtttcaccattttcattggtcagaagatgcctctgcacctacaagacagaactgtaagctcttggtccatcttttgtttaagatgatgtttggc

SEQ ID NO: 35611 - protein, 202 aa, Zea mays subsp. mays
  peptide (1)..(202): Ceres Seq. ID no. 13622792
  misc_feature (40)..(130): Pfam Name: Pfam Description:  Mucin-like glycoprotein
TNQPTNPQFPYRQPSATQPRLRKQSLSLWRQEERRRRPWRPPSRGRPPSAPPATRRCTLWTSSPPTTASTTRPASAATTARAPSSSPTTTPSRECSTAGLTSTSCSRGQGAWTRASKELRRLSSQKETLGMRMLLKSQAPLLAPERNVLDAARQSIQLRGSLLTTLCTTRAASSAAMEGAPSALLTTLRTRGSCTASTTTSS

SEQ ID NO: 35612 - protein, 197 aa, Zea mays subsp. mays
  peptide (1)..(197): Ceres Seq. ID no. 13622793
  misc_feature (110)..(167): Pfam Name: Pfam Description:  LIM domain
  misc_feature (1)..(197): NCBI GI NO: 7715037 NR Description: LIM transcription factor homolog [Zea mays]
  misc_feature (4)..(175): NCBI GI NO: 18565112 NR Description: transcription factor LIM [Populus kitakamiensis]
  misc_feature (4)..(175): NCBI GI NO: 18565116 NR Description: transcription factor LIM [Populus kitakamiensis]
  misc_feature (4)..(175): NCBI GI NO: 15218450 NR Description: transcription factor -related
  misc_feature (4)..(175): NCBI GI NO: 6467903 NR Description: pollen specific LIM domain protein 1a
  misc_feature (4)..(175): NCBI GI NO: 5932413 NR Description: LIM domain protein WLIM1 [Nicotiana tabacum]
  misc_feature (4)..(175): NCBI GI NO: 5932418 NR Description: LIM domain protein PLIM1 [Nicotiana tabacum]
  misc_feature (4)..(175): NCBI GI NO: 18565124 NR Description: transcription factor LIM [Nicotiana tabacum]
  misc_feature (4)..(175): NCBI GI NO: 6467905 NR Description: pollen specific LIM domain protein 1b
  misc_feature (4)..(175): NCBI GI NO: 5689136 NR Description: transcription factor Ntlim1 [Nicotiana tabacum]
MATSFQGTTTKRTACDKTVYLVDKLTADNRIYHKACFRCHHCKGTLKLANYNSFEGVLYCRPHFDQLFKRTGSLDKSFEGTPKVVKPERNVGNENATKVSSAFAGTREKCVGCSKTVYPTERVTVNNTMYHKSCFKCCHGGCTISPSNYIAHEGKLYCKHHHIQLIKERGTSASLRMTTRRHHRLGHWRRMNMSIDH

SEQ ID NO: 35613 - protein, 130 aa, Zea mays subsp. mays
  peptide (1)..(130): Ceres Seq. ID no. 13622794
PTNQPTHSSHIGSHRLHSLASVSRVCRCGGRKRDDGGHGDLLPGDDHQAHRLRQDGVPCGQAHRRQPHLPQGLLPLPPLQGHPQARQLQLLRGSALLQASLRPAVQEDRELGQELRRNSEGCQARKKRWE

SEQ ID NO: 35614 - DNA, 2017 bp, Zea mays subsp. mays
  misc_feature (1)..(2017): Ceres Seq. ID no. 13622795
atccttctagcttcgatctctatatacctctgtatgtgagtgaggccaatgagagccctcgtagtcgtaagtttcgcttcggcgtgcttgctgctgctgttgcagctcgcaggagcgtcgcatgtcgtctacaactacaaggacctcgaagccgaggctgctgcggcgacggaccaggtgccgccgtccatcgtcaaccccctgctcaggacggggtaccacttccagccccccaagaactggatcaatgatcccaacgcgcccatgtactacaaggggtggtaccatttcttctaccaatacaatcccaagggcgccgtatggggcaacatcgtgtgggcgcactcggtgtcgcgagacctcatcaactgggtggcgctagagccggcgctcagaccaagcatcccgggcgacaggtacggctgctggtccgggtcggcgacggtgctgcccgacggcggcggcccggtgatcatgtacacgggcgtggaccacccggacatcaactaccaggtccagaacgtggcgtacccgaagaacgtgtcggacccgctgctccgggagtgggtgaagccctcgcacaaccccgtcatcgtccccgagggcggcatcaacgcgacgcagttccgcgacccgaccacggcctggcgcggccccggccccgagcagtggcggctgctcgtcggcagcgcggcggggtcgtcgccgccccgcggcgtggcgtacgtgtaccgtagccgcgacttccggcggtggaggcgggtgcggcggccgctgcactcggcgcccacggggatgtgggagtgccctgacttctacccggtgagcaagggcggcgcgccgcgcgcggggctcgagacgtccgtgccgcccggcccaagggtcaagcacgtgctcaagaacagcctcgacctccggcggtacgactactacaccgtgggcacgtaccacccgagggccgagcggtacgtgccggacgaccccgccggcgacgagcaccgcctgcgctacgactacggcaacttctacgcgtccaagacgttctacgacccggccaagcggcgccgcatcctgtggggctgggctaacgagtccgacaccgccgccgacgatgtggctaaaggctgggctggaatccaggcgattccaaggacggtgtggctggaccccagtgggaagcagctgctgcagtggcctatcgaggaggtggaggcgctgagagcaaagtcggtcactctcaggaacagggtaatcaaggcaggacatcacgtcgaggtgaccgggatacaaacggcacaggctgacgtggaggtgagcttcgaagtgtcgccggcggccctggccggtgccgagacgctggacccggcgctggcctacgacgcggagaggctgtgcggcgtgaagcgcgcggacgtgaggggcggcgtggggccgttcgggctgtgggtgctggcctccgccaaccgcaaggagagaaccgcggtgttcttcagggtgttcaagcccgccgccggcgacaagcccgtggtgctcatgtgcaccgaccctaccaagtcgtccctgaacccgaacctgtaccgcccgacatttgcaggatttgtcgacacggacatctcgaacggcaagatatccctgagaagcctgatcgaccggtcggtcgttgagagcttcggagccgggggcaagacctgcatcctctccagggtctacccgtcgctggccatcggcaaggacgctcgcctctacgtgttcaacaacgggagggcgcacgtcaaggtgtcccgtctcaccgcgtgggagatgaagaagccggtcatgaacggggcctgaagatcttgaataaatatatcactcatgcatgacatatagtggcgcctgagaaatctttccttatatatatatatattttagatatatcgtttaagaattcattttctacactaaaagggcgccccgttatgttacaatggtaccagctgcacttctagtaacaaagacaattgactatttgttgttc

SEQ ID NO: 35615 - protein, 593 aa, Zea mays subsp. mays
  peptide (1)..(593): Ceres Seq. ID no. 13622796
  misc_feature (58)..(545): Pfam Name: Pfam Description:  Glycosyl hydrolases family 32
  misc_feature (14)..(593): NCBI GI NO: 33694260 NR Description: cell wall invertase 2
  misc_feature (51)..(593): NCBI GI NO: 26986190 NR Description: apoplastic invertase 1
  misc_feature (6)..(593): NCBI GI NO: 33694262 NR Description: cell wall invertase 1
  misc_feature (6)..(593): NCBI GI NO: 20196210 NR Description: cell wall invertase
  misc_feature (1)..(593): NCBI GI NO: 1352469 NR Description: BETA-FRUCTOFURANOSIDASE
  misc_feature (1)..(593): NCBI GI NO: 4105721 NR Description: cell wall invertase Incw1; beta-fructosidase
  misc_feature (53)..(593): NCBI GI NO: 31872120 NR Description: cell wall invertase [Saccharum hybrid cultivar]
  misc_feature (2)..(591): NCBI GI NO: 33694264 NR Description: cell wall invertase 3
  misc_feature (54)..(591): NCBI GI NO: 32488653 NR Description: OSJNBa0087O24.3
  misc_feature (54)..(585): NCBI GI NO: 1352468 NR Description: Beta-fructofuranosidase 1 precursor
MRALVVVSFASACLLLLLQLAGASHVVYNYKDLEAEAAAATDQVPPSIVNPLLRTGYHFQPPKNWINDPNAPMYYKGWYHFFYQYNPKGAVWGNIVWAHSVSRDLINWVALEPALRPSIPGDRYGCWSGSATVLPDGGGPVIMYTGVDHPDINYQVQNVAYPKNVSDPLLREWVKPSHNPVIVPEGGINATQFRDPTTAWRGPGPEQWRLLVGSAAGSSPPRGVAYVYRSRDFRRWRRVRRPLHSAPTGMWECPDFYPVSKGGAPRAGLETSVPPGPRVKHVLKNSLDLRRYDYYTVGTYHPRAERYVPDDPAGDEHRLRYDYGNFYASKTFYDPAKRRRILWGWANESDTAADDVAKGWAGIQAIPRTVWLDPSGKQLLQWPIEEVEALRAKSVTLRNRVIKAGHHVEVTGIQTAQADVEVSFEVSPAALAGAETLDPALAYDAERLCGVKRADVRGGVGPFGLWVLASANRKERTAVFFRVFKPAAGDKPVVLMCTDPTKSSLNPNLYRPTFAGFVDTDISNGKISLRSLIDRSVVESFGAGGKTCILSRVYPSLAIGKDARLYVFNNGRAHVKVSRLTAWEMKKPVMNGA

SEQ ID NO: 35616 - protein, 521 aa, Zea mays subsp. mays
  peptide (1)..(521): Ceres Seq. ID no. 13622797
  misc_feature (1)..(473): Pfam Name: Pfam Description:  Glycosyl hydrolases family 32
  misc_feature (1)..(521): NCBI GI NO: 33694260 NR Description: cell wall invertase 2
  misc_feature (1)..(521): NCBI GI NO: 26986190 NR Description: apoplastic invertase 1
  misc_feature (1)..(521): NCBI GI NO: 33694262 NR Description: cell wall invertase 1
  misc_feature (1)..(521): NCBI GI NO: 20196210 NR Description: cell wall invertase
  misc_feature (1)..(521): NCBI GI NO: 1352469 NR Description: BETA-FRUCTOFURANOSIDASE
  misc_feature (1)..(521): NCBI GI NO: 4105721 NR Description: cell wall invertase Incw1; beta-fructosidase
  misc_feature (1)..(521): NCBI GI NO: 31872120 NR Description: cell wall invertase [Saccharum hybrid cultivar]
  misc_feature (1)..(519): NCBI GI NO: 33694264 NR Description: cell wall invertase 3
  misc_feature (1)..(519): NCBI GI NO: 32488653 NR Description: OSJNBa0087O24.3
  misc_feature (1)..(513): NCBI GI NO: 1352468 NR Description: Beta-fructofuranosidase 1 precursor
MYYKGWYHFFYQYNPKGAVWGNIVWAHSVSRDLINWVALEPALRPSIPGDRYGCWSGSATVLPDGGGPVIMYTGVDHPDINYQVQNVAYPKNVSDPLLREWVKPSHNPVIVPEGGINATQFRDPTTAWRGPGPEQWRLLVGSAAGSSPPRGVAYVYRSRDFRRWRRVRRPLHSAPTGMWECPDFYPVSKGGAPRAGLETSVPPGPRVKHVLKNSLDLRRYDYYTVGTYHPRAERYVPDDPAGDEHRLRYDYGNFYASKTFYDPAKRRRILWGWANESDTAADDVAKGWAGIQAIPRTVWLDPSGKQLLQWPIEEVEALRAKSVTLRNRVIKAGHHVEVTGIQTAQADVEVSFEVSPAALAGAETLDPALAYDAERLCGVKRADVRGGVGPFGLWVLASANRKERTAVFFRVFKPAAGDKPVVLMCTDPTKSSLNPNLYRPTFAGFVDTDISNGKISLRSLIDRSVVESFGAGGKTCILSRVYPSLAIGKDARLYVFNNGRAHVKVSRLTAWEMKKPVMNGA

SEQ ID NO: 35617 - protein, 451 aa, Zea mays subsp. mays
  peptide (1)..(451): Ceres Seq. ID no. 13622798
  misc_feature (1)..(403): Pfam Name: Pfam Description:  Glycosyl hydrolases family 32
  misc_feature (1)..(451): NCBI GI NO: 33694260 NR Description: cell wall invertase 2
  misc_feature (1)..(451): NCBI GI NO: 26986190 NR Description: apoplastic invertase 1
  misc_feature (1)..(451): NCBI GI NO: 33694262 NR Description: cell wall invertase 1
  misc_feature (1)..(451): NCBI GI NO: 20196210 NR Description: cell wall invertase
  misc_feature (1)..(451): NCBI GI NO: 1352469 NR Description: BETA-FRUCTOFURANOSIDASE
  misc_feature (1)..(451): NCBI GI NO: 4105721 NR Description: cell wall invertase Incw1; beta-fructosidase
  misc_feature (1)..(451): NCBI GI NO: 31872120 NR Description: cell wall invertase [Saccharum hybrid cultivar]
  misc_feature (1)..(449): NCBI GI NO: 33694264 NR Description: cell wall invertase 3
  misc_feature (1)..(449): NCBI GI NO: 32488653 NR Description: OSJNBa0087O24.3
  misc_feature (1)..(443): NCBI GI NO: 1352468 NR Description: Beta-fructofuranosidase 1 precursor
MYTGVDHPDINYQVQNVAYPKNVSDPLLREWVKPSHNPVIVPEGGINATQFRDPTTAWRGPGPEQWRLLVGSAAGSSPPRGVAYVYRSRDFRRWRRVRRPLHSAPTGMWECPDFYPVSKGGAPRAGLETSVPPGPRVKHVLKNSLDLRRYDYYTVGTYHPRAERYVPDDPAGDEHRLRYDYGNFYASKTFYDPAKRRRILWGWANESDTAADDVAKGWAGIQAIPRTVWLDPSGKQLLQWPIEEVEALRAKSVTLRNRVIKAGHHVEVTGIQTAQADVEVSFEVSPAALAGAETLDPALAYDAERLCGVKRADVRGGVGPFGLWVLASANRKERTAVFFRVFKPAAGDKPVVLMCTDPTKSSLNPNLYRPTFAGFVDTDISNGKISLRSLIDRSVVESFGAGGKTCILSRVYPSLAIGKDARLYVFNNGRAHVKVSRLTAWEMKKPVMNGA

SEQ ID NO: 35618 - DNA, 1239 bp, Zea mays subsp. mays
  misc_feature (1)..(1239): Ceres Seq. ID no. 12379187
acgagccttacgacatcagcaacaaaccaaacaaaaggacacttcgtgagagaacacgtcggtggctcggtgtcagcagcgagccagcgacggagccccaccagacaccgcagtaccgcaccgcactgcccatggacgcacgcctcccggcgcgcccaccccgcccgcgtgcgcgtgcccctgtccgcctcccgtttgccgcctccaccgcaacgcggcgcgcggggtggtggtgccctcgcgatcctcgtgtcgatcccagcggcaggggtgcctgtgcctttgcttctcctggccgttgcccgcgcctcgcggtcgcgcacctgaaccggagccccgcgtcaaatctagggttgcatccgcgccgccccctcctcccgagactcccagcggctggaaccagaacgagggtgacaggcgacgaaagctgcgagggacgcccctcgtcgaatgcactggcgaccgttccgtcgaggagcagccggagcacgcaggagttgagggaaaagcttggaaaatgtcatccaccgtgccgaagtcatcaaatatcttctggcacgattgtccagttggcaagactgatcgccagaacgtactcaagcagaaaggctgtgttgtctggattacaggccttagtggttcaggtaaaagtaccttggcatgtacattaggccgtgagctccacacaagagggaagcttgcatatgtccttgacggtgataacttaagacatggtctgaacaaggatcttggcttcaaagctgaagaccgtgctgaaaatataaggagagttgtagcaaagttatttgcagatgcgggccttgtatgtattgcaagtttgatatctccacataggagagaccgtgaatcttgccgtgcattgttgtctgatagtagcttcattgaagttttcttgaacatgtccttggaattatgtgaagcaagagatccaaagggcctctataagcttgctcgtgcaggaaaaataaagggttttacaggaatagatgacccttatgaagcaccactgaattgtgagattgagatcaaagaggtagatggtgtatgccctccgcctgctgagatggcagggcaagttgttacttaccttgaggagaaaggcttcctgcacgagtaggctgaatccaagcaacatctggggaagatttcagtaagactagcgcagaataagtcaaaggcgctggcagttacggtatagcagttgcatagattggcctc

SEQ ID NO: 35619 - protein, 222 aa, Zea mays subsp. mays
  peptide (1)..(222): Ceres Seq. ID no. 12379188
EPYDISNKPNKRTLRERTRRWLGVSSEPATEPHQTPQYRTALPMDARLPARPPRPRARAPVRLPFAASTATRRAGWWCPRDPRVDPSGRGACAFASPGRCPRLAVAHLNRSPASNLGLHPRRPLLPRLPAAGTRTRVTGDESCEGRPSSNALATVPSRSSRSTQELREKLGKCHPPCRSHQISSGTIVQLARLIARTYSSRKAVLSGLQALVVQVKVPWHVH

SEQ ID NO: 35620 - protein, 206 aa, Zea mays subsp. mays
  peptide (1)..(206): Ceres Seq. ID no. 12379189
  misc_feature (30)..(183): Pfam Name: Pfam Description:  Adenylylsulphate kinase
  misc_feature (1)..(206): NCBI GI NO: 6563285 NR Description: adenosine-5'-phosphosulfate kinase [Zea mays]
  misc_feature (1)..(206): NCBI GI NO: 34393551 NR Description: putative adenosine-5'-phosphosulfate kinase
  misc_feature (3)..(204): NCBI GI NO: 15228666 NR Description: putative adenylylsulfate kinase
  misc_feature (1)..(204): NCBI GI NO: 15225999 NR Description: putative adenosine phosphosulfate kinase
  misc_feature (1)..(204): NCBI GI NO: 21553403 NR Description: putative adenosine phosphosulfate kinase
  misc_feature (1)..(204): NCBI GI NO: 7387809 NR Description: Adenylylsulfate kinase, chloroplast precursor
  misc_feature (1)..(204): NCBI GI NO: 9757873 NR Description: adenylylsulfate kinase-like protein
  misc_feature (7)..(204): NCBI GI NO: 15236087 NR Description: adenosine-5-phosphosulfate-kinase
  misc_feature (1)..(178): NCBI GI NO: 18425199 NR Description: adenylylsulfate kinase-like protein
  misc_feature (1)..(178): NCBI GI NO: 21537248 NR Description: adenylylsulfate kinase-like protein
MSSTVPKSSNIFWHDCPVGKTDRQNVLKQKGCVVWITGLSGSGKSTLACTLGRELHTRGKLAYVLDGDNLRHGLNKDLGFKAEDRAENIRRVVAKLFADAGLVCIASLISPHRRDRESCRALLSDSSFIEVFLNMSLELCEARDPKGLYKLARAGKIKGFTGIDDPYEAPLNCEIEIKEVDGVCPPPAEMAGQVVTYLEEKGFLHE

SEQ ID NO: 35621 - protein, 179 aa, Zea mays subsp. mays
  peptide (1)..(179): Ceres Seq. ID no. 12379190
MDARLPARPPRPRARAPVRLPFAASTATRRAGWWCPRDPRVDPSGRGACAFASPGRCPRLAVAHLNRSPASNLGLHPRRPLLPRLPAAGTRTRVTGDESCEGRPSSNALATVPSRSSRSTQELREKLGKCHPPCRSHQISSGTIVQLARLIARTYSSRKAVLSGLQALVVQVKVPWHVH

SEQ ID NO: 35622 - DNA, 2059 bp, Zea mays subsp. mays
  misc_feature (1)..(2059): Ceres Seq. ID no. 12450527
aaaaaagttaaaccctagtatctccccgcgtcgccgcacacatcgcccgttcgcacgcgccgtccccctggaggatcgagccaccctcctcacctggaatggaggacggcctggaggagccgccgcccgcggggagcgcggccgccaacgccagctccacctccggcggcggcagcggcgggagcaaggggtccccgtgcgaggagtgtggggagcagccgtggaagtaccggtgccccgggtgcggccgcctcacctgcagcctcccctgcgtgcaggcccacaagcgccgtaccgcctgcacgggcaagcgcccacgcacggaccccgtcccgctcgcccgattcgacgacaaccagctcatatccgattacaacttgctggaggaggtgaagcaggcccacgattccgcgcacaggctcatcggcggcttcggccgcaactacgggggacggggatcaggcggcgcccagctgcccagatggctgttctacctcagcaaggcggcgcaccgccgtggtgtcaagctctgctttctccccaggggcatggccaggagagagcagaatcgatcgcaacacaattacaggaaggattgcatattctggacacttgagtggaaattcaattcaactgatgttgtcctaactgatcatgggatagatgagcacacaaccttgctctctctattggaaaaacatcttattcctggcccttggaaagatcagcttacacaatatcggaacaccaaattacatgatctgaaactgttcattcaaaagtgtgccaagcaatcagagtcaccgtaccgcctactcaatatagaagagccattgcgcccacagctgaggggtatacttgttgtggagtacccaactatcaatgtatttcttccgtcagacaattgtgactttgaaatggagaaaatggtgaacagacttcctaaagatggaaaaggccctggcagcatgactgacgagccacctgtagagggcagcaagtttcatgaggaggaaatagaggaaggcgaactttcacctgaaactgagattatagatctcaaggaccatggaacttcaaatgcctgcaaaatttctccagcagatgttacaagtgaatcaaagatagttaacaatgtcgattcttctgtgctctcataccccggttgtcaagctcaagcattacatggtcagccgaaaggactgaatcaatatagcaagatatcaccaaatggtacctctgggcctgcagaaactaaatcccgcatggaagtctgtcctctggatatggagaagacaagggaaagcgggttgtcctcagagggacgcgttgtagatctgaaggggtatggaatttcatatcctgtcagcactgcagaggcaggaggtgcagctctatcgaagatagacaccaaggcaacatatcccttagtaccatcttccaccagcattgtagtatctgatggcgcgacgggtcctcagctggaacacagtcagcaaaacaaacggacgccaagctcgactcctgaagcgctgaaaaggaaatcttgcatgaaagtttatccgctggacattgacgagggattgttccccgaggtacccgacttggcctttgagcaagagatgttggatacctacccagagctcttcgagaacatggatgtcgatgacttcttaagctgcgattttgcaatggtgaacagggacgaaccagtagatgcaacgtctgggttaccgagggacgacttggaggaaggggagattccaacattgtgaaggaagaacgtgatgcttcacaggatgttgcactcgagcggaagagtctgtgtcgtgcttttctaggacatgtcatgcgacgtaatggtagaacactcacatgtacctagcttgtatagctgcaacttgaaactatgcagcctcttttattctttatcgttttctttagtctcgctgttgtgttatgtagctctgccagagcagcaagaaattttggggttctaattttgtaagagatgatggctgtttggggatatggatgtcgaggatttctcaagctgtgc

SEQ ID NO: 35623 - protein, 558 aa, Zea mays subsp. mays
  peptide (1)..(558): Ceres Seq. ID no. 12450528
  misc_feature (233)..(351): NCBI GI NO: 25406822 NR Description: hypothetical protein
  misc_feature (89)..(202): NCBI GI NO: 25406822 NR Description: hypothetical protein
  misc_feature (32)..(274): NCBI GI NO: 7021009 NR Description: unnamed protein product [Homo sapiens]
  misc_feature (32)..(274): NCBI GI NO: 7021062 NR Description: unnamed protein product [Homo sapiens]
  misc_feature (32)..(274): NCBI GI NO: 20149643 NR Description: hypothetical protein FLJ20729 [Homo sapiens]
  misc_feature (32)..(200): NCBI GI NO: 12060843 NR Description: serologically defined breast cancer antigen NY-BR-75
  misc_feature (161)..(351): NCBI GI NO: 15220356 NR Description: unknown protein; protein id: At1g04940.1
  misc_feature (32)..(157): NCBI GI NO: 34860945 NR Description: similar to hypothetical protein FLJ20729
  misc_feature (132)..(264): NCBI GI NO: 28829432 NR Description: hypothetical protein [Dictyostelium discoideum]
  misc_feature (28)..(91): NCBI GI NO: 28829432 NR Description: hypothetical protein [Dictyostelium discoideum]
MEDGLEEPPPAGSAAANASSTSGGGSGGSKGSPCEECGEQPWKYRCPGCGRLTCSLPCVQAHKRRTACTGKRPRTDPVPLARFDDNQLISDYNLLEEVKQAHDSAHRLIGGFGRNYGGRGSGGAQLPRWLFYLSKAAHRRGVKLCFLPRGMARREQNRSQHNYRKDCIFWTLEWKFNSTDVVLTDHGIDEHTTLLSLLEKHLIPGPWKDQLTQYRNTKLHDLKLFIQKCAKQSESPYRLLNIEEPLRPQLRGILVVEYPTINVFLPSDNCDFEMEKMVNRLPKDGKGPGSMTDEPPVEGSKFHEEEIEEGELSPETEIIDLKDHGTSNACKISPADVTSESKIVNNVDSSVLSYPGCQAQALHGQPKGLNQYSKISPNGTSGPAETKSRMEVCPLDMEKTRESGLSSEGRVVDLKGYGISYPVSTAEAGGAALSKIDTKATYPLVPSSTSIVVSDGATGPQLEHSQQNKRTPSSTPEALKRKSCMKVYPLDIDEGLFPEVPDLAFEQEMLDTYPELFENMDVDDFLSCDFAMVNRDEPVDATSGLPRDDLEEGEIPTL

SEQ ID NO: 35624 - protein, 408 aa, Zea mays subsp. mays
  peptide (1)..(408): Ceres Seq. ID no. 12450529
  misc_feature (83)..(201): NCBI GI NO: 25406822 NR Description: hypothetical protein
  misc_feature (1)..(52): NCBI GI NO: 25406822 NR Description: hypothetical protein
  misc_feature (1)..(124): NCBI GI NO: 7021009 NR Description: unnamed protein product [Homo sapiens]
  misc_feature (1)..(124): NCBI GI NO: 7021062 NR Description: unnamed protein product [Homo sapiens]
  misc_feature (1)..(124): NCBI GI NO: 20149643 NR Description: hypothetical protein FLJ20729 [Homo sapiens]
  misc_feature (1)..(50): NCBI GI NO: 12060843 NR Description: serologically defined breast cancer antigen NY-BR-75
  misc_feature (11)..(201): NCBI GI NO: 15220356 NR Description: unknown protein; protein id: At1g04940.1
  misc_feature (1)..(114): NCBI GI NO: 28829432 NR Description: hypothetical protein [Dictyostelium discoideum]
  misc_feature (1)..(204): NCBI GI NO: 19075195 NR Description: possible zinc-finger protein
  misc_feature (1)..(113): NCBI GI NO: 24641569 NR Description: CG1463-PA [Drosophila melanogaster]
MARREQNRSQHNYRKDCIFWTLEWKFNSTDVVLTDHGIDEHTTLLSLLEKHLIPGPWKDQLTQYRNTKLHDLKLFIQKCAKQSESPYRLLNIEEPLRPQLRGILVVEYPTINVFLPSDNCDFEMEKMVNRLPKDGKGPGSMTDEPPVEGSKFHEEEIEEGELSPETEIIDLKDHGTSNACKISPADVTSESKIVNNVDSSVLSYPGCQAQALHGQPKGLNQYSKISPNGTSGPAETKSRMEVCPLDMEKTRESGLSSEGRVVDLKGYGISYPVSTAEAGGAALSKIDTKATYPLVPSSTSIVVSDGATGPQLEHSQQNKRTPSSTPEALKRKSCMKVYPLDIDEGLFPEVPDLAFEQEMLDTYPELFENMDVDDFLSCDFAMVNRDEPVDATSGLPRDDLEEGEIPTL

SEQ ID NO: 35625 - protein, 285 aa, Zea mays subsp. mays
  peptide (1)..(285): Ceres Seq. ID no. 12450530
  misc_feature (1)..(78): NCBI GI NO: 25406822 NR Description: hypothetical protein
  misc_feature (1)..(78): NCBI GI NO: 15220356 NR Description: unknown protein; protein id: At1g04940.1
  misc_feature (1)..(81): NCBI GI NO: 19075195 NR Description: possible zinc-finger protein
MEKMVNRLPKDGKGPGSMTDEPPVEGSKFHEEEIEEGELSPETEIIDLKDHGTSNACKISPADVTSESKIVNNVDSSVLSYPGCQAQALHGQPKGLNQYSKISPNGTSGPAETKSRMEVCPLDMEKTRESGLSSEGRVVDLKGYGISYPVSTAEAGGAALSKIDTKATYPLVPSSTSIVVSDGATGPQLEHSQQNKRTPSSTPEALKRKSCMKVYPLDIDEGLFPEVPDLAFEQEMLDTYPELFENMDVDDFLSCDFAMVNRDEPVDATSGLPRDDLEEGEIPTL

SEQ ID NO: 35626 - DNA, 2160 bp, Zea mays subsp. mays
  misc_feature (1)..(2160): Ceres Seq. ID no. 12435948
atcctttccactactctcgtcagcttgctcagctcagctagctagctagctttcccctccctgctgcaatgcaagcttgcccaacccaataagctaagcaagcactcatcacacactctctacttgctagctagccgcccttagcttcggacgcgacatctatcatcggccaagaaacggagcagatcggtcggccgccgacatgggggatcacgctgagatgttgcatgccactccggccatatacaacggcgccggcgctgcccctcgtggtggctggtggagtacggccgtgcccgcgaccacgtgctcgacggagctggccggcttcaccacgtggtcgtccgccctggctgctagctacgacctggcggcggagggggcaaaggccaacaagagcgccaccaccgcctcgtcggagtcgcccgggaacaacagctccgtgaccttccaagaaccggccggcggcgtcggaaccgccgtggtgcagcagcctcttgctggttgcgctgactggacgcatccctatttgagcagcggcgctgctactttgcatgggtttatgcaagatggtcaccagcaggacatgagctcatcgacaactgagcagagccccatggccgcatcaagcctgataatgaacccttcatccaataacctagccctggccctgcaacaaggtcaccatcaccaagagccggaccaccagcagatgctgtccaacttcggcggctccgaggccgagctgctcctgtcgccgacgacctcaccctacgggttccagtcgtctctgctgagaagcttcatggagccgacagcggcggcggcgaagccggctttgccggggtaccggcagcagtatgaccagtaccagcagatgggcatgggccaggcgaggtttgcaccggccggcggagctgccagcagggaggcactccagttcaccaacgacgcgccgtcctggaacccttctgctgctgcggctgggttcggcgtgccgccggcgccggcgccggttgaccaagctagcagcagcgtacgttctgtgaaaccatcgccggcggcgcgtgctactgcaacccttgcattaaagactgcgttggaaggagtaggagagtctgctagctccatcatcaccaagaagaaggcaaacggagagctggcgccggccttcaagaaatcgaggctccagacgccgtcgccgttgccaacgttcaaggttaggaaggagaaggtaggggacagggtcactgcactccaacaactcgtcgccccttttggaaagacggatacagcatcggtgctccatgagaccatcgagtacatcaagttcctccacgaccaggtcggggtccttagtgctccatacttgaagaacaacggccatcaagtgccctacctgaagagatcaagtcctgacaggtccgaggacgacagcagccatgccggcgagagatcactcaagggccgggggctgtgcctggtcccgatatcgagcacgttcgcggtagccagcgaggtgcccgtcgatttcgggtggagtactgcatttgctgccagctttaggtagaagagaaggctgggaacgaagagcgcgccaaagctctgatcagaggcgtcgaacgagtatataactagctagctagccagctaccacagatcgatcgacctgccctgctgacgatattatatgcatatgtcgatgcgtttctgatctagtgagtctagcagtgtatggttatgcgtggttatctctctctcataactatagtacgtactaagcatgcatgcagcagctctggcaacgaaaaaggattgcagattgagcttgcattgcttgcttgctagctcgagatgaacctttggaatgagtcctgaagacttggattcattctccaggttcatctatccatcagggaataagctacttaagaggtggtcatctaataggtttgagaggacacacaacaagtctctactgatcgtcatcatcagcttctaactattacggttgttggttgttggattgcatcattgggtagttgtcgaaggatttgttaaatatgtgtaatgatttctagtttaatttagtatggatcaaagtgtgtagcaggtctctattgattgtactaccaaataaattaaagtgtcatctctttg

SEQ ID NO: 35627 - protein, 455 aa, Zea mays subsp. mays
  peptide (1)..(455): Ceres Seq. ID no. 12435949
  misc_feature (341)..(378): Pfam Name: Pfam Description:  Helix-loop-helix DNA-binding domain
  misc_feature (245)..(455): NCBI GI NO: 9294343 NR Description: gene_id:F3H11.2~unknown protein
  misc_feature (245)..(455): NCBI GI NO: 15232315 NR Description: hypothetical protein; protein id: At3g20640.1
  misc_feature (271)..(455): NCBI GI NO: 18407276 NR Description: expressed protein; protein id: At1g61660
  misc_feature (271)..(455): NCBI GI NO: 21553730 NR Description: unknown [Arabidopsis thaliana]
  misc_feature (271)..(397): NCBI GI NO: 25404333 NR Description: hypothetical protein T13M11.1
  misc_feature (403)..(455): NCBI GI NO: 25404333 NR Description: hypothetical protein T13M11.1
  misc_feature (305)..(435): NCBI GI NO: 22328848 NR Description: hypothetical protein; protein id: At4g21340
  misc_feature (297)..(438): NCBI GI NO: 15234636 NR Description: putative protein; protein id: At4g05170.1
  misc_feature (240)..(382): NCBI GI NO: 34910130 NR Description: B1070A12.8
  misc_feature (154)..(433): NCBI GI NO: 22093671 NR Description: similar to bHLH
MGDHAEMLHATPAIYNGAGAAPRGGWWSTAVPATTCSTELAGFTTWSSALAASYDLAAEGAKANKSATTASSESPGNNSSVTFQEPAGGVGTAVVQQPLAGCADWTHPYLSSGAATLHGFMQDGHQQDMSSSTTEQSPMAASSLIMNPSSNNLALALQQGHHHQEPDHQQMLSNFGGSEAELLLSPTTSPYGFQSSLLRSFMEPTAAAAKPALPGYRQQYDQYQQMGMGQARFAPAGGAASREALQFTNDAPSWNPSAAAAGFGVPPAPAPVDQASSSVRSVKPSPAARATATLALKTALEGVGESASSIITKKKANGELAPAFKKSRLQTPSPLPTFKVRKEKVGDRVTALQQLVAPFGKTDTASVLHETIEYIKFLHDQVGVLSAPYLKNNGHQVPYLKRSSPDRSEDDSSHAGERSLKGRGLCLVPISSTFAVASEVPVDFGWSTAFAASFR

SEQ ID NO: 35628 - protein, 449 aa, Zea mays subsp. mays
  peptide (1)..(449): Ceres Seq. ID no. 12435950
  misc_feature (335)..(372): Pfam Name: Pfam Description:  Helix-loop-helix DNA-binding domain
  misc_feature (239)..(449): NCBI GI NO: 9294343 NR Description: gene_id:F3H11.2~unknown protein
  misc_feature (239)..(449): NCBI GI NO: 15232315 NR Description: hypothetical protein; protein id: At3g20640.1
  misc_feature (265)..(449): NCBI GI NO: 18407276 NR Description: expressed protein; protein id: At1g61660
  misc_feature (265)..(449): NCBI GI NO: 21553730 NR Description: unknown [Arabidopsis thaliana]
  misc_feature (265)..(391): NCBI GI NO: 25404333 NR Description: hypothetical protein T13M11.1
  misc_feature (397)..(449): NCBI GI NO: 25404333 NR Description: hypothetical protein T13M11.1
  misc_feature (299)..(429): NCBI GI NO: 22328848 NR Description: hypothetical protein; protein id: At4g21340
  misc_feature (291)..(432): NCBI GI NO: 15234636 NR Description: putative protein; protein id: At4g05170.1
  misc_feature (234)..(376): NCBI GI NO: 34910130 NR Description: B1070A12.8
  misc_feature (148)..(427): NCBI GI NO: 22093671 NR Description: similar to bHLH
MLHATPAIYNGAGAAPRGGWWSTAVPATTCSTELAGFTTWSSALAASYDLAAEGAKANKSATTASSESPGNNSSVTFQEPAGGVGTAVVQQPLAGCADWTHPYLSSGAATLHGFMQDGHQQDMSSSTTEQSPMAASSLIMNPSSNNLALALQQGHHHQEPDHQQMLSNFGGSEAELLLSPTTSPYGFQSSLLRSFMEPTAAAAKPALPGYRQQYDQYQQMGMGQARFAPAGGAASREALQFTNDAPSWNPSAAAAGFGVPPAPAPVDQASSSVRSVKPSPAARATATLALKTALEGVGESASSIITKKKANGELAPAFKKSRLQTPSPLPTFKVRKEKVGDRVTALQQLVAPFGKTDTASVLHETIEYIKFLHDQVGVLSAPYLKNNGHQVPYLKRSSPDRSEDDSSHAGERSLKGRGLCLVPISSTFAVASEVPVDFGWSTAFAASFR

SEQ ID NO: 35629 - protein, 335 aa, Zea mays subsp. mays
  peptide (1)..(335): Ceres Seq. ID no. 12435951
  misc_feature (221)..(258): Pfam Name: Pfam Description:  Helix-loop-helix DNA-binding domain
  misc_feature (125)..(335): NCBI GI NO: 9294343 NR Description: gene_id:F3H11.2~unknown protein
  misc_feature (125)..(335): NCBI GI NO: 15232315 NR Description: hypothetical protein; protein id: At3g20640.1
  misc_feature (151)..(335): NCBI GI NO: 18407276 NR Description: expressed protein; protein id: At1g61660
  misc_feature (151)..(335): NCBI GI NO: 21553730 NR Description: unknown [Arabidopsis thaliana]
  misc_feature (151)..(277): NCBI GI NO: 25404333 NR Description: hypothetical protein T13M11.1
  misc_feature (283)..(335): NCBI GI NO: 25404333 NR Description: hypothetical protein T13M11.1
  misc_feature (185)..(315): NCBI GI NO: 22328848 NR Description: hypothetical protein; protein id: At4g21340
  misc_feature (177)..(318): NCBI GI NO: 15234636 NR Description: putative protein; protein id: At4g05170.1
  misc_feature (120)..(262): NCBI GI NO: 34910130 NR Description: B1070A12.8
  misc_feature (34)..(313): NCBI GI NO: 22093671 NR Description: similar to bHLH
MQDGHQQDMSSSTTEQSPMAASSLIMNPSSNNLALALQQGHHHQEPDHQQMLSNFGGSEAELLLSPTTSPYGFQSSLLRSFMEPTAAAAKPALPGYRQQYDQYQQMGMGQARFAPAGGAASREALQFTNDAPSWNPSAAAAGFGVPPAPAPVDQASSSVRSVKPSPAARATATLALKTALEGVGESASSIITKKKANGELAPAFKKSRLQTPSPLPTFKVRKEKVGDRVTALQQLVAPFGKTDTASVLHETIEYIKFLHDQVGVLSAPYLKNNGHQVPYLKRSSPDRSEDDSSHAGERSLKGRGLCLVPISSTFAVASEVPVDFGWSTAFAASFR

SEQ ID NO: 35630 - DNA, 1943 bp, Zea mays subsp. mays; identical to SEQ ID NO: 26139
  misc_feature (1)..(1943): Ceres Seq. ID no. 12387936

SEQ ID NO: 35631 - protein, 576 aa, Zea mays subsp. mays; identical to SEQ ID NO: 26140
  peptide (1)..(576): Ceres Seq. ID no. 12387937
  misc_feature (139)..(545): Pfam Name: Pfam Description:  Serine carboxypeptidase S28
  misc_feature (139)..(574): NCBI GI NO: 37535976 NR Description: putative serine peptidase
  misc_feature (81)..(558): NCBI GI NO: 37535980 NR Description: putative serine peptidase
  misc_feature (82)..(557): NCBI GI NO: 18419800 NR Description: Expressed protein; protein id: At4g36195
  misc_feature (189)..(557): NCBI GI NO: 18419798 NR Description: putative protein; protein id: At4g36190.1
  misc_feature (114)..(232): NCBI GI NO: 18419798 NR Description: putative protein; protein id: At4g36190.1
  misc_feature (226)..(558): NCBI GI NO: 15227960 NR Description: unknown protein; protein id: At2g18080.1
  misc_feature (151)..(179): NCBI GI NO: 15227960 NR Description: unknown protein; protein id: At2g18080.1
  misc_feature (139)..(374): NCBI GI NO: 15144318 NR Description: putative serine peptidase
  misc_feature (139)..(374): NCBI GI NO: 7486037 NR Description: hypothetical protein F23E13
  misc_feature (497)..(557): NCBI GI NO: 7486037 NR Description: hypothetical protein F23E13

SEQ ID NO: 35632 - protein, 509 aa, Zea mays subsp. mays; identical to SEQ ID NO: 26141
  peptide (1)..(509): Ceres Seq. ID no. 12387938
  misc_feature (72)..(478): Pfam Name: Pfam Description:  Serine carboxypeptidase S28
  misc_feature (72)..(507): NCBI GI NO: 37535976 NR Description: putative serine peptidase
  misc_feature (14)..(491): NCBI GI NO: 37535980 NR Description: putative serine peptidase
  misc_feature (15)..(490): NCBI GI NO: 18419800 NR Description: Expressed protein; protein id: At4g36195
  misc_feature (122)..(490): NCBI GI NO: 18419798 NR Description: putative protein; protein id: At4g36190.1
  misc_feature (47)..(165): NCBI GI NO: 18419798 NR Description: putative protein; protein id: At4g36190.1
  misc_feature (159)..(491): NCBI GI NO: 15227960 NR Description: unknown protein; protein id: At2g18080.1
  misc_feature (84)..(112): NCBI GI NO: 15227960 NR Description: unknown protein; protein id: At2g18080.1
  misc_feature (72)..(307): NCBI GI NO: 15144318 NR Description: putative serine peptidase
  misc_feature (72)..(307): NCBI GI NO: 7486037 NR Description: hypothetical protein F23E13
  misc_feature (430)..(490): NCBI GI NO: 7486037 NR Description: hypothetical protein F23E13

SEQ ID NO: 35633 - protein, 486 aa, Zea mays subsp. mays; identical to SEQ ID NO: 26142
  peptide (1)..(486): Ceres Seq. ID no. 12387939
  misc_feature (49)..(455): Pfam Name: Pfam Description:  Serine carboxypeptidase S28
  misc_feature (49)..(484): NCBI GI NO: 37535976 NR Description: putative serine peptidase
  misc_feature (1)..(468): NCBI GI NO: 37535980 NR Description: putative serine peptidase
  misc_feature (1)..(467): NCBI GI NO: 18419800 NR Description: Expressed protein; protein id: At4g36195
  misc_feature (99)..(467): NCBI GI NO: 18419798 NR Description: putative protein; protein id: At4g36190.1
  misc_feature (24)..(142): NCBI GI NO: 18419798 NR Description: putative protein; protein id: At4g36190.1
  misc_feature (136)..(468): NCBI GI NO: 15227960 NR Description: unknown protein; protein id: At2g18080.1
  misc_feature (61)..(89): NCBI GI NO: 15227960 NR Description: unknown protein; protein id: At2g18080.1
  misc_feature (49)..(284): NCBI GI NO: 15144318 NR Description: putative serine peptidase
  misc_feature (49)..(284): NCBI GI NO: 7486037 NR Description: hypothetical protein F23E13
  misc_feature (407)..(467): NCBI GI NO: 7486037 NR Description: hypothetical protein F23E13

SEQ ID NO: 35634 - DNA, 413 bp, Zea mays subsp. mays
  misc_feature (1)..(413): Ceres Seq. ID no. 11023056
attcgcccacacgagcctacccaaagagcccagagcccgggaggttacttcgctgcctgatgagtccccggcaccggaggtcttgctaccggctggcggcttcttcttccgttcctccccaagtcctcttcccggaggaatcatgatcgtctgcgtcgccgttgtcggccaccagaacaatctgtacctgcagagcttcacggaggcggacgacgccctcaagctccaccacatcgtccactgctctctcgacgtcatcgacgagcgagtgagcaatcctaagaggagtgcacctacattgaatgagacatttttgggtcttctatacccaactgagaactacaaagtgtatggctatttgacaaacacaaaggtcaaatttatcatggtcacgactgatcttgatgtcaaag

SEQ ID NO: 35635 - protein, 137 aa, Zea mays subsp. mays
  peptide (1)..(137): Ceres Seq. ID no. 11023057
  misc_feature (48)..(136): NCBI GI NO: 18399520 NR Description: expressed protein; protein id: At2g20930
  misc_feature (48)..(136): NCBI GI NO: 25338945 NR Description: hypothetical protein At2g20930
  misc_feature (48)..(136): NCBI GI NO: 21555278 NR Description: unknown [Arabidopsis thaliana]
  misc_feature (48)..(130): NCBI GI NO: 6841572 NR Description: HSPC176 [Homo sapiens]
  misc_feature (48)..(130): NCBI GI NO: 27659496 NR Description: similar to hypothetical protein, 2-6
  misc_feature (48)..(130): NCBI GI NO: 7706429 NR Description: unknown [Homo sapiens]
  misc_feature (48)..(130): NCBI GI NO: 10946914 NR Description: hypothetical protein, 2-6 [Mus musculus]
  misc_feature (50)..(130): NCBI GI NO: 34851319 NR Description: similar to hypothetical protein, 2-6
  misc_feature (48)..(136): NCBI GI NO: 24652658 NR Description: CG9067-PA [Drosophila melanogaster]
FAHTSLPKEPRAREVTSLPDESPAPEVLLPAGGFFFRSSPSPLPGGIMIVCVAVVGHQNNLYLQSFTEADDALKLHHIVHCSLDVIDERVSNPKRSAPTLNETFLGLLYPTENYKVYGYLTNTKVKFIMVTTDLDVK

SEQ ID NO: 35636 - protein, 90 aa, Zea mays subsp. mays
  peptide (1)..(90): Ceres Seq. ID no. 11023058
  misc_feature (1)..(89): NCBI GI NO: 18399520 NR Description: expressed protein; protein id: At2g20930
  misc_feature (1)..(89): NCBI GI NO: 25338945 NR Description: hypothetical protein At2g20930
  misc_feature (1)..(89): NCBI GI NO: 21555278 NR Description: unknown [Arabidopsis thaliana]
  misc_feature (1)..(83): NCBI GI NO: 6841572 NR Description: HSPC176 [Homo sapiens]
  misc_feature (1)..(83): NCBI GI NO: 7706429 NR Description: unknown [Homo sapiens]
  misc_feature (1)..(83): NCBI GI NO: 27659496 NR Description: similar to hypothetical protein, 2-6
  misc_feature (1)..(83): NCBI GI NO: 10946914 NR Description: hypothetical protein, 2-6 [Mus musculus]
  misc_feature (3)..(83): NCBI GI NO: 34851319 NR Description: similar to hypothetical protein, 2-6
  misc_feature (1)..(89): NCBI GI NO: 24652658 NR Description: CG9067-PA [Drosophila melanogaster]
MIVCVAVVGHQNNLYLQSFTEADDALKLHHIVHCSLDVIDERVSNPKRSAPTLNETFLGLLYPTENYKVYGYLTNTKVKFIMVTTDLDVK

SEQ ID NO: 35637 - DNA, 1017 bp, Zea mays subsp. mays
  misc_feature (1)..(1017): Ceres Seq. ID no. 12382656
  misc_feature (701)..(701): n is a, c, t, g, unknown, or other
  misc_feature (859)..(859): n is a, c, t, g, unknown, or other
  misc_feature (819)..(819): n is a, c, t, g, unknown, or other
atccatccatccatagatccctcacctcactcactcgtgaagaaccagagaacccacccaccctccttcatctcctacatccacatctatccaagaaggtccgttctctcctccccgctcccctcagcaataatctccgcacggcaacctcgctcctccgttttggttttcctctgtgtgccatgggcgacgccgtggagcacctcaagagcgggttccagaagttcaagaccgaggtgtatgacaagaagccggagctgttcgagcctctcaaggccggtcaggcccccaagtacatggttttcgcctgctccgactcccgcgtgtgcccgtcggtgaccctgggcctgcagcccggcgaggccttcaccgtgcgcaacatcgccgccatggtcccggcctacgacaagaccaagtacaccggcatcgggtccgccatcgagtacgccgtgtgcgccctcaaggtggaggtcctcgtggtcatcggccacagctgctgcggtggcatccgggcgctgctctccctccaggacggtgcacccgacaacttccacttcgtcgagaactgggtcaagatcggcttccctgccaaggtcaaggtgaagaaagagcacgcctccgtgcccttcgatgaccagtgctccatcctggagaaggaggccgtgaacgtgtccctggagaacctcaagacctaccccttngtccaggaagggctggccaaggggaccctcaagctggtcggcgcccactacgacttcgtgtccgggaacttcctcgtatgggaaacttagccacacccgccgctcagcgcgcggcttngtcgtcacaactcctatatcttcataaatatatatatccnctacctatatatacctaccgatatgtgaatgcgaggagtactattacctgcatgttttcagcagtatgcagctacgtacatatatatgtaccggatcgcctaacgacgtgaatgtaataagcaataatattttctaccgcttttttttatttctttcc

SEQ ID NO: 35638 - protein, 262 aa, Zea mays subsp. mays
  peptide (1)..(262): Ceres Seq. ID no. 12382657
  misc_feature (63)..(261): NCBI GI NO: 7489809 NR Description: probable carbonate dehydratase (EC 4
  misc_feature (26)..(262): NCBI GI NO: 7489810 NR Description: probable carbonate dehydratase (EC 4
  misc_feature (63)..(261): NCBI GI NO: 7489810 NR Description: probable carbonate dehydratase (EC 4
  misc_feature (61)..(262): NCBI GI NO: 7489809 NR Description: probable carbonate dehydratase (EC 4
  misc_feature (63)..(262): NCBI GI NO: 7489810 NR Description: probable carbonate dehydratase (EC 4
  misc_feature (35)..(261): NCBI GI NO: 7436816 NR Description: probable carbonate dehydratase (EC 4
  misc_feature (35)..(261): NCBI GI NO: 34911604 NR Description: carbonic anhydrase
  misc_feature (61)..(261): NCBI GI NO: 729003 NR Description: CARBONIC ANHYDRASE, CHLOROPLAST PRECURSOR
  misc_feature (63)..(261): NCBI GI NO: 882246 NR Description: carbonic anhydrase 2
  misc_feature (63)..(261): NCBI GI NO: 882248 NR Description: carbonic anhydrase 1
  misc_feature (233)..(233): Xaa is any aa, unknown or other
PSIHRSLTSLTREEPENPPTLLHLLHPHLSKKVRSLLPAPLSNNLRTATSLLRFGFPLCAMGDAVEHLKSGFQKFKTEVYDKKPELFEPLKAGQAPKYMVFACSDSRVCPSVTLGLQPGEAFTVRNIAAMVPAYDKTKYTGIGSAIEYAVCALKVEVLVVIGHSCCGGIRALLSLQDGAPDNFHFVENWVKIGFPAKVKVKKEHASVPFDDQCSILEKEAVNVSLENLKTYPXVQEGLAKGTLKLVGAHYDFVSGNFLVWET

SEQ ID NO: 35639 - protein, 202 aa, Zea mays subsp. mays
  peptide (1)..(202): Ceres Seq. ID no. 12382658
  misc_feature (3)..(201): NCBI GI NO: 7489809 NR Description: probable carbonate dehydratase (EC 4
  misc_feature (1)..(202): NCBI GI NO: 7489810 NR Description: probable carbonate dehydratase (EC 4
  misc_feature (3)..(201): NCBI GI NO: 7489810 NR Description: probable carbonate dehydratase (EC 4
  misc_feature (1)..(202): NCBI GI NO: 7489809 NR Description: probable carbonate dehydratase (EC 4
  misc_feature (3)..(202): NCBI GI NO: 7489810 NR Description: probable carbonate dehydratase (EC 4
  misc_feature (1)..(201): NCBI GI NO: 7436816 NR Description: probable carbonate dehydratase (EC 4
  misc_feature (1)..(201): NCBI GI NO: 34911604 NR Description: carbonic anhydrase
  misc_feature (1)..(201): NCBI GI NO: 729003 NR Description: CARBONIC ANHYDRASE, CHLOROPLAST PRECURSOR
  misc_feature (3)..(201): NCBI GI NO: 882246 NR Description: carbonic anhydrase 2
  misc_feature (3)..(201): NCBI GI NO: 882248 NR Description: carbonic anhydrase 1
  misc_feature (173)..(173): Xaa is any aa, unknown or other
MGDAVEHLKSGFQKFKTEVYDKKPELFEPLKAGQAPKYMVFACSDSRVCPSVTLGLQPGEAFTVRNIAAMVPAYDKTKYTGIGSAIEYAVCALKVEVLVVIGHSCCGGIRALLSLQDGAPDNFHFVENWVKIGFPAKVKVKKEHASVPFDDQCSILEKEAVNVSLENLKTYPXVQEGLAKGTLKLVGAHYDFVSGNFLVWET

SEQ ID NO: 35640 - protein, 164 aa, Zea mays subsp. mays
  peptide (1)..(164): Ceres Seq. ID no. 12382659
  misc_feature (1)..(163): NCBI GI NO: 7489809 NR Description: probable carbonate dehydratase (EC 4
  misc_feature (1)..(164): NCBI GI NO: 7489810 NR Description: probable carbonate dehydratase (EC 4
  misc_feature (1)..(163): NCBI GI NO: 7489810 NR Description: probable carbonate dehydratase (EC 4
  misc_feature (1)..(164): NCBI GI NO: 7489809 NR Description: probable carbonate dehydratase (EC 4
  misc_feature (1)..(164): NCBI GI NO: 7489810 NR Description: probable carbonate dehydratase (EC 4
  misc_feature (1)..(163): NCBI GI NO: 7436816 NR Description: probable carbonate dehydratase (EC 4
  misc_feature (1)..(163): NCBI GI NO: 34911604 NR Description: carbonic anhydrase
  misc_feature (1)..(163): NCBI GI NO: 729003 NR Description: CARBONIC ANHYDRASE, CHLOROPLAST PRECURSOR
  misc_feature (1)..(163): NCBI GI NO: 882246 NR Description: carbonic anhydrase 2
  misc_feature (1)..(163): NCBI GI NO: 882248 NR Description: carbonic anhydrase 1
  misc_feature (135)..(135): Xaa is any aa, unknown or other
MVFACSDSRVCPSVTLGLQPGEAFTVRNIAAMVPAYDKTKYTGIGSAIEYAVCALKVEVLVVIGHSCCGGIRALLSLQDGAPDNFHFVENWVKIGFPAKVKVKKEHASVPFDDQCSILEKEAVNVSLENLKTYPXVQEGLAKGTLKLVGAHYDFVSGNFLVWET

SEQ ID NO: 35641 - DNA, 1476 bp, Zea mays subsp. mays
  misc_feature (1)..(1476): Ceres Seq. ID no. 15180020
gcgcaaaaaaacaaaccatcctcgattcgaccggaggggaaggagacgcgccgggagaagggggaagagacgcggcgaccatgtctccgatctgggtgttcgggtacggctcgctgatctggaacccaggcttcgcctacgacgaccgcgtcgtcggctttgtcagggactaccgccgcgtcttctaccaagggagcacggaccacaggggcacgccgcagttccccgggaggaccgtcacgctcgagcaccagcccgaagcgacttgcgtaggccctttctcatgtccaccctcctactctgtcaatgtaactgctaaggacagactgattactaggacacgcaaaccaaatgaattagtaaattcatggttgatgacatgtcactcccactacgtcatgttatcatgtagtacatcttttttacttatcgttttggatagcctggtaatcctcttcgcagtccatgcgattgattttgcgagctaatctgtctattttacatctttcagtggggagttgcttacagaataaaggaggaagataaggagatagctttggaggtatgtttattgcaagccaggcagatgcagatatgttttgttcactagtactgatcgcgcacaaatatcccatgatgatactcagattgtttgatgattgggatattgctgatgttacttgtcattatggagatttagagattggtcgatgtaccaaaactcatatgttctttcctacaaattgattatatctagatactatgacgatttaagtcatgaatgggcttatgaaatttcggtatatatatcaacttatatgtgtttatcgcgatggtatacgtagcagcaaatctctgcacattctgatactccgttgcttacagctttatattgcttctactggcatttatcttcagatttaaatttgcagtatcttgaggtcagggagaagcaatatgatgagaaggtttaccttgacttgtatactgtaagatacgagggctggatctatttccctttggataatgttcgatatgtaactattacggagtattaagttgtaataactttcaggattcatcgcccaaagtaccagctgtcgaaaatgtgatggtatacttcgccaccagtaacaaggagaacaatcaaaactatcttggtcctgcacctctggaagaaatgaccaggcaaatttaccttgctcaaggcccatctggacctaacaaagagtatgtgttcaaactcgaggacgcgttacacaaattaggagttgtagaccaacatgtccaagaactggcaaatgctctgcgtgagtattctgacaccgagttatctaagtgaaagatcacatttaccccttgtttggagggtaaggatttataaataaagttagaattcattcatgcatgtcccaacatggatatattcttgtaagctgcgttttgagtgactacattacgattatattcctgtac

SEQ ID NO: 35642 - protein, 161 aa, Zea mays subsp. mays
  peptide (1)..(161): Ceres Seq. ID no. 15180021
  misc_feature (30)..(91): Pfam Name: Pfam Description:  ChaC-like protein
  misc_feature (30)..(120): NCBI GI NO: 38344831 NR Description: OSJNBa0064H22.12
  misc_feature (30)..(91): NCBI GI NO: 12083292 NR Description: unknown protein [Arabidopsis thaliana]
  misc_feature (30)..(91): NCBI GI NO: 18401334 NR Description: expressed protein [Arabidopsis thaliana]
  misc_feature (30)..(89): NCBI GI NO: 25349686 NR Description: hypothetical protein T12C22.6
  misc_feature (30)..(95): NCBI GI NO: 18417778 NR Description: expressed protein [Arabidopsis thaliana]
  misc_feature (30)..(95): NCBI GI NO: 21593515 NR Description: unknown [Arabidopsis thaliana]
  misc_feature (30)..(95): NCBI GI NO: 15239626 NR Description: expressed protein [Arabidopsis thaliana]
  misc_feature (30)..(95): NCBI GI NO: 7486723 NR Description: hypothetical protein F9D12
  misc_feature (31)..(95): NCBI GI NO: 27525010 NR Description: putative cation transporter [Beta procumbens]
  misc_feature (30)..(95): NCBI GI NO: 7486662 NR Description: hypothetical protein F8F16
AKKQTILDSTGGEGDAPGEGGRDAATMSPIWVFGYGSLIWNPGFAYDDRVVGFVRDYRRVFYQGSTDHRGTPQFPGRTVTLEHQPEATCVGPFSCPPSYSVNVTAKDRLITRTRKPNELVNSWLMTCHSHYVMLSCSTSFLLIVLDSLVILFAVHAIDFAS

SEQ ID NO: 35643 - protein, 135 aa, Zea mays subsp. mays
  peptide (1)..(135): Ceres Seq. ID no. 15180022
  misc_feature (4)..(65): Pfam Name: Pfam Description:  ChaC-like protein
  misc_feature (4)..(94): NCBI GI NO: 38344831 NR Description: OSJNBa0064H22.12
  misc_feature (4)..(65): NCBI GI NO: 12083292 NR Description: unknown protein [Arabidopsis thaliana]
  misc_feature (4)..(65): NCBI GI NO: 18401334 NR Description: expressed protein [Arabidopsis thaliana]
  misc_feature (4)..(63): NCBI GI NO: 25349686 NR Description: hypothetical protein T12C22.6
  misc_feature (4)..(69): NCBI GI NO: 18417778 NR Description: expressed protein [Arabidopsis thaliana]
  misc_feature (4)..(69): NCBI GI NO: 21593515 NR Description: unknown [Arabidopsis thaliana]
  misc_feature (4)..(69): NCBI GI NO: 15239626 NR Description: expressed protein [Arabidopsis thaliana]
  misc_feature (4)..(69): NCBI GI NO: 7486723 NR Description: hypothetical protein F9D12
  misc_feature (5)..(69): NCBI GI NO: 27525010 NR Description: putative cation transporter [Beta procumbens]
  misc_feature (4)..(69): NCBI GI NO: 7486662 NR Description: hypothetical protein F8F16
MSPIWVFGYGSLIWNPGFAYDDRVVGFVRDYRRVFYQGSTDHRGTPQFPGRTVTLEHQPEATCVGPFSCPPSYSVNVTAKDRLITRTRKPNELVNSWLMTCHSHYVMLSCSTSFLLIVLDSLVILFAVHAIDFAS

SEQ ID NO: 35644 - protein, 105 aa, Zea mays subsp. mays
  peptide (1)..(105): Ceres Seq. ID no. 15180023
RKKTNHPRFDRRGRRRAGRRGKRRGDHVSDLGVRVRLADLEPRLRLRRPRRRLCQGLPPRLLPREHGPQGHAAVPREDRHARAPARSDLRRPFLMSTLLLCQCNC

SEQ ID NO: 35645 - DNA, 592 bp, Zea mays subsp. mays; identical to SEQ ID NO: 33302
  misc_feature (1)..(592): Ceres Seq. ID no. 12566495

SEQ ID NO: 35646 - protein, 156 aa, Zea mays subsp. mays; identical to SEQ ID NO: 33303
  peptide (1)..(156): Ceres Seq. ID no. 12566496

SEQ ID NO: 35647 - protein, 131 aa, Zea mays subsp. mays; identical to SEQ ID NO: 33304
  peptide (1)..(131): Ceres Seq. ID no. 12566497
  misc_feature (18)..(125): Pfam Name: Pfam Description:  KE2 family protein
  misc_feature (4)..(129): NCBI GI NO: 30691134 NR Description: hydrophilic protein -related
  misc_feature (4)..(129): NCBI GI NO: 26450257 NR Description: unknown protein [Arabidopsis thaliana]
  misc_feature (4)..(96): NCBI GI NO: 25403096 NR Description: probable hydrophilic protein, 29542-30030
  misc_feature (14)..(131): NCBI GI NO: 33585747 NR Description: Unknown (protein for MGC:66282) [Danio rerio]
  misc_feature (14)..(131): NCBI GI NO: 27704620 NR Description: similar to H2-K region expressed gene 2
  misc_feature (14)..(129): NCBI GI NO: 6754128 NR Description: H2-K region expressed gene 2 [Mus musculus]
  misc_feature (14)..(129): NCBI GI NO: 7657162 NR Description: HLA class II region expressed gene KE2
  misc_feature (14)..(129): NCBI GI NO: 24667085 NR Description: CG7770-PA [Drosophila melanogaster]
  misc_feature (14)..(129): NCBI GI NO: 38048503 NR Description: similar to Drosophila melanogaster CG7770
  misc_feature (13)..(130): NCBI GI NO: 39582756 NR Description: Hypothetical protein CBG21902

SEQ ID NO: 35648 - protein, 123 aa, Zea mays subsp. mays; identical to SEQ ID NO: 33305
  peptide (1)..(123): Ceres Seq. ID no. 12566498
  misc_feature (1)..(122): Pfam Name: Pfam Description:  Cupin
  misc_feature (6)..(120): NCBI GI NO: 29250446 NR Description: GLP_39_87477_88058 [Giardia lamblia ATCC 50803]
  misc_feature (1)..(123): NCBI GI NO: 14017923 NR Description: KIAA1853 protein [Homo sapiens]
  misc_feature (8)..(123): NCBI GI NO: 23490106 NR Description: FHA domain, putative [Plasmodium yoelii yoelii]
  misc_feature (8)..(123): NCBI GI NO: 17137528 NR Description: CG4602-PA [Drosophila melanogaster]
  misc_feature (19)..(123): NCBI GI NO: 7949115 NR Description: Ser/Arg-related nuclear matrix protein
  misc_feature (8)..(123): NCBI GI NO: 7532408 NR Description: splicing factor SRp54 [Drosophila melanogaster]
  misc_feature (10)..(123): NCBI GI NO: 5821145 NR Description: RNA binding protein [Homo sapiens]
  misc_feature (10)..(123): NCBI GI NO: 5821143 NR Description: RNA binding protein [Homo sapiens]
  misc_feature (19)..(123): NCBI GI NO: 23274133 NR Description: Similar to serine/arginine repetitive matrix 1

SEQ ID NO: 35649 - DNA, 1885 bp, Zea mays subsp. mays
  misc_feature (1)..(1885): Ceres Seq. ID no. 12435283
actgccagtgctcggtgcccgtgcccgcgcgcgctagcctagctgctcctgcctggttcgccgtagcccgtagcccgtagcacaacaacaacaaaaaaaatctccgcggcgcggggggaggtggtctgttcaccttggggagcagcggcgggccgtcggccgagaaatgcccggtggcgccttcctcctcaacggcagcggcggcggcatggcggactacggcggcggcctcaccgtccccgtcgtcgtgacctgcctcatcggcggcctccggcggcctcatcttcggctacgacattggcatctcaggaggtgtgtcggagatggaggatttcctgaacaagttcttccccgggttgctcaagaggacggcgcgcgccaacaaggacgtgtactgcatttacaacaaccaggcgctgacggccttcacgtcgtcgctgtacgcgttcggcatggtggggacgctgctggcgagccgcgtgacccggcggctggggcggcaggccgtcatgctgatcggcggcggcctgttcttggccggcgccctcgtcaacgccgccgcggccaacatcgccatgctcatcgtcgggaggatgctgctcggcctggggctcggcttctccggccaggccacgccggtgtacctcgccgaggtgtcgcccccgcgctggcgcggcggcttcatctcggccttccccctcttcatcagcgtcgggtacctggtggccaacctcatcaactacggcacctcgcggatcccgggctggggctggcgcctctcgctcggcctcgcctccgtcccggccgccgtcatggtggtcggcgccgcgttcatcccggacacccccagcagcctcgtcctgcgcgggaagcacgacgacgcccgcgccgcgctccagcgggtgcgcggcaagggcgtggacatcggccccgagttcgcggacatcctcgccgcggcggagaacgaccgccggaacgaggagggcgcgttccgccggatcctgcgccgggagtaccggccctacctggtgatggccgtggcgttcccggtgttcctcaacctcacaggggtggccgtcaccgccttcttctcgccgatactgttccggaccgtcggcttcgagagcgacgccgcgctcatgggcgccgtcatcctgggcctcatgaacatcggcggcatcctcgcgtcgggcttcgccatggaccgctacggccggaagctgctcttcatgatcggtggcgcgctcatgttcacgtgccaggtggcgatggcgagcataatcggatcacacctcggcaacgggagcaagatgcccaaggggtacgcggtgacggtgctggtggtggcgctgatcttctcggcgagcttcagctggtcgtggggcgcgctgtactggaccatccccggcgagatataccccgtggaggtgcggtcggcggggcagggcgcggccgtggcgctcaacctggggctcaacttcttgcaggcgcagttcttcctggccatgctgtgctgcttcaagtacggcaccttcctcttctacgcgtcgtggctggttgtcatgaccgccttcgccgtggcgttcgtgccggagaccaagggcgtgccgctcgagtccatggctcacgtcttcgcgcgccactggtactggggcaggttcgtcaaggaccaccagaagttgggcgaagagtccacctagctaagctaataattcggaatcagcgaacgacgtaccctactaccagtagcagattattgataagggagtcaaacacatattgcgtgtgtgtgtcttttaaagtgttcgtttagaatggcttgagaagctcatccgtgtagtaaatttggagacttcgaaatataataaatatgttcgtagttggc

SEQ ID NO: 35650 - protein, 548 aa, Zea mays subsp. mays
  peptide (1)..(548): Ceres Seq. ID no. 12435284
  misc_feature (100)..(328): Pfam Name: Pfam Description:  HlyD family secretion protein
  misc_feature (1)..(35): NCBI GI NO: 11991110 NR Description: monosaccharide transporter 1 [Oryza sativa]
MPGGAFLLNGSGGGMADYGGGLTVPVVVTCLIGGLRRPHLRLRHWHLRRCVGDGGFPEQVLPRVAQEDGARQQGRVLHLQQPGADGLHVVAVRVRHGGDAAGEPRDPAAGAAGRHADRRRPVLGRRPRQRRRGQHRHAHRREDAARPGARLLRPGHAGVPRRGVAPALARRLHLGLPPLHQRRVPGGQPHQLRHLADPGLGLAPLARPRLRPGRRHGGRRRVHPGHPQQPRPAREARRRPRRAPAGARQGRGHRPRVRGHPRRGGERPPERGGRVPPDPAPGVPALPGDGRGVPGVPQPHRGGRHRLLLADTVPDRRLRERRRAHGRRHPGPHEHRRHPRVGLRHGPLRPEAALHDRWRAHVHVPGGDGEHNRITPRQREQDAQGVRGDGAGGGADLLGELQLVVGRAVLDHPRRDIPRGGAVGGAGRGRGAQPGAQLLAGAVLPGHAVLLQVRHLPLLRVVAGCHDRLRRGVRAGDQGRAARVHGSRLRAPLVLGQVRQGPPEVGRRVHLAKLIIRNQRTTYPTTSSRLLIRESNTYCVCVSFKVFV

SEQ ID NO: 35651 - protein, 534 aa, Zea mays subsp. mays
  peptide (1)..(534): Ceres Seq. ID no. 12435285
  misc_feature (86)..(314): Pfam Name: Pfam Description:  HlyD family secretion protein
  misc_feature (1)..(21): NCBI GI NO: 11991110 NR Description: monosaccharide transporter 1 [Oryza sativa]
MADYGGGLTVPVVVTCLIGGLRRPHLRLRHWHLRRCVGDGGFPEQVLPRVAQEDGARQQGRVLHLQQPGADGLHVVAVRVRHGGDAAGEPRDPAAGAAGRHADRRRPVLGRRPRQRRRGQHRHAHRREDAARPGARLLRPGHAGVPRRGVAPALARRLHLGLPPLHQRRVPGGQPHQLRHLADPGLGLAPLARPRLRPGRRHGGRRRVHPGHPQQPRPAREARRRPRRAPAGARQGRGHRPRVRGHPRRGGERPPERGGRVPPDPAPGVPALPGDGRGVPGVPQPHRGGRHRLLLADTVPDRRLRERRRAHGRRHPGPHEHRRHPRVGLRHGPLRPEAALHDRWRAHVHVPGGDGEHNRITPRQREQDAQGVRGDGAGGGADLLGELQLVVGRAVLDHPRRDIPRGGAVGGAGRGRGAQPGAQLLAGAVLPGHAVLLQVRHLPLLRVVAGCHDRLRRGVRAGDQGRAARVHGSRLRAPLVLGQVRQGPPEVGRRVHLAKLIIRNQRTTYPTTSSRLLIRESNTYCVCVSFKVFV

SEQ ID NO: 35652 - protein, 458 aa, Zea mays subsp. mays
  peptide (1)..(458): Ceres Seq. ID no. 12435286
  misc_feature (1)..(437): Pfam Name: and other Pfam Description: Sugar
  misc_feature (1)..(448): NCBI GI NO: 32489200 NR Description: OSJNBa0027G07.27
  misc_feature (1)..(458): NCBI GI NO: 11991110 NR Description: monosaccharide transporter 1 [Oryza sativa]
  misc_feature (1)..(449): NCBI GI NO: 21741620 NR Description: OSJNBa0027G07.12
  misc_feature (1)..(447): NCBI GI NO: 21740734 NR Description: OSJNBa0086B14.28
  misc_feature (1)..(448): NCBI GI NO: 15218693 NR Description: monosaccharide transporter, putative
  misc_feature (1)..(453): NCBI GI NO: 30349813 NR Description: putative monosaccharide-H+ symporter
  misc_feature (1)..(450): NCBI GI NO: 34915514 NR Description: monosaccharide transporter 3
  misc_feature (1)..(449): NCBI GI NO: 30349804 NR Description: monosaccharide-H+ symporter [Datisca glomerata]
  misc_feature (1)..(449): NCBI GI NO: 3915039 NR Description: Sugar carrier protein C
  misc_feature (1)..(449): NCBI GI NO: 81619 NR Description: glucose transport protein STP1
MEDFLNKFFPGLLKRTARANKDVYCIYNNQALTAFTSSLYAFGMVGTLLASRVTRRLGRQAVMLIGGGLFLAGALVNAAAANIAMLIVGRMLLGLGLGFSGQATPVYLAEVSPPRWRGGFISAFPLFISVGYLVANLINYGTSRIPGWGWRLSLGLASVPAAVMVVGAAFIPDTPSSLVLRGKHDDARAALQRVRGKGVDIGPEFADILAAAENDRRNEEGAFRRILRREYRPYLVMAVAFPVFLNLTGVAVTAFFSPILFRTVGFESDAALMGAVILGLMNIGGILASGFAMDRYGRKLLFMIGGALMFTCQVAMASIIGSHLGNGSKMPKGYAVTVLVVALIFSASFSWSWGALYWTIPGEIYPVEVRSAGQGAAVALNLGLNFLQAQFFLAMLCCFKYGTFLFYASWLVVMTAFAVAFVPETKGVPLESMAHVFARHWYWGRFVKDHQKLGEEST

SEQ ID NO: 35653 - DNA, 903 bp, Zea mays subsp. mays
  misc_feature (1)..(903): Ceres Seq. ID no. 12443307
gcaccgctcaacgtctcaacctgagaagctagctagagctagctagctccgggcgcccgcagcatggccacgaacagccaccgcattattgcgcccggcctcctgctggtcgcggccacgacgctagtcgtcgtcgtcgtcgcgcagctcgcggcgccggctgccgcctgcccctactgcccgacgccgacgccgccccctccgccaccgcccccgcccccggtggtgaacccgccgccgtcgtccacgccgtgccctccgcctccctactcgccgtccacgccgacgggcaagtgccccgtggacacgctgaagctgctggcgtgcgtggacgcgctcaacggcctcgtgcacgccgtcgtcgggaccaacgccagcgacacctgctgcccgctgctgtccggcgtggccgacctcgacgccgcgctctgcctctgcaccaccatcaaggccaaggcgctcagcgtcagcctcgtgctccccgtcgccatctccgtgctcgtcaacgagtgcggcaagcacgtgccctccagcttccagtgcccgtaataactatattagggcgcgtacttactgatcgatcatcatctgcatatgtactgctactctactgtatatatatgatgtatcgtcactaaactatatacatcatatatgtacacgtacggtcaagttatatatacatccatatataacacaaacatatacataagcatgcatgtgcagcttcatatgcataagctctgccggcttgtgatatacatggagctgcgggggttgtgcatttttttgtaaccatgtaccagtattattgtatcataaaccagtgtgagagttgtggccttggtggggtcgatcgcttgtagtagtcattaaggaaacttatgaataaagtgcgtctgt

SEQ ID NO: 35654 - protein, 161 aa, Zea mays subsp. mays
  peptide (1)..(161): Ceres Seq. ID no. 12443308
  misc_feature (78)..(160): Pfam Name: Pfam Description:  Protease inhibitor/seed storage/LTP family
  misc_feature (12)..(161): NCBI GI NO: 38568019 NR Description: OSJNBa0070C17.11
  misc_feature (32)..(161): NCBI GI NO: 38568018 NR Description: OSJNBa0070C17.10
  misc_feature (32)..(161): NCBI GI NO: 7446487 NR Description: proline rich protein homolog WCOR518 - wheat
  misc_feature (31)..(161): NCBI GI NO: 7446487 NR Description: proline rich protein homolog WCOR518 - wheat
  misc_feature (37)..(161): NCBI GI NO: 283044 NR Description: hybrid proline-rich protein - maize
  misc_feature (32)..(161): NCBI GI NO: 34898430 NR Description: Similar to Zea mays PRP gene.(X60432)
  misc_feature (8)..(161): NCBI GI NO: 19521 NR Description: proline rich protein [Lycopersicon esculentum]
  misc_feature (8)..(161): NCBI GI NO: 1709767 NR Description: 36.4 KD PROLINE-RICH PROTEIN
  misc_feature (37)..(161): NCBI GI NO: 1076501 NR Description: cell wall protein - alfalfa
  misc_feature (32)..(161): NCBI GI NO: 7446488 NR Description: cytokinin-induced proline rich protein
MATNSHRIIAPGLLLVAATTLVVVVVAQLAAPAAACPYCPTPTPPPPPPPPPPVVNPPPSSTPCPPPPYSPSTPTGKCPVDTLKLLACVDALNGLVHAVVGTNASDTCCPLLSGVADLDAALCLCTTIKAKALSVSLVLPVAISVLVNECGKHVPSSFQCP

SEQ ID NO: 35655 - DNA, 2487 bp, Zea mays subsp. mays
  misc_feature (1)..(2487): Ceres Seq. ID no. 12435918
agaagatggaatcttctagagaatggtgaaaaatggaatttagaggtatataaagagaatccctccggttaatcattgatcacccaagccagtggagccttggcctcgaacagaatagaaccaaccaatcgcgcgggcgcacacagtcggcttccaccaaccacgttgccagcaggcagcggcagcctccacttgctccatgtctccatccaaccctcttccgccgccgggcgagacgcgcgtcggctgctcgttgccctcaccagtcacccctcaggccatgggcgggggccccgctcgtcatgtggccatgcgcgcccttcgcgctcgcttcctctcgcggcagcgggagggaggaccagcggcagcgtcgacctggtggtggtgcgcttcgggttcggcgaagggcgacatggagagcacgctcaaggggatacgcggcagcgatgcgccgtgcgttctggacctggacgacgcggccaccgtggcgggcggcgtcgaggacacctacggcgaggatcgcgccaccgaggagcagctcgtcacgccctggaccgtctccgtcgccagcggttacaatctgcttagggatccccgttacaacaagggacttgcgttcacagagagggaacgtgagacgcactacctccgtggccttctgccaccagctattgtatcccaggagctccaggaaagaaagatcatgaataatattcgacaataccagttgcctttgcagcgctacatggcactcatggatctccaggaagggaacgagaggcttttctacaagttgctcattgacaacgtcgaggagttacttccaatcgtgtacactccaaccgttggcgaggcctgccaaaagtatggatccatatttagtcgccctcagggtctttatatcagtttgaaggagaagggaaagatccttgaggtgttgaagaactggccagagaggagcattcaggttatagttgttactgatggtgaacgtattttggggcttggagatctcggatgccaggggatggggattcctgttggtaaactttccctttacactgccctgggaggagttcgtccatctgcttgcttgccgatcacattggatgttggtacaaataacgaggagctgcttaatgacgaattttacattggcttgagacaaagaagagccactggccaggagtacactgattttctgcaagaatttatgagtgctgtgaaacaaaactatggggagaaagtgcttattcagtttgaggattttgccaaccataatgcttttgatcttcttgcaagatatggcaccactcaccttgtattcaatgatgatattcagggaacagcttctgtggttcttgctgggcttattgcagcacaaacattacttggtggttcattggcagatcacacttaccttttccttggtgctggagaggctgggacaggtatcgctgaacttatagctcttgagatctcacgtcagacgaaagctcctatagaggagtgccgcaagaaaatctggcttgttgattcaaagggcttgattgtcagtacacgaaaggagtcccttcaacacttcaagaaaccatgggctcatgagcataaaccactcagcaacctcttagatgctgttaatgctatcaaaccaacagtgttgattggcacatccgggaaggggcaaactttcacaaaagacgttgttgaagcaatctcctcatttaacgagagaccaatcattcttgccctatcgaacccaacatcacaatctgaatgcacagctgagcaagcttacacatggagcaagggacaagcagtgtttgcgactgggagtccatttgatcctgtggagtacaatggcaagatacatgttcccggacaggcaaacaatgcctatatcttcccagggtttggcctcggcgtggtgatgtctggagctatccgcgttcatgatgacatgcttctggcagcatcggaggctctggcccagcaggtcacagaagaaaattttgagaaggggctgatttatcctcccttctcaaacataaggaagatctctgcccacattgcagccagcgttgcagcaaaggcatatgaacttggtttggcaagtaggcgccctcggccaaaggacctggtgaaatatgcagagagctgcatgtacagccccatctaccgcaactaccgttgaattcggatcaactccagttatgtgcaaatcagcagcagccttgcgtcaactgcaagatttcctaagaatataactcgtttcagtctttcatactgtaataccctaagccctctagcaatagctgtttcacgtccttttctgcccctacatattccgcagcgtttatctcttgcgatgtcatgtaaatcagctccggttaggcttttggatgctagtcagtcatggtgctgctgccgtccttccggttccggacaaggataaatttggaataaagtttgagtcgacgattcctc

SEQ ID NO: 35656 - protein, 664 aa, Zea mays subsp. mays
  peptide (1)..(664): Ceres Seq. ID no. 12435919
  misc_feature (380)..(633): Pfam Name: Pfam Description:  Malic enzyme, NAD binding domain
  misc_feature (72)..(664): NCBI GI NO: 8118507 NR Description: NADP-dependent malic protein [Ricinus communis]
  misc_feature (72)..(664): NCBI GI NO: 1708924 NR Description: NADP-DEPENDENT MALIC ENZYME (NADP-ME)
  misc_feature (72)..(664): NCBI GI NO: 7431234 NR Description: malate dehydrogenase
  misc_feature (72)..(664): NCBI GI NO: 1346485 NR Description: NADP-DEPENDENT MALIC ENZYME (NADP-ME)
  misc_feature (82)..(664): NCBI GI NO: 4239891 NR Description: NADP-malic enzyme [Aloe arborescens]
  misc_feature (72)..(664): NCBI GI NO: 1561774 NR Description: malate dehydrogenase [Vitis vinifera]
  misc_feature (72)..(664): NCBI GI NO: 228412 NR Description: malic enzyme
  misc_feature (72)..(664): NCBI GI NO: 282848 NR Description: malate dehydrogenase
  misc_feature (72)..(664): NCBI GI NO: 15077107 NR Description: putative cytosolic NADP-malic enzyme
  misc_feature (91)..(664): NCBI GI NO: 1170871 NR Description: NADP-DEPENDENT MALIC ENZYME, CHLOROPLAST PRECURSOR
MSPSNPLPPPGETRVGCSLPSPVTPQAMGGGPARHVAMRALRARFLSRQREGGPAAASTWWWCASGSAKGDMESTLKGIRGSDAPCVLDLDDAATVAGGVEDTYGEDRATEEQLVTPWTVSVASGYNLLRDPRYNKGLAFTERERETHYLRGLLPPAIVSQELQERKIMNNIRQYQLPLQRYMALMDLQEGNERLFYKLLIDNVEELLPIVYTPTVGEACQKYGSIFSRPQGLYISLKEKGKILEVLKNWPERSIQVIVVTDGERILGLGDLGCQGMGIPVGKLSLYTALGGVRPSACLPITLDVGTNNEELLNDEFYIGLRQRRATGQEYTDFLQEFMSAVKQNYGEKVLIQFEDFANHNAFDLLARYGTTHLVFNDDIQGTASVVLAGLIAAQTLLGGSLADHTYLFLGAGEAGTGIAELIALEISRQTKAPIEECRKKIWLVDSKGLIVSTRKESLQHFKKPWAHEHKPLSNLLDAVNAIKPTVLIGTSGKGQTFTKDVVEAISSFNERPIILALSNPTSQSECTAEQAYTWSKGQAVFATGSPFDPVEYNGKIHVPGQANNAYIFPGFGLGVVMSGAIRVHDDMLLAASEALAQQVTEENFEKGLIYPPFSNIRKISAHIAASVAAKAYELGLASRRPRPKDLVKYAESCMYSPIYRNYR

SEQ ID NO: 35657 - protein, 637 aa, Zea mays subsp. mays
  peptide (1)..(637): Ceres Seq. ID no. 12435920
  misc_feature (353)..(606): Pfam Name: Pfam Description:  Malic enzyme, NAD binding domain
  misc_feature (45)..(637): NCBI GI NO: 8118507 NR Description: NADP-dependent malic protein [Ricinus communis]
  misc_feature (45)..(637): NCBI GI NO: 1708924 NR Description: NADP-DEPENDENT MALIC ENZYME (NADP-ME)
  misc_feature (45)..(637): NCBI GI NO: 7431234 NR Description: malate dehydrogenase
  misc_feature (45)..(637): NCBI GI NO: 1346485 NR Description: NADP-DEPENDENT MALIC ENZYME (NADP-ME)
  misc_feature (55)..(637): NCBI GI NO: 4239891 NR Description: NADP-malic enzyme [Aloe arborescens]
  misc_feature (45)..(637): NCBI GI NO: 1561774 NR Description: malate dehydrogenase [Vitis vinifera]
  misc_feature (45)..(637): NCBI GI NO: 228412 NR Description: malic enzyme
  misc_feature (45)..(637): NCBI GI NO: 282848 NR Description: malate dehydrogenase
  misc_feature (45)..(637): NCBI GI NO: 15077107 NR Description: putative cytosolic NADP-malic enzyme
  misc_feature (64)..(637): NCBI GI NO: 1170871 NR Description: NADP-DEPENDENT MALIC ENZYME, CHLOROPLAST PRECURSOR
MGGGPARHVAMRALRARFLSRQREGGPAAASTWWWCASGSAKGDMESTLKGIRGSDAPCVLDLDDAATVAGGVEDTYGEDRATEEQLVTPWTVSVASGYNLLRDPRYNKGLAFTERERETHYLRGLLPPAIVSQELQERKIMNNIRQYQLPLQRYMALMDLQEGNERLFYKLLIDNVEELLPIVYTPTVGEACQKYGSIFSRPQGLYISLKEKGKILEVLKNWPERSIQVIVVTDGERILGLGDLGCQGMGIPVGKLSLYTALGGVRPSACLPITLDVGTNNEELLNDEFYIGLRQRRATGQEYTDFLQEFMSAVKQNYGEKVLIQFEDFANHNAFDLLARYGTTHLVFNDDIQGTASVVLAGLIAAQTLLGGSLADHTYLFLGAGEAGTGIAELIALEISRQTKAPIEECRKKIWLVDSKGLIVSTRKESLQHFKKPWAHEHKPLSNLLDAVNAIKPTVLIGTSGKGQTFTKDVVEAISSFNERPIILALSNPTSQSECTAEQAYTWSKGQAVFATGSPFDPVEYNGKIHVPGQANNAYIFPGFGLGVVMSGAIRVHDDMLLAASEALAQQVTEENFEKGLIYPPFSNIRKISAHIAASVAAKAYELGLASRRPRPKDLVKYAESCMYSPIYRNYR

SEQ ID NO: 35658 - protein, 627 aa, Zea mays subsp. mays
  peptide (1)..(627): Ceres Seq. ID no. 12435921
  misc_feature (343)..(596): Pfam Name: Pfam Description:  Malic enzyme, NAD binding domain
  misc_feature (35)..(627): NCBI GI NO: 8118507 NR Description: NADP-dependent malic protein [Ricinus communis]
  misc_feature (35)..(627): NCBI GI NO: 1708924 NR Description: NADP-DEPENDENT MALIC ENZYME (NADP-ME)
  misc_feature (35)..(627): NCBI GI NO: 7431234 NR Description: malate dehydrogenase
  misc_feature (35)..(627): NCBI GI NO: 1346485 NR Description: NADP-DEPENDENT MALIC ENZYME (NADP-ME)
  misc_feature (45)..(627): NCBI GI NO: 4239891 NR Description: NADP-malic enzyme [Aloe arborescens]
  misc_feature (35)..(627): NCBI GI NO: 1561774 NR Description: malate dehydrogenase [Vitis vinifera]
  misc_feature (35)..(627): NCBI GI NO: 228412 NR Description: malic enzyme
  misc_feature (35)..(627): NCBI GI NO: 282848 NR Description: malate dehydrogenase
  misc_feature (35)..(627): NCBI GI NO: 15077107 NR Description: putative cytosolic NADP-malic enzyme
  misc_feature (54)..(627): NCBI GI NO: 1170871 NR Description: NADP-DEPENDENT MALIC ENZYME, CHLOROPLAST PRECURSOR
MRALRARFLSRQREGGPAAASTWWWCASGSAKGDMESTLKGIRGSDAPCVLDLDDAATVAGGVEDTYGEDRATEEQLVTPWTVSVASGYNLLRDPRYNKGLAFTERERETHYLRGLLPPAIVSQELQERKIMNNIRQYQLPLQRYMALMDLQEGNERLFYKLLIDNVEELLPIVYTPTVGEACQKYGSIFSRPQGLYISLKEKGKILEVLKNWPERSIQVIVVTDGERILGLGDLGCQGMGIPVGKLSLYTALGGVRPSACLPITLDVGTNNEELLNDEFYIGLRQRRATGQEYTDFLQEFMSAVKQNYGEKVLIQFEDFANHNAFDLLARYGTTHLVFNDDIQGTASVVLAGLIAAQTLLGGSLADHTYLFLGAGEAGTGIAELIALEISRQTKAPIEECRKKIWLVDSKGLIVSTRKESLQHFKKPWAHEHKPLSNLLDAVNAIKPTVLIGTSGKGQTFTKDVVEAISSFNERPIILALSNPTSQSECTAEQAYTWSKGQAVFATGSPFDPVEYNGKIHVPGQANNAYIFPGFGLGVVMSGAIRVHDDMLLAASEALAQQVTEENFEKGLIYPPFSNIRKISAHIAASVAAKAYELGLASRRPRPKDLVKYAESCMYSPIYRNYR

SEQ ID NO: 35659 - DNA, 474 bp, Zea mays subsp. mays
  misc_feature (1)..(474): Ceres Seq. ID no. 4615028
atcagaaccgatccttacagagagacacccccagcgcgcgaggtatctacatcgatcatcaccagcgagccagccggccgaacgagcagcaccgatggcggcgtacatgcgcgtgacgcaccgcgacgagaaaggcaagaaggtgacggakaagatgccggtcccggagacgcggcgcccggacacggccaagcacttcgagcgcaagctggaggagcagggcctacaccgcttcgagcggcacccggcgaacgcgccccggggcgtgggcatcggcgccccgccgcccaagtccgggcgcggcggcmagtacacgtgggagggccccggcggcctcgtcgaggaccagctcgacccggcgccgcccgccatcgacccmaacgaccccaactacgaggaggcggaggakggaggggcggcggacgaggacgacgaggcggccagggaggtggtcgtcggggaggtggaggtcgc

SEQ ID NO: 35660 - protein, 158 aa, Zea mays subsp. mays
  peptide (1)..(158): Ceres Seq. ID no. 4615029
  misc_feature (50)..(157): Pfam Name: rhodopsin family Pfam Description: 7 transmembrane receptor
  misc_feature (26)..(157): NCBI GI NO: 32141270 NR Description: probable translational initiation factor
  misc_feature (22)..(157): NCBI GI NO: 22960558 NR Description: hypothetical protein [Rhodobacter sphaeroides]
  misc_feature (24)..(157): NCBI GI NO: 32141270 NR Description: probable translational initiation factor
  misc_feature (25)..(157): NCBI GI NO: 7494125 NR Description: myosin-IA - Acanthamoeba castellanii
  misc_feature (28)..(157): NCBI GI NO: 29829093 NR Description: putative translation initiation factor IF-2
  misc_feature (29)..(156): NCBI GI NO: 23019271 NR Description: hypothetical protein [Thermobifida fusca]
  misc_feature (45)..(156): NCBI GI NO: 105270 NR Description: alpha-2A-adrenergic receptor - human
  misc_feature (45)..(156): NCBI GI NO: 178192 NR Description: alpha-2-adrenergic receptor old gene name 'ADRA2R'
  misc_feature (20)..(157): NCBI GI NO: 27380286 NR Description: bll5175 [Bradyrhizobium japonicum]
  misc_feature (50)..(157): NCBI GI NO: 127749 NR Description: Myosin IC heavy chain
  misc_feature (51)..(51): Xaa is any aa, unknown or other
  misc_feature (103)..(103): Xaa is any aa, unknown or other
  misc_feature (127)..(127): Xaa is any aa, unknown or other
  misc_feature (137)..(137): Xaa is any aa, unknown or other
IRTDPYRETPPAREVSTSIITSEPAGRTSSTDGGVHARDAPRRERQEGDGXDAGPGDAAPGHGQALRAQAGGAGPTPLRAAPGERAPGRGHRRPAAQVRARRXVHVGGPRRPRRGPARPGAARHRPXRPQLRGGGGXRGGGRGRRGGQGGGRRGGGGR

SEQ ID NO: 35661 - protein, 157 aa, Zea mays subsp. mays
  peptide (1)..(157): Ceres Seq. ID no. 4615030
  misc_feature (36)..(156): NCBI GI NO: 18398726 NR Description: expressed protein; protein id: At3g10020
  misc_feature (50)..(50): Xaa is any aa, unknown or other
  misc_feature (103)..(103): Xaa is any aa, unknown or other
  misc_feature (126)..(126): Xaa is any aa, unknown or other
  misc_feature (136)..(136): Xaa is any aa, unknown or other
SEPILTERHPQRARYLHRSSPASQPAERAAPMAAYMRVTHRDEKGKKVTXKMPVPETRRPDTAKHFERKLEEQGLHRFERHPANAPRGVGIGAPPPKSGRGGXYTWEGPGGLVEDQLDPAPPAIDXNDPNYEEAEXGGAADEDDEAAREVVVGEVEV

SEQ ID NO: 35662 - protein, 126 aa, Zea mays subsp. mays
  peptide (1)..(126): Ceres Seq. ID no. 4615031
  misc_feature (5)..(125): NCBI GI NO: 18398726 NR Description: expressed protein; protein id: At3g10020
  misc_feature (19)..(19): Xaa is any aa, unknown or other
  misc_feature (72)..(72): Xaa is any aa, unknown or other
  misc_feature (95)..(95): Xaa is any aa, unknown or other
  misc_feature (105)..(105): Xaa is any aa, unknown or other
MAAYMRVTHRDEKGKKVTXKMPVPETRRPDTAKHFERKLEEQGLHRFERHPANAPRGVGIGAPPPKSGRGGXYTWEGPGGLVEDQLDPAPPAIDXNDPNYEEAEXGGAADEDDEAAREVVVGEVEV

SEQ ID NO: 35663 - DNA, 1100 bp, Zea mays subsp. mays
  misc_feature (1)..(1100): Ceres Seq. ID no. 13494902
ccccaaacgcctccctattaatctccccgcgttccccttccctcgcgccgccgctctcccctcccaaagctcgccccgctcccagctagggtttcctcttcccatccacagccgccgagcgccgccgacgaggacagcgccgccacgatgttggagttgcgtctggtgcaggggagcctcctcaagaaggtcttggaggcgatccgcgagctggtcacggacgccaacttcgactgctccgggaccgggttctcgctgcaggccatggactcgagccacgtcgcgctcgtcgcgctgctccttcgcgccgagggcttcgagcactaccgctgcgaccgcaacctctccatgggcatgaacctcaacaacatggccaagatgctccgctgcgccggcaacgaggacatcatcaccatcaaggccgacgacggctccgacaccgtcactttcatgttcgagtcgcccaagcaagataagatcgcggatttcgagatgaaactgatggacattgatagcgagcacctcggaatcccggattccgagtaccaggccatcgtccgcatgccttctgctgagtttatgaggatctgcaaagatcttagcagcatcggagacacagtcgtcatctcggtgactaaggagggcgtgaagttctccacatctggagaaattgggagtgcaaacattgtctgcaggcagaaccaaactattgacaagccagaagaggctaccattatagagatgcaggagccggtttccctgacctttgccctgcggtacatgaactcctttaccaaggcgtcttcactgtctgagcaagtcactatcagcctgtcgtccgagcttccagtggtggtcgagtacaagatcgctgagatgggttacattagattttacctggcccccaagatcgacgatgacgaggagatgaagccctgatggcctgtgacgacataatgctcgtgttgcctgctcttccttccagccgttgtttgcttagctactctttgcaagcgaagggatgtgatgtgtatctcttaggctagactgcttcacgtagttttctgtgactgcttcatgaatccatggattactgattt

SEQ ID NO: 35664 - protein, 263 aa, Zea mays subsp. mays
  peptide (1)..(263): Ceres Seq. ID no. 13494903
  misc_feature (1)..(125): Pfam Name: Pfam Description:  Proliferating cell nuclear antigen
  misc_feature (1)..(263): NCBI GI NO: 4099508 NR Description: proliferating cell nuclear antigen [Zea mays]
  misc_feature (1)..(263): NCBI GI NO: 2499442 NR Description: PROLIFERATING CELL NUCLEAR ANTIGEN (PCNA)
  misc_feature (1)..(262): NCBI GI NO: 129697 NR Description: PROLIFERATING CELL NUCLEAR ANTIGEN (PCNA) (CYCLIN)
  misc_feature (1)..(263): NCBI GI NO: 10946427 NR Description: proliferating cell nuclear antigen
  misc_feature (1)..(263): NCBI GI NO: 25005275 NR Description: proliferating cell nuclear antigen
  misc_feature (1)..(263): NCBI GI NO: 3608175 NR Description: proliferating cell nuclear antigen [Pisum sativum]
  misc_feature (1)..(263): NCBI GI NO: 6225836 NR Description: Proliferating cell nuclear antigen (PCNA)
  misc_feature (1)..(263): NCBI GI NO: 129692 NR Description: PROLIFERATING CELL NUCLEAR ANTIGEN (PCNA) (CYCLIN)
  misc_feature (1)..(263): NCBI GI NO: 3947727 NR Description: proliferating cell nuclear antigen
  misc_feature (1)..(260): NCBI GI NO: 129691 NR Description: PROLIFERATING CELL NUCLEAR ANTIGEN (PCNA) (CYCLIN)
MLELRLVQGSLLKKVLEAIRELVTDANFDCSGTGFSLQAMDSSHVALVALLLRAEGFEHYRCDRNLSMGMNLNNMAKMLRCAGNEDIITIKADDGSDTVTFMFESPKQDKIADFEMKLMDIDSEHLGIPDSEYQAIVRMPSAEFMRICKDLSSIGDTVVISVTKEGVKFSTSGEIGSANIVCRQNQTIDKPEEATIIEMQEPVSLTFALRYMNSFTKASSLSEQVTISLSSELPVVVEYKIAEMGYIRFYLAPKIDDDEEMKP

SEQ ID NO: 35665 - protein, 224 aa, Zea mays subsp. mays
  peptide (1)..(224): Ceres Seq. ID no. 13494904
  misc_feature (1)..(86): Pfam Name: Pfam Description:  Proliferating cell nuclear antigen
  misc_feature (1)..(224): NCBI GI NO: 4099508 NR Description: proliferating cell nuclear antigen [Zea mays]
  misc_feature (1)..(224): NCBI GI NO: 2499442 NR Description: PROLIFERATING CELL NUCLEAR ANTIGEN (PCNA)
  misc_feature (1)..(223): NCBI GI NO: 129697 NR Description: PROLIFERATING CELL NUCLEAR ANTIGEN (PCNA) (CYCLIN)
  misc_feature (1)..(224): NCBI GI NO: 10946427 NR Description: proliferating cell nuclear antigen
  misc_feature (1)..(224): NCBI GI NO: 25005275 NR Description: proliferating cell nuclear antigen
  misc_feature (1)..(224): NCBI GI NO: 3608175 NR Description: proliferating cell nuclear antigen [Pisum sativum]
  misc_feature (1)..(224): NCBI GI NO: 6225836 NR Description: Proliferating cell nuclear antigen (PCNA)
  misc_feature (1)..(224): NCBI GI NO: 129692 NR Description: PROLIFERATING CELL NUCLEAR ANTIGEN (PCNA) (CYCLIN)
  misc_feature (1)..(224): NCBI GI NO: 3947727 NR Description: proliferating cell nuclear antigen
  misc_feature (1)..(221): NCBI GI NO: 129691 NR Description: PROLIFERATING CELL NUCLEAR ANTIGEN (PCNA) (CYCLIN)
MDSSHVALVALLLRAEGFEHYRCDRNLSMGMNLNNMAKMLRCAGNEDIITIKADDGSDTVTFMFESPKQDKIADFEMKLMDIDSEHLGIPDSEYQAIVRMPSAEFMRICKDLSSIGDTVVISVTKEGVKFSTSGEIGSANIVCRQNQTIDKPEEATIIEMQEPVSLTFALRYMNSFTKASSLSEQVTISLSSELPVVVEYKIAEMGYIRFYLAPKIDDDEEMKP

SEQ ID NO: 35666 - protein, 196 aa, Zea mays subsp. mays
  peptide (1)..(196): Ceres Seq. ID no. 13494905
  misc_feature (1)..(58): Pfam Name: Pfam Description:  Proliferating cell nuclear antigen
  misc_feature (1)..(196): NCBI GI NO: 4099508 NR Description: proliferating cell nuclear antigen [Zea mays]
  misc_feature (1)..(196): NCBI GI NO: 2499442 NR Description: PROLIFERATING CELL NUCLEAR ANTIGEN (PCNA)
  misc_feature (1)..(195): NCBI GI NO: 129697 NR Description: PROLIFERATING CELL NUCLEAR ANTIGEN (PCNA) (CYCLIN)
  misc_feature (1)..(196): NCBI GI NO: 10946427 NR Description: proliferating cell nuclear antigen
  misc_feature (1)..(196): NCBI GI NO: 25005275 NR Description: proliferating cell nuclear antigen
  misc_feature (1)..(196): NCBI GI NO: 3608175 NR Description: proliferating cell nuclear antigen [Pisum sativum]
  misc_feature (1)..(196): NCBI GI NO: 6225836 NR Description: Proliferating cell nuclear antigen (PCNA)
  misc_feature (1)..(196): NCBI GI NO: 129692 NR Description: PROLIFERATING CELL NUCLEAR ANTIGEN (PCNA) (CYCLIN)
  misc_feature (1)..(196): NCBI GI NO: 3947727 NR Description: proliferating cell nuclear antigen
  misc_feature (1)..(193): NCBI GI NO: 129691 NR Description: PROLIFERATING CELL NUCLEAR ANTIGEN (PCNA) (CYCLIN)
MGMNLNNMAKMLRCAGNEDIITIKADDGSDTVTFMFESPKQDKIADFEMKLMDIDSEHLGIPDSEYQAIVRMPSAEFMRICKDLSSIGDTVVISVTKEGVKFSTSGEIGSANIVCRQNQTIDKPEEATIIEMQEPVSLTFALRYMNSFTKASSLSEQVTISLSSELPVVVEYKIAEMGYIRFYLAPKIDDDEEMKP

SEQ ID NO: 35667 - DNA, 478 bp, Zea mays subsp. mays
  misc_feature (1)..(478): Ceres Seq. ID no. 4615295
aacagccatcacacgcacgcatacacagcacagagtgaggtaagcatccgaaaaaagctgtgatctgatcgacatggccgccgccaccatggctctcacctcccgcgcgctcgtcggcaagccggcgaccagcaccagggacgtcttcggcgaggggcgcatcaccatgcgtaagactgctggcaagcccaagccagcggcgtccggcagcccctggtacggggccgaccgcgtcctgtacctgggcccgctgtccggccaccccccaagctacctgaccggcgagttccccggcgactacggctgggacaccgcggggctgtccgccgacccggagactttcgccaagaaccgcgagctggaggtgatccactgccgctgggccatgctgggcgcgctcgggtgcgtgttcccggagctgctcgcycgcaacggcgtcaagttcggcgaggccgtgtggttcaaggccgggtcccag

SEQ ID NO: 35668 - protein, 135 aa, Zea mays subsp. mays
  peptide (1)..(135): Ceres Seq. ID no. 4615296
  misc_feature (64)..(134): Pfam Name: Pfam Description:  Chlorophyll A-B binding protein
  misc_feature (1)..(134): NCBI GI NO: 543938 NR Description: Chlorophyll A-B binding protein 48
  misc_feature (1)..(134): NCBI GI NO: 34912356 NR Description: putative chlorophyll a/b-binding protein 2
  misc_feature (1)..(134): NCBI GI NO: 34910682 NR Description: chlorophyll a/b binding protein
  misc_feature (1)..(134): NCBI GI NO: 7443224 NR Description: chlorophyll a/b-binding protein precursor kcdl895 -rice
  misc_feature (1)..(134): NCBI GI NO: 115787 NR Description: Chlorophyll A-B binding protein 2
  misc_feature (1)..(134): NCBI GI NO: 115786 NR Description: Chlorophyll A-B binding protein
  misc_feature (1)..(134): NCBI GI NO: 320618 NR Description: chlorophyll a/b-binding protein I precursor - rice
  misc_feature (1)..(134): NCBI GI NO: 115772 NR Description: Chlorophyll A-B binding protein 1
  misc_feature (1)..(134): NCBI GI NO: 115815 NR Description: Chlorophyll A-B binding protein M9
  misc_feature (1)..(134): NCBI GI NO: 115771 NR Description: Chlorophyll A-B binding protein 1
  misc_feature (118)..(118): Xaa is any aa, unknown or other
MAAATMALTSRALVGKPATSTRDVFGEGRITMRKTAGKPKPAASGSPWYGADRVLYLGPLSGHPPSYLTGEFPGDYGWDTAGLSADPETFAKNRELEVIHCRWAMLGALGCVFPELLXRNGVKFGEAVWFKAGSQ

SEQ ID NO: 35669 - protein, 130 aa, Zea mays subsp. mays
  peptide (1)..(130): Ceres Seq. ID no. 4615297
  misc_feature (59)..(129): Pfam Name: Pfam Description:  Chlorophyll A-B binding protein
  misc_feature (1)..(129): NCBI GI NO: 543938 NR Description: Chlorophyll A-B binding protein 48
  misc_feature (1)..(129): NCBI GI NO: 34912356 NR Description: putative chlorophyll a/b-binding protein 2
  misc_feature (1)..(129): NCBI GI NO: 34910682 NR Description: chlorophyll a/b binding protein
  misc_feature (1)..(129): NCBI GI NO: 7443224 NR Description: chlorophyll a/b-binding protein precursor kcdl895 -rice
  misc_feature (1)..(129): NCBI GI NO: 115787 NR Description: Chlorophyll A-B binding protein 2
  misc_feature (1)..(129): NCBI GI NO: 115786 NR Description: Chlorophyll A-B binding protein
  misc_feature (1)..(129): NCBI GI NO: 320618 NR Description: chlorophyll a/b-binding protein I precursor - rice
  misc_feature (1)..(129): NCBI GI NO: 115772 NR Description: Chlorophyll A-B binding protein 1
  misc_feature (1)..(129): NCBI GI NO: 115815 NR Description: Chlorophyll A-B binding protein M9
  misc_feature (1)..(129): NCBI GI NO: 115771 NR Description: Chlorophyll A-B binding protein 1
  misc_feature (113)..(113): Xaa is any aa, unknown or other
MALTSRALVGKPATSTRDVFGEGRITMRKTAGKPKPAASGSPWYGADRVLYLGPLSGHPPSYLTGEFPGDYGWDTAGLSADPETFAKNRELEVIHCRWAMLGALGCVFPELLXRNGVKFGEAVWFKAGSQ

SEQ ID NO: 35670 - protein, 104 aa, Zea mays subsp. mays
  peptide (1)..(104): Ceres Seq. ID no. 4615298
  misc_feature (33)..(103): Pfam Name: Pfam Description:  Chlorophyll A-B binding protein
  misc_feature (1)..(103): NCBI GI NO: 543938 NR Description: Chlorophyll A-B binding protein 48
  misc_feature (1)..(103): NCBI GI NO: 34912356 NR Description: putative chlorophyll a/b-binding protein 2
  misc_feature (1)..(103): NCBI GI NO: 34910682 NR Description: chlorophyll a/b binding protein
  misc_feature (1)..(103): NCBI GI NO: 7443224 NR Description: chlorophyll a/b-binding protein precursor kcdl895 -rice
  misc_feature (1)..(103): NCBI GI NO: 115787 NR Description: Chlorophyll A-B binding protein 2
  misc_feature (1)..(103): NCBI GI NO: 115786 NR Description: Chlorophyll A-B binding protein
  misc_feature (1)..(103): NCBI GI NO: 320618 NR Description: chlorophyll a/b-binding protein I precursor - rice
  misc_feature (1)..(103): NCBI GI NO: 115772 NR Description: Chlorophyll A-B binding protein 1
  misc_feature (1)..(103): NCBI GI NO: 115815 NR Description: Chlorophyll A-B binding protein M9
  misc_feature (1)..(103): NCBI GI NO: 115771 NR Description: Chlorophyll A-B binding protein 1
  misc_feature (87)..(87): Xaa is any aa, unknown or other
MRKTAGKPKPAASGSPWYGADRVLYLGPLSGHPPSYLTGEFPGDYGWDTAGLSADPETFAKNRELEVIHCRWAMLGALGCVFPELLXRNGVKFGEAVWFKAGSQ

SEQ ID NO: 35671 - DNA, 1606 bp, Zea mays subsp. mays
  misc_feature (1)..(1606): Ceres Seq. ID no. 12450558
atcgctgcgtccaccttctgtagtccagttgtagccgcttgccgatggcgcggccggcggcgaaggcgcgggtgccgaagcacttggtggcgctcgccgtcgtcgccatcctcggcctcgtactcgtcgctgactacctctgggcttcgtcctccgcgtcgtcctcggccgtctggtcctccaggcttaatctccacaccggacccgccggttcgacgccgcccgtcgcgaagaagattaaggaggacaagaaatctgtaggttcgactggcataaatgcaacttttgcggacttgccagctccagaactgaaatgggaggagatggctgaagcacctgtggcccgtttggatggcgctgctatacagattaagaatctcttatatgtatttgctgggtatggcaccattaaccatgtgcattctcatgttgatatatacaatttctcggataatacatggggtggaagatttgacatgcccgaagacatggcacattcacatttggggatggttactgatggaagattcatctatgtggtaactggacagtatggtccacaatgtaggggaccaacaactcgaaattttgtattggacacagaaacaaaagaatggcgtggcatgccaccattgccagttcctagatatgctccagcaacacaactttggagaggcagacttcatgtgatgggtggcagcaaggaggataggcatgaacctgcgcttgaacactggagtctcgcggtaaaggatgggaaagcattggagaaagagtggaggagcgagaaaccaataccgcgtggaggtcctcatagggcttgtgtagttgcaaatgataaactccttgttattggtggtcaagaaggtgatttcatggccaagcctgggtctcctatatttaaatgtgttagaagaagtgaggttgtgtatagtaatgtttatatgcttgatgatggaacgacttggaaggaacttccacctatgccaaaaccagattcacatatagaatttgcttgggtgaatgtcaacaattctcttgttattgctggaggaacgacagataagcacccaataactaaaaagatggtgttggttggtgaagtatttcggttcaatctgggtacgctggaatggagtgtgattgggcggttacctttccgaatcaagaccacattggtaggatactgggatggctggctgtatttcacttctgggcaacgagacaaaggaccaaaagacccgtctcctaaaaaggttgttgggtgcatgtggagaactaaattgcacttgtgatttcctttaaaagaactaagccgttctttggttttatggtttacaaaactgtttcaatcccctcatgggcgagttctttcttggttatatatcgtaggtgaaatgggtggcgttggggactgtctgccattgccaccggtgtgttgtatgtttattcttttagttaggatcaccaacttttgcaccattttgtacagagagaatcgatctgtccaggtgctgtcgcaatcttgtaagttgtagcgtgtaccttttttttattgagctcttacactcatcttctaaaattaatcacaacttcaacttgagcc

SEQ ID NO: 35672 - protein, 416 aa, Zea mays subsp. mays
  peptide (1)..(416): Ceres Seq. ID no. 12450559
  misc_feature (254)..(315): Pfam Name: Pfam Description:  Kelch motif
  misc_feature (1)..(416): NCBI GI NO: 29150199 NR Description: hypothetical protein
  misc_feature (1)..(416): NCBI GI NO: 38344229 NR Description: OJ991113_30.6
  misc_feature (14)..(416): NCBI GI NO: 15217949 NR Description: unknown protein; protein id: At1g51540.1
  misc_feature (14)..(416): NCBI GI NO: 28416695 NR Description: At1g51540 [Arabidopsis thaliana]
  misc_feature (14)..(414): NCBI GI NO: 18405273 NR Description: expressed protein; protein id: At3g27220
  misc_feature (14)..(414): NCBI GI NO: 15912245 NR Description: AT3g27220/K17E12_4 [Arabidopsis thaliana]
  misc_feature (73)..(337): NCBI GI NO: 34932909 NR Description: similar to hypothetical protein MGC35097
MARPAAKARVPKHLVALAVVAILGLVLVADYLWASSSASSSAVWSSRLNLHTGPAGSTPPVAKKIKEDKKSVGSTGINATFADLPAPELKWEEMAEAPVARLDGAAIQIKNLLYVFAGYGTINHVHSHVDIYNFSDNTWGGRFDMPEDMAHSHLGMVTDGRFIYVVTGQYGPQCRGPTTRNFVLDTETKEWRGMPPLPVPRYAPATQLWRGRLHVMGGSKEDRHEPALEHWSLAVKDGKALEKEWRSEKPIPRGGPHRACVVANDKLLVIGGQEGDFMAKPGSPIFKCVRRSEVVYSNVYMLDDGTTWKELPPMPKPDSHIEFAWVNVNNSLVIAGGTTDKHPITKKMVLVGEVFRFNLGTLEWSVIGRLPFRIKTTLVGYWDGWLYFTSGQRDKGPKDPSPKKVVGCMWRTKLHL

SEQ ID NO: 35673 - protein, 323 aa, Zea mays subsp. mays
  peptide (1)..(323): Ceres Seq. ID no. 12450560
  misc_feature (161)..(222): Pfam Name: Pfam Description:  Kelch motif
  misc_feature (1)..(323): NCBI GI NO: 29150199 NR Description: hypothetical protein
  misc_feature (1)..(323): NCBI GI NO: 38344229 NR Description: OJ991113_30.6
  misc_feature (1)..(323): NCBI GI NO: 15217949 NR Description: unknown protein; protein id: At1g51540.1
  misc_feature (1)..(323): NCBI GI NO: 28416695 NR Description: At1g51540 [Arabidopsis thaliana]
  misc_feature (1)..(321): NCBI GI NO: 18405273 NR Description: expressed protein; protein id: At3g27220
  misc_feature (1)..(321): NCBI GI NO: 15912245 NR Description: AT3g27220/K17E12_4 [Arabidopsis thaliana]
  misc_feature (1)..(244): NCBI GI NO: 34932909 NR Description: similar to hypothetical protein MGC35097
MAEAPVARLDGAAIQIKNLLYVFAGYGTINHVHSHVDIYNFSDNTWGGRFDMPEDMAHSHLGMVTDGRFIYVVTGQYGPQCRGPTTRNFVLDTETKEWRGMPPLPVPRYAPATQLWRGRLHVMGGSKEDRHEPALEHWSLAVKDGKALEKEWRSEKPIPRGGPHRACVVANDKLLVIGGQEGDFMAKPGSPIFKCVRRSEVVYSNVYMLDDGTTWKELPPMPKPDSHIEFAWVNVNNSLVIAGGTTDKHPITKKMVLVGEVFRFNLGTLEWSVIGRLPFRIKTTLVGYWDGWLYFTSGQRDKGPKDPSPKKVVGCMWRTKLHL

SEQ ID NO: 35674 - protein, 272 aa, Zea mays subsp. mays
  peptide (1)..(272): Ceres Seq. ID no. 12450561
  misc_feature (110)..(171): Pfam Name: Pfam Description:  Kelch motif
  misc_feature (1)..(272): NCBI GI NO: 29150199 NR Description: hypothetical protein
  misc_feature (1)..(272): NCBI GI NO: 38344229 NR Description: OJ991113_30.6
  misc_feature (1)..(272): NCBI GI NO: 15217949 NR Description: unknown protein; protein id: At1g51540.1
  misc_feature (1)..(272): NCBI GI NO: 28416695 NR Description: At1g51540 [Arabidopsis thaliana]
  misc_feature (1)..(270): NCBI GI NO: 18405273 NR Description: expressed protein; protein id: At3g27220
  misc_feature (1)..(270): NCBI GI NO: 15912245 NR Description: AT3g27220/K17E12_4 [Arabidopsis thaliana]
  misc_feature (1)..(193): NCBI GI NO: 34932909 NR Description: similar to hypothetical protein MGC35097
MPEDMAHSHLGMVTDGRFIYVVTGQYGPQCRGPTTRNFVLDTETKEWRGMPPLPVPRYAPATQLWRGRLHVMGGSKEDRHEPALEHWSLAVKDGKALEKEWRSEKPIPRGGPHRACVVANDKLLVIGGQEGDFMAKPGSPIFKCVRRSEVVYSNVYMLDDGTTWKELPPMPKPDSHIEFAWVNVNNSLVIAGGTTDKHPITKKMVLVGEVFRFNLGTLEWSVIGRLPFRIKTTLVGYWDGWLYFTSGQRDKGPKDPSPKKVVGCMWRTKLHL

SEQ ID NO: 35675 - DNA, 815 bp, Zea mays subsp. mays
  misc_feature (1)..(815): Ceres Seq. ID no. 12435907
  misc_feature (645)..(645): n is a, c, t, g, unknown, or other
  misc_feature (451)..(451): n is a, c, t, g, unknown, or other
  misc_feature (792)..(792): n is a, c, t, g, unknown, or other
acttttctttttaacgactgagagcctcgaatcctcctattattatgcaatagagtttttctgactgctccacgcgctgttccccttggaaatttcgaccgctttctcgatcgccacctacacgtctgtggttgcagtgaaaactagaagggaagaacagcctcctaatggataggaacaacgaactggaagaggtggtcccaaatgactcggaccctcttattgggagggataacagggagtcagagtcatcagtagagatgtcaccgccacagccagcaactgtgaacctgctggagattgaggatgaagagaccgacggctcttctgctgcgtgttgccgcatttgccttgaggctgagtctgagataggtgatgagctaatatcaccttgcatgtgcaagggaactcagcagtttgttcaccgttcttgtcttgaccactggcgatntgttaaggaaggatttgcattttcacactgcacaacttgcaaagctcagtttcatcttcgagtggaaacctgggaggataactcatggcgtaaaatgaagttcaggatctttgttgcaagggatgttctactcgtatttcttgctgtacagcttactattgctatcatcggtgcgattgcatactttttagacngggatggaagtttccggaacagttttagcgatggttgggaccgcttcttgtcaaagcacccaatacccttctactattgcataggtgttgtgattttctttgtgctgcttggattcttcgggctgatagtacactgctcatccttcnacgacaaccaggatccatgcagc

SEQ ID NO: 35676 - protein, 216 aa, Zea mays subsp. mays
  peptide (1)..(216): Ceres Seq. ID no. 12435908
  misc_feature (58)..(108): Pfam Name: RING finger Pfam Description: Zinc finger, C3HC4 type
  misc_feature (1)..(215): NCBI GI NO: 40253895 NR Description: zinc finger (C3HC4-type RING finger) protein -like
  misc_feature (13)..(214): NCBI GI NO: 18391230 NR Description: expressed protein; protein id: At1g11020
  misc_feature (13)..(211): NCBI GI NO: 21593635 NR Description: unknown [Arabidopsis thaliana]
  misc_feature (13)..(151): NCBI GI NO: 25402638 NR Description: hypothetical protein
  misc_feature (187)..(214): NCBI GI NO: 25402638 NR Description: hypothetical protein
  misc_feature (34)..(145): NCBI GI NO: 34912564 NR Description: P0410E03.20
  misc_feature (34)..(205): NCBI GI NO: 28393273 NR Description: unknown protein [Arabidopsis thaliana]
  misc_feature (34)..(151): NCBI GI NO: 15227153 NR Description: hypothetical protein; protein id: At2g22120.1
  misc_feature (42)..(203): NCBI GI NO: 18403075 NR Description: expressed protein; protein id: At1g50440
  misc_feature (42)..(203): NCBI GI NO: 26450547 NR Description: unknown protein [Arabidopsis thaliana]
  misc_feature (95)..(95): Xaa is any aa, unknown or other
  misc_feature (160)..(160): Xaa is any aa, unknown or other
  misc_feature (209)..(209): Xaa is any aa, unknown or other
MDRNNELEEVVPNDSDPLIGRDNRESESSVEMSPPQPATVNLLEIEDEETDGSSAACCRICLEAESEIGDELISPCMCKGTQQFVHRSCLDHWRXVKEGFAFSHCTTCKAQFHLRVETWEDNSWRKMKFRIFVARDVLLVFLAVQLTIAIIGAIAYFLDXDGSFRNSFSDGWDRFLSKHPIPFYYCIGVVIFFVLLGFFGLIVHCSSFXDNQDPCS

SEQ ID NO: 35677 - protein, 185 aa, Zea mays subsp. mays
  peptide (1)..(185): Ceres Seq. ID no. 12435909
  misc_feature (27)..(77): Pfam Name: RING finger Pfam Description: Zinc finger, C3HC4 type
  misc_feature (1)..(184): NCBI GI NO: 40253895 NR Description: zinc finger (C3HC4-type RING finger) protein -like
  misc_feature (1)..(183): NCBI GI NO: 18391230 NR Description: expressed protein; protein id: At1g11020
  misc_feature (1)..(180): NCBI GI NO: 21593635 NR Description: unknown [Arabidopsis thaliana]
  misc_feature (1)..(120): NCBI GI NO: 25402638 NR Description: hypothetical protein
  misc_feature (156)..(183): NCBI GI NO: 25402638 NR Description: hypothetical protein
  misc_feature (3)..(114): NCBI GI NO: 34912564 NR Description: P0410E03.20
  misc_feature (3)..(174): NCBI GI NO: 28393273 NR Description: unknown protein [Arabidopsis thaliana]
  misc_feature (3)..(120): NCBI GI NO: 15227153 NR Description: hypothetical protein; protein id: At2g22120.1
  misc_feature (11)..(172): NCBI GI NO: 18403075 NR Description: expressed protein; protein id: At1g50440
  misc_feature (11)..(172): NCBI GI NO: 26450547 NR Description: unknown protein [Arabidopsis thaliana]
  misc_feature (64)..(64): Xaa is any aa, unknown or other
  misc_feature (129)..(129): Xaa is any aa, unknown or other
  misc_feature (178)..(178): Xaa is any aa, unknown or other
MSPPQPATVNLLEIEDEETDGSSAACCRICLEAESEIGDELISPCMCKGTQQFVHRSCLDHWRXVKEGFAFSHCTTCKAQFHLRVETWEDNSWRKMKFRIFVARDVLLVFLAVQLTIAIIGAIAYFLDXDGSFRNSFSDGWDRFLSKHPIPFYYCIGVVIFFVLLGFFGLIVHCSSFXDNQDPCS

SEQ ID NO: 35678 - protein, 140 aa, Zea mays subsp. mays
  peptide (1)..(140): Ceres Seq. ID no. 12435910
  misc_feature (1)..(139): NCBI GI NO: 40253895 NR Description: zinc finger (C3HC4-type RING finger) protein -like
  misc_feature (1)..(138): NCBI GI NO: 18391230 NR Description: expressed protein; protein id: At1g11020
  misc_feature (1)..(135): NCBI GI NO: 21593635 NR Description: unknown [Arabidopsis thaliana]
  misc_feature (1)..(75): NCBI GI NO: 25402638 NR Description: hypothetical protein
  misc_feature (111)..(138): NCBI GI NO: 25402638 NR Description: hypothetical protein
  misc_feature (1)..(69): NCBI GI NO: 34912564 NR Description: P0410E03.20
  misc_feature (1)..(129): NCBI GI NO: 28393273 NR Description: unknown protein [Arabidopsis thaliana]
  misc_feature (1)..(75): NCBI GI NO: 15227153 NR Description: hypothetical protein; protein id: At2g22120.1
  misc_feature (1)..(127): NCBI GI NO: 18403075 NR Description: expressed protein; protein id: At1g50440
  misc_feature (1)..(127): NCBI GI NO: 26450547 NR Description: unknown protein [Arabidopsis thaliana]
  misc_feature (19)..(19): Xaa is any aa, unknown or other
  misc_feature (84)..(84): Xaa is any aa, unknown or other
  misc_feature (133)..(133): Xaa is any aa, unknown or other
MCKGTQQFVHRSCLDHWRXVKEGFAFSHCTTCKAQFHLRVETWEDNSWRKMKFRIFVARDVLLVFLAVQLTIAIIGAIAYFLDXDGSFRNSFSDGWDRFLSKHPIPFYYCIGVVIFFVLLGFFGLIVHCSSFXDNQDPCS

SEQ ID NO: 35679 - DNA, 1521 bp, Zea mays subsp. mays; identical to SEQ ID NO: 25852
  misc_feature (1)..(1521): Ceres Seq. ID no. 13495297

SEQ ID NO: 35680 - protein, 374 aa, Zea mays subsp. mays; identical to SEQ ID NO: 25853
  peptide (1)..(374): Ceres Seq. ID no. 13495298
  misc_feature (41)..(360): Pfam Name: URO-D Pfam Description: Uroporphyrinogen decarboxylase
  misc_feature (5)..(360): NCBI GI NO: 34912796 NR Description: putative uroporphyrinogen decarboxylase
  misc_feature (39)..(360): NCBI GI NO: 16323119 NR Description: AT3g14930/K15M2_7 [Arabidopsis thaliana]
  misc_feature (39)..(360): NCBI GI NO: 18400577 NR Description: uroporphyrinogen decarboxylase (UPD), putative
  misc_feature (63)..(360): NCBI GI NO: 8777476 NR Description: uroporphyrinogen decarboxylase
  misc_feature (41)..(360): NCBI GI NO: 23041382 NR Description: hypothetical protein
  misc_feature (39)..(360): NCBI GI NO: 14334768 NR Description: putative uroporphyrinogen decarboxylase
  misc_feature (39)..(360): NCBI GI NO: 15226690 NR Description: uroporphyrinogen decarboxylase (UPD), putative
  misc_feature (16)..(360): NCBI GI NO: 2501647 NR Description: Uroporphyrinogen decarboxylase
  misc_feature (36)..(360): NCBI GI NO: 16975230 NR Description: Chain A
  misc_feature (44)..(360): NCBI GI NO: 33240529 NR Description: Uroporphyrinogen decarboxylase

SEQ ID NO: 35681 - protein, 373 aa, Zea mays subsp. mays; identical to SEQ ID NO: 25854
  peptide (1)..(373): Ceres Seq. ID no. 13495299
  misc_feature (40)..(359): Pfam Name: URO-D Pfam Description: Uroporphyrinogen decarboxylase
  misc_feature (4)..(359): NCBI GI NO: 34912796 NR Description: putative uroporphyrinogen decarboxylase
  misc_feature (38)..(359): NCBI GI NO: 16323119 NR Description: AT3g14930/K15M2_7 [Arabidopsis thaliana]
  misc_feature (38)..(359): NCBI GI NO: 18400577 NR Description: uroporphyrinogen decarboxylase (UPD), putative
  misc_feature (62)..(359): NCBI GI NO: 8777476 NR Description: uroporphyrinogen decarboxylase
  misc_feature (40)..(359): NCBI GI NO: 23041382 NR Description: hypothetical protein
  misc_feature (38)..(359): NCBI GI NO: 14334768 NR Description: putative uroporphyrinogen decarboxylase
  misc_feature (38)..(359): NCBI GI NO: 15226690 NR Description: uroporphyrinogen decarboxylase (UPD), putative
  misc_feature (15)..(359): NCBI GI NO: 2501647 NR Description: Uroporphyrinogen decarboxylase
  misc_feature (35)..(359): NCBI GI NO: 16975230 NR Description: Chain A
  misc_feature (43)..(359): NCBI GI NO: 33240529 NR Description: Uroporphyrinogen decarboxylase

SEQ ID NO: 35682 - protein, 312 aa, Zea mays subsp. mays; identical to SEQ ID NO: 25855
  peptide (1)..(312): Ceres Seq. ID no. 13495300
  misc_feature (1)..(298): Pfam Name: URO-D Pfam Description: Uroporphyrinogen decarboxylase
  misc_feature (1)..(298): NCBI GI NO: 34912796 NR Description: putative uroporphyrinogen decarboxylase
  misc_feature (1)..(298): NCBI GI NO: 16323119 NR Description: AT3g14930/K15M2_7 [Arabidopsis thaliana]
  misc_feature (1)..(298): NCBI GI NO: 18400577 NR Description: uroporphyrinogen decarboxylase (UPD), putative
  misc_feature (1)..(298): NCBI GI NO: 8777476 NR Description: uroporphyrinogen decarboxylase
  misc_feature (1)..(298): NCBI GI NO: 23041382 NR Description: hypothetical protein
  misc_feature (1)..(298): NCBI GI NO: 14334768 NR Description: putative uroporphyrinogen decarboxylase
  misc_feature (1)..(298): NCBI GI NO: 15226690 NR Description: uroporphyrinogen decarboxylase (UPD), putative
  misc_feature (1)..(298): NCBI GI NO: 2501647 NR Description: Uroporphyrinogen decarboxylase
  misc_feature (1)..(298): NCBI GI NO: 16975230 NR Description: Chain A
  misc_feature (1)..(298): NCBI GI NO: 33240529 NR Description: Uroporphyrinogen decarboxylase

SEQ ID NO: 35683 - DNA, 1041 bp, Zea mays subsp. mays; identical to SEQ ID NO: 27313
  misc_feature (1)..(1041): Ceres Seq. ID no. 13498730

SEQ ID NO: 35684 - protein, 252 aa, Zea mays subsp. mays; identical to SEQ ID NO: 27314
  peptide (1)..(252): Ceres Seq. ID no. 13498731

SEQ ID NO: 35685 - protein, 220 aa, Zea mays subsp. mays; identical to SEQ ID NO: 27315
  peptide (1)..(220): Ceres Seq. ID no. 13498732
  misc_feature (41)..(105): Pfam Name: Pfam Description:  AP2 domain
  misc_feature (1)..(220): NCBI GI NO: 38605848 NR Description: OSJNBb0034G17.6
  misc_feature (1)..(220): NCBI GI NO: 14140163 NR Description: putative AP2 domain containing protein
  misc_feature (1)..(219): NCBI GI NO: 21908034 NR Description: DRE binding factor 2 [Zea mays]
  misc_feature (1)..(219): NCBI GI NO: 25990951 NR Description: DREB-like protein [Zea mays]
  misc_feature (1)..(220): NCBI GI NO: 14140155 NR Description: putative AP2 domain transcription factor
  misc_feature (1)..(219): NCBI GI NO: 37536842 NR Description: putative DNA binding protein
  misc_feature (14)..(220): NCBI GI NO: 38605845 NR Description: OSJNBb0034G17.3
  misc_feature (1)..(218): NCBI GI NO: 38605844 NR Description: OSJNBb0034G17.2
  misc_feature (2)..(188): NCBI GI NO: 15225381 NR Description: AP2 domain transcription factor TINY, putative
  misc_feature (15)..(165): NCBI GI NO: 15227471 NR Description: AP2 domain transcription factor, putative

SEQ ID NO: 35686 - protein, 172 aa, Zea mays subsp. mays; identical to SEQ ID NO: 27316
  peptide (1)..(172): Ceres Seq. ID no. 13498733
  misc_feature (1)..(57): Pfam Name: Pfam Description:  AP2 domain
  misc_feature (1)..(172): NCBI GI NO: 38605848 NR Description: OSJNBb0034G17.6
  misc_feature (1)..(172): NCBI GI NO: 14140163 NR Description: putative AP2 domain containing protein
  misc_feature (1)..(171): NCBI GI NO: 21908034 NR Description: DRE binding factor 2 [Zea mays]
  misc_feature (1)..(171): NCBI GI NO: 25990951 NR Description: DREB-like protein [Zea mays]
  misc_feature (1)..(172): NCBI GI NO: 14140155 NR Description: putative AP2 domain transcription factor
  misc_feature (1)..(171): NCBI GI NO: 37536842 NR Description: putative DNA binding protein
  misc_feature (1)..(172): NCBI GI NO: 38605845 NR Description: OSJNBb0034G17.3
  misc_feature (1)..(170): NCBI GI NO: 38605844 NR Description: OSJNBb0034G17.2
  misc_feature (1)..(140): NCBI GI NO: 15225381 NR Description: AP2 domain transcription factor TINY, putative
  misc_feature (1)..(117): NCBI GI NO: 15227471 NR Description: AP2 domain transcription factor, putative

SEQ ID NO: 35687 - DNA, 1144 bp, Zea mays subsp. mays
  misc_feature (1)..(1144): Ceres Seq. ID no. 13598993
gtagcgcaactccgcaagcaaatcctcctatctccaagcctccaatctgtgaacggtgaaccccaatcgaatgacgccgacggcgagcctcctcctcccggctcccccattcgtctctatctccgatgtgcgccgcctccagctccccccgcgcggcggccaccggcctcgcccctgctggaagggcttggagtgcggctccgtacagacgcggatggtctcttctttcgttgggagcagaacacgccgcagaaacgttatatgtgcttccctgttcggagttggagctcccgaagcactggtcattggagtagtcgccttgttggtgttcggccccaagggtctagcagaggtagccaggaatttggggaagactttgcgtgctttccaaccaaccattagagagatacaggatgtatcaagggagttcaggagcactcttgaacgagaaatcggaattgatgaggtttcccagtcgacgaattatacacccacgaccatgaataacaaccaacaacctgctgccgactcaaatatcaagcctgcacctgcaccttacaccagcgatgaacttgtgaaagtaactgaagaacaaattgctgcatcagctgctgcagcttggaacccgcaacaacctgcatcgtcgcaacagcaagaagtgtacactactccgagtgaggacgctcctacatcaggaggaagcgatggtcctgctgctccagctcttgctgcgagtgactcggatccaaagcaagtgaatctggacaaggcggaaacacagagatgactccgcttaacagcttgacactggatgggatgagcagcactgaacacgtcaggacgagcagtcttattttaattttgtaggcgatggacttcagattaaagccagttatttggactgctgcagctataatctatagagacataacactgtaaaaatagtagaatccgttttagattaaagccaaacgagatgagagcgttttctgtgtttactaggcttgttctgtagcagcatgcatgggcaggttcatacaaaaaggctatgtgtatgcgtaacataaccacgagtttatatggattaaatatatttagccacgttgaaaaaccggttcagttaataaaataatgtcagttggtt

SEQ ID NO: 35688 - protein, 238 aa, Zea mays subsp. mays
  peptide (1)..(238): Ceres Seq. ID no. 13598994
  misc_feature (71)..(153): Pfam Name: Pfam Description:  mttA/Hcf106 family
  misc_feature (1)..(238): NCBI GI NO: 7542514 NR Description: HCF106C precursor protein [Zea mays]
  misc_feature (1)..(238): NCBI GI NO: 7489747 NR Description: HCF106 protein precursor, chloroplast - maize
  misc_feature (4)..(197): NCBI GI NO: 15277532 NR Description: HCF106 [Pisum sativum]
  misc_feature (2)..(228): NCBI GI NO: 15237156 NR Description: HCF106 (gb|AAD32652.1) [Arabidopsis thaliana]
  misc_feature (67)..(127): NCBI GI NO: 22298928 NR Description: ORF_ID:tsl1385~hypothetical protein
  misc_feature (68)..(162): NCBI GI NO: 37522572 NR Description: hypothetical protein gsr3003
  misc_feature (67)..(149): NCBI GI NO: 16329622 NR Description: hypothetical protein [Synechocystis sp. PCC 6803]
  misc_feature (67)..(159): NCBI GI NO: 33864103 NR Description: mttA/Hcf106 family
  misc_feature (68)..(217): NCBI GI NO: 22960273 NR Description: hypothetical protein [Rhodobacter sphaeroides]
  misc_feature (65)..(155): NCBI GI NO: 4877984 NR Description: THA4 [Zea mays]
MTPTASLLLPAPPFVSISDVRRLQLPPRGGHRPRPCWKGLECGSVQTRMVSSFVGSRTRRRNVICASLFGVGAPEALVIGVVALLVFGPKGLAEVARNLGKTLRAFQPTIREIQDVSREFRSTLEREIGIDEVSQSTNYTPTTMNNNQQPAADSNIKPAPAPYTSDELVKVTEEQIAASAAAAWNPQQPASSQQQEVYTTPSEDAPTSGGSDGPAAPALAASDSDPKQVNLDKAETQR

SEQ ID NO: 35689 - protein, 190 aa, Zea mays subsp. mays
  peptide (1)..(190): Ceres Seq. ID no. 13598995
  misc_feature (23)..(105): Pfam Name: Pfam Description:  mttA/Hcf106 family
  misc_feature (1)..(190): NCBI GI NO: 7542514 NR Description: HCF106C precursor protein [Zea mays]
  misc_feature (1)..(190): NCBI GI NO: 7489747 NR Description: HCF106 protein precursor, chloroplast - maize
  misc_feature (1)..(149): NCBI GI NO: 15277532 NR Description: HCF106 [Pisum sativum]
  misc_feature (1)..(180): NCBI GI NO: 15237156 NR Description: HCF106 (gb|AAD32652.1) [Arabidopsis thaliana]
  misc_feature (19)..(79): NCBI GI NO: 22298928 NR Description: ORF_ID:tsl1385~hypothetical protein
  misc_feature (20)..(114): NCBI GI NO: 37522572 NR Description: hypothetical protein gsr3003
  misc_feature (19)..(101): NCBI GI NO: 16329622 NR Description: hypothetical protein [Synechocystis sp. PCC 6803]
  misc_feature (19)..(111): NCBI GI NO: 33864103 NR Description: mttA/Hcf106 family
  misc_feature (20)..(169): NCBI GI NO: 22960273 NR Description: hypothetical protein [Rhodobacter sphaeroides]
  misc_feature (17)..(107): NCBI GI NO: 4877984 NR Description: THA4 [Zea mays]
MVSSFVGSRTRRRNVICASLFGVGAPEALVIGVVALLVFGPKGLAEVARNLGKTLRAFQPTIREIQDVSREFRSTLEREIGIDEVSQSTNYTPTTMNNNQQPAADSNIKPAPAPYTSDELVKVTEEQIAASAAAAWNPQQPASSQQQEVYTTPSEDAPTSGGSDGPAAPALAASDSDPKQVNLDKAETQR

SEQ ID NO: 35690 - protein, 133 aa, Zea mays subsp. mays
  peptide (1)..(133): Ceres Seq. ID no. 13598996
VAQLRKQILLSPSLQSVNGEPQSNDADGEPPPPGSPIRLYLRCAPPPAPPARRPPASPLLEGLGVRLRTDADGLFFRWEQNTPQKRYMCFPVRSWSSRSTGHWSSRLVGVRPQGSSRGSQEFGEDFACFPTNH

SEQ ID NO: 35691 - DNA, 486 bp, Zea mays subsp. mays
  misc_feature (1)..(486): Ceres Seq. ID no. 4615923
actcgtcactcacgaacgcacgaattcaccaaccaaactccactgtctccaactctccatcgcgtctgctacgcctctcctgcaggacgaccaatggcttccaggaagttcttcgtgggtggcaactggaaatgcaacggtactggcgaggacgtgaagaagatcgtcaccgtgctcaaccaagccgaggtgccctctgaagacgtcgtcgaggtggtggtgagtccgccgttcgtttttctgcagcaggtcaaggggctgctgcggctggacttcgccgtcgcagcgcagaactgctgggtgcgcaagggcggcgccttcaccggcgagatcagtgctgagatgctggtaaacctgcaggttccctgggtcattttggggcattctgagcgcagagctctgttgggtgaatccagtgattttgttgctgataaagttgcatatgcactcactcaaggtctcaaggtaattgcttgcattggtgag

SEQ ID NO: 35692 - protein, 162 aa, Zea mays subsp. mays
  peptide (1)..(162): Ceres Seq. ID no. 4615924
  misc_feature (35)..(161): Pfam Name: Pfam Description:  Triosephosphate isomerase
  misc_feature (32)..(161): NCBI GI NO: 34908172 NR Description: putative triosephosphate isomerase
  misc_feature (35)..(161): NCBI GI NO: 136057 NR Description: TRIOSEPHOSPHATE ISOMERASE, CYTOSOLIC (TIM)
  misc_feature (34)..(161): NCBI GI NO: 11270444 NR Description: triose-phosphate isomerase (EC 5.3.1.1), cytosolic
  misc_feature (34)..(161): NCBI GI NO: 15233272 NR Description: cytosolic triosephosphatisomerase
  misc_feature (35)..(161): NCBI GI NO: 1351279 NR Description: Triosephosphate isomerase, cytosolic (TIM)
  misc_feature (35)..(161): NCBI GI NO: 38112662 NR Description: triose phosphate isomerase cytosolic isoform
  misc_feature (35)..(161): NCBI GI NO: 136063 NR Description: TRIOSEPHOSPHATE ISOMERASE, CYTOSOLIC (TIM)
  misc_feature (35)..(161): NCBI GI NO: 553107 NR Description: triosephosphate isomerase [Oryza sativa]
  misc_feature (35)..(161): NCBI GI NO: 34895792 NR Description: putative triose-phosphate isomerase
  misc_feature (35)..(161): NCBI GI NO: 11124572 NR Description: triosephosphat-isomerase [Triticum aestivum]
TRHSRTHEFTNQTPLSPTLHRVCYASPAGRPMASRKFFVGGNWKCNGTGEDVKKIVTVLNQAEVPSEDVVEVVVSPPFVFLQQVKGLLRLDFAVAAQNCWVRKGGAFTGEISAEMLVNLQVPWVILGHSERRALLGESSDFVADKVAYALTQGLKVIACIGE

SEQ ID NO: 35693 - protein, 131 aa, Zea mays subsp. mays
  peptide (1)..(131): Ceres Seq. ID no. 4615925
  misc_feature (4)..(130): Pfam Name: Pfam Description:  Triosephosphate isomerase
  misc_feature (1)..(130): NCBI GI NO: 34908172 NR Description: putative triosephosphate isomerase
  misc_feature (4)..(130): NCBI GI NO: 136057 NR Description: TRIOSEPHOSPHATE ISOMERASE, CYTOSOLIC (TIM)
  misc_feature (3)..(130): NCBI GI NO: 11270444 NR Description: triose-phosphate isomerase (EC 5.3.1.1), cytosolic
  misc_feature (3)..(130): NCBI GI NO: 15233272 NR Description: cytosolic triosephosphatisomerase
  misc_feature (4)..(130): NCBI GI NO: 1351279 NR Description: Triosephosphate isomerase, cytosolic (TIM)
  misc_feature (4)..(130): NCBI GI NO: 38112662 NR Description: triose phosphate isomerase cytosolic isoform
  misc_feature (4)..(130): NCBI GI NO: 136063 NR Description: TRIOSEPHOSPHATE ISOMERASE, CYTOSOLIC (TIM)
  misc_feature (4)..(130): NCBI GI NO: 553107 NR Description: triosephosphate isomerase [Oryza sativa]
  misc_feature (4)..(130): NCBI GI NO: 34895792 NR Description: putative triose-phosphate isomerase
  misc_feature (4)..(130): NCBI GI NO: 11124572 NR Description: triosephosphat-isomerase [Triticum aestivum]
MASRKFFVGGNWKCNGTGEDVKKIVTVLNQAEVPSEDVVEVVVSPPFVFLQQVKGLLRLDFAVAAQNCWVRKGGAFTGEISAEMLVNLQVPWVILGHSERRALLGESSDFVADKVAYALTQGLKVIACIGE

SEQ ID NO: 35694 - DNA, 713 bp, Zea mays subsp. mays
  misc_feature (1)..(713): Ceres Seq. ID no. 12483013
  misc_feature (298)..(298): n is a, c, t, g, unknown, or other
cactattggtgttgtctattattcccctattcaattcttttttcttaggaatacctatggtcagcatgctcctttatgtctggagccgagagaatccaaatgctcagataaatatatacggcctcgtccaattgaggtccttttatcttccatgggctatgctcttattggatgtgatatttgggtcatcattaatgcctggacttctgggtatcatggttggacatctctactacttctttgcagtgttgcaccctcttgccaccgggaagaactacctcaagactcctaaatgggnttacataagattgtttctcgattcagggataggcatgcaagcaaactcacccgtccgtccaccagccaatggcaacagcgggtctggtgtgtttagaggaagaagctataggctcaatcaatagattcacccacctcgtaatgtgatccatggtcggagtggcaatgtagaagcaaagaccagaacgcatagtagggtcaatcaaaattaagggttacccgtcagagattttcttaaaaaacctggacggacggaatggagaaccctttcatttgctcatttagttgctaacaatgttcatcgtccatgtttacacatgaatataattctgtaatgacaatttgtgtacacttatgctggacttattgtcgcctctttttagctaggataagaacaaaagatgatgagtttgccc

SEQ ID NO: 35695 - protein, 139 aa, Zea mays subsp. mays
  peptide (1)..(139): Ceres Seq. ID no. 12483014
  misc_feature (1)..(97): Pfam Name: Pfam Description:  Der1-like family
  misc_feature (1)..(139): NCBI GI NO: 9187743 NR Description: putative NADH oxidoreductase [Zea mays]
  misc_feature (1)..(98): NCBI GI NO: 22329014 NR Description: putative protein; protein id: At4g29330
  misc_feature (1)..(98): NCBI GI NO: 25407607 NR Description: hypothetical protein AT4g29330
  misc_feature (2)..(107): NCBI GI NO: 35505512 NR Description: FLJ43842 protein [Homo sapiens]
  misc_feature (2)..(106): NCBI GI NO: 13435738 NR Description: RIKEN cDNA 1810063P04 gene [Mus musculus]
  misc_feature (2)..(106): NCBI GI NO: 18859601 NR Description: RIKEN cDNA 1810063P04 [Mus musculus]
  misc_feature (2)..(96): NCBI GI NO: 15777933 NR Description: putative NADH oxidoreductase complex I subunithomolog
  misc_feature (1)..(104): NCBI GI NO: 7506746 NR Description: hypothetical protein R151
  misc_feature (1)..(104): NCBI GI NO: 25149181 NR Description: Putative NADH oxidoreductase complex I subunit(28
  misc_feature (2)..(98): NCBI GI NO: 34852394 NR Description: similar to carcinoma related gene
  misc_feature (99)..(99): Xaa is any aa, unknown or other
LLVLSIIPLFNSFFLGIPMVSMLLYVWSRENPNAQINIYGLVQLRSFYLPWAMLLLDVIFGSSLMPGLLGIMVGHLYYFFAVLHPLATGKNYLKTPKWXYIRLFLDSGIGMQANSPVRPPANGNSGSGVFRGRSYRLNQ

SEQ ID NO: 35696 - protein, 121 aa, Zea mays subsp. mays
  peptide (1)..(121): Ceres Seq. ID no. 12483015
  misc_feature (1)..(79): Pfam Name: Pfam Description:  Der1-like family
  misc_feature (1)..(121): NCBI GI NO: 9187743 NR Description: putative NADH oxidoreductase [Zea mays]
  misc_feature (1)..(80): NCBI GI NO: 22329014 NR Description: putative protein; protein id: At4g29330
  misc_feature (1)..(80): NCBI GI NO: 25407607 NR Description: hypothetical protein AT4g29330
  misc_feature (1)..(89): NCBI GI NO: 35505512 NR Description: FLJ43842 protein [Homo sapiens]
  misc_feature (1)..(88): NCBI GI NO: 13435738 NR Description: RIKEN cDNA 1810063P04 gene [Mus musculus]
  misc_feature (1)..(88): NCBI GI NO: 18859601 NR Description: RIKEN cDNA 1810063P04 [Mus musculus]
  misc_feature (1)..(78): NCBI GI NO: 15777933 NR Description: putative NADH oxidoreductase complex I subunithomolog
  misc_feature (1)..(86): NCBI GI NO: 7506746 NR Description: hypothetical protein R151
  misc_feature (1)..(86): NCBI GI NO: 25149181 NR Description: Putative NADH oxidoreductase complex I subunit(28
  misc_feature (1)..(80): NCBI GI NO: 34852394 NR Description: similar to carcinoma related gene
  misc_feature (81)..(81): Xaa is any aa, unknown or other
MVSMLLYVWSRENPNAQINIYGLVQLRSFYLPWAMLLLDVIFGSSLMPGLLGIMVGHLYYFFAVLHPLATGKNYLKTPKWXYIRLFLDSGIGMQANSPVRPPANGNSGSGVFRGRSYRLNQ

SEQ ID NO: 35697 - protein, 118 aa, Zea mays subsp. mays
  peptide (1)..(118): Ceres Seq. ID no. 12483016
  misc_feature (1)..(76): Pfam Name: Pfam Description:  Der1-like family
  misc_feature (1)..(118): NCBI GI NO: 9187743 NR Description: putative NADH oxidoreductase [Zea mays]
  misc_feature (1)..(77): NCBI GI NO: 22329014 NR Description: putative protein; protein id: At4g29330
  misc_feature (1)..(77): NCBI GI NO: 25407607 NR Description: hypothetical protein AT4g29330
  misc_feature (1)..(86): NCBI GI NO: 35505512 NR Description: FLJ43842 protein [Homo sapiens]
  misc_feature (1)..(85): NCBI GI NO: 13435738 NR Description: RIKEN cDNA 1810063P04 gene [Mus musculus]
  misc_feature (1)..(85): NCBI GI NO: 18859601 NR Description: RIKEN cDNA 1810063P04 [Mus musculus]
  misc_feature (1)..(75): NCBI GI NO: 15777933 NR Description: putative NADH oxidoreductase complex I subunithomolog
  misc_feature (1)..(83): NCBI GI NO: 7506746 NR Description: hypothetical protein R151
  misc_feature (1)..(83): NCBI GI NO: 25149181 NR Description: Putative NADH oxidoreductase complex I subunit(28
  misc_feature (1)..(77): NCBI GI NO: 34852394 NR Description: similar to carcinoma related gene
  misc_feature (78)..(78): Xaa is any aa, unknown or other
MLLYVWSRENPNAQINIYGLVQLRSFYLPWAMLLLDVIFGSSLMPGLLGIMVGHLYYFFAVLHPLATGKNYLKTPKWXYIRLFLDSGIGMQANSPVRPPANGNSGSGVFRGRSYRLNQ

SEQ ID NO: 35698 - DNA, 445 bp, Zea mays subsp. mays
  misc_feature (1)..(445): Ceres Seq. ID no. 3008311
ctgggccacaagcttcgtgcttataacttacaggatgatgggcgtgatactgtggaagctaatgaggaacttggtcttcctgtggactcacgggaatatgggattggcgcacagatattgcgggatctaggagtccgttcaatgaagctgatgactaataaccctgcgaaatatagtggtctcaagggctatggattgagcattgcgggcagggtgcccttgattacgccaattaccagtgagaaccgtaggtacctggagactaaaagaacaaagatgggacatgtatatgggttggccaatgcgcaggccaacctagcaaatggcagccagagcacagaagagaatcattaggcccccaagcatgtttccattattattccagcaatccagcttggtgacacaaaagagtgatatgattcttcgtttggggagttcctgaaat

SEQ ID NO: 35699 - protein, 117 aa, Zea mays subsp. mays
  peptide (1)..(117): Ceres Seq. ID no. 3008312
  misc_feature (1)..(99): NCBI GI NO: 1084339 NR Description: GTP cyclohydrolase II (EC 3
  misc_feature (1)..(99): NCBI GI NO: 27735197 NR Description: Riboflavin biosynthesis protein ribA
  misc_feature (1)..(99): NCBI GI NO: 30697989 NR Description: GTP cyclohydrolase II
  misc_feature (1)..(98): NCBI GI NO: 29367375 NR Description: GTP cyclohydrolase II/3
  misc_feature (1)..(107): NCBI GI NO: 18424277 NR Description: GTP cyclohydrolase II / 3
  misc_feature (1)..(117): NCBI GI NO: 7436011 NR Description: GTP cyclohydrolase II (EC 3
  misc_feature (1)..(102): NCBI GI NO: 15614119 NR Description: GTP cyclohydrolase II / 3
  misc_feature (3)..(106): NCBI GI NO: 21674409 NR Description: 3
  misc_feature (1)..(95): NCBI GI NO: 15608553 NR Description: ribA2 [Mycobacterium tuberculosis H37Rv]
  misc_feature (1)..(95): NCBI GI NO: 2183211 NR Description: RibA [Mycobacterium tuberculosis]
LGHKLRAYNLQDDGRDTVEANEELGLPVDSREYGIGAQILRDLGVRSMKLMTNNPAKYSGLKGYGLSIAGRVPLITPITSENRRYLETKRTKMGHVYGLANAQANLANGSQSTEENH

SEQ ID NO: 35700 - protein, 70 aa, Zea mays subsp. mays
  peptide (1)..(70): Ceres Seq. ID no. 3008313
  misc_feature (1)..(52): NCBI GI NO: 1084339 NR Description: GTP cyclohydrolase II (EC 3
  misc_feature (1)..(52): NCBI GI NO: 27735197 NR Description: Riboflavin biosynthesis protein ribA
  misc_feature (1)..(52): NCBI GI NO: 30697989 NR Description: GTP cyclohydrolase II
  misc_feature (1)..(51): NCBI GI NO: 29367375 NR Description: GTP cyclohydrolase II/3
  misc_feature (1)..(60): NCBI GI NO: 18424277 NR Description: GTP cyclohydrolase II / 3
  misc_feature (1)..(70): NCBI GI NO: 7436011 NR Description: GTP cyclohydrolase II (EC 3
  misc_feature (1)..(55): NCBI GI NO: 15614119 NR Description: GTP cyclohydrolase II / 3
  misc_feature (1)..(59): NCBI GI NO: 21674409 NR Description: 3
  misc_feature (1)..(48): NCBI GI NO: 15608553 NR Description: ribA2 [Mycobacterium tuberculosis H37Rv]
  misc_feature (1)..(48): NCBI GI NO: 2183211 NR Description: RibA [Mycobacterium tuberculosis]
MKLMTNNPAKYSGLKGYGLSIAGRVPLITPITSENRRYLETKRTKMGHVYGLANAQANLANGSQSTEENH

SEQ ID NO: 35701 - protein, 67 aa, Zea mays subsp. mays
  peptide (1)..(67): Ceres Seq. ID no. 3008314
  misc_feature (1)..(49): NCBI GI NO: 1084339 NR Description: GTP cyclohydrolase II (EC 3
  misc_feature (1)..(49): NCBI GI NO: 27735197 NR Description: Riboflavin biosynthesis protein ribA
  misc_feature (1)..(49): NCBI GI NO: 30697989 NR Description: GTP cyclohydrolase II
  misc_feature (1)..(48): NCBI GI NO: 29367375 NR Description: GTP cyclohydrolase II/3
  misc_feature (1)..(57): NCBI GI NO: 18424277 NR Description: GTP cyclohydrolase II / 3
  misc_feature (1)..(67): NCBI GI NO: 7436011 NR Description: GTP cyclohydrolase II (EC 3
  misc_feature (1)..(52): NCBI GI NO: 15614119 NR Description: GTP cyclohydrolase II / 3
  misc_feature (1)..(56): NCBI GI NO: 21674409 NR Description: 3
  misc_feature (1)..(45): NCBI GI NO: 15608553 NR Description: ribA2 [Mycobacterium tuberculosis H37Rv]
  misc_feature (1)..(45): NCBI GI NO: 2183211 NR Description: RibA [Mycobacterium tuberculosis]
MTNNPAKYSGLKGYGLSIAGRVPLITPITSENRRYLETKRTKMGHVYGLANAQANLANGSQSTEENH

SEQ ID NO: 35702 - DNA, 1441 bp, Zea mays subsp. mays
  misc_feature (1)..(1441): Ceres Seq. ID no. 13587836
accatccactgcgatacttcagacagctcttcttgcgttgcctactaagctctctctctctctctttctctcttgtgttcttgccttctgcctactacgagtgatggccagcctcactgacctcgtcaacctcgacctgagtgactgcacagacaggatcatcgccgagtacatctgggttggaggatccggcatagacctcaggagcaaagcaaggacggtgaaaggccccatcaccgatccgagccagctgccaaaatggaactacgacggctccagcaccgggcaggctcccggagaggacagcgaagtcatcctctaccctcaagtcattttcaaggacccgttcaggaagtgtaacaacatccttgtgatgtgtgactgctacacgccacaaggcgagccaatccccagtaacaagaggtacaaagctgccacggttttcagccaccccgatgttgcagctgaggtgccatggtacggtattgagcaggagtacactctccttcagaaggatgtgagctggccccttggctggcctgttggtggataccctggtccccagggaccatactactgtgctgccggtgccgataaggcctttgggcgcgacgtggttgacgcccactacaaagcctgcctctacgccggcatcaacatcagcggcatcaacggcgaagtcatgcctggacagtgggagttccaagtcgggccgtccgttgggatctctgccggcgacgagatatgggtcgcccgctacattctcgagaggatcactgagatggccggaatcgttctctccctcgacccgaagccgatcaagggtgactggaacggcgccggcgctcacaccaactacagcaccaagtcgatgagggaggccggtggctacgaggtgatcaaggaggcgatcgagaagctggggaagaggcacagggagcacatcgccgcgtacgacgggggcaacgagcgccgcctcacgggccgccacgagaccgccgacatcaacaccttcaaatggggcgtggcgaaccgcggcggctccatccgcgtcggccgcgacaccgagaaggagggcaagggatatttcgaggaccgcaggccggcttccaacatggacccctacgtcgtcaccggcatgatcgccgacaccaccatcctgtggaagggaaactgataaaaccactgttcttctcctgcacgcatgcatccgccccgtgctgtcactttttgttttttcaaatttcgattcccgtcctaaagtttgttaccacttattattacggtctccagtgtactgctcggaaagtccgaataaaaacggctctaatgattttgttttttttaaaaaaaaatttgccttcgccataggtgtacgattggctgcgcttcccgtttattgggtactagtacaattgatatgaatcaattgccattaacg

SEQ ID NO: 35703 - protein, 391 aa, Zea mays subsp. mays
  peptide (1)..(391): Ceres Seq. ID no. 13587837
  misc_feature (137)..(389): Pfam Name: Pfam Description:  Glutamine synthetase, catalytic domain
  misc_feature (35)..(391): NCBI GI NO: 699621 NR Description: glutamine synthetase [Zea mays]
  misc_feature (35)..(391): NCBI GI NO: 1169926 NR Description: GLUTAMINE SYNTHETASE ROOT ISOZYME 5
  misc_feature (35)..(391): NCBI GI NO: 699623 NR Description: glutamine synthetase [Zea mays]
  misc_feature (35)..(391): NCBI GI NO: 585201 NR Description: GLUTAMINE SYNTHETASE ROOT ISOZYME 1
  misc_feature (35)..(391): NCBI GI NO: 121332 NR Description: GLUTAMINE SYNTHETASE ROOT ISOZYME
  misc_feature (35)..(389): NCBI GI NO: 121368 NR Description: Glutamine synthetase, cytosolic isozyme
  misc_feature (35)..(389): NCBI GI NO: 1835156 NR Description: glutamine synthetase [Medicago truncatula]
  misc_feature (35)..(389): NCBI GI NO: 13924490 NR Description: cytosolic glutamine synthetase
  misc_feature (35)..(389): NCBI GI NO: 417060 NR Description: Glutamine synthetase nodule isozyme
  misc_feature (35)..(389): NCBI GI NO: 10946357 NR Description: cytosolic glutamine synthetase GSbeta1
PSTAILQTALLALPTKLSLSLFLSCVLAFCLLRVMASLTDLVNLDLSDCTDRIIAEYIWVGGSGIDLRSKARTVKGPITDPSQLPKWNYDGSSTGQAPGEDSEVILYPQVIFKDPFRKCNNILVMCDCYTPQGEPIPSNKRYKAATVFSHPDVAAEVPWYGIEQEYTLLQKDVSWPLGWPVGGYPGPQGPYYCAAGADKAFGRDVVDAHYKACLYAGINISGINGEVMPGQWEFQVGPSVGISAGDEIWVARYILERITEMAGIVLSLDPKPIKGDWNGAGAHTNYSTKSMREAGGYEVIKEAIEKLGKRHREHIAAYDGGNERRLTGRHETADINTFKWGVANRGGSIRVGRDTEKEGKGYFEDRRPASNMDPYVVTGMIADTTILWKGN

SEQ ID NO: 35704 - protein, 357 aa, Zea mays subsp. mays
  peptide (1)..(357): Ceres Seq. ID no. 13587838
  misc_feature (103)..(355): Pfam Name: Pfam Description:  Glutamine synthetase, catalytic domain
  misc_feature (1)..(357): NCBI GI NO: 699621 NR Description: glutamine synthetase [Zea mays]
  misc_feature (1)..(357): NCBI GI NO: 1169926 NR Description: GLUTAMINE SYNTHETASE ROOT ISOZYME 5
  misc_feature (1)..(357): NCBI GI NO: 699623 NR Description: glutamine synthetase [Zea mays]
  misc_feature (1)..(357): NCBI GI NO: 585201 NR Description: GLUTAMINE SYNTHETASE ROOT ISOZYME 1
  misc_feature (1)..(357): NCBI GI NO: 121332 NR Description: GLUTAMINE SYNTHETASE ROOT ISOZYME
  misc_feature (1)..(355): NCBI GI NO: 121368 NR Description: Glutamine synthetase, cytosolic isozyme
  misc_feature (1)..(355): NCBI GI NO: 1835156 NR Description: glutamine synthetase [Medicago truncatula]
  misc_feature (1)..(355): NCBI GI NO: 13924490 NR Description: cytosolic glutamine synthetase
  misc_feature (1)..(355): NCBI GI NO: 417060 NR Description: Glutamine synthetase nodule isozyme
  misc_feature (1)..(355): NCBI GI NO: 10946357 NR Description: cytosolic glutamine synthetase GSbeta1
MASLTDLVNLDLSDCTDRIIAEYIWVGGSGIDLRSKARTVKGPITDPSQLPKWNYDGSSTGQAPGEDSEVILYPQVIFKDPFRKCNNILVMCDCYTPQGEPIPSNKRYKAATVFSHPDVAAEVPWYGIEQEYTLLQKDVSWPLGWPVGGYPGPQGPYYCAAGADKAFGRDVVDAHYKACLYAGINISGINGEVMPGQWEFQVGPSVGISAGDEIWVARYILERITEMAGIVLSLDPKPIKGDWNGAGAHTNYSTKSMREAGGYEVIKEAIEKLGKRHREHIAAYDGGNERRLTGRHETADINTFKWGVANRGGSIRVGRDTEKEGKGYFEDRRPASNMDPYVVTGMIADTTILWKGN

SEQ ID NO: 35705 - protein, 267 aa, Zea mays subsp. mays
  peptide (1)..(267): Ceres Seq. ID no. 13587839
  misc_feature (13)..(265): Pfam Name: Pfam Description:  Glutamine synthetase, catalytic domain
  misc_feature (1)..(267): NCBI GI NO: 699621 NR Description: glutamine synthetase [Zea mays]
  misc_feature (1)..(267): NCBI GI NO: 1169926 NR Description: GLUTAMINE SYNTHETASE ROOT ISOZYME 5
  misc_feature (1)..(267): NCBI GI NO: 699623 NR Description: glutamine synthetase [Zea mays]
  misc_feature (1)..(267): NCBI GI NO: 585201 NR Description: GLUTAMINE SYNTHETASE ROOT ISOZYME 1
  misc_feature (1)..(267): NCBI GI NO: 121332 NR Description: GLUTAMINE SYNTHETASE ROOT ISOZYME
  misc_feature (1)..(265): NCBI GI NO: 121368 NR Description: Glutamine synthetase, cytosolic isozyme
  misc_feature (1)..(265): NCBI GI NO: 1835156 NR Description: glutamine synthetase [Medicago truncatula]
  misc_feature (1)..(265): NCBI GI NO: 13924490 NR Description: cytosolic glutamine synthetase
  misc_feature (1)..(265): NCBI GI NO: 417060 NR Description: Glutamine synthetase nodule isozyme
  misc_feature (1)..(265): NCBI GI NO: 10946357 NR Description: cytosolic glutamine synthetase GSbeta1
MCDCYTPQGEPIPSNKRYKAATVFSHPDVAAEVPWYGIEQEYTLLQKDVSWPLGWPVGGYPGPQGPYYCAAGADKAFGRDVVDAHYKACLYAGINISGINGEVMPGQWEFQVGPSVGISAGDEIWVARYILERITEMAGIVLSLDPKPIKGDWNGAGAHTNYSTKSMREAGGYEVIKEAIEKLGKRHREHIAAYDGGNERRLTGRHETADINTFKWGVANRGGSIRVGRDTEKEGKGYFEDRRPASNMDPYVVTGMIADTTILWKGN

SEQ ID NO: 35706 - DNA, 2424 bp, Zea mays subsp. mays
  misc_feature (1)..(2424): Ceres Seq. ID no. 12465500
caccaaaatgtaagaacacacgcccggcgctgtggacgcctacgctactagtcagtactcggtagtcacccccaaagctccgcctccgcacctcttcccactcgcccggccgcggctatggcggccaccacgtccacgacgccggccgtctccttctccctcccctcgcccccgcaccgccaaggggccccgcgccgccgcgcgcctttcctcctccgtgccgcctccaccgcggcgcccccctcccccgacctctccatccagctctcgccccgcgcgtccccgcccgcgtcgacaaacggcgccgccaccgcgcttggacgccccgtggccgcctccttcgcccgtgaccgcgccgaagacctgcaggccgaggcccgcgccatggcccgcgccgccggcgccacagtctacagccccgagctcctcgcctcccgttacggttcccgccccttcaaggtggcgctccgggcagcggaggtgctgtccaagctgacgtcgttcggggtgaaggtcctgctggacgagcggagaggggagtcgtcctcggagaggagacgcgccagagcggtggagttgcgcagcatcctcaccagactgggcccaaccttcgtcaaaattgggcagggtctgtccacacgccccgacctctgcccggtcgagtacctcgaggagctcgccgagctgcaggattcacttcccacatttccggatgaggatgcatttgcatgtattgagagagagcttggcttcacgcttgattcaatctactcgtcaatttcaccttcccccattgcagccgctagtttaggtcaagtttataaagcacagttgaaatactctgggaagctggtagctgtgaaggtgcagagacctggtatcgaggatgctattgggcttgatttttatctacttagaggactcgggtttcttataaataagtatgttgacattgtaaccagcgatgttgttgcccttatggatgaatttgcacggagagttttccaagagcttaattatgttcaggaaggccaaaatgcaagaaggtttaaaaaactatatgccgataagcaagatatcttagtgcctgatatattttgggattacacaagtgctaaggttctaacaatggagtggattgagggtgtaaaattaaaccaacaagcagctattgaaagtcaaggattgaaggttctggatttggtcaacattggtatccagtgtagcttgaggcagcttctggagtatggttactttcatgctgaccctcatcctggtaatatattggcaacacctgaggggaagctggcttttcttgattttggcatgatgagtgaaacaccagaggatgcgagggtagccattataggacatgttgtccacttagtcaacagggactatgaagcaatggctcgtgattattatgcactagatttcttgggaccggatgtagatgtttccccgattgtgcctgctctcaagaatttctttgatgatgcactaaatgcaacagtgagtgagctgaacttcaagacaatagttgatggcctaggtgctgttctctatcagtacccgttcaatgtaccggcatactatgcattgatactacgatcgctcactgtactggaaggtttagcactctatgctgaccctgattttaaggtgcttgctgcatcgtatccttactttgcgaaaaggctactcactgatcccaatccatacctcagagacgctttagttgagcttctattcaaggatggaagattcagatggaataggcttgaaaatcttcttgttcaagggcgccaagatagagagtttgcagccaaagatgcattacagcctgttctaaagcttctcctgggtcctgatggggaggaattgcgtgtgttggttgtgaaagaggcagttcgtgtaacagaagccatcactattggaacactgatcgattcatacaatgcatctccagcgtttttgaagccattaatttccagtggcaatccagccggacccttcaagtttagtgaggctgaacaagaacagatgttggagctccgagaccaggttttcagagtatggggtcttttgagatcctcaaataactttgatccgagccttttgcaaccaatcgttcaggtgctacaagaaccagaggcccgcgtcttgggttctcgtgtcgcaggtggtgtaacacagcgccttgcggcacgtctgctgcaacagcttctcaggatcccttctcctggatcttcgtaacagattatatagagatgggctcgtatgaagcatgtaaattgacacgatacttttgacaggaaactgaggtgccatttgattcaagaaatgtaaatatagatatgggctcgtatgaagcatgtaaattgacacgatacttttcacaggaaacaggatttcatttgattc

SEQ ID NO: 35707 - protein, 712 aa, Zea mays subsp. mays
  peptide (1)..(712): Ceres Seq. ID no. 12465501
  misc_feature (208)..(327): Pfam Name: Pfam Description:  ABC1 family
  misc_feature (26)..(712): NCBI GI NO: 18412437 NR Description: expressed protein; protein id: At1g79600
  misc_feature (148)..(712): NCBI GI NO: 14532490 NR Description: At1g79600/F20B17_3 [Arabidopsis thaliana]
  misc_feature (99)..(707): NCBI GI NO: 23042448 NR Description: hypothetical protein
  misc_feature (99)..(704): NCBI GI NO: 22298493 NR Description: ORF_ID:tll0950~hypothetical protein
  misc_feature (98)..(712): NCBI GI NO: 17232452 NR Description: hypothetical protein [Nostoc sp. PCC 7120]
  misc_feature (99)..(702): NCBI GI NO: 16331408 NR Description: ABC1-like [Synechocystis sp. PCC 6803]
  misc_feature (83)..(701): NCBI GI NO: 33241332 NR Description: Predicted protein kinase
  misc_feature (99)..(616): NCBI GI NO: 37522693 NR Description: hypothetical protein glr3124
  misc_feature (83)..(701): NCBI GI NO: 33867054 NR Description: possible protein kinase: ABC1 family
  misc_feature (83)..(701): NCBI GI NO: 33864536 NR Description: possible protein kinase:ABC1 family
MAATTSTTPAVSFSLPSPPHRQGAPRRRAPFLLRAASTAAPPSPDLSIQLSPRASPPASTNGAATALGRPVAASFARDRAEDLQAEARAMARAAGATVYSPELLASRYGSRPFKVALRAAEVLSKLTSFGVKVLLDERRGESSSERRRARAVELRSILTRLGPTFVKIGQGLSTRPDLCPVEYLEELAELQDSLPTFPDEDAFACIERELGFTLDSIYSSISPSPIAAASLGQVYKAQLKYSGKLVAVKVQRPGIEDAIGLDFYLLRGLGFLINKYVDIVTSDVVALMDEFARRVFQELNYVQEGQNARRFKKLYADKQDILVPDIFWDYTSAKVLTMEWIEGVKLNQQAAIESQGLKVLDLVNIGIQCSLRQLLEYGYFHADPHPGNILATPEGKLAFLDFGMMSETPEDARVAIIGHVVHLVNRDYEAMARDYYALDFLGPDVDVSPIVPALKNFFDDALNATVSELNFKTIVDGLGAVLYQYPFNVPAYYALILRSLTVLEGLALYADPDFKVLAASYPYFAKRLLTDPNPYLRDALVELLFKDGRFRWNRLENLLVQGRQDREFAAKDALQPVLKLLLGPDGEELRVLVVKEAVRVTEAITIGTLIDSYNASPAFLKPLISSGNPAGPFKFSEAEQEQMLELRDQVFRVWGLLRSSNNFDPSLLQPIVQVLQEPEARVLGSRVAGGVTQRLAARLLQQLLRIPSPGSS

SEQ ID NO: 35708 - protein, 623 aa, Zea mays subsp. mays
  peptide (1)..(623): Ceres Seq. ID no. 12465502
  misc_feature (119)..(238): Pfam Name: Pfam Description:  ABC1 family
  misc_feature (1)..(623): NCBI GI NO: 18412437 NR Description: expressed protein; protein id: At1g79600
  misc_feature (59)..(623): NCBI GI NO: 14532490 NR Description: At1g79600/F20B17_3 [Arabidopsis thaliana]
  misc_feature (10)..(618): NCBI GI NO: 23042448 NR Description: hypothetical protein
  misc_feature (10)..(615): NCBI GI NO: 22298493 NR Description: ORF_ID:tll0950~hypothetical protein
  misc_feature (9)..(623): NCBI GI NO: 17232452 NR Description: hypothetical protein [Nostoc sp. PCC 7120]
  misc_feature (10)..(613): NCBI GI NO: 16331408 NR Description: ABC1-like [Synechocystis sp. PCC 6803]
  misc_feature (1)..(612): NCBI GI NO: 33241332 NR Description: Predicted protein kinase
  misc_feature (10)..(527): NCBI GI NO: 37522693 NR Description: hypothetical protein glr3124
  misc_feature (1)..(612): NCBI GI NO: 33867054 NR Description: possible protein kinase: ABC1 family
  misc_feature (1)..(612): NCBI GI NO: 33864536 NR Description: possible protein kinase:ABC1 family
MARAAGATVYSPELLASRYGSRPFKVALRAAEVLSKLTSFGVKVLLDERRGESSSERRRARAVELRSILTRLGPTFVKIGQGLSTRPDLCPVEYLEELAELQDSLPTFPDEDAFACIERELGFTLDSIYSSISPSPIAAASLGQVYKAQLKYSGKLVAVKVQRPGIEDAIGLDFYLLRGLGFLINKYVDIVTSDVVALMDEFARRVFQELNYVQEGQNARRFKKLYADKQDILVPDIFWDYTSAKVLTMEWIEGVKLNQQAAIESQGLKVLDLVNIGIQCSLRQLLEYGYFHADPHPGNILATPEGKLAFLDFGMMSETPEDARVAIIGHVVHLVNRDYEAMARDYYALDFLGPDVDVSPIVPALKNFFDDALNATVSELNFKTIVDGLGAVLYQYPFNVPAYYALILRSLTVLEGLALYADPDFKVLAASYPYFAKRLLTDPNPYLRDALVELLFKDGRFRWNRLENLLVQGRQDREFAAKDALQPVLKLLLGPDGEELRVLVVKEAVRVTEAITIGTLIDSYNASPAFLKPLISSGNPAGPFKFSEAEQEQMLELRDQVFRVWGLLRSSNNFDPSLLQPIVQVLQEPEARVLGSRVAGGVTQRLAARLLQQLLRIPSPGSS

SEQ ID NO: 35709 - protein, 425 aa, Zea mays subsp. mays
  peptide (1)..(425): Ceres Seq. ID no. 12465503
  misc_feature (1)..(425): NCBI GI NO: 18412437 NR Description: expressed protein; protein id: At1g79600
  misc_feature (1)..(425): NCBI GI NO: 14532490 NR Description: At1g79600/F20B17_3 [Arabidopsis thaliana]
  misc_feature (1)..(420): NCBI GI NO: 23042448 NR Description: hypothetical protein
  misc_feature (1)..(417): NCBI GI NO: 22298493 NR Description: ORF_ID:tll0950~hypothetical protein
  misc_feature (1)..(425): NCBI GI NO: 17232452 NR Description: hypothetical protein [Nostoc sp. PCC 7120]
  misc_feature (1)..(415): NCBI GI NO: 16331408 NR Description: ABC1-like [Synechocystis sp. PCC 6803]
  misc_feature (1)..(414): NCBI GI NO: 33241332 NR Description: Predicted protein kinase
  misc_feature (1)..(329): NCBI GI NO: 37522693 NR Description: hypothetical protein glr3124
  misc_feature (1)..(414): NCBI GI NO: 33867054 NR Description: possible protein kinase: ABC1 family
  misc_feature (1)..(414): NCBI GI NO: 33864536 NR Description: possible protein kinase:ABC1 family
MDEFARRVFQELNYVQEGQNARRFKKLYADKQDILVPDIFWDYTSAKVLTMEWIEGVKLNQQAAIESQGLKVLDLVNIGIQCSLRQLLEYGYFHADPHPGNILATPEGKLAFLDFGMMSETPEDARVAIIGHVVHLVNRDYEAMARDYYALDFLGPDVDVSPIVPALKNFFDDALNATVSELNFKTIVDGLGAVLYQYPFNVPAYYALILRSLTVLEGLALYADPDFKVLAASYPYFAKRLLTDPNPYLRDALVELLFKDGRFRWNRLENLLVQGRQDREFAAKDALQPVLKLLLGPDGEELRVLVVKEAVRVTEAITIGTLIDSYNASPAFLKPLISSGNPAGPFKFSEAEQEQMLELRDQVFRVWGLLRSSNNFDPSLLQPIVQVLQEPEARVLGSRVAGGVTQRLAARLLQQLLRIPSPGSS

SEQ ID NO: 35710 - DNA, 1141 bp, Zea mays subsp. mays
  misc_feature (1)..(1141): Ceres Seq. ID no. 12436346
caactgaaggtgccggactagtagctccgtgtcaccaaccagagccagagccatgggggccagcctgagcctggtgccggtgctcgactacttcgcccgccgcgagtgcctgcgcgccggcctccaccagaacgccgtcacgctcccgtaccccgacggcggcggcggggcgacctgcaccgtccagtactgggctccgcagggggagcctgagctcccgccgctcctgctggtccacggcttcgggccccgggccgactggcagtggcgctgccaggtggggccgctctcgcgccacttccacgtcatcatccccgacctcctgggcttcggcggcagcgcgtacccgtccgagacggcgccgccgccgacggaggcgacgcaggccgcggtgctggcggcgctgctgggcgcgctgcccgggatggagcgccggcgcgtggccgtggcgggcaccagctacggcgggttcgtggcgtactggctggcccgcgaggcggggcccgccagggtcggccccgtggtgatcgccagctccgacctgctcaagacggctgccgacgacagggcgttcctgaagcgcgccggcgaagggtggggcggcgtggacgagatcctcctccccgccgagcccgccgcgctgcggaagctcctggagctggcctcctgccgcccgccgccgcggctggtgacgccggacttcctgctccgtgacttcatccagaaactcttcacgcagaacagggagcggcttgtccatctgctgaaggggattacggtcgggacagagaagttccaagtgacgccaatatctcaggaagtgctgattgtatggggagaccacgaccagctgttcccggtggagaaggcgtttgcggttcagagggctctgaacgggaccgctaggctggaggtgataccgaagacaggccacgctcctcagctggaggatccggctcgcttcaacaaggtcatgctggacttcttgctggcttctcacaagcctgacccctcggttagtggtagcgcgcaataatttaccaaggtgcattggcgattggtcagtggtagccgactcgattgtttgtaataagatcgctggacaggttcagttcattccattaaatcaatggtaaatttc

SEQ ID NO: 35711 - protein, 327 aa, Zea mays subsp. mays
  peptide (1)..(327): Ceres Seq. ID no. 12436347
  misc_feature (83)..(310): Pfam Name: Pfam Description:  alpha/beta hydrolase fold
  misc_feature (1)..(327): NCBI GI NO: 27436746 NR Description: Unknown protein
  misc_feature (7)..(321): NCBI GI NO: 27436745 NR Description: Hypothetical protein
  misc_feature (4)..(229): NCBI GI NO: 24059850 NR Description: hydrolase-like protein
  misc_feature (223)..(322): NCBI GI NO: 24059850 NR Description: hydrolase-like protein
  misc_feature (25)..(327): NCBI GI NO: 34896168 NR Description: contains ESTs C73890
  misc_feature (1)..(315): NCBI GI NO: 30689631 NR Description: hydrolase, alpha/beta fold family
  misc_feature (58)..(315): NCBI GI NO: 21592805 NR Description: unknown [Arabidopsis thaliana]
  misc_feature (22)..(224): NCBI GI NO: 27436747 NR Description: Hypothetical protein
  misc_feature (229)..(315): NCBI GI NO: 27436747 NR Description: Hypothetical protein
  misc_feature (22)..(322): NCBI GI NO: 37533664 NR Description: putative hydrolase
MGASLSLVPVLDYFARRECLRAGLHQNAVTLPYPDGGGGATCTVQYWAPQGEPELPPLLLVHGFGPRADWQWRCQVGPLSRHFHVIIPDLLGFGGSAYPSETAPPPTEATQAAVLAALLGALPGMERRRVAVAGTSYGGFVAYWLAREAGPARVGPVVIASSDLLKTAADDRAFLKRAGEGWGGVDEILLPAEPAALRKLLELASCRPPPRLVTPDFLLRDFIQKLFTQNRERLVHLLKGITVGTEKFQVTPISQEVLIVWGDHDQLFPVEKAFAVQRALNGTARLEVIPKTGHAPQLEDPARFNKVMLDFLLASHKPDPSVSGSAQ

SEQ ID NO: 35712 - protein, 203 aa, Zea mays subsp. mays
  peptide (1)..(203): Ceres Seq. ID no. 12436348
  misc_feature (1)..(186): Pfam Name: Pfam Description:  alpha/beta hydrolase fold
  misc_feature (1)..(203): NCBI GI NO: 27436746 NR Description: Unknown protein
  misc_feature (1)..(197): NCBI GI NO: 27436745 NR Description: Hypothetical protein
  misc_feature (1)..(105): NCBI GI NO: 24059850 NR Description: hydrolase-like protein
  misc_feature (99)..(198): NCBI GI NO: 24059850 NR Description: hydrolase-like protein
  misc_feature (1)..(203): NCBI GI NO: 34896168 NR Description: contains ESTs C73890
  misc_feature (1)..(191): NCBI GI NO: 30689631 NR Description: hydrolase, alpha/beta fold family
  misc_feature (1)..(191): NCBI GI NO: 21592805 NR Description: unknown [Arabidopsis thaliana]
  misc_feature (1)..(100): NCBI GI NO: 27436747 NR Description: Hypothetical protein
  misc_feature (105)..(191): NCBI GI NO: 27436747 NR Description: Hypothetical protein
  misc_feature (1)..(198): NCBI GI NO: 37533664 NR Description: putative hydrolase
MERRRVAVAGTSYGGFVAYWLAREAGPARVGPVVIASSDLLKTAADDRAFLKRAGEGWGGVDEILLPAEPAALRKLLELASCRPPPRLVTPDFLLRDFIQKLFTQNRERLVHLLKGITVGTEKFQVTPISQEVLIVWGDHDQLFPVEKAFAVQRALNGTARLEVIPKTGHAPQLEDPARFNKVMLDFLLASHKPDPSVSGSAQ

SEQ ID NO: 35713 - DNA, 1802 bp, Zea mays subsp. mays
  misc_feature (1)..(1802): Ceres Seq. ID no. 12484069
aacaacactcgcctgccctgccctctcatctcgcttcgcttccattccatcgcgccagtcgccagactcaccagggagacagggagagtagggggaaatatcaattagaaacaacgaggaactagcaaagaaagaaggataactcccataagaaaaatcgccaaatacgccattcatcttctccgcccgggtttcagaacgtgcggcagtttagccaggatggtggcgatcgagaaccagaaccagagccaggccgcggtggcggtggcggcggaggcggtgccggcgccggcgtcgcggatccccagggaggcgcggcgcctgctgcacgagctggcggcggcgtgggcggacgtggccgactgccgcgcgctggaggtcgtgccgctcaagggggccatgaccaacgaggtctaccaggcgcgctggctcactgcaggccctgccggccagaaggaggagcccagggcggagagggaggtgaggaaggtgctcgtgcggatttacggcgacggcgtcgacctcttcttcgaccgcgaggacgaggtgcgcaccttcgagtgcatgtcacgccatggccagggtccccgcctcctcggccgcttcccgaacggccgcgtcgaggagttcatccacgcaaggacattgtcagctgccgaccttcgcgatcctgaaatttcagctctggtggcttccaagctgagggagttccacaaccttgacatgcctggtcccaaatctgtgctcatttgggacagacttaggaactggctcagaactgccaagagcttgtgtccacctgaagaagccaaggaatttcggttggacagtctggagaaccagattactgcattggagaacgagtgttcaggtgattaccagtggattggtttctgtcacaatgatcttcagtatggcaatatcatgattgatgaagagaccaacgtgctgaccatcattgattatgagtatgcaagcttcaacccagttgcatatgacattgctaaccatttctgtgagatggcagcagactatcattcatcaaagcctcatatactggactacagcagatatccagatgttgatgagcagaagcgttttgttaagacctacctgaacatttctggtgaggaacctgatgcggaagttgtagagaacctgctccaaagcattgagaagcacacgctctccagccatctagtatggggcctctggggaataatttcggaccatgttaacgacattgacttcgactacaaggagtatgcgaggcagagattcgagcagtactggcacaagtctgcgatcttaacatcttgaacatgtgtataaacacccgtacgtggtctcaggaactccctgagggcctgtggctgcacacacgaaattgtgcagtgccactgacacatagataagctgtgaaagaagaaatactgacgacgacgacgaataatcccgttttgggctcgggaggttatttctccgcaactcgatgagcttcaggcttcagcttcaggaaggaaggaaggagctatggggatttggctgcccgcttatgctgtaccaatgcaattaaaagataaagatccggtccggtgttgcgtgtgctatgtttagttttggctagcaccgccgagagccgtggtcctgttgtggtgtttctagtttctgtatgcttgatgttgttagtgtgctggataatttggttttgtgcttggggagtccttagctttgggacaacgcatacattgtatactgggtagatgtataaacataaaacagctatgggaatttggttctct

SEQ ID NO: 35714 - protein, 366 aa, Zea mays subsp. mays
  peptide (1)..(366): Ceres Seq. ID no. 12484070
  misc_feature (87)..(348): Pfam Name: Pfam Description:  Choline/ethanolamine kinase
  misc_feature (1)..(366): NCBI GI NO: 33149685 NR Description: choline kinase
  misc_feature (1)..(348): NCBI GI NO: 34910612 NR Description: putative choline kinase
  misc_feature (25)..(364): NCBI GI NO: 7488654 NR Description: choline kinase (EC 2
  misc_feature (27)..(358): NCBI GI NO: 22330627 NR Description: putative choline kinase; protein id: At1g74320
  misc_feature (27)..(358): NCBI GI NO: 25348157 NR Description: protein choline kinase F1O17.1
  misc_feature (31)..(366): NCBI GI NO: 7488653 NR Description: choline kinase (EC 2.7.1.32) CK2 - soybean
  misc_feature (14)..(364): NCBI GI NO: 15217543 NR Description: choline kinase, putative; protein id: At1g71697.1
  misc_feature (31)..(364): NCBI GI NO: 12311795 NR Description: choline kinase [Pisum sativum]
  misc_feature (24)..(366): NCBI GI NO: 15234032 NR Description: choline kinase GmCK2p -like protein
  misc_feature (24)..(366): NCBI GI NO: 21537276 NR Description: choline kinase GmCK2p-like protein
MVAIENQNQSQAAVAVAAEAVPAPASRIPREARRLLHELAAAWADVADCRALEVVPLKGAMTNEVYQARWLTAGPAGQKEEPRAEREVRKVLVRIYGDGVDLFFDREDEVRTFECMSRHGQGPRLLGRFPNGRVEEFIHARTLSAADLRDPEISALVASKLREFHNLDMPGPKSVLIWDRLRNWLRTAKSLCPPEEAKEFRLDSLENQITALENECSGDYQWIGFCHNDLQYGNIMIDEETNVLTIIDYEYASFNPVAYDIANHFCEMAADYHSSKPHILDYSRYPDVDEQKRFVKTYLNISGEEPDAEVVENLLQSIEKHTLSSHLVWGLWGIISDHVNDIDFDYKEYARQRFEQYWHKSAILTS

SEQ ID NO: 35715 - protein, 306 aa, Zea mays subsp. mays
  peptide (1)..(306): Ceres Seq. ID no. 12484071
  misc_feature (27)..(288): Pfam Name: Pfam Description:  Choline/ethanolamine kinase
  misc_feature (1)..(306): NCBI GI NO: 33149685 NR Description: choline kinase
  misc_feature (1)..(288): NCBI GI NO: 34910612 NR Description: putative choline kinase
  misc_feature (1)..(304): NCBI GI NO: 7488654 NR Description: choline kinase (EC 2
  misc_feature (1)..(298): NCBI GI NO: 22330627 NR Description: putative choline kinase; protein id: At1g74320
  misc_feature (1)..(298): NCBI GI NO: 25348157 NR Description: protein choline kinase F1O17.1
  misc_feature (1)..(306): NCBI GI NO: 7488653 NR Description: choline kinase (EC 2.7.1.32) CK2 - soybean
  misc_feature (1)..(304): NCBI GI NO: 15217543 NR Description: choline kinase, putative; protein id: At1g71697.1
  misc_feature (1)..(304): NCBI GI NO: 12311795 NR Description: choline kinase [Pisum sativum]
  misc_feature (1)..(306): NCBI GI NO: 15234032 NR Description: choline kinase GmCK2p -like protein
  misc_feature (1)..(306): NCBI GI NO: 21537276 NR Description: choline kinase GmCK2p-like protein
MTNEVYQARWLTAGPAGQKEEPRAEREVRKVLVRIYGDGVDLFFDREDEVRTFECMSRHGQGPRLLGRFPNGRVEEFIHARTLSAADLRDPEISALVASKLREFHNLDMPGPKSVLIWDRLRNWLRTAKSLCPPEEAKEFRLDSLENQITALENECSGDYQWIGFCHNDLQYGNIMIDEETNVLTIIDYEYASFNPVAYDIANHFCEMAADYHSSKPHILDYSRYPDVDEQKRFVKTYLNISGEEPDAEVVENLLQSIEKHTLSSHLVWGLWGIISDHVNDIDFDYKEYARQRFEQYWHKSAILTS

SEQ ID NO: 35716 - protein, 251 aa, Zea mays subsp. mays
  peptide (1)..(251): Ceres Seq. ID no. 12484072
  misc_feature (1)..(233): Pfam Name: Pfam Description:  Choline/ethanolamine kinase
  misc_feature (1)..(251): NCBI GI NO: 33149685 NR Description: choline kinase
  misc_feature (1)..(233): NCBI GI NO: 34910612 NR Description: putative choline kinase
  misc_feature (1)..(249): NCBI GI NO: 7488654 NR Description: choline kinase (EC 2
  misc_feature (1)..(243): NCBI GI NO: 22330627 NR Description: putative choline kinase; protein id: At1g74320
  misc_feature (1)..(243): NCBI GI NO: 25348157 NR Description: protein choline kinase F1O17.1
  misc_feature (1)..(251): NCBI GI NO: 7488653 NR Description: choline kinase (EC 2.7.1.32) CK2 - soybean
  misc_feature (1)..(249): NCBI GI NO: 15217543 NR Description: choline kinase, putative; protein id: At1g71697.1
  misc_feature (1)..(249): NCBI GI NO: 12311795 NR Description: choline kinase [Pisum sativum]
  misc_feature (1)..(251): NCBI GI NO: 15234032 NR Description: choline kinase GmCK2p -like protein
  misc_feature (1)..(251): NCBI GI NO: 21537276 NR Description: choline kinase GmCK2p-like protein
MSRHGQGPRLLGRFPNGRVEEFIHARTLSAADLRDPEISALVASKLREFHNLDMPGPKSVLIWDRLRNWLRTAKSLCPPEEAKEFRLDSLENQITALENECSGDYQWIGFCHNDLQYGNIMIDEETNVLTIIDYEYASFNPVAYDIANHFCEMAADYHSSKPHILDYSRYPDVDEQKRFVKTYLNISGEEPDAEVVENLLQSIEKHTLSSHLVWGLWGIISDHVNDIDFDYKEYARQRFEQYWHKSAILTS

SEQ ID NO: 35717 - DNA, 494 bp, Zea mays subsp. mays
  misc_feature (1)..(494): Ceres Seq. ID no. 3008609
  misc_feature (476)..(476): n is a, c, t, g, unknown, or other
aactacccccacgctggctcgccaccgccgccgcagcaggcgtgggaatctgggcagcgccccgcggagaagaggaggcagcgcgctctccgtccgccatggcgggctcttccgaccccgacaagctcatgagcaaagccgacaaactaacaaaattgagttttacaagatggaatgctgattggaaaagcgctacctccttgtatgagcaagctgcaattgcgtataggttcagaaaggataatgagaaagcaaaagatgcttttgagaaggcctcaaaaggacaggaaatgatctcctcaccatgggacgctgctaagcatatggaatctgctgctgctttagcaaaggagcttgggcgctggaatgaagtatctgatttctatcacagagcttcagaattataccgtgaatgtggaaggccacaacctgcatctgatgctctagcaaagggtgccagtgcattggcggcgacnaggcagccacctacttgt

SEQ ID NO: 35718 - protein, 164 aa, Zea mays subsp. mays
  peptide (1)..(164): Ceres Seq. ID no. 3008610
  misc_feature (34)..(155): NCBI GI NO: 38344323 NR Description: OSJNBa0058K23.5
  misc_feature (36)..(155): NCBI GI NO: 21554919 NR Description: unknown [Arabidopsis thaliana]
  misc_feature (36)..(155): NCBI GI NO: 7486759 NR Description: hypothetical protein F9F13
  misc_feature (36)..(155): NCBI GI NO: 18415496 NR Description: putative protein; protein id: At4g20410
  misc_feature (97)..(155): NCBI GI NO: 5852090 NR Description: zwh13.1 [Oryza sativa (indica cultivar-group)]
  misc_feature (37)..(161): NCBI GI NO: 17137734 NR Description: gamma-soluble NSF attachment protein CG3988-PA
  misc_feature (40)..(155): NCBI GI NO: 5639862 NR Description: soluble NSF attachment protein gamma isoform
  misc_feature (1)..(155): NCBI GI NO: 34932055 NR Description: similar to Gamma-soluble NSF attachment protein
  misc_feature (43)..(155): NCBI GI NO: 18272359 NR Description: Gamma-soluble NSF attachment protein
  misc_feature (43)..(155): NCBI GI NO: 423252 NR Description: gamma-SNAP protein - bovine
  misc_feature (158)..(158): Xaa is any aa, unknown or other
LPPRWLATAAAAGVGIWAAPRGEEEAARSPSAMAGSSDPDKLMSKADKLTKLSFTRWNADWKSATSLYEQAAIAYRFRKDNEKAKDAFEKASKGQEMISSPWDAAKHMESAAALAKELGRWNEVSDFYHRASELYRECGRPQPASDALAKGASALAAXRQPPTC

SEQ ID NO: 35719 - protein, 132 aa, Zea mays subsp. mays
  peptide (1)..(132): Ceres Seq. ID no. 3008611
  misc_feature (2)..(123): NCBI GI NO: 38344323 NR Description: OSJNBa0058K23.5
  misc_feature (4)..(123): NCBI GI NO: 21554919 NR Description: unknown [Arabidopsis thaliana]
  misc_feature (4)..(123): NCBI GI NO: 7486759 NR Description: hypothetical protein F9F13
  misc_feature (4)..(123): NCBI GI NO: 18415496 NR Description: putative protein; protein id: At4g20410
  misc_feature (65)..(123): NCBI GI NO: 5852090 NR Description: zwh13.1 [Oryza sativa (indica cultivar-group)]
  misc_feature (5)..(129): NCBI GI NO: 17137734 NR Description: gamma-soluble NSF attachment protein CG3988-PA
  misc_feature (8)..(123): NCBI GI NO: 5639862 NR Description: soluble NSF attachment protein gamma isoform
  misc_feature (1)..(123): NCBI GI NO: 34932055 NR Description: similar to Gamma-soluble NSF attachment protein
  misc_feature (11)..(123): NCBI GI NO: 18272359 NR Description: Gamma-soluble NSF attachment protein
  misc_feature (11)..(123): NCBI GI NO: 423252 NR Description: gamma-SNAP protein - bovine
  misc_feature (126)..(126): Xaa is any aa, unknown or other
MAGSSDPDKLMSKADKLTKLSFTRWNADWKSATSLYEQAAIAYRFRKDNEKAKDAFEKASKGQEMISSPWDAAKHMESAAALAKELGRWNEVSDFYHRASELYRECGRPQPASDALAKGASALAAXRQPPTC

SEQ ID NO: 35720 - protein, 122 aa, Zea mays subsp. mays
  peptide (1)..(122): Ceres Seq. ID no. 3008612
  misc_feature (1)..(113): NCBI GI NO: 38344323 NR Description: OSJNBa0058K23.5
  misc_feature (1)..(113): NCBI GI NO: 21554919 NR Description: unknown [Arabidopsis thaliana]
  misc_feature (1)..(113): NCBI GI NO: 7486759 NR Description: hypothetical protein F9F13
  misc_feature (1)..(113): NCBI GI NO: 18415496 NR Description: putative protein; protein id: At4g20410
  misc_feature (55)..(113): NCBI GI NO: 5852090 NR Description: zwh13.1 [Oryza sativa (indica cultivar-group)]
  misc_feature (1)..(119): NCBI GI NO: 17137734 NR Description: gamma-soluble NSF attachment protein CG3988-PA
  misc_feature (1)..(113): NCBI GI NO: 5639862 NR Description: soluble NSF attachment protein gamma isoform
  misc_feature (1)..(113): NCBI GI NO: 34932055 NR Description: similar to Gamma-soluble NSF attachment protein
  misc_feature (1)..(113): NCBI GI NO: 18272359 NR Description: Gamma-soluble NSF attachment protein
  misc_feature (1)..(113): NCBI GI NO: 423252 NR Description: gamma-SNAP protein - bovine
  misc_feature (116)..(116): Xaa is any aa, unknown or other
MSKADKLTKLSFTRWNADWKSATSLYEQAAIAYRFRKDNEKAKDAFEKASKGQEMISSPWDAAKHMESAAALAKELGRWNEVSDFYHRASELYRECGRPQPASDALAKGASALAAXRQPPTC

SEQ ID NO: 35721 - DNA, 424 bp, Zea mays subsp. mays
  misc_feature (1)..(424): Ceres Seq. ID no. 4616227
aaaatcacctcacaacaagctgccccgcagcaacgaacacgaaccttggcagaacgaagctgaagtagttcgttgtgaacccagtatggcaaacgcgccgaggatcctggccctcggcctgctgctagcgctcctgtgcgctgccgccggcccggccgccgcgcagaactgcggctgccagcctaacttctgctgcagcaagttcggctactgcggcacgaccgacgactactgcggcgacgggtgccagtcgggcccgtgccgctcgggcggcggcggcggcggcggcggaggcggaggcagtggcggtgcgaacgtggctaacgtggtcagcgacgcgttcttcaacggcatcaagaaccaggccgggagcgggtgcgagggcaagaacttctacacccggagcgcgttcctgagcgccgtc

SEQ ID NO: 35722 - protein, 141 aa, Zea mays subsp. mays
  peptide (1)..(141): Ceres Seq. ID no. 4616228
  misc_feature (54)..(87): Pfam Name: Pfam Description:  Chitin recognition protein
  misc_feature (29)..(140): NCBI GI NO: 116329 NR Description: ENDOCHITINASE A PRECURSOR (SEED CHITINASE A)
  misc_feature (29)..(140): NCBI GI NO: 283037 NR Description: chitinase (EC 3.2.1.14) A - maize
  misc_feature (33)..(140): NCBI GI NO: 116333 NR Description: ENDOCHITINASE B PRECURSOR (SEED CHITINASE B)
  misc_feature (34)..(140): NCBI GI NO: 482985 NR Description: chitinase (EC 3
  misc_feature (29)..(140): NCBI GI NO: 15529119 NR Description: chitinase-B1 [Sorghum bicolor]
  misc_feature (35)..(140): NCBI GI NO: 15213848 NR Description: chitinase-B [Saccharum officinarum]
  misc_feature (35)..(140): NCBI GI NO: 15213852 NR Description: chitinase-B [Sorghum halepense]
  misc_feature (35)..(140): NCBI GI NO: 15529121 NR Description: chitinase-B [Sorghum bicolor]
  misc_feature (35)..(140): NCBI GI NO: 15213850 NR Description: chitinase-B [Sorghum arundinaceum]
  misc_feature (35)..(140): NCBI GI NO: 15529117 NR Description: chitinase-B [Sorghum bicolor]
KSPHNKLPRSNEHEPWQNEAEVVRCEPSMANAPRILALGLLLALLCAAAGPAAAQNCGCQPNFCCSKFGYCGTTDDYCGDGCQSGPCRSGGGGGGGGGGGSGGANVANVVSDAFFNGIKNQAGSGCEGKNFYTRSAFLSAV

SEQ ID NO: 35723 - protein, 113 aa, Zea mays subsp. mays
  peptide (1)..(113): Ceres Seq. ID no. 4616229
  misc_feature (26)..(59): Pfam Name: Pfam Description:  Chitin recognition protein
  misc_feature (1)..(112): NCBI GI NO: 116329 NR Description: ENDOCHITINASE A PRECURSOR (SEED CHITINASE A)
  misc_feature (1)..(112): NCBI GI NO: 283037 NR Description: chitinase (EC 3.2.1.14) A - maize
  misc_feature (5)..(112): NCBI GI NO: 116333 NR Description: ENDOCHITINASE B PRECURSOR (SEED CHITINASE B)
  misc_feature (6)..(112): NCBI GI NO: 482985 NR Description: chitinase (EC 3
  misc_feature (1)..(112): NCBI GI NO: 15529119 NR Description: chitinase-B1 [Sorghum bicolor]
  misc_feature (7)..(112): NCBI GI NO: 15213848 NR Description: chitinase-B [Saccharum officinarum]
  misc_feature (7)..(112): NCBI GI NO: 15213852 NR Description: chitinase-B [Sorghum halepense]
  misc_feature (7)..(112): NCBI GI NO: 15529121 NR Description: chitinase-B [Sorghum bicolor]
  misc_feature (7)..(112): NCBI GI NO: 15213850 NR Description: chitinase-B [Sorghum arundinaceum]
  misc_feature (7)..(112): NCBI GI NO: 15529117 NR Description: chitinase-B [Sorghum bicolor]
MANAPRILALGLLLALLCAAAGPAAAQNCGCQPNFCCSKFGYCGTTDDYCGDGCQSGPCRSGGGGGGGGGGGSGGANVANVVSDAFFNGIKNQAGSGCEGKNFYTRSAFLSAV

SEQ ID NO: 35724 - DNA, 2566 bp, Zea mays subsp. mays
  misc_feature (1)..(2566): Ceres Seq. ID no. 12450470
acctctgtccatccatcacagcttcgagactcgtcctccatgggttctggcggcgtcagatggaaggctctgccgctgtgcctagctctcgtggctctgcaagcatgcctccctgctcgcggggcagctcccaagacttacatcgttcagatggccgcgtctgagatgccgagctcgttcgatttccaccacgaatggtacgcatccactgtgaaatccgtgagctctgtgcagctggaaggagacgcggacgaccattacgccgcgaggatcgtctacaactacgagacggcgttccacggcttcgcggcgaagctggacgaggacgaggccgagcggatggccgaggcggacggcgtggtggccgtgctcccggagacggtcctgcagctgcacaccaccaggagcccggacttcctgggcatcagcccggagatcagcgacagcatatggtccgccggcctggccgaccacgacgtcgtcgtcggcgtgctcgacaccggcatctggcccgagagccccagctttagcgacaagggcctcggccctgtcccggccaggtggaagggcctgtgccagaccggccgcggcttcaccgtagccagctgcaaccgcaagatcatcggcgcgcgcatcttctacaacggctacgaggcctcgtcgggccccatcaacgagacggccgagctcaaatctccgcgggaccaggacggccacggcacgcacaccgcggccaccgccgcgggcgcgcccgtgccggacgccagcctcttcggctacgccagcggcgtcgcccgtggcatggcgccccgcgcccgcgtcgcggcgtacaaggtgtgctggacggggggctgcttcagctccgacatcctggcggccgtcgaccgcgccgtggcggacggcgtcgacgtgctctccatctcgctcggcggcggctcgtccccctacttccgcgacagcctggccatcgcgtcgttcggtgccatgcagatgggcgtgttcgtcgcctgctcgggcggcaacggcggcccggaccccataagcctcaccaacctgtcgccgtggataaccacggtgggcgcgagcaccatggaccgggacttcccggccacggtgacgctcggcaatggcgcaaacctcaccggggtttcgctctacaaaggccggcgaggtctttcgtccaaggagcagtacccgttagtctacatgggcggcaactcgagcatccctgaccccaggtccctgtgcctggaggggacactccagccccacgaggtcgctggaaagattgtgatctgcgaccgcggcattagtcctcgggtgcagaagggtcaggttgtcaagaacgccggtgccgcgggcatgatactcgccaacacaccggcaaacggcgaggagcttgtcgccgacagccacctcctgccagcagtggccgttgggcagtctgaaggcattgccgccaagaagtacagcaaaaccgccccgaaaccaacggccacgctcagcttcgacgggacgaagctcgggatccgcccatcgccagtcgtagccgcgttctcgtcccggggaccaaacttcctgaccctggagatcctcaagccggatgtcatcgcgcccggcgtgaacatcttggcggcatggagcggcgacgccagcccgtcgagcttgtccagcgaccgccggcgggtcggcttcaacatcctgtcggggacgtccatgtcgtgcccgcacgtcgccggcgtggctgcgctgatcaaggccagccacccggactggagccccgcgaagatcaagtccgcgctgatgaccaccgcgtacgtccacgacaacacgtaccggtcgctgaaggacgcggccaccggcaaggcgtccacgccgttcgatcacggagctgggcacatacacccgctgcgtgccctcaaccctggcctggtctacgacatcggccaggacgactacctggagttcctctgcgtggagaacctgacgccgttgcagctcaggtccttcaccaagaactcgagcaagacatgcaagcacaccttcagctcgccgggtgacttgaattattcggccatctccgcggtcttcgcggagcagccatctgctgcgcttacggtgcgtcgcaccgtgacgaacgtcggcccgccgtcttcgacttaccatgtcaaggttacagagttcaaaggcgcagacattgtcgtcgaaccaagcaccctgcacttcacaagttcgaaccagaagctaacctacaaggtgacgatgacaaccaaggctgcccagaagacaccggagttcggagcgctgtcttggagcgacggcgtccacatcgtccggagcccccttgtcctcacatggctgccaccgatgtgagcttcgtttatttaccgtgcgtttagagcaagcaatggagcaggaacctctgggcctgggtaatcaagccagagatccgttgtgtcgcagcggcagcggcagcggcagaacaggttcactaaccaacggaaaaatactgtcaaagctccacatgagaaccgcctttattcttcaatgtattcatgcttattcc

SEQ ID NO: 35725 - protein, 790 aa, Zea mays subsp. mays
  peptide (1)..(790): Ceres Seq. ID no. 12450471
  misc_feature (140)..(365): Pfam Name: Pfam Description:  Subtilase family
  misc_feature (26)..(790): NCBI GI NO: 18423316 NR Description: subtilisin-like serine protease
  misc_feature (26)..(787): NCBI GI NO: 7435656 NR Description: subtilisin-like proteinase (EC 3
  misc_feature (30)..(786): NCBI GI NO: 18425181 NR Description: subtilisin-like serine protease ARA12
  misc_feature (30)..(786): NCBI GI NO: 20147211 NR Description: AT5g67360/K8K14_8 [Arabidopsis thaliana]
  misc_feature (26)..(786): NCBI GI NO: 7435657 NR Description: subtilisin-like proteinase (EC 3
  misc_feature (26)..(786): NCBI GI NO: 14488360 NR Description: putative serine protease
  misc_feature (88)..(786): NCBI GI NO: 1076414 NR Description: subtilisin-like proteinase (EC 3
  misc_feature (46)..(790): NCBI GI NO: 21536632 NR Description: subtilisin-like serine protease
  misc_feature (46)..(790): NCBI GI NO: 13430434 NR Description: putative subtilisin serine protease
  misc_feature (91)..(784): NCBI GI NO: 22325457 NR Description: subtilisin-like serine protease AIR3
TSVHPSQLRDSSSMGSGGVRWKALPLCLALVALQACLPARGAAPKTYIVQMAASEMPSSFDFHHEWYASTVKSVSSVQLEGDADDHYAARIVYNYETAFHGFAAKLDEDEAERMAEADGVVAVLPETVLQLHTTRSPDFLGISPEISDSIWSAGLADHDVVVGVLDTGIWPESPSFSDKGLGPVPARWKGLCQTGRGFTVASCNRKIIGARIFYNGYEASSGPINETAELKSPRDQDGHGTHTAATAAGAPVPDASLFGYASGVARGMAPRARVAAYKVCWTGGCFSSDILAAVDRAVADGVDVLSISLGGGSSPYFRDSLAIASFGAMQMGVFVACSGGNGGPDPISLTNLSPWITTVGASTMDRDFPATVTLGNGANLTGVSLYKGRRGLSSKEQYPLVYMGGNSSIPDPRSLCLEGTLQPHEVAGKIVICDRGISPRVQKGQVVKNAGAAGMILANTPANGEELVADSHLLPAVAVGQSEGIAAKKYSKTAPKPTATLSFDGTKLGIRPSPVVAAFSSRGPNFLTLEILKPDVIAPGVNILAAWSGDASPSSLSSDRRRVGFNILSGTSMSCPHVAGVAALIKASHPDWSPAKIKSALMTTAYVHDNTYRSLKDAATGKASTPFDHGAGHIHPLRALNPGLVYDIGQDDYLEFLCVENLTPLQLRSFTKNSSKTCKHTFSSPGDLNYSAISAVFAEQPSAALTVRRTVTNVGPPSSTYHVKVTEFKGADIVVEPSTLHFTSSNQKLTYKVTMTTKAAQKTPEFGALSWSDGVHIVRSPLVLTWLPPM

SEQ ID NO: 35726 - protein, 777 aa, Zea mays subsp. mays
  peptide (1)..(777): Ceres Seq. ID no. 12450472
  misc_feature (127)..(352): Pfam Name: Pfam Description:  Subtilase family
  misc_feature (13)..(777): NCBI GI NO: 18423316 NR Description: subtilisin-like serine protease
  misc_feature (13)..(774): NCBI GI NO: 7435656 NR Description: subtilisin-like proteinase (EC 3
  misc_feature (17)..(773): NCBI GI NO: 18425181 NR Description: subtilisin-like serine protease ARA12
  misc_feature (17)..(773): NCBI GI NO: 20147211 NR Description: AT5g67360/K8K14_8 [Arabidopsis thaliana]
  misc_feature (13)..(773): NCBI GI NO: 7435657 NR Description: subtilisin-like proteinase (EC 3
  misc_feature (13)..(773): NCBI GI NO: 14488360 NR Description: putative serine protease
  misc_feature (75)..(773): NCBI GI NO: 1076414 NR Description: subtilisin-like proteinase (EC 3
  misc_feature (33)..(777): NCBI GI NO: 21536632 NR Description: subtilisin-like serine protease
  misc_feature (33)..(777): NCBI GI NO: 13430434 NR Description: putative subtilisin serine protease
  misc_feature (78)..(771): NCBI GI NO: 22325457 NR Description: subtilisin-like serine protease AIR3
MGSGGVRWKALPLCLALVALQACLPARGAAPKTYIVQMAASEMPSSFDFHHEWYASTVKSVSSVQLEGDADDHYAARIVYNYETAFHGFAAKLDEDEAERMAEADGVVAVLPETVLQLHTTRSPDFLGISPEISDSIWSAGLADHDVVVGVLDTGIWPESPSFSDKGLGPVPARWKGLCQTGRGFTVASCNRKIIGARIFYNGYEASSGPINETAELKSPRDQDGHGTHTAATAAGAPVPDASLFGYASGVARGMAPRARVAAYKVCWTGGCFSSDILAAVDRAVADGVDVLSISLGGGSSPYFRDSLAIASFGAMQMGVFVACSGGNGGPDPISLTNLSPWITTVGASTMDRDFPATVTLGNGANLTGVSLYKGRRGLSSKEQYPLVYMGGNSSIPDPRSLCLEGTLQPHEVAGKIVICDRGISPRVQKGQVVKNAGAAGMILANTPANGEELVADSHLLPAVAVGQSEGIAAKKYSKTAPKPTATLSFDGTKLGIRPSPVVAAFSSRGPNFLTLEILKPDVIAPGVNILAAWSGDASPSSLSSDRRRVGFNILSGTSMSCPHVAGVAALIKASHPDWSPAKIKSALMTTAYVHDNTYRSLKDAATGKASTPFDHGAGHIHPLRALNPGLVYDIGQDDYLEFLCVENLTPLQLRSFTKNSSKTCKHTFSSPGDLNYSAISAVFAEQPSAALTVRRTVTNVGPPSSTYHVKVTEFKGADIVVEPSTLHFTSSNQKLTYKVTMTTKAAQKTPEFGALSWSDGVHIVRSPLVLTWLPPM

SEQ ID NO: 35727 - protein, 740 aa, Zea mays subsp. mays
  peptide (1)..(740): Ceres Seq. ID no. 12450473
  misc_feature (90)..(315): Pfam Name: Pfam Description:  Subtilase family
  misc_feature (1)..(740): NCBI GI NO: 18423316 NR Description: subtilisin-like serine protease
  misc_feature (1)..(737): NCBI GI NO: 7435656 NR Description: subtilisin-like proteinase (EC 3
  misc_feature (1)..(736): NCBI GI NO: 18425181 NR Description: subtilisin-like serine protease ARA12
  misc_feature (1)..(736): NCBI GI NO: 20147211 NR Description: AT5g67360/K8K14_8 [Arabidopsis thaliana]
  misc_feature (1)..(736): NCBI GI NO: 7435657 NR Description: subtilisin-like proteinase (EC 3
  misc_feature (1)..(736): NCBI GI NO: 14488360 NR Description: putative serine protease
  misc_feature (38)..(736): NCBI GI NO: 1076414 NR Description: subtilisin-like proteinase (EC 3
  misc_feature (1)..(740): NCBI GI NO: 21536632 NR Description: subtilisin-like serine protease
  misc_feature (1)..(740): NCBI GI NO: 13430434 NR Description: putative subtilisin serine protease
  misc_feature (41)..(734): NCBI GI NO: 22325457 NR Description: subtilisin-like serine protease AIR3
MAASEMPSSFDFHHEWYASTVKSVSSVQLEGDADDHYAARIVYNYETAFHGFAAKLDEDEAERMAEADGVVAVLPETVLQLHTTRSPDFLGISPEISDSIWSAGLADHDVVVGVLDTGIWPESPSFSDKGLGPVPARWKGLCQTGRGFTVASCNRKIIGARIFYNGYEASSGPINETAELKSPRDQDGHGTHTAATAAGAPVPDASLFGYASGVARGMAPRARVAAYKVCWTGGCFSSDILAAVDRAVADGVDVLSISLGGGSSPYFRDSLAIASFGAMQMGVFVACSGGNGGPDPISLTNLSPWITTVGASTMDRDFPATVTLGNGANLTGVSLYKGRRGLSSKEQYPLVYMGGNSSIPDPRSLCLEGTLQPHEVAGKIVICDRGISPRVQKGQVVKNAGAAGMILANTPANGEELVADSHLLPAVAVGQSEGIAAKKYSKTAPKPTATLSFDGTKLGIRPSPVVAAFSSRGPNFLTLEILKPDVIAPGVNILAAWSGDASPSSLSSDRRRVGFNILSGTSMSCPHVAGVAALIKASHPDWSPAKIKSALMTTAYVHDNTYRSLKDAATGKASTPFDHGAGHIHPLRALNPGLVYDIGQDDYLEFLCVENLTPLQLRSFTKNSSKTCKHTFSSPGDLNYSAISAVFAEQPSAALTVRRTVTNVGPPSSTYHVKVTEFKGADIVVEPSTLHFTSSNQKLTYKVTMTTKAAQKTPEFGALSWSDGVHIVRSPLVLTWLPPM

SEQ ID NO: 35728 - DNA, 1433 bp, Zea mays subsp. mays
  misc_feature (1)..(1433): Ceres Seq. ID no. 13494861
agggctcatctctctcttcctcttctcccgccgcccagcttctctcttctctcggcggcgccaccacggcgatcaagcgcgatacgggcgtaaccgaagaatcgacaatgggcggcgagaaggaaacctttgatacgtccgacctcaacgcctccctccccgcggccgctgcagccctcagcgccgaggaccgcgccggcctcgtcaatgcccttaaggataagctgcagagcctggcgggccagcacgccgatgtgttagagacgctgtcgcccaatgttaggaagcgggttgagtttttgagagagatccagagtcaacacgatgaaattgaggccaagttttttgaagaacgagctgcccttgaggcaaagtaccagaagctttatgaacctttatacacaaagaggtatggaattgtaaatggagaagtggaggtagatggtgtttgtgatgaaccggccagtgagaatactgttgagggaaaagaaccagacgctaaaggagttccagacttttggcttactgccatgaaaacaaacgaggttttgtctgaggagatacaagagcgcgatgaagccgctttgaaatatctaaaagatatcaagtggtctagaatcgaggatcctaagggtttcaagctggattttttctttgatacaaacccattcttcaagaattctgtcctgacaaaaacgtaccacatggttgatgaagatgacccaattttggagaaagctattggaactgaaatcgagtggtatcctgggaaaaacctaacacagaagattctaaaaaagaaacctaaaaaaggttcaaagaatacgaagcctatcactaaaaccgaggactgtgagagtttcttcaactttttcaatcccccgcaggtccctgaagatgatgatgacatcgatgaagacactgctgatgagctgcagagtcaaatggagcatgattatgacattgggaccaccataagggataagattatccctcacgcagtttcctggtttactggtgaggctgtgcaaggtgaggattttggtgagttgggcgatgatgatgaagatgatgatgatgaagacgatgacgaagatgatgaggatgaagaagaggatgatgatgaggaagaggatgatgaggaagaaagcaagccagcaaggaagtcaggatctggtcgcagacataaggcgccacagaaggtgtcgcagggaaatgcggaacaaccagcggagtgcaagcagcagtagaatggcctgttgatgttggttgatgcagtattttccattgagctgcctagaggttatgtgtgcgcaggccagatgttggtgttgatatctcaagtgtggtttttattagtaggcggtgagggtgttgtctggagcactttggtgctgcgttggtggatggatattggtttgcaacttgtctgc

SEQ ID NO: 35729 - protein, 415 aa, Zea mays subsp. mays
  peptide (1)..(415): Ceres Seq. ID no. 13494862
  misc_feature (94)..(343): Pfam Name: NAP Pfam Description: Nucleosome assembly protein
  misc_feature (36)..(415): NCBI GI NO: 29569109 NR Description: nucleosome/chromatin assembly factor group A
  misc_feature (36)..(415): NCBI GI NO: 15224782 NR Description: nucleosome assembly protein -related
  misc_feature (45)..(415): NCBI GI NO: 2129840 NR Description: nucleosome assembly protein 1 - soybean
  misc_feature (36)..(415): NCBI GI NO: 18423918 NR Description: nucleosome assembly protein [Arabidopsis thaliana]
  misc_feature (36)..(415): NCBI GI NO: 8777435 NR Description: nucleosome assembly protein [Arabidopsis thaliana]
  misc_feature (36)..(415): NCBI GI NO: 549975 NR Description: nucleosome assembly protein I-like protein
  misc_feature (36)..(415): NCBI GI NO: 15236115 NR Description: nucleosome assembly protein I-related protein
  misc_feature (36)..(415): NCBI GI NO: 7488816 NR Description: nucleosome assembly protein 1 - garden pea
  misc_feature (36)..(403): NCBI GI NO: 21898560 NR Description: nucleosome/chromatin assembly factor group A
  misc_feature (30)..(366): NCBI GI NO: 15231361 NR Description: nucleosome assembly protein -related
GSSLSSSSPAAQLLSSLGGATTAIKRDTGVTEESTMGGEKETFDTSDLNASLPAAAAALSAEDRAGLVNALKDKLQSLAGQHADVLETLSPNVRKRVEFLREIQSQHDEIEAKFFEERAALEAKYQKLYEPLYTKRYGIVNGEVEVDGVCDEPASENTVEGKEPDAKGVPDFWLTAMKTNEVLSEEIQERDEAALKYLKDIKWSRIEDPKGFKLDFFFDTNPFFKNSVLTKTYHMVDEDDPILEKAIGTEIEWYPGKNLTQKILKKKPKKGSKNTKPITKTEDCESFFNFFNPPQVPEDDDDIDEDTADELQSQMEHDYDIGTTIRDKIIPHAVSWFTGEAVQGEDFGELGDDDEDDDDEDDDEDDEDEEEDDDEEEDDEEESKPARKSGSGRRHKAPQKVSQGNAEQPAECKQQ

SEQ ID NO: 35730 - protein, 380 aa, Zea mays subsp. mays
  peptide (1)..(380): Ceres Seq. ID no. 13494863
  misc_feature (59)..(308): Pfam Name: NAP Pfam Description: Nucleosome assembly protein
  misc_feature (1)..(380): NCBI GI NO: 29569109 NR Description: nucleosome/chromatin assembly factor group A
  misc_feature (1)..(380): NCBI GI NO: 15224782 NR Description: nucleosome assembly protein -related
  misc_feature (10)..(380): NCBI GI NO: 2129840 NR Description: nucleosome assembly protein 1 - soybean
  misc_feature (1)..(380): NCBI GI NO: 18423918 NR Description: nucleosome assembly protein [Arabidopsis thaliana]
  misc_feature (1)..(380): NCBI GI NO: 8777435 NR Description: nucleosome assembly protein [Arabidopsis thaliana]
  misc_feature (1)..(380): NCBI GI NO: 549975 NR Description: nucleosome assembly protein I-like protein
  misc_feature (1)..(380): NCBI GI NO: 15236115 NR Description: nucleosome assembly protein I-related protein
  misc_feature (1)..(380): NCBI GI NO: 7488816 NR Description: nucleosome assembly protein 1 - garden pea
  misc_feature (1)..(368): NCBI GI NO: 21898560 NR Description: nucleosome/chromatin assembly factor group A
  misc_feature (1)..(331): NCBI GI NO: 15231361 NR Description: nucleosome assembly protein -related
MGGEKETFDTSDLNASLPAAAAALSAEDRAGLVNALKDKLQSLAGQHADVLETLSPNVRKRVEFLREIQSQHDEIEAKFFEERAALEAKYQKLYEPLYTKRYGIVNGEVEVDGVCDEPASENTVEGKEPDAKGVPDFWLTAMKTNEVLSEEIQERDEAALKYLKDIKWSRIEDPKGFKLDFFFDTNPFFKNSVLTKTYHMVDEDDPILEKAIGTEIEWYPGKNLTQKILKKKPKKGSKNTKPITKTEDCESFFNFFNPPQVPEDDDDIDEDTADELQSQMEHDYDIGTTIRDKIIPHAVSWFTGEAVQGEDFGELGDDDEDDDDEDDDEDDEDEEEDDDEEEDDEEESKPARKSGSGRRHKAPQKVSQGNAEQPAECKQQ

SEQ ID NO: 35731 - protein, 239 aa, Zea mays subsp. mays
  peptide (1)..(239): Ceres Seq. ID no. 13494864
  misc_feature (1)..(167): Pfam Name: NAP Pfam Description: Nucleosome assembly protein
  misc_feature (1)..(239): NCBI GI NO: 29569109 NR Description: nucleosome/chromatin assembly factor group A
  misc_feature (1)..(239): NCBI GI NO: 15224782 NR Description: nucleosome assembly protein -related
  misc_feature (1)..(239): NCBI GI NO: 2129840 NR Description: nucleosome assembly protein 1 - soybean
  misc_feature (1)..(239): NCBI GI NO: 18423918 NR Description: nucleosome assembly protein [Arabidopsis thaliana]
  misc_feature (1)..(239): NCBI GI NO: 8777435 NR Description: nucleosome assembly protein [Arabidopsis thaliana]
  misc_feature (1)..(239): NCBI GI NO: 549975 NR Description: nucleosome assembly protein I-like protein
  misc_feature (1)..(239): NCBI GI NO: 15236115 NR Description: nucleosome assembly protein I-related protein
  misc_feature (1)..(239): NCBI GI NO: 7488816 NR Description: nucleosome assembly protein 1 - garden pea
  misc_feature (1)..(227): NCBI GI NO: 21898560 NR Description: nucleosome/chromatin assembly factor group A
  misc_feature (1)..(190): NCBI GI NO: 15231361 NR Description: nucleosome assembly protein -related
MKTNEVLSEEIQERDEAALKYLKDIKWSRIEDPKGFKLDFFFDTNPFFKNSVLTKTYHMVDEDDPILEKAIGTEIEWYPGKNLTQKILKKKPKKGSKNTKPITKTEDCESFFNFFNPPQVPEDDDDIDEDTADELQSQMEHDYDIGTTIRDKIIPHAVSWFTGEAVQGEDFGELGDDDEDDDDEDDDEDDEDEEEDDDEEEDDEEESKPARKSGSGRRHKAPQKVSQGNAEQPAECKQQ

SEQ ID NO: 35732 - DNA, 998 bp, Zea mays subsp. mays
  misc_feature (1)..(998): Ceres Seq. ID no. 12420272
agcctctcttactctccgccgtcgccctgctcgcccgaagcagctgccggcaaaatggccccgaagagaggcggtagggcgccggtccccgccaagaagaaggcggtggtgacgaacccgctcttcgagaagaggccgaagcagtttgggatcggcggcgcccttccgcccaagaaggacctccaccgcttcgtcaagtggcccaaggtcgtgcgcatccagcgccagcgccgcatcctcaagcagcgcctcaaggtgcccccggcgctcaaccagttcacacgtaccctcgacaagaaccttgcaacaaacttgttcaagatgcttcttaagtaccgccccgaggacaaagctgccaagaaggagaggctcttgaagagggcccaggctgaaaacgaggggaaaactgttgagtcaaagaaaccaattgttgtgaagtacggccttaaccatgtgacttacctcatcgagcagagcaaggcccagctggttgtcatagctcatgatgttgatccgatcgagctggttgtgtggctcccggccctttgcaggaaaatggaggttccatactgcattgtcaagggaaaagcacgccttggatcgatcgttcacaagaagactgcatctgttctttgcttgaccaccgtcaagaacgaggacaagcttgagttcagcaaaatcttggaggctatcaaggctaacttcaacgacaagtttgatgaggtcaggaagaagtggggtggtggtatcatgggctccaaatcacaggcgaaaaccaggccagggaaaagctgcttgccaaggaagctgcccagcggatgacctaagtcttgccctgttaaattaaaattttcttgtacttgcgatcgtgtgcaatcccggtggttgtcagatctagtttttgagagttttgcttgagaaagaccgagtcaccgaccatgacagaaagacatcatgtaagaattcaagttttggttctgtaccatctagttcatgtg

SEQ ID NO: 35733 - protein, 273 aa, Zea mays subsp. mays
  peptide (1)..(273): Ceres Seq. ID no. 12420273
  misc_feature (130)..(225): Pfam Name: Pfam Description:  Ribosomal protein L7Ae/L30e/S12e/Gadd45 family
  misc_feature (19)..(269): NCBI GI NO: 548774 NR Description: 60S RIBOSOMAL PROTEIN L7A
  misc_feature (19)..(260): NCBI GI NO: 15226635 NR Description: 60S ribosomal protein L7A; protein id: At2g47610
  misc_feature (19)..(260): NCBI GI NO: 15229338 NR Description: 60S RIBOSOMAL PROTEIN L7A protein
  misc_feature (7)..(269): NCBI GI NO: 20161741 NR Description: putative 60S ribosomal protein
  misc_feature (18)..(258): NCBI GI NO: 17530825 NR Description: Ribosomal protein L7A CG3314-PD
  misc_feature (18)..(258): NCBI GI NO: 1173062 NR Description: 60S RIBOSOMAL PROTEIN L7A
  misc_feature (19)..(257): NCBI GI NO: 19112624 NR Description: 60s ribosomal protein L7a (L8)
  misc_feature (2)..(258): NCBI GI NO: 34853132 NR Description: similar to 60S ribosomal protein L7a
  misc_feature (17)..(258): NCBI GI NO: 4506661 NR Description: ribosomal protein L7a
  misc_feature (17)..(258): NCBI GI NO: 7305443 NR Description: ribosomal protein L7a; surfeit 3 [Mus musculus]
SLSYSPPSPCSPEAAAGKMAPKRGGRAPVPAKKKAVVTNPLFEKRPKQFGIGGALPPKKDLHRFVKWPKVVRIQRQRRILKQRLKVPPALNQFTRTLDKNLATNLFKMLLKYRPEDKAAKKERLLKRAQAENEGKTVESKKPIVVKYGLNHVTYLIEQSKAQLVVIAHDVDPIELVVWLPALCRKMEVPYCIVKGKARLGSIVHKKTASVLCLTTVKNEDKLEFSKILEAIKANFNDKFDEVRKKWGGGIMGSKSQAKTRPGKSCLPRKLPSG

SEQ ID NO: 35734 - protein, 255 aa, Zea mays subsp. mays
  peptide (1)..(255): Ceres Seq. ID no. 12420274
  misc_feature (112)..(207): Pfam Name: Pfam Description:  Ribosomal protein L7Ae/L30e/S12e/Gadd45 family
  misc_feature (1)..(251): NCBI GI NO: 548774 NR Description: 60S RIBOSOMAL PROTEIN L7A
  misc_feature (1)..(242): NCBI GI NO: 15226635 NR Description: 60S ribosomal protein L7A; protein id: At2g47610
  misc_feature (1)..(242): NCBI GI NO: 15229338 NR Description: 60S RIBOSOMAL PROTEIN L7A protein
  misc_feature (1)..(251): NCBI GI NO: 20161741 NR Description: putative 60S ribosomal protein
  misc_feature (1)..(240): NCBI GI NO: 17530825 NR Description: Ribosomal protein L7A CG3314-PD
  misc_feature (1)..(240): NCBI GI NO: 1173062 NR Description: 60S RIBOSOMAL PROTEIN L7A
  misc_feature (1)..(239): NCBI GI NO: 19112624 NR Description: 60s ribosomal protein L7a (L8)
  misc_feature (1)..(240): NCBI GI NO: 34853132 NR Description: similar to 60S ribosomal protein L7a
  misc_feature (1)..(240): NCBI GI NO: 4506661 NR Description: ribosomal protein L7a
  misc_feature (1)..(240): NCBI GI NO: 7305443 NR Description: ribosomal protein L7a; surfeit 3 [Mus musculus]
MAPKRGGRAPVPAKKKAVVTNPLFEKRPKQFGIGGALPPKKDLHRFVKWPKVVRIQRQRRILKQRLKVPPALNQFTRTLDKNLATNLFKMLLKYRPEDKAAKKERLLKRAQAENEGKTVESKKPIVVKYGLNHVTYLIEQSKAQLVVIAHDVDPIELVVWLPALCRKMEVPYCIVKGKARLGSIVHKKTASVLCLTTVKNEDKLEFSKILEAIKANFNDKFDEVRKKWGGGIMGSKSQAKTRPGKSCLPRKLPSG

SEQ ID NO: 35735 - protein, 166 aa, Zea mays subsp. mays
  peptide (1)..(166): Ceres Seq. ID no. 12420275
  misc_feature (23)..(118): Pfam Name: Pfam Description:  Ribosomal protein L7Ae/L30e/S12e/Gadd45 family
  misc_feature (1)..(162): NCBI GI NO: 548774 NR Description: 60S RIBOSOMAL PROTEIN L7A
  misc_feature (1)..(153): NCBI GI NO: 15226635 NR Description: 60S ribosomal protein L7A; protein id: At2g47610
  misc_feature (1)..(153): NCBI GI NO: 15229338 NR Description: 60S RIBOSOMAL PROTEIN L7A protein
  misc_feature (1)..(162): NCBI GI NO: 20161741 NR Description: putative 60S ribosomal protein
  misc_feature (1)..(151): NCBI GI NO: 17530825 NR Description: Ribosomal protein L7A CG3314-PD
  misc_feature (1)..(151): NCBI GI NO: 1173062 NR Description: 60S RIBOSOMAL PROTEIN L7A
  misc_feature (1)..(150): NCBI GI NO: 19112624 NR Description: 60s ribosomal protein L7a (L8)
  misc_feature (1)..(151): NCBI GI NO: 34853132 NR Description: similar to 60S ribosomal protein L7a
  misc_feature (1)..(151): NCBI GI NO: 4506661 NR Description: ribosomal protein L7a
  misc_feature (1)..(151): NCBI GI NO: 7305443 NR Description: ribosomal protein L7a; surfeit 3 [Mus musculus]
MLLKYRPEDKAAKKERLLKRAQAENEGKTVESKKPIVVKYGLNHVTYLIEQSKAQLVVIAHDVDPIELVVWLPALCRKMEVPYCIVKGKARLGSIVHKKTASVLCLTTVKNEDKLEFSKILEAIKANFNDKFDEVRKKWGGGIMGSKSQAKTRPGKSCLPRKLPSG

SEQ ID NO: 35736 - DNA, 855 bp, Zea mays subsp. mays
  misc_feature (1)..(855): Ceres Seq. ID no. 12420264
aatttctttattctacttgtacattctgaataatctcatgtatcttgcagctctgaatgatgcactaaagcaggagctggagaggcttaagcttgttactgggtgagatgaccaattccagtgagacatataacatgagatttcagcatattccatacaactcttccttctttccgctttcccagcaaaatgcatctccacaccctggtaccacccagttgccaccaccgttccacccaccccatcccaatgtgccaaaccaccagatgctgtcccacccaaacgctctcccagacataatgcagcaagagtctcttggacggctgcagggtttggacattggaaaggggccactggttgtcaagtcagagagcagctcgatctctgctagtgaaagcagcagcaccttctaacgaggcctaccaatgagaatctgccgtttcaatacgtcccattgttcataatagcctgacatccttgtgctgcttcctgctctgtaagcttatttgttatttaattcattcaattagttgaaattgttccttgtcgcactggcagatcgatccatgttgtagaatgatccaggaacccttctagtctgtttatgttttgggaccatttcatgtttatgtgttcggtattagggcatttggattttggagtgaaattctctgatgatacttttgttgtgttgagccatgttgactgcatgaatcctcttttgaacatactcactctgtaccaaattcgttttaggccaatggtggattcatgaaagacttgttgaatgtattttatgtgtctatattcatcctcactcatttgaatatagacaaaaactactcctttcgttcc

SEQ ID NO: 35737 - protein, 101 aa, Zea mays subsp. mays
  peptide (1)..(101): Ceres Seq. ID no. 12420265
  misc_feature (1)..(101): NCBI GI NO: 39579226 NR Description: bZIP transcription factor RF2b
  misc_feature (1)..(101): NCBI GI NO: 34394739 NR Description: putative transcription activator RF2a
MTNSSETYNMRFQHIPYNSSFFPLSQQNASPHPGTTQLPPPFHPPHPNVPNHQMLSHPNALPDIMQQESLGRLQGLDIGKGPLVVKSESSSISASESSSTF

SEQ ID NO: 35738 - protein, 92 aa, Zea mays subsp. mays
  peptide (1)..(92): Ceres Seq. ID no. 12420266
  misc_feature (1)..(92): NCBI GI NO: 39579226 NR Description: bZIP transcription factor RF2b
  misc_feature (1)..(92): NCBI GI NO: 34394739 NR Description: putative transcription activator RF2a
MRFQHIPYNSSFFPLSQQNASPHPGTTQLPPPFHPPHPNVPNHQMLSHPNALPDIMQQESLGRLQGLDIGKGPLVVKSESSSISASESSSTF

SEQ ID NO: 35739 - protein, 56 aa, Zea mays subsp. mays
  peptide (1)..(56): Ceres Seq. ID no. 12420267
MFWDHFMFMCSVLGHLDFGVKFSDDTFVVLSHVDCMNPLLNILTLYQIRFRPMVDS

SEQ ID NO: 35740 - DNA, 637 bp, Zea mays subsp. mays
  misc_feature (1)..(637): Ceres Seq. ID no. 12420260
aaagatccagatttgacaacttttgtatgtgtttgtatcccggaatttctttcattgtatgaaacagagagatggtgcaagagttagcaaagtttgagattgattcgcacaacattattattaatcaagttatatttgatgaggaagttgtcgagtcaaaattgctaaaagcacggataaaaatgcaacagaaatacattgaccagttccatatgttatatgatgacttcaacatcaccaaacttcccttgctttcagaagaggtttgtggtgttcaagctctacaaaacttttcccaccgcttccttacaccatacaagtctgctcgtaaaaggggcaccatcgaggagctggaggagagaataactatactaaaatctgcattgcaagaagctgaggcagaattagataggattaggaaaggaaagcagtcagcgtgatccttttcccccataggttaaggtatgtaaagcctggcagaagctactaagaaaacagagttagagagacgctcaaatgtcattacactcttgttgatttcactaccatgtttcctcatcgaaatgtttagatttgtcatagctatcggaagagaagtgtttgattcacacgagatatatataggtccattcttttt

SEQ ID NO: 35741 - protein, 122 aa, Zea mays subsp. mays
  peptide (1)..(122): Ceres Seq. ID no. 12420261
  misc_feature (1)..(80): Pfam Name: Pfam Description:  Anion-transporting ATPase
  misc_feature (1)..(118): NCBI GI NO: 18378897 NR Description: arsA homolog
  misc_feature (1)..(118): NCBI GI NO: 25290846 NR Description: hypothetical protein F22M8.4
  misc_feature (1)..(83): NCBI GI NO: 4757796 NR Description: arsA arsenite transporter, ATP-binding, homolog 1
  misc_feature (1)..(83): NCBI GI NO: 26358207 NR Description: unnamed protein product [Mus musculus]
  misc_feature (1)..(83): NCBI GI NO: 17391018 NR Description: Unknown (protein for MGC:28999) [Mus musculus]
  misc_feature (1)..(83): NCBI GI NO: 2905657 NR Description: arsenite translocating ATPase [Homo sapiens]
  misc_feature (1)..(83): NCBI GI NO: 12025542 NR Description: arsA
  misc_feature (1)..(83): NCBI GI NO: 6647417 NR Description: Arsenical pump-driving ATPase
  misc_feature (1)..(82): NCBI GI NO: 40744304 NR Description: conserved hypothetical protein
  misc_feature (1)..(82): NCBI GI NO: 24586297 NR Description: CG1598-PA [Drosophila melanogaster]
MVQELAKFEIDSHNIIINQVIFDEEVVESKLLKARIKMQQKYIDQFHMLYDDFNITKLPLLSEEVCGVQALQNFSHRFLTPYKSARKRGTIEELEERITILKSALQEAEAELDRIRKGKQSA

SEQ ID NO: 35742 - protein, 85 aa, Zea mays subsp. mays
  peptide (1)..(85): Ceres Seq. ID no. 12420262
  misc_feature (1)..(81): NCBI GI NO: 18378897 NR Description: arsA homolog
  misc_feature (1)..(81): NCBI GI NO: 25290846 NR Description: hypothetical protein F22M8.4
  misc_feature (1)..(46): NCBI GI NO: 4757796 NR Description: arsA arsenite transporter, ATP-binding, homolog 1
  misc_feature (1)..(46): NCBI GI NO: 17391018 NR Description: Unknown (protein for MGC:28999) [Mus musculus]
  misc_feature (1)..(46): NCBI GI NO: 26358207 NR Description: unnamed protein product [Mus musculus]
  misc_feature (1)..(46): NCBI GI NO: 2905657 NR Description: arsenite translocating ATPase [Homo sapiens]
  misc_feature (1)..(46): NCBI GI NO: 6647417 NR Description: Arsenical pump-driving ATPase
  misc_feature (1)..(46): NCBI GI NO: 12025542 NR Description: arsA
  misc_feature (1)..(45): NCBI GI NO: 40744304 NR Description: conserved hypothetical protein
  misc_feature (1)..(45): NCBI GI NO: 24586297 NR Description: CG1598-PA [Drosophila melanogaster]
MQQKYIDQFHMLYDDFNITKLPLLSEEVCGVQALQNFSHRFLTPYKSARKRGTIEELEERITILKSALQEAEAELDRIRKGKQSA

SEQ ID NO: 35743 - protein, 75 aa, Zea mays subsp. mays
  peptide (1)..(75): Ceres Seq. ID no. 12420263
  misc_feature (1)..(71): NCBI GI NO: 18378897 NR Description: arsA homolog
  misc_feature (1)..(71): NCBI GI NO: 25290846 NR Description: hypothetical protein F22M8.4
  misc_feature (1)..(36): NCBI GI NO: 4757796 NR Description: arsA arsenite transporter, ATP-binding, homolog 1
  misc_feature (1)..(36): NCBI GI NO: 17391018 NR Description: Unknown (protein for MGC:28999) [Mus musculus]
  misc_feature (1)..(36): NCBI GI NO: 26358207 NR Description: unnamed protein product [Mus musculus]
  misc_feature (1)..(36): NCBI GI NO: 2905657 NR Description: arsenite translocating ATPase [Homo sapiens]
  misc_feature (1)..(36): NCBI GI NO: 12025542 NR Description: arsA
  misc_feature (1)..(36): NCBI GI NO: 6647417 NR Description: Arsenical pump-driving ATPase
  misc_feature (1)..(35): NCBI GI NO: 40744304 NR Description: conserved hypothetical protein
  misc_feature (1)..(35): NCBI GI NO: 24586297 NR Description: CG1598-PA [Drosophila melanogaster]
MLYDDFNITKLPLLSEEVCGVQALQNFSHRFLTPYKSARKRGTIEELEERITILKSALQEAEAELDRIRKGKQSA

SEQ ID NO: 35744 - DNA, 1063 bp, Zea mays subsp. mays
  misc_feature (1)..(1063): Ceres Seq. ID no. 12467899
gaagccctgcaacgatacgaatgatattccaacagtccagtcgtcggtgtccgtgagagatgtgggcacagagatgactccaatacctagccaggaaccttcaagaactggaactccactagggtcaaggacaccaactcgaagccctaactgttcagtaccgtcaacacctgtaggggggaggtcaatagcatctcctcctggagaagactgcacagacgatggcccatttttccacaggaaatgcggcgtacatgcaaatgaattgtcagatactgagacgaggcttaaaacaaggcaagaaatcgctgcgcttggcatacagctaggaaagatgaacattgctacgtgggccagcaaagaggagctagagctagtctctgcggcaccgagcatcgctgatttggagcgcatcaggaaggaatatgctgctcgtgctgcatcgtatgaggaggcagaaaatactaaacatacagcaagattcaaaaaagaagaggtgaagattgaagcttgggagggtcgtcaaagagcaaaaattgaatatgaaatgagaagaatagaggaatttgctgagagaatgagaagtgaggccatggaaaagatggccgaaaagctagagatgacgcgccgcatagccgaagagaaacgagcttcggccaacgccaaaatgaaccagcaagcagctatagcggttcagaaggccgagaagattcgccaaacgggacgagtcccaggatcgagtatcctacgctgcggtggctgcttctgtggaccgtagtagatcatacataggattcgacagctagtatgttggtctgggatatatagtggtgggaaacctgaactccaccctccaacaagtcagcattccttgattttagcatgaaaaaaggaatgtctctaaggtattcagatgcaaacgtgttcttgtttgtcatgtatgtaaattattccaatgattttaacttgggtcggtgtacaaggtaaccagctgttcgttggttaacgaagaagtcacgaatcgttcaaacattatgtttattattaaaaaaaaaaaaaaaaa

SEQ ID NO: 35745 - protein, 258 aa, Zea mays subsp. mays
  peptide (1)..(258): Ceres Seq. ID no. 12467900
  misc_feature (141)..(247): Pfam Name: Pfam Description:  Remorin, C-terminal region
  misc_feature (1)..(256): NCBI GI NO: 38344336 NR Description: OSJNBa0058K23.18
  misc_feature (15)..(255): NCBI GI NO: 15220725 NR Description: hypothetical protein; protein id: At1g30320.1
  misc_feature (10)..(256): NCBI GI NO: 18395321 NR Description: expressed protein; protein id: At2g02170
  misc_feature (144)..(256): NCBI GI NO: 18408804 NR Description: expressed protein; protein id: At1g67590
  misc_feature (144)..(256): NCBI GI NO: 21536537 NR Description: unknown [Arabidopsis thaliana]
  misc_feature (144)..(256): NCBI GI NO: 28393368 NR Description: unknown protein [Arabidopsis thaliana]
  misc_feature (10)..(49): NCBI GI NO: 18408804 NR Description: expressed protein; protein id: At1g67590
  misc_feature (10)..(49): NCBI GI NO: 28393368 NR Description: unknown protein [Arabidopsis thaliana]
  misc_feature (10)..(49): NCBI GI NO: 21536537 NR Description: unknown [Arabidopsis thaliana]
  misc_feature (13)..(256): NCBI GI NO: 34902218 NR Description: Unknown protein
KPCNDTNDIPTVQSSVSVRDVGTEMTPIPSQEPSRTGTPLGSRTPTRSPNCSVPSTPVGGRSIASPPGEDCTDDGPFFHRKCGVHANELSDTETRLKTRQEIAALGIQLGKMNIATWASKEELELVSAAPSIADLERIRKEYAARAASYEEAENTKHTARFKKEEVKIEAWEGRQRAKIEYEMRRIEEFAERMRSEAMEKMAEKLEMTRRIAEEKRASANAKMNQQAAIAVQKAEKIRQTGRVPGSSILRCGGCFCGP

SEQ ID NO: 35746 - protein, 234 aa, Zea mays subsp. mays
  peptide (1)..(234): Ceres Seq. ID no. 12467901
  misc_feature (117)..(223): Pfam Name: Pfam Description:  Remorin, C-terminal region
  misc_feature (1)..(232): NCBI GI NO: 38344336 NR Description: OSJNBa0058K23.18
  misc_feature (1)..(231): NCBI GI NO: 15220725 NR Description: hypothetical protein; protein id: At1g30320.1
  misc_feature (1)..(232): NCBI GI NO: 18395321 NR Description: expressed protein; protein id: At2g02170
  misc_feature (120)..(232): NCBI GI NO: 18408804 NR Description: expressed protein; protein id: At1g67590
  misc_feature (120)..(232): NCBI GI NO: 21536537 NR Description: unknown [Arabidopsis thaliana]
  misc_feature (120)..(232): NCBI GI NO: 28393368 NR Description: unknown protein [Arabidopsis thaliana]
  misc_feature (1)..(25): NCBI GI NO: 18408804 NR Description: expressed protein; protein id: At1g67590
  misc_feature (1)..(25): NCBI GI NO: 21536537 NR Description: unknown [Arabidopsis thaliana]
  misc_feature (1)..(25): NCBI GI NO: 28393368 NR Description: unknown protein [Arabidopsis thaliana]
  misc_feature (1)..(232): NCBI GI NO: 34902218 NR Description: Unknown protein
MTPIPSQEPSRTGTPLGSRTPTRSPNCSVPSTPVGGRSIASPPGEDCTDDGPFFHRKCGVHANELSDTETRLKTRQEIAALGIQLGKMNIATWASKEELELVSAAPSIADLERIRKEYAARAASYEEAENTKHTARFKKEEVKIEAWEGRQRAKIEYEMRRIEEFAERMRSEAMEKMAEKLEMTRRIAEEKRASANAKMNQQAAIAVQKAEKIRQTGRVPGSSILRCGGCFCGP

SEQ ID NO: 35747 - protein, 147 aa, Zea mays subsp. mays
  peptide (1)..(147): Ceres Seq. ID no. 12467902
  misc_feature (30)..(136): Pfam Name: Pfam Description:  Remorin, C-terminal region
  misc_feature (1)..(145): NCBI GI NO: 38344336 NR Description: OSJNBa0058K23.18
  misc_feature (1)..(144): NCBI GI NO: 15220725 NR Description: hypothetical protein; protein id: At1g30320.1
  misc_feature (1)..(145): NCBI GI NO: 18395321 NR Description: expressed protein; protein id: At2g02170
  misc_feature (33)..(145): NCBI GI NO: 18408804 NR Description: expressed protein; protein id: At1g67590
  misc_feature (33)..(145): NCBI GI NO: 21536537 NR Description: unknown [Arabidopsis thaliana]
  misc_feature (33)..(145): NCBI GI NO: 28393368 NR Description: unknown protein [Arabidopsis thaliana]
  misc_feature (1)..(145): NCBI GI NO: 34902218 NR Description: Unknown protein
  misc_feature (21)..(144): NCBI GI NO: 601843 NR Description: DNA-binding protein
  misc_feature (21)..(144): NCBI GI NO: 15225899 NR Description: remorin; protein id: At2g45820
  misc_feature (1)..(133): NCBI GI NO: 30103007 NR Description: remorin-like protein
MNIATWASKEELELVSAAPSIADLERIRKEYAARAASYEEAENTKHTARFKKEEVKIEAWEGRQRAKIEYEMRRIEEFAERMRSEAMEKMAEKLEMTRRIAEEKRASANAKMNQQAAIAVQKAEKIRQTGRVPGSSILRCGGCFCGP

SEQ ID NO: 35748 - DNA, 2238 bp, Zea mays subsp. mays
  misc_feature (1)..(2238): Ceres Seq. ID no. 12436409
  misc_feature (1248)..(1248): n is a, c, t, g, unknown, or other
aaaaataatcatacctggtatgctaaatcgaaacaggagggagtctgtagtagtccagttcacaagtagcggcagctagctgctgttggctgttgcccttctccgaaagaaaactactcgagctgaggcggagtagccaaggagaagtcaatgccgttctagcagtccagctttcacatggagcaggtcaaacaccttattacgcttgacgctttgcagcagcgatctcgatctgtggaggattgcatcaacctgacaatctctcgagttcttcacctcctctctcccaacggcatccattcagcccttggatgaccaggcatggccgtgggaggcccctcctggcccaatttgcagtgcctggtgcggcggaagccggcgaccgctggctgggccgaagacgctgacaggggaggtgtccagcgcctcgccaagacgctatctattccccacctcgtcgccatcggtgtcggctcgacgattggcgccggcatctatgtcctggttggaaccgtggctcgtgagcacaccgggccgggactgacgctctcctttctgatagccggcgtcgccgcggctctttcagcattgtgctatgccgagctctcctgccgtttcccttcggcagggagtgcctatcactactcctacatctgcattggggagagtgttgcttggctgattgggtgggccttgatccttgagtacaccattggggggtcatcagtggcacgtggcatgtcaccaaacttggctctatttttcggtggccaagataagttgccattctttctagcacaggtgcatgtcaaaggcctcgacaccccagttgatccatgtgctgctattcttgtcctgatagttactgcattactctgtctgggaattaaagagagctcatctgtggaaggcatcatcaccactgcaaatatcatagtgatgctctttgtcatctgcgctggtggatggctaggattcaggaatggctgggttggttataaagtgccagaaggttatttccctaatggtatcagcggagttctctctggatcagcaacccctcttcttcgcattcattggcttcgacacagttgctagtacggccgaggaggtgaagaatcctcgacgcgatcttccattgggtatgggcctgaccttatccctgtgttgcttcctatatatgatggtttctgctgttgtggtcggtttggtgccgtaccacgcgatggatccggacacccctatttnttctgtgtttgcgcgatatgggatgcagtgggccgagtatgttgtttccagtggagctgttcttgctcttgtggcatccttgataggtggtattcttccccagccaagaattataatggccatggctagagatggattgctcccgccactgttctcagatgttaatcgaaaaactcaagtgccaatcttgagcacagtcttaattggcacatgtgcttctgtcctggcctttttcatggatgtctcccaattggcagggatggtaagcgtgggaaccttattggcatttactgcggttgccatttctgttttagtagtaagatatgctcctccgtatgagatgccaatggaagtggcccttgcagtagcttcattctctgggcacttagagcatgatgagcaaaattcagaagatccttttagcaatgttcaagaagcgcttgatgtcagtgaggtagccagagaagtaaggcgacagaaagccattggaagcatagtgttgatatgcgttggagccatcatcttgatttctgcggtttctgtctcctttttgccattttatgtgcaaaggatcgcatgcactgtaggcgggctggcagtgttgggttcttctattgtgcttttgtgcattggacaagacaagaagttcttgggacaaactggaggtttcatgtgcccgttggtcccatttcttccagtctgttgcatcatggtcaacttatacctgcttatgaacgtcgggagtcacacgtggattcgtgtttccatatggctggtggctggggccctcatatacatcttctatggcatgaagcatagttcactggcaagcatggcctaccatcgcatatcacctttgtagttcaacgtttggctagaggtcttttgcattttgatagcagaaaatgagaacacgtggcggctacagaagctgtttctcaaaggtgtcgggggcgggggtttcttaggctatccgcaagcgttaacccc

SEQ ID NO: 35749 - protein, 375 aa, Zea mays subsp. mays
  peptide (1)..(375): Ceres Seq. ID no. 12436410
  misc_feature (27)..(374): NCBI GI NO: 37534696 NR Description: putative cationic amino acid transporter -likeprotein
  misc_feature (27)..(256): NCBI GI NO: 30696198 NR Description: expressed protein [Arabidopsis thaliana]
  misc_feature (228)..(369): NCBI GI NO: 30696198 NR Description: expressed protein [Arabidopsis thaliana]
  misc_feature (27)..(256): NCBI GI NO: 23306414 NR Description: Unknown protein [Arabidopsis thaliana]
  misc_feature (228)..(369): NCBI GI NO: 23306414 NR Description: Unknown protein [Arabidopsis thaliana]
  misc_feature (27)..(223): NCBI GI NO: 29244640 NR Description: putative cationic amino acid transporter
  misc_feature (223)..(369): NCBI GI NO: 29244640 NR Description: putative cationic amino acid transporter
  misc_feature (27)..(369): NCBI GI NO: 30693001 NR Description: cationic amino acid transporter -related protein
  misc_feature (27)..(369): NCBI GI NO: 10178213 NR Description: cationic amino acid transporter-like protein
  misc_feature (27)..(369): NCBI GI NO: 22330822 NR Description: putative cationic amino acid transporter
  misc_feature (89)..(89): Xaa is any aa, unknown or other
MAGLVIKCQKVISLMVSAEFSLDQQPLFFAFIGFDTVASTAEEVKNPRRDLPLGMGLTLSLCCFLYMMVSAVVVGLVPYHAMDPDTPIXSVFARYGMQWAEYVVSSGAVLALVASLIGGILPQPRIIMAMARDGLLPPLFSDVNRKTQVPILSTVLIGTCASVLAFFMDVSQLAGMVSVGTLLAFTAVAISVLVVRYAPPYEMPMEVALAVASFSGHLEHDEQNSEDPFSNVQEALDVSEVAREVRRQKAIGSIVLICVGAIILISAVSVSFLPFYVQRIACTVGGLAVLGSSIVLLCIGQDKKFLGQTGGFMCPLVPFLPVCCIMVNLYLLMNVGSHTWIRVSIWLVAGALIYIFYGMKHSSLASMAYHRISPL

SEQ ID NO: 35750 - protein, 361 aa, Zea mays subsp. mays
  peptide (1)..(361): Ceres Seq. ID no. 12436411
  misc_feature (13)..(360): NCBI GI NO: 37534696 NR Description: putative cationic amino acid transporter -likeprotein
  misc_feature (13)..(242): NCBI GI NO: 30696198 NR Description: expressed protein [Arabidopsis thaliana]
  misc_feature (214)..(355): NCBI GI NO: 30696198 NR Description: expressed protein [Arabidopsis thaliana]
  misc_feature (13)..(242): NCBI GI NO: 23306414 NR Description: Unknown protein [Arabidopsis thaliana]
  misc_feature (214)..(355): NCBI GI NO: 23306414 NR Description: Unknown protein [Arabidopsis thaliana]
  misc_feature (13)..(209): NCBI GI NO: 29244640 NR Description: putative cationic amino acid transporter
  misc_feature (209)..(355): NCBI GI NO: 29244640 NR Description: putative cationic amino acid transporter
  misc_feature (13)..(355): NCBI GI NO: 30693001 NR Description: cationic amino acid transporter -related protein
  misc_feature (13)..(355): NCBI GI NO: 10178213 NR Description: cationic amino acid transporter-like protein
  misc_feature (13)..(355): NCBI GI NO: 22330822 NR Description: putative cationic amino acid transporter
  misc_feature (75)..(75): Xaa is any aa, unknown or other
MVSAEFSLDQQPLFFAFIGFDTVASTAEEVKNPRRDLPLGMGLTLSLCCFLYMMVSAVVVGLVPYHAMDPDTPIXSVFARYGMQWAEYVVSSGAVLALVASLIGGILPQPRIIMAMARDGLLPPLFSDVNRKTQVPILSTVLIGTCASVLAFFMDVSQLAGMVSVGTLLAFTAVAISVLVVRYAPPYEMPMEVALAVASFSGHLEHDEQNSEDPFSNVQEALDVSEVAREVRRQKAIGSIVLICVGAIILISAVSVSFLPFYVQRIACTVGGLAVLGSSIVLLCIGQDKKFLGQTGGFMCPLVPFLPVCCIMVNLYLLMNVGSHTWIRVSIWLVAGALIYIFYGMKHSSLASMAYHRISPL

SEQ ID NO: 35751 - protein, 321 aa, Zea mays subsp. mays
  peptide (1)..(321): Ceres Seq. ID no. 12436412
  misc_feature (1)..(320): NCBI GI NO: 37534696 NR Description: putative cationic amino acid transporter -likeprotein
  misc_feature (1)..(202): NCBI GI NO: 30696198 NR Description: expressed protein [Arabidopsis thaliana]
  misc_feature (174)..(315): NCBI GI NO: 30696198 NR Description: expressed protein [Arabidopsis thaliana]
  misc_feature (1)..(202): NCBI GI NO: 23306414 NR Description: Unknown protein [Arabidopsis thaliana]
  misc_feature (174)..(315): NCBI GI NO: 23306414 NR Description: Unknown protein [Arabidopsis thaliana]
  misc_feature (1)..(169): NCBI GI NO: 29244640 NR Description: putative cationic amino acid transporter
  misc_feature (169)..(315): NCBI GI NO: 29244640 NR Description: putative cationic amino acid transporter
  misc_feature (1)..(315): NCBI GI NO: 30693001 NR Description: cationic amino acid transporter -related protein
  misc_feature (1)..(315): NCBI GI NO: 10178213 NR Description: cationic amino acid transporter-like protein
  misc_feature (1)..(315): NCBI GI NO: 22330822 NR Description: putative cationic amino acid transporter
  misc_feature (35)..(35): Xaa is any aa, unknown or other
MGLTLSLCCFLYMMVSAVVVGLVPYHAMDPDTPIXSVFARYGMQWAEYVVSSGAVLALVASLIGGILPQPRIIMAMARDGLLPPLFSDVNRKTQVPILSTVLIGTCASVLAFFMDVSQLAGMVSVGTLLAFTAVAISVLVVRYAPPYEMPMEVALAVASFSGHLEHDEQNSEDPFSNVQEALDVSEVAREVRRQKAIGSIVLICVGAIILISAVSVSFLPFYVQRIACTVGGLAVLGSSIVLLCIGQDKKFLGQTGGFMCPLVPFLPVCCIMVNLYLLMNVGSHTWIRVSIWLVAGALIYIFYGMKHSSLASMAYHRISPL

SEQ ID NO: 35752 - DNA, 2161 bp, Zea mays subsp. mays
  misc_feature (1)..(2161): Ceres Seq. ID no. 12435871
cttttattagggtttttttgtctccttagatttgcgcctgttctcacctgtgcgcatactagtctctgcatcagagagtagagacctcggagccgatcttcaacacgcagattgggcagagctgcctgccggagggagagtggagagagagagagagagagagagagagagagctcaaggggggcaaaaggagtttttttttatccagcttgttagcttgattctctttgatccgggagagcagccgccagtccaactaatcctagctattggtgtgccggggctttgattgttctccagatccgagccacctgctgggtggactccaggaatccgagcacgaagttgacaggggagttctcagggaaaagttgcgcaggggaggaaggaagagcctgaaagggcggtgcggagagaaagactataagagcgacctgggtcccttgaggatgccgtcaagaaaccgcgtggagaggagggcgatgagatgagggatgctggccgcggtgatggactatttcagctcctgctggggcccgcgatcgggtgacgggcacagggggaagggccccgacgccgccggccggcaggacggtctcctctggtacaaggacgccggtcagctcgtcactggggagttctccatggccgtggtgcaggccaaccagctgcttgaggaccagagccaagtggagtccggatcgctctccctggctgacccgggcccgcagggcaccttcgtcggcgtctatgatggccatggcggtcctgagacgtcccggttcatcaatgaccacctcttcaaccatctcagaaggtttgcaactgagcacaagtttatgtcagcggacgtgatccggaaagctttccaagcaactgaggagggctttctttctctagtcagcaaggaatggtctttgaagcctcagattgcttcagtgggctcctgctgccttgttggtgtaatctgtgctgggactctctatgttgcaaacctgggtgactcacgtgcagttcttggaaggcttgttaaggcaactggagaggtcgtggccatgcagttgtcatcggagcacaatgcatgctatgaggaagttagacaagaactgcagtcatcacatcctgacgatccacatattgtggttctcaaacacaatgtttggcgagtgaagggtctcatccagatctcaagatctattggagatgtatatctaaagaaaccagagtataacagagaaccacttcacagcaagtttcggcttcgagaaaccttccagaggccgatccttagttctgaacctcaaattactgaacatcgaatacagccaaatgatcaatttgttatatttgcttctgatggtctatgggagcacctcaccaataaggaagcagttgaccttgtccaaagtagtccacgcaatggaattgctcggagactagtgaaagcggcgatgcaagaagctgccaagaagagggagatgagatactcagacctcaagaagatcgaccgtggtgtgagaaggcatttcctcgacgatataacggtcgtcgtggtattccttgatttgaatgccatgagcaaagctagctggagcaaaagcccctcggtttctctccgagggggcggtgtcaccgtccctgccaagtccctcgcacctttctcagctccggcacggctgaacagcacctactgaagttgctaccactcttgaaaggaagaacacggtgcagatctgcagtggtgagagaaaaaaaaaacagcaatcaagtgtagcgttacacttacacctgctgtgctgttgctctttgcaaaactactgtctagactcctggtaattagtgtactgatagcgaggtaaaaaaaagttagattatttgttagcagcggcagtgatttgacatctaaggaacaacaacacggtgcccaccgattctgctatcctgatggctcgcggcagcctggctggtcggcacacgacacgaagtgaagctgttttactggcggcatctggctttgttttctcatgggacagtgatccacaagagtaagggatcagctcaatccaaagtcaatagatgttccttataaaaaatagaggtacagatgttcccatcggctatgtgtatttggggaaaaaatcaatataaggggtgtttggtg

SEQ ID NO: 35753 - protein, 399 aa, Zea mays subsp. mays
  peptide (1)..(399): Ceres Seq. ID no. 12435872
  misc_feature (47)..(328): Pfam Name: Pfam Description:  Protein phosphatase 2C
  misc_feature (1)..(392): NCBI GI NO: 37536574 NR Description: putative protein phosphatase 2C
  misc_feature (6)..(392): NCBI GI NO: 13357263 NR Description: putative protein phosphatase 2C
  misc_feature (1)..(398): NCBI GI NO: 11282004 NR Description: protein phosphatase 2C homolog
  misc_feature (1)..(398): NCBI GI NO: 7768153 NR Description: protein phosphatase 2C (PP2C) [Fagus sylvatica]
  misc_feature (1)..(391): NCBI GI NO: 18855039 NR Description: putative protein phosphatase [Oryza sativa]
  misc_feature (1)..(384): NCBI GI NO: 20340237 NR Description: protein phosphatase 2c-like protein
  misc_feature (1)..(384): NCBI GI NO: 11282001 NR Description: protein phosphatase 2C-like protein
  misc_feature (1)..(384): NCBI GI NO: 15239244 NR Description: protein phosphatase 2C-like protein
  misc_feature (1)..(394): NCBI GI NO: 22329238 NR Description: putative protein phosphatase-2c
  misc_feature (1)..(394): NCBI GI NO: 17064756 NR Description: putative protein phosphatase-2c
MLAAVMDYFSSCWGPRSGDGHRGKGPDAAGRQDGLLWYKDAGQLVTGEFSMAVVQANQLLEDQSQVESGSLSLADPGPQGTFVGVYDGHGGPETSRFINDHLFNHLRRFATEHKFMSADVIRKAFQATEEGFLSLVSKEWSLKPQIASVGSCCLVGVICAGTLYVANLGDSRAVLGRLVKATGEVVAMQLSSEHNACYEEVRQELQSSHPDDPHIVVLKHNVWRVKGLIQISRSIGDVYLKKPEYNREPLHSKFRLRETFQRPILSSEPQITEHRIQPNDQFVIFASDGLWEHLTNKEAVDLVQSSPRNGIARRLVKAAMQEAAKKREMRYSDLKKIDRGVRRHFLDDITVVVVFLDLNAMSKASWSKSPSVSLRGGGVTVPAKSLAPFSAPARLNSTY

SEQ ID NO: 35754 - protein, 394 aa, Zea mays subsp. mays
  peptide (1)..(394): Ceres Seq. ID no. 12435873
  misc_feature (42)..(323): Pfam Name: Pfam Description:  Protein phosphatase 2C
  misc_feature (1)..(387): NCBI GI NO: 37536574 NR Description: putative protein phosphatase 2C
  misc_feature (1)..(387): NCBI GI NO: 13357263 NR Description: putative protein phosphatase 2C
  misc_feature (1)..(393): NCBI GI NO: 11282004 NR Description: protein phosphatase 2C homolog
  misc_feature (1)..(393): NCBI GI NO: 7768153 NR Description: protein phosphatase 2C (PP2C) [Fagus sylvatica]
  misc_feature (1)..(386): NCBI GI NO: 18855039 NR Description: putative protein phosphatase [Oryza sativa]
  misc_feature (1)..(379): NCBI GI NO: 20340237 NR Description: protein phosphatase 2c-like protein
  misc_feature (1)..(379): NCBI GI NO: 11282001 NR Description: protein phosphatase 2C-like protein
  misc_feature (1)..(379): NCBI GI NO: 15239244 NR Description: protein phosphatase 2C-like protein
  misc_feature (1)..(389): NCBI GI NO: 22329238 NR Description: putative protein phosphatase-2c
  misc_feature (1)..(389): NCBI GI NO: 17064756 NR Description: putative protein phosphatase-2c
MDYFSSCWGPRSGDGHRGKGPDAAGRQDGLLWYKDAGQLVTGEFSMAVVQANQLLEDQSQVESGSLSLADPGPQGTFVGVYDGHGGPETSRFINDHLFNHLRRFATEHKFMSADVIRKAFQATEEGFLSLVSKEWSLKPQIASVGSCCLVGVICAGTLYVANLGDSRAVLGRLVKATGEVVAMQLSSEHNACYEEVRQELQSSHPDDPHIVVLKHNVWRVKGLIQISRSIGDVYLKKPEYNREPLHSKFRLRETFQRPILSSEPQITEHRIQPNDQFVIFASDGLWEHLTNKEAVDLVQSSPRNGIARRLVKAAMQEAAKKREMRYSDLKKIDRGVRRHFLDDITVVVVFLDLNAMSKASWSKSPSVSLRGGGVTVPAKSLAPFSAPARLNSTY

SEQ ID NO: 35755 - protein, 349 aa, Zea mays subsp. mays
  peptide (1)..(349): Ceres Seq. ID no. 12435874
  misc_feature (1)..(278): Pfam Name: Pfam Description:  Protein phosphatase 2C
  misc_feature (1)..(342): NCBI GI NO: 37536574 NR Description: putative protein phosphatase 2C
  misc_feature (1)..(342): NCBI GI NO: 13357263 NR Description: putative protein phosphatase 2C
  misc_feature (1)..(348): NCBI GI NO: 11282004 NR Description: protein phosphatase 2C homolog
  misc_feature (1)..(348): NCBI GI NO: 7768153 NR Description: protein phosphatase 2C (PP2C) [Fagus sylvatica]
  misc_feature (1)..(341): NCBI GI NO: 18855039 NR Description: putative protein phosphatase [Oryza sativa]
  misc_feature (1)..(334): NCBI GI NO: 20340237 NR Description: protein phosphatase 2c-like protein
  misc_feature (1)..(334): NCBI GI NO: 11282001 NR Description: protein phosphatase 2C-like protein
  misc_feature (1)..(334): NCBI GI NO: 15239244 NR Description: protein phosphatase 2C-like protein
  misc_feature (1)..(344): NCBI GI NO: 22329238 NR Description: putative protein phosphatase-2c
  misc_feature (1)..(344): NCBI GI NO: 17064756 NR Description: putative protein phosphatase-2c
MAVVQANQLLEDQSQVESGSLSLADPGPQGTFVGVYDGHGGPETSRFINDHLFNHLRRFATEHKFMSADVIRKAFQATEEGFLSLVSKEWSLKPQIASVGSCCLVGVICAGTLYVANLGDSRAVLGRLVKATGEVVAMQLSSEHNACYEEVRQELQSSHPDDPHIVVLKHNVWRVKGLIQISRSIGDVYLKKPEYNREPLHSKFRLRETFQRPILSSEPQITEHRIQPNDQFVIFASDGLWEHLTNKEAVDLVQSSPRNGIARRLVKAAMQEAAKKREMRYSDLKKIDRGVRRHFLDDITVVVVFLDLNAMSKASWSKSPSVSLRGGGVTVPAKSLAPFSAPARLNSTY

SEQ ID NO: 35756 - DNA, 450 bp, Zea mays subsp. mays
  misc_feature (1)..(450): Ceres Seq. ID no. 13635772
gcttcatttaacgctgtcgctttcgctttcgcttccactcgcactccatgggtgcgcgggcgacgatgggatgttcgcccttgctgcccttccaagcgctctggctcacagcggccgttgtcgcggcgctcgcgctcgcggccggcgcgcagccgtcgccgtcgctgtcgccggggttctacgacgcgacgtgcccggggctgcagcccatcgtgcgccgcggcgtggcgcgcgccgtccgggcggagccgcgcatgggggcgtccctcctccgcctcttcttccacgactgcttcgtcaatggctgcgacgcctccgtcttgctggacgacgtgcccggtaacttcaccggggagaagaacgcggggcccaacgccaactcgctgcgcgggtacgaggtcatcgacgccatcaaggcccaggtggaggcgtcctgcaaggccaccgtct

SEQ ID NO: 35757 - protein, 150 aa, Zea mays subsp. mays
  peptide (1)..(150): Ceres Seq. ID no. 13635773
ASFNAVAFAFASTRTPWVRGRRWDVRPCCPSKRSGSQRPLSRRSRSRPARSRRRRCRRGSTTRRARGCSPSCAAAWRAPSGRSRAWGRPSSASSSTTASSMAATPPSCWTTCPVTSPGRRTRGPTPTRCAGTRSSTPSRPRWRRPARPPS

SEQ ID NO: 35758 - protein, 134 aa, Zea mays subsp. mays
  peptide (1)..(134): Ceres Seq. ID no. 13635774
  misc_feature (56)..(133): Pfam Name: Pfam Description:  Peroxidase
  misc_feature (22)..(133): NCBI GI NO: 34903770 NR Description: unnamed protein product
  misc_feature (20)..(133): NCBI GI NO: 5453379 NR Description: bacterial-induced peroxidase precursor
  misc_feature (17)..(133): NCBI GI NO: 2117619 NR Description: peroxidase (EC 1.11.1.7) 4 precursor - wheat
  misc_feature (20)..(133): NCBI GI NO: 34393249 NR Description: putative peroxidase precursor
  misc_feature (22)..(133): NCBI GI NO: 15237190 NR Description: peroxidase, putative [Arabidopsis thaliana]
  misc_feature (20)..(133): NCBI GI NO: 2429288 NR Description: peroxidase [Oryza sativa]
  misc_feature (20)..(133): NCBI GI NO: 34393250 NR Description: peroxidase
  misc_feature (40)..(130): NCBI GI NO: 4760704 NR Description: peroxidase 3 [Scutellaria baicalensis]
  misc_feature (27)..(133): NCBI GI NO: 7433049 NR Description: peroxidase (EC 1.11.1.7) - flax (fragment)
  misc_feature (31)..(133): NCBI GI NO: 34015359 NR Description: putative peroxidase
MGARATMGCSPLLPFQALWLTAAVVAALALAAGAQPSPSLSPGFYDATCPGLQPIVRRGVARAVRAEPRMGASLLRLFFHDCFVNGCDASVLLDDVPGNFTGEKNAGPNANSLRGYEVIDAIKAQVEASCKATV

SEQ ID NO: 35759 - protein, 128 aa, Zea mays subsp. mays
  peptide (1)..(128): Ceres Seq. ID no. 13635775
  misc_feature (50)..(127): Pfam Name: Pfam Description:  Peroxidase
  misc_feature (16)..(127): NCBI GI NO: 34903770 NR Description: unnamed protein product
  misc_feature (14)..(127): NCBI GI NO: 5453379 NR Description: bacterial-induced peroxidase precursor
  misc_feature (11)..(127): NCBI GI NO: 2117619 NR Description: peroxidase (EC 1.11.1.7) 4 precursor - wheat
  misc_feature (14)..(127): NCBI GI NO: 34393249 NR Description: putative peroxidase precursor
  misc_feature (16)..(127): NCBI GI NO: 15237190 NR Description: peroxidase, putative [Arabidopsis thaliana]
  misc_feature (14)..(127): NCBI GI NO: 2429288 NR Description: peroxidase [Oryza sativa]
  misc_feature (14)..(127): NCBI GI NO: 34393250 NR Description: peroxidase
  misc_feature (34)..(124): NCBI GI NO: 4760704 NR Description: peroxidase 3 [Scutellaria baicalensis]
  misc_feature (21)..(127): NCBI GI NO: 7433049 NR Description: peroxidase (EC 1.11.1.7) - flax (fragment)
  misc_feature (25)..(127): NCBI GI NO: 34015359 NR Description: putative peroxidase
MGCSPLLPFQALWLTAAVVAALALAAGAQPSPSLSPGFYDATCPGLQPIVRRGVARAVRAEPRMGASLLRLFFHDCFVNGCDASVLLDDVPGNFTGEKNAGPNANSLRGYEVIDAIKAQVEASCKATV

SEQ ID NO: 35760 - DNA, 1057 bp, Zea mays subsp. mays
  misc_feature (1)..(1057): Ceres Seq. ID no. 12435854
  misc_feature (1036)..(1036): n is a, c, t, g, unknown, or other
aacgaagccacaagcagcgccgcgagccacagctagcaccaccaccttgcaccgcacccgcaccgagacgaacagatctatcgatcgatagctagatccatggctgccggcggcgacgacaccaccatcgcgcaggtccacagcggcatcgacagcagcaacaagacgctgctcaagagcgaggccctctacaagtacgtgctggacacgtcggtgctgccgcacgagccggagagcatgcgtgagctgcggctggtgaccgacaagcacgagtgggggttcatgcagtcgtccccggacgaggcgtcgctgctgcggatgctgatcaagctgagcggcgcgcggcggacgctggaggtgggcgtgttcacgggctactcgctgctggcgacggcgctggcgctgcccgccgacggcaaggtcatcgcattcgacgtgagccgcgagtactacgacatcggccgccccttcatcgagcgcgccggggtggcgggcaaggtggacttccgggagggcccggcgctggagcagctggacgagctcctcgccgacccggccaaccacggcgccttcgacttcgcgttcgtcgacgccgacaagcctaactacgtccggtaccacgagcagctgctccgcctggtgcgcgtcgggggtaccgtcgtgtacgacaacacgctgtgggccggtactgtggcgcttccccccgacgcgccgctcagcgacctcgaccgcaggttctccgccgccatcagggaactcaacgtccggctttctcaggatccccgcgtcgaggtctgccagctcgccatcgccgacggcgtcaccatctgccgccgcgtcgtctgatgtgatgatgatccgacgaccaagatcgtatatcattcgctcgtcgtctctgtcatctttcaactgcctgcccgctgccgtcgtcaactaataatgcatggttctgctggttctttttttttattttcttttgtgcttgcattgtgtgtgttgagttgaacatcccccgcgatgtactgcaacaactggnatgcaatgcaacatcatgcgt

SEQ ID NO: 35761 - protein, 248 aa, Zea mays subsp. mays
  peptide (1)..(248): Ceres Seq. ID no. 12435855
  misc_feature (35)..(247): Pfam Name: Pfam Description:  O-methyltransferase
  misc_feature (1)..(248): NCBI GI NO: 5257275 NR Description: ESTs AU030740
  misc_feature (1)..(247): NCBI GI NO: 15235213 NR Description: caffeoyl-CoA 3-O-methyltransferase
  misc_feature (1)..(247): NCBI GI NO: 30580385 NR Description: Caffeoyl-CoA O-methyltransferase 1
  misc_feature (1)..(247): NCBI GI NO: 37221545 NR Description: caffeoyl-CoA 3-O-methyltransferase 1 [Zea mays]
  misc_feature (1)..(247): NCBI GI NO: 21595512 NR Description: caffeoyl-CoA O-methyltransferase-like protein
  misc_feature (1)..(248): NCBI GI NO: 40363753 NR Description: putative caffeoyl CoA O-methyltransferase
  misc_feature (14)..(247): NCBI GI NO: 30580384 NR Description: Caffeoyl-CoA O-methyltransferase 2
  misc_feature (21)..(247): NCBI GI NO: 30580324 NR Description: Caffeoyl-CoA O-methyltransferase 5
  misc_feature (21)..(247): NCBI GI NO: 2511737 NR Description: caffeoyl-CoA 3-O-methyltransferase 5
  misc_feature (1)..(247): NCBI GI NO: 30580381 NR Description: Caffeoyl-CoA O-methyltransferase 2
MAAGGDDTTIAQVHSGIDSSNKTLLKSEALYKYVLDTSVLPHEPESMRELRLVTDKHEWGFMQSSPDEASLLRMLIKLSGARRTLEVGVFTGYSLLATALALPADGKVIAFDVSREYYDIGRPFIERAGVAGKVDFREGPALEQLDELLADPANHGAFDFAFVDADKPNYVRYHEQLLRLVRVGGTVVYDNTLWAGTVALPPDAPLSDLDRRFSAAIRELNVRLSQDPRVEVCQLAIADGVTICRRVV

SEQ ID NO: 35762 - protein, 202 aa, Zea mays subsp. mays
  peptide (1)..(202): Ceres Seq. ID no. 12435856
  misc_feature (1)..(201): Pfam Name: Pfam Description:  O-methyltransferase
  misc_feature (1)..(202): NCBI GI NO: 5257275 NR Description: ESTs AU030740
  misc_feature (1)..(201): NCBI GI NO: 15235213 NR Description: caffeoyl-CoA 3-O-methyltransferase
  misc_feature (1)..(201): NCBI GI NO: 30580385 NR Description: Caffeoyl-CoA O-methyltransferase 1
  misc_feature (1)..(201): NCBI GI NO: 37221545 NR Description: caffeoyl-CoA 3-O-methyltransferase 1 [Zea mays]
  misc_feature (1)..(201): NCBI GI NO: 21595512 NR Description: caffeoyl-CoA O-methyltransferase-like protein
  misc_feature (1)..(202): NCBI GI NO: 40363753 NR Description: putative caffeoyl CoA O-methyltransferase
  misc_feature (1)..(201): NCBI GI NO: 30580384 NR Description: Caffeoyl-CoA O-methyltransferase 2
  misc_feature (1)..(201): NCBI GI NO: 30580324 NR Description: Caffeoyl-CoA O-methyltransferase 5
  misc_feature (1)..(201): NCBI GI NO: 2511737 NR Description: caffeoyl-CoA 3-O-methyltransferase 5
  misc_feature (1)..(201): NCBI GI NO: 30580381 NR Description: Caffeoyl-CoA O-methyltransferase 2
MRELRLVTDKHEWGFMQSSPDEASLLRMLIKLSGARRTLEVGVFTGYSLLATALALPADGKVIAFDVSREYYDIGRPFIERAGVAGKVDFREGPALEQLDELLADPANHGAFDFAFVDADKPNYVRYHEQLLRLVRVGGTVVYDNTLWAGTVALPPDAPLSDLDRRFSAAIRELNVRLSQDPRVEVCQLAIADGVTICRRVV

SEQ ID NO: 35763 - protein, 187 aa, Zea mays subsp. mays
  peptide (1)..(187): Ceres Seq. ID no. 12435857
  misc_feature (1)..(186): Pfam Name: Pfam Description:  O-methyltransferase
  misc_feature (1)..(187): NCBI GI NO: 5257275 NR Description: ESTs AU030740
  misc_feature (1)..(186): NCBI GI NO: 15235213 NR Description: caffeoyl-CoA 3-O-methyltransferase
  misc_feature (1)..(186): NCBI GI NO: 30580385 NR Description: Caffeoyl-CoA O-methyltransferase 1
  misc_feature (1)..(186): NCBI GI NO: 37221545 NR Description: caffeoyl-CoA 3-O-methyltransferase 1 [Zea mays]
  misc_feature (1)..(186): NCBI GI NO: 21595512 NR Description: caffeoyl-CoA O-methyltransferase-like protein
  misc_feature (1)..(187): NCBI GI NO: 40363753 NR Description: putative caffeoyl CoA O-methyltransferase
  misc_feature (1)..(186): NCBI GI NO: 30580384 NR Description: Caffeoyl-CoA O-methyltransferase 2
  misc_feature (1)..(186): NCBI GI NO: 30580324 NR Description: Caffeoyl-CoA O-methyltransferase 5
  misc_feature (1)..(186): NCBI GI NO: 2511737 NR Description: caffeoyl-CoA 3-O-methyltransferase 5
  misc_feature (1)..(186): NCBI GI NO: 30580381 NR Description: Caffeoyl-CoA O-methyltransferase 2
MQSSPDEASLLRMLIKLSGARRTLEVGVFTGYSLLATALALPADGKVIAFDVSREYYDIGRPFIERAGVAGKVDFREGPALEQLDELLADPANHGAFDFAFVDADKPNYVRYHEQLLRLVRVGGTVVYDNTLWAGTVALPPDAPLSDLDRRFSAAIRELNVRLSQDPRVEVCQLAIADGVTICRRVV

SEQ ID NO: 35764 - DNA, 999 bp, Zea mays subsp. mays
  misc_feature (1)..(999): Ceres Seq. ID no. 13624677
acccatcacacgacaaaatccctcaccctcgtgagtcctgacgtcctcgcccgtgctcgcagttggtagggttctagccatggcgtggagcgccgccgccgtctccaggttcgcagccgcctccccacccgcggctagaacccgaccaactgctgaaacacgtgcaattctggacctcagtgtccagtattggacaagtagagggtgggcatatgtcgatgtcaactatggaggaagcactggttatggaagagagtatcgggagagactattgaacaaatggggtattgttgatgttgatgattgctgcggctgtgcgagattcctggtggagagtgggaaagtagatgggcagcgcctttgtattactggtagatcagcaggtggatacactactttagcttcacttgcattcagagacacgttcaaggctggagcttctctctatggtgttggggacttgactctgttgagagcggagacgcacaaatttgagtctcattatatggacaatcttgtaggaaatgaaagagcttactacgagagatcaccaatcaactttgtcaaccagtttacttgtccagtcattttgtttcaagggttggaggataaggttgtgccaccagatcaggcacgcaaaatatacagtgccttgaaagagaaaggtttgcctgttgctttggttgaatatgaaggagagcagcatgggttccgtaaggcggagaacatcaagttcacctagatctctctgatctggtctgttctgccctccctccgtcatcgtcgactccccctgcgtccgttcctttggatctgaataagatggtggtgatctgagtggtggtcttagtttatcatgtatcgctcgcagtttaatttagcggtttaggtgtggatctgtgaaccccatggcgcctctgcttgattcgtgtttcacctgttatgttctgagattcatgataatgctatgagaactgaaattcccgtttcatgcttctc

SEQ ID NO: 35765 - protein, 220 aa, Zea mays subsp. mays
  peptide (1)..(220): Ceres Seq. ID no. 13624678
  misc_feature (41)..(105): Pfam Name: Pfam Description:  Prolyl oligopeptidase family
  misc_feature (23)..(220): NCBI GI NO: 15239342 NR Description: acyl-peptide hydrolase-related
  misc_feature (23)..(218): NCBI GI NO: 23043087 NR Description: hypothetical protein
  misc_feature (23)..(218): NCBI GI NO: 37521039 NR Description: probable peptidase [Gloeobacter violaceus]
  misc_feature (23)..(218): NCBI GI NO: 16331709 NR Description: hypothetical protein [Synechocystis sp. PCC 6803]
  misc_feature (23)..(217): NCBI GI NO: 22972830 NR Description: hypothetical protein [Chloroflexus aurantiacus]
  misc_feature (23)..(218): NCBI GI NO: 29654820 NR Description: prolyl oligopeptidase family  protein
  misc_feature (23)..(212): NCBI GI NO: 33864859 NR Description: putative peptidase [Synechococcus sp. WH 8102]
  misc_feature (2)..(218): NCBI GI NO: 33863869 NR Description: Dienelactone hydrolase
  misc_feature (23)..(218): NCBI GI NO: 23029170 NR Description: hypothetical protein
  misc_feature (23)..(217): NCBI GI NO: 22299228 NR Description: ORF_ID:tlr1685~probable peptidase
MAWSAAAVSRFAAASPPAARTRPTAETRAILDLSVQYWTSRGWAYVDVNYGGSTGYGREYRERLLNKWGIVDVDDCCGCARFLVESGKVDGQRLCITGRSAGGYTTLASLAFRDTFKAGASLYGVGDLTLLRAETHKFESHYMDNLVGNERAYYERSPINFVNQFTCPVILFQGLEDKVVPPDQARKIYSALKEKGLPVALVEYEGEQHGFRKAENIKFT

SEQ ID NO: 35766 - DNA, 446 bp, Zea mays subsp. mays
  misc_feature (1)..(446): Ceres Seq. ID no. 4614880
acttttttcgtgcgttcgcgttcgacgcctcgctcggctggttccttccttccttccgctgtgttcccttctgtttctcgggcggagacgggaaggccgtgcgctcaaggatggcgcgcgagcagctggaggagtccatcgtggccgacggcaacggcaaggaggaagaggtcggggtcatgggcatcggcgccgcggacggcgccgacgaccagcacggcggcggcaagctcagcatgaagagcctgctgtggcacggcggctccgtctgggacgcgtggttcagctgcgcctccaaccaggtggcgcaggtgctcctgacgctgccgtactccttctcccagctggggatgctgtccggcgtgctgctgcagatcttctacggcttcctgggcagctggaccgcgtacctcatcagcgtcctctacgtcgagtaccgctcccgc

SEQ ID NO: 35767 - protein, 148 aa, Zea mays subsp. mays
  peptide (1)..(148): Ceres Seq. ID no. 4614881
LFSCVRVRRLARLVPSFLPLCSLLFLGRRREGRALKDGARAAGGVHRGRRQRQGGRGRGHGHRRRGRRRRPARRRQAQHEEPAVARRLRLGRVVQLRLQPGGAGAPDAAVLLLPAGDAVRRAAADLLRLPGQLDRVPHQRPLRRVPLP

SEQ ID NO: 35768 - protein, 148 aa, Zea mays subsp. mays
  peptide (1)..(148): Ceres Seq. ID no. 4614882
  misc_feature (39)..(147): NCBI GI NO: 34908418 NR Description: putative AUX1-like permease
  misc_feature (40)..(147): NCBI GI NO: 15240927 NR Description: LAX1 / AUX1 -like permease; protein id: At5g01240
  misc_feature (40)..(147): NCBI GI NO: 5881784 NR Description: putative AUX1-like permease [Arabidopsis thaliana]
  misc_feature (37)..(147): NCBI GI NO: 10800920 NR Description: putative AUX1-like permease [Medicago truncatula]
  misc_feature (37)..(147): NCBI GI NO: 37651177 NR Description: AUX1-like auxin influx carrier protein
  misc_feature (37)..(147): NCBI GI NO: 21586468 NR Description: auxin influx carrier protein [Medicago truncatula]
  misc_feature (44)..(147): NCBI GI NO: 18404642 NR Description: expressed protein; protein id: At2g38120
  misc_feature (37)..(147): NCBI GI NO: 25956260 NR Description: AUX1-like auxin transport protein
  misc_feature (37)..(147): NCBI GI NO: 6650716 NR Description: AUX1-like protein
  misc_feature (43)..(147): NCBI GI NO: 10441742 NR Description: putative AUX1-like permease
FFRAFAFDASLGWFLPSFRCVPFCFSGGDGKAVRSRMAREQLEESIVADGNGKEEEVGVMGIGAADGADDQHGGGKLSMKSLLWHGGSVWDAWFSCASNQVAQVLLTLPYSFSQLGMLSGVLLQIFYGFLGSWTAYLISVLYVEYRSR

SEQ ID NO: 35769 - protein, 112 aa, Zea mays subsp. mays
  peptide (1)..(112): Ceres Seq. ID no. 4614883
  misc_feature (3)..(111): NCBI GI NO: 34908418 NR Description: putative AUX1-like permease
  misc_feature (4)..(111): NCBI GI NO: 15240927 NR Description: LAX1 / AUX1 -like permease; protein id: At5g01240
  misc_feature (4)..(111): NCBI GI NO: 5881784 NR Description: putative AUX1-like permease [Arabidopsis thaliana]
  misc_feature (1)..(111): NCBI GI NO: 10800920 NR Description: putative AUX1-like permease [Medicago truncatula]
  misc_feature (1)..(111): NCBI GI NO: 37651177 NR Description: AUX1-like auxin influx carrier protein
  misc_feature (1)..(111): NCBI GI NO: 21586468 NR Description: auxin influx carrier protein [Medicago truncatula]
  misc_feature (8)..(111): NCBI GI NO: 18404642 NR Description: expressed protein; protein id: At2g38120
  misc_feature (1)..(111): NCBI GI NO: 25956260 NR Description: AUX1-like auxin transport protein
  misc_feature (1)..(111): NCBI GI NO: 6650716 NR Description: AUX1-like protein
  misc_feature (7)..(111): NCBI GI NO: 10441742 NR Description: putative AUX1-like permease
MAREQLEESIVADGNGKEEEVGVMGIGAADGADDQHGGGKLSMKSLLWHGGSVWDAWFSCASNQVAQVLLTLPYSFSQLGMLSGVLLQIFYGFLGSWTAYLISVLYVEYRSR

SEQ ID NO: 35770 - DNA, 1122 bp, Zea mays subsp. mays
  misc_feature (1)..(1122): Ceres Seq. ID no. 12781335
attcccctctccactagctccggtccgaagagggagggaggaccggaggaggacgcccgttgccactgccgcgccgctcccgcctccctctctccatccgccgagctcgagaagccaccatgatctccgcgcgcaccgccgcagcttcccccgcttccctgtggaagcagggaggacgaagcgagggcggcggcagctgcgacggatgtcggacttacaggaacactttgcggagggccgcagcagcgaaggtgcgtgccttgccgtcgagggcggtggaggcggtcaaaatgggctccgccgcggagatggagcaggaggaggcggaggtggccgcggccgcggccggcgtcgtcgtcgaggaccactacggcgaggacagcgccaccgaggagctgcccatcctgccctgggccttctccgtcgcaagcggttacaccctcttgagggatccacatcacaacaagggtcttgctttcatggagaaggagagggatgcacaccacttgcgggggctgcttcctcctgcagttgtgcctcaagaactccaaattaagaagatcatgcacaacctgcggcagtaccaggtccctttgcagcgctatatggccatgatggaccttcaggagaggaacgagaggcttttctacaagcttttaattgataacgtggaggagctgcttcctgtggtttatacaccaactgtaggtgaggcctgccagaagtatgggtccatctttcgacaaccacagggtctgtatgtcagcttgagggacaaggggaaggtcctagaagttctaaggaactggccacataggaacatttaagttatctgtgttactgatggtgagcgaatcttgggacttggagatttgggttctcagggaatgggaattcctgtaggcaaacttgctctatacactgctcttggaggagttcgtccatcagcttgtttgcctatcacaatcgatgttggcacaaataatgagaaactgcttaatgatgagttttacattggactccggcaaaaacgtgcaactggcgaggagtatcatgagcttatggaagagttcatggctgctgttaagcaaatctacggcgagaaagtcctcattcagtttg

SEQ ID NO: 35771 - protein, 235 aa, Zea mays subsp. mays
  peptide (1)..(235): Ceres Seq. ID no. 12781336
  misc_feature (169)..(235): Pfam Name: Pfam Description:  Malic enzyme, N-terminal domain
  misc_feature (1)..(235): NCBI GI NO: 37147841 NR Description: non-photosynthetic NADP-malic enzyme [Zea mays]
  misc_feature (104)..(235): NCBI GI NO: 4096786 NR Description: NADP-malic enzyme [Zea mays]
  misc_feature (1)..(133): NCBI GI NO: 4096786 NR Description: NADP-malic enzyme [Zea mays]
  misc_feature (1)..(235): NCBI GI NO: 18460985 NR Description: NADP-dependent malic enzyme [Zea mays]
  misc_feature (1)..(235): NCBI GI NO: 34906372 NR Description: unnamed protein product
  misc_feature (1)..(235): NCBI GI NO: 1170871 NR Description: NADP-DEPENDENT MALIC ENZYME, CHLOROPLAST PRECURSOR
  misc_feature (1)..(235): NCBI GI NO: 30526303 NR Description: NADP-dependent malic enzyme [Sorghum bicolor]
  misc_feature (1)..(235): NCBI GI NO: 126737 NR Description: NADP-DEPENDENT MALIC ENZYME, CHLOROPLAST PRECURSOR
  misc_feature (1)..(235): NCBI GI NO: 30575690 NR Description: NADP-malic enzyme [Zea mays]
  misc_feature (52)..(235): NCBI GI NO: 547886 NR Description: NADP-DEPENDENT MALIC ENZYME, CHLOROPLAST PRECURSOR
MISARTAAASPASLWKQGGRSEGGGSCDGCRTYRNTLRRAAAAKVRALPSRAVEAVKMGSAAEMEQEEAEVAAAAAGVVVEDHYGEDSATEELPILPWAFSVASGYTLLRDPHHNKGLAFMEKERDAHHLRGLLPPAVVPQELQIKKIMHNLRQYQVPLQRYMAMMDLQERNERLFYKLLIDNVEELLPVVYTPTVGEACQKYGSIFRQPQGLYVSLRDKGKVLEVLRNWPHRNI

SEQ ID NO: 35772 - protein, 184 aa, Zea mays subsp. mays
  peptide (1)..(184): Ceres Seq. ID no. 12781337
FPSPLAPVRRGREDRRRTPVATAAPLPPPSLHPPSSRSHHDLRAHRRSFPRFPVEAGRTKRGRRQLRRMSDLQEHFAEGRSSEGACLAVEGGGGGQNGLRRGDGAGGGGGGRGRGRRRRRGPLRRGQRHRGAAHPALGLLRRKRLHPLEGSTSQQGSCFHGEGEGCTPLAGAASSCSCASRTPN

SEQ ID NO: 35773 - protein, 178 aa, Zea mays subsp. mays
  peptide (1)..(178): Ceres Seq. ID no. 12781338
  misc_feature (112)..(178): Pfam Name: Pfam Description:  Malic enzyme, N-terminal domain
  misc_feature (1)..(178): NCBI GI NO: 37147841 NR Description: non-photosynthetic NADP-malic enzyme [Zea mays]
  misc_feature (47)..(178): NCBI GI NO: 4096786 NR Description: NADP-malic enzyme [Zea mays]
  misc_feature (1)..(76): NCBI GI NO: 4096786 NR Description: NADP-malic enzyme [Zea mays]
  misc_feature (1)..(178): NCBI GI NO: 18460985 NR Description: NADP-dependent malic enzyme [Zea mays]
  misc_feature (1)..(178): NCBI GI NO: 34906372 NR Description: unnamed protein product
  misc_feature (1)..(178): NCBI GI NO: 1170871 NR Description: NADP-DEPENDENT MALIC ENZYME, CHLOROPLAST PRECURSOR
  misc_feature (1)..(178): NCBI GI NO: 30526303 NR Description: NADP-dependent malic enzyme [Sorghum bicolor]
  misc_feature (1)..(178): NCBI GI NO: 126737 NR Description: NADP-DEPENDENT MALIC ENZYME, CHLOROPLAST PRECURSOR
  misc_feature (1)..(178): NCBI GI NO: 30575690 NR Description: NADP-malic enzyme [Zea mays]
  misc_feature (1)..(178): NCBI GI NO: 547886 NR Description: NADP-DEPENDENT MALIC ENZYME, CHLOROPLAST PRECURSOR
MGSAAEMEQEEAEVAAAAAGVVVEDHYGEDSATEELPILPWAFSVASGYTLLRDPHHNKGLAFMEKERDAHHLRGLLPPAVVPQELQIKKIMHNLRQYQVPLQRYMAMMDLQERNERLFYKLLIDNVEELLPVVYTPTVGEACQKYGSIFRQPQGLYVSLRDKGKVLEVLRNWPHRNI

SEQ ID NO: 35774 - DNA, 466 bp, Zea mays subsp. mays
  misc_feature (1)..(466): Ceres Seq. ID no. 4616532
  misc_feature (403)..(403): n is a, c, t, g, unknown, or other
gcacgagactgctcggccgacgaaataataaagcgcgcgcgcgcacgcggagaggctcggagagctgagtgagatggcacaaaccatggcgtccatgaccggcctctcgcagggcgttctgcccagcaggcgcgccgccaacagggccaggacggccgccgtcgtcagggcgtccgccgaggcgcaggcgggccgccgcgccgtgctcgggctggtggccactggcatcgtcggcggcgccttgtcgcaggcggtgcacgccgagaccgtcaagaccatcaagatcggagccccgccgccgccctccggtggactccccgggactctgaactctgaccaggcgagggacttcgacctccccttgaaggagcggttctacctgcagccgctgccgccggcggangcggtggcgagggtgaagacgtcggcgcaggacatcatcaacctcaagccgctcatcgacaag

SEQ ID NO: 35775 - protein, 131 aa, Zea mays subsp. mays
  peptide (1)..(131): Ceres Seq. ID no. 4616533
  misc_feature (15)..(130): Pfam Name: PsbQ Pfam Description: Oxygen evolving enhancer protein 3
  misc_feature (1)..(130): NCBI GI NO: 11134057 NR Description: Oxygen-evolving enhancer protein 3-1
  misc_feature (1)..(130): NCBI GI NO: 11134066 NR Description: Oxygen-evolving enhancer protein 3-2
  misc_feature (5)..(130): NCBI GI NO: 34393258 NR Description: putative Oxygen-evolving enhancer protein 3-1
  misc_feature (1)..(130): NCBI GI NO: 32400800 NR Description: oxygen-evolving complex precursor
  misc_feature (18)..(130): NCBI GI NO: 4583542 NR Description: 16 kDa polypeptide of oxygen-evolving complex
  misc_feature (18)..(130): NCBI GI NO: 15233587 NR Description: oxygen-evolving complex protein 16
  misc_feature (1)..(130): NCBI GI NO: 15234637 NR Description: oxygen-evolving complex protein 16
  misc_feature (26)..(130): NCBI GI NO: 31096349 NR Description: oxygen-evolving enhancer protein 3 precursor
  misc_feature (20)..(130): NCBI GI NO: 11133850 NR Description: Oxygen-evolving enhancer protein 3
  misc_feature (32)..(130): NCBI GI NO: 131397 NR Description: Oxygen-evolving enhancer protein 3
  misc_feature (110)..(110): Xaa is any aa, unknown or other
MAQTMASMTGLSQGVLPSRRAANRARTAAVVRASAEAQAGRRAVLGLVATGIVGGALSQAVHAETVKTIKIGAPPPPSGGLPGTLNSDQARDFDLPLKERFYLQPLPPAXAVARVKTSAQDIINLKPLIDK

SEQ ID NO: 35776 - protein, 127 aa, Zea mays subsp. mays
  peptide (1)..(127): Ceres Seq. ID no. 4616534
  misc_feature (11)..(126): Pfam Name: PsbQ Pfam Description: Oxygen evolving enhancer protein 3
  misc_feature (1)..(126): NCBI GI NO: 11134057 NR Description: Oxygen-evolving enhancer protein 3-1
  misc_feature (1)..(126): NCBI GI NO: 11134066 NR Description: Oxygen-evolving enhancer protein 3-2
  misc_feature (1)..(126): NCBI GI NO: 34393258 NR Description: putative Oxygen-evolving enhancer protein 3-1
  misc_feature (1)..(126): NCBI GI NO: 32400800 NR Description: oxygen-evolving complex precursor
  misc_feature (14)..(126): NCBI GI NO: 4583542 NR Description: 16 kDa polypeptide of oxygen-evolving complex
  misc_feature (14)..(126): NCBI GI NO: 15233587 NR Description: oxygen-evolving complex protein 16
  misc_feature (1)..(126): NCBI GI NO: 15234637 NR Description: oxygen-evolving complex protein 16
  misc_feature (22)..(126): NCBI GI NO: 31096349 NR Description: oxygen-evolving enhancer protein 3 precursor
  misc_feature (16)..(126): NCBI GI NO: 11133850 NR Description: Oxygen-evolving enhancer protein 3
  misc_feature (28)..(126): NCBI GI NO: 131397 NR Description: Oxygen-evolving enhancer protein 3
  misc_feature (106)..(106): Xaa is any aa, unknown or other
MASMTGLSQGVLPSRRAANRARTAAVVRASAEAQAGRRAVLGLVATGIVGGALSQAVHAETVKTIKIGAPPPPSGGLPGTLNSDQARDFDLPLKERFYLQPLPPAXAVARVKTSAQDIINLKPLIDK

SEQ ID NO: 35777 - protein, 124 aa, Zea mays subsp. mays
  peptide (1)..(124): Ceres Seq. ID no. 4616535
  misc_feature (8)..(123): Pfam Name: PsbQ Pfam Description: Oxygen evolving enhancer protein 3
  misc_feature (1)..(123): NCBI GI NO: 11134057 NR Description: Oxygen-evolving enhancer protein 3-1
  misc_feature (1)..(123): NCBI GI NO: 11134066 NR Description: Oxygen-evolving enhancer protein 3-2
  misc_feature (1)..(123): NCBI GI NO: 34393258 NR Description: putative Oxygen-evolving enhancer protein 3-1
  misc_feature (1)..(123): NCBI GI NO: 32400800 NR Description: oxygen-evolving complex precursor
  misc_feature (11)..(123): NCBI GI NO: 4583542 NR Description: 16 kDa polypeptide of oxygen-evolving complex
  misc_feature (11)..(123): NCBI GI NO: 15233587 NR Description: oxygen-evolving complex protein 16
  misc_feature (1)..(123): NCBI GI NO: 15234637 NR Description: oxygen-evolving complex protein 16
  misc_feature (19)..(123): NCBI GI NO: 31096349 NR Description: oxygen-evolving enhancer protein 3 precursor
  misc_feature (13)..(123): NCBI GI NO: 11133850 NR Description: Oxygen-evolving enhancer protein 3
  misc_feature (25)..(123): NCBI GI NO: 131397 NR Description: Oxygen-evolving enhancer protein 3
  misc_feature (103)..(103): Xaa is any aa, unknown or other
MTGLSQGVLPSRRAANRARTAAVVRASAEAQAGRRAVLGLVATGIVGGALSQAVHAETVKTIKIGAPPPPSGGLPGTLNSDQARDFDLPLKERFYLQPLPPAXAVARVKTSAQDIINLKPLIDK

SEQ ID NO: 35778 - DNA, 1391 bp, Zea mays subsp. mays; identical to SEQ ID NO: 31549
  misc_feature (1)..(1391): Ceres Seq. ID no. 13504058
  misc_feature (1379)..(1379): n is a, c, t, g, unknown, or other

SEQ ID NO: 35779 - protein, 284 aa, Zea mays subsp. mays; identical to SEQ ID NO: 31550
  peptide (1)..(284): Ceres Seq. ID no. 13504059
  misc_feature (140)..(193): Pfam Name: Pfam Description:  KH domain
  misc_feature (1)..(284): NCBI GI NO: 34909270 NR Description: P0454H12.18
  misc_feature (3)..(284): NCBI GI NO: 34900448 NR Description: contains EST C27129
  misc_feature (1)..(283): NCBI GI NO: 12322716 NR Description: unknown protein; 28504-31237
  misc_feature (1)..(283): NCBI GI NO: 30680583 NR Description: KH domain protein [Arabidopsis thaliana]
  misc_feature (1)..(283): NCBI GI NO: 40645104 NR Description: hypothetical protein [Nicotiana tabacum]
  misc_feature (1)..(283): NCBI GI NO: 15224909 NR Description: KH domain protein [Arabidopsis thaliana]
  misc_feature (18)..(283): NCBI GI NO: 16930473 NR Description: At1g09660/F21M12_5 [Arabidopsis thaliana]
  misc_feature (18)..(283): NCBI GI NO: 22329449 NR Description: KH domain quaking protein, putative
  misc_feature (61)..(283): NCBI GI NO: 34907446 NR Description: P0434C04.5
  misc_feature (1)..(283): NCBI GI NO: 15236738 NR Description: KH domain protein [Arabidopsis thaliana]

SEQ ID NO: 35780 - protein, 237 aa, Zea mays subsp. mays; identical to SEQ ID NO: 31551
  peptide (1)..(237): Ceres Seq. ID no. 13504060
  misc_feature (93)..(146): Pfam Name: Pfam Description:  KH domain
  misc_feature (1)..(237): NCBI GI NO: 34909270 NR Description: P0454H12.18
  misc_feature (1)..(237): NCBI GI NO: 34900448 NR Description: contains EST C27129
  misc_feature (1)..(236): NCBI GI NO: 12322716 NR Description: unknown protein; 28504-31237
  misc_feature (1)..(236): NCBI GI NO: 30680583 NR Description: KH domain protein [Arabidopsis thaliana]
  misc_feature (1)..(236): NCBI GI NO: 40645104 NR Description: hypothetical protein [Nicotiana tabacum]
  misc_feature (1)..(236): NCBI GI NO: 15224909 NR Description: KH domain protein [Arabidopsis thaliana]
  misc_feature (1)..(236): NCBI GI NO: 16930473 NR Description: At1g09660/F21M12_5 [Arabidopsis thaliana]
  misc_feature (1)..(236): NCBI GI NO: 22329449 NR Description: KH domain quaking protein, putative
  misc_feature (14)..(236): NCBI GI NO: 34907446 NR Description: P0434C04.5
  misc_feature (1)..(236): NCBI GI NO: 15236738 NR Description: KH domain protein [Arabidopsis thaliana]

SEQ ID NO: 35781 - protein, 196 aa, Zea mays subsp. mays; identical to SEQ ID NO: 31552
  peptide (1)..(196): Ceres Seq. ID no. 13504061
  misc_feature (52)..(105): Pfam Name: Pfam Description:  KH domain
  misc_feature (1)..(196): NCBI GI NO: 34909270 NR Description: P0454H12.18
  misc_feature (1)..(196): NCBI GI NO: 34900448 NR Description: contains EST C27129
  misc_feature (1)..(195): NCBI GI NO: 12322716 NR Description: unknown protein; 28504-31237
  misc_feature (1)..(195): NCBI GI NO: 30680583 NR Description: KH domain protein [Arabidopsis thaliana]
  misc_feature (1)..(195): NCBI GI NO: 40645104 NR Description: hypothetical protein [Nicotiana tabacum]
  misc_feature (1)..(195): NCBI GI NO: 15224909 NR Description: KH domain protein [Arabidopsis thaliana]
  misc_feature (1)..(195): NCBI GI NO: 16930473 NR Description: At1g09660/F21M12_5 [Arabidopsis thaliana]
  misc_feature (1)..(195): NCBI GI NO: 22329449 NR Description: KH domain quaking protein, putative
  misc_feature (1)..(195): NCBI GI NO: 34907446 NR Description: P0434C04.5
  misc_feature (1)..(195): NCBI GI NO: 15236738 NR Description: KH domain protein [Arabidopsis thaliana]

SEQ ID NO: 35782 - DNA, 744 bp, Zea mays subsp. mays
  misc_feature (1)..(744): Ceres Seq. ID no. 12435845
cataccatccctcgaccggccacctctccccaattgcatcgcatccccaggacttgcgcccggtccagagacggcgataatgggggcttctgaggtgtggtcatcggtgccggcctggctggcgatcgccgtcggcttggcggccgtggtttcctcgtcggaggctcacgtcttctacgccggtggccgcgacggctgggtccttgaccccaccgagagctacaaccattgggccgggcgcagccggttccaagtgaacgacaccatcgtgttcacgcacgaggagggcgtcgactcggtgctgctggtgacggagcaggacttcgacacgtgcaacacgcgcaacccggtccggcggctccaggccgtcggcagcagcggcagttcggagcgttcggtgttcaagctcgaccggtccggcccgttcttcttcatcagcagcgacgaggaacggtgccaaaagggccagaagctgtacgtaatcgtgatggcggttcgccggtcgacgacgccggcggcaccggcaccggcacccgacgcggcgttcccgccggcgccttcaccggtacccgattcggcgttcccgccggcgccttcaccggtgtgggcctcggcgcccgacaacgcgcacgctccaccaccgacggcgggtgcgtcacgtctggacgacggagcgatcatcggctctgtgcttggggttataggagctttggtgctctgtaccgtgtactaatcagaaatcag

SEQ ID NO: 35783 - protein, 243 aa, Zea mays subsp. mays
  peptide (1)..(243): Ceres Seq. ID no. 12435846
  misc_feature (66)..(156): Pfam Name: Pfam Description:  Plastocyanin-like domain
  misc_feature (10)..(219): NCBI GI NO: 34909494 NR Description: P0481E12.17
  misc_feature (40)..(242): NCBI GI NO: 7486634 NR Description: hypothetical protein F8B4
  misc_feature (40)..(242): NCBI GI NO: 30689408 NR Description: plastocyanin-like domain containing protein
  misc_feature (34)..(214): NCBI GI NO: 34903678 NR Description: B1015E06.24
  misc_feature (35)..(219): NCBI GI NO: 15234164 NR Description: putative protein; protein id: At4g27520
  misc_feature (35)..(219): NCBI GI NO: 21592865 NR Description: unknown [Arabidopsis thaliana]
  misc_feature (30)..(218): NCBI GI NO: 15238868 NR Description: putative protein; protein id: At5g53870.1
  misc_feature (44)..(238): NCBI GI NO: 7485901 NR Description: hypothetical protein F20O9
  misc_feature (44)..(238): NCBI GI NO: 18417181 NR Description: copper-binding protein-like; protein id:At4g28365
  misc_feature (30)..(218): NCBI GI NO: 28396618 NR Description: phytocyanin protein, PUP2 [Arabidopsis thaliana]
IPSLDRPPLPNCIASPGLAPGPETAIMGASEVWSSVPAWLAIAVGLAAVVSSSEAHVFYAGGRDGWVLDPTESYNHWAGRSRFQVNDTIVFTHEEGVDSVLLVTEQDFDTCNTRNPVRRLQAVGSSGSSERSVFKLDRSGPFFFISSDEERCQKGQKLYVIVMAVRRSTTPAAPAPAPDAAFPPAPSPVPDSAFPPAPSPVWASAPDNAHAPPPTAGASRLDDGAIIGSVLGVIGALVLCTVY

SEQ ID NO: 35784 - protein, 217 aa, Zea mays subsp. mays
  peptide (1)..(217): Ceres Seq. ID no. 12435847
  misc_feature (40)..(130): Pfam Name: Pfam Description:  Plastocyanin-like domain
  misc_feature (1)..(193): NCBI GI NO: 34909494 NR Description: P0481E12.17
  misc_feature (14)..(216): NCBI GI NO: 7486634 NR Description: hypothetical protein F8B4
  misc_feature (14)..(216): NCBI GI NO: 30689408 NR Description: plastocyanin-like domain containing protein
  misc_feature (8)..(188): NCBI GI NO: 34903678 NR Description: B1015E06.24
  misc_feature (9)..(193): NCBI GI NO: 15234164 NR Description: putative protein; protein id: At4g27520
  misc_feature (9)..(193): NCBI GI NO: 21592865 NR Description: unknown [Arabidopsis thaliana]
  misc_feature (4)..(192): NCBI GI NO: 15238868 NR Description: putative protein; protein id: At5g53870.1
  misc_feature (18)..(212): NCBI GI NO: 7485901 NR Description: hypothetical protein F20O9
  misc_feature (18)..(212): NCBI GI NO: 18417181 NR Description: copper-binding protein-like; protein id:At4g28365
  misc_feature (4)..(192): NCBI GI NO: 28396618 NR Description: phytocyanin protein, PUP2 [Arabidopsis thaliana]
MGASEVWSSVPAWLAIAVGLAAVVSSSEAHVFYAGGRDGWVLDPTESYNHWAGRSRFQVNDTIVFTHEEGVDSVLLVTEQDFDTCNTRNPVRRLQAVGSSGSSERSVFKLDRSGPFFFISSDEERCQKGQKLYVIVMAVRRSTTPAAPAPAPDAAFPPAPSPVPDSAFPPAPSPVWASAPDNAHAPPPTAGASRLDDGAIIGSVLGVIGALVLCTVY

SEQ ID NO: 35785 - DNA, 1515 bp, Zea mays subsp. mays; identical to SEQ ID NO: 29049
  misc_feature (1)..(1515): Ceres Seq. ID no. 13498565

SEQ ID NO: 35786 - protein, 390 aa, Zea mays subsp. mays; identical to SEQ ID NO: 29050
  peptide (1)..(390): Ceres Seq. ID no. 13498566
  misc_feature (64)..(385): Pfam Name: Pfam Description:  Protein of unknown function, DUF642
  misc_feature (1)..(390): NCBI GI NO: 30102997 NR Description: unknown protein
  misc_feature (45)..(385): NCBI GI NO: 18398135 NR Description: expressed protein [Arabidopsis thaliana]
  misc_feature (64)..(385): NCBI GI NO: 12321555 NR Description: unknown protein, 5' partial [Arabidopsis thaliana]
  misc_feature (42)..(385): NCBI GI NO: 15227437 NR Description: expressed protein [Arabidopsis thaliana]
  misc_feature (41)..(385): NCBI GI NO: 15227439 NR Description: expressed protein [Arabidopsis thaliana]
  misc_feature (48)..(389): NCBI GI NO: 15239049 NR Description: expressed protein [Arabidopsis thaliana]
  misc_feature (48)..(389): NCBI GI NO: 21554402 NR Description: unknown [Arabidopsis thaliana]
  misc_feature (48)..(389): NCBI GI NO: 23397043 NR Description: unknown protein [Arabidopsis thaliana]
  misc_feature (49)..(389): NCBI GI NO: 15239438 NR Description: expressed protein [Arabidopsis thaliana]
  misc_feature (49)..(389): NCBI GI NO: 21537379 NR Description: unknown [Arabidopsis thaliana]

SEQ ID NO: 35787 - protein, 384 aa, Zea mays subsp. mays; identical to SEQ ID NO: 29051
  peptide (1)..(384): Ceres Seq. ID no. 13498567
  misc_feature (58)..(379): Pfam Name: Pfam Description:  Protein of unknown function, DUF642
  misc_feature (1)..(384): NCBI GI NO: 30102997 NR Description: unknown protein
  misc_feature (39)..(379): NCBI GI NO: 18398135 NR Description: expressed protein [Arabidopsis thaliana]
  misc_feature (58)..(379): NCBI GI NO: 12321555 NR Description: unknown protein, 5' partial [Arabidopsis thaliana]
  misc_feature (36)..(379): NCBI GI NO: 15227437 NR Description: expressed protein [Arabidopsis thaliana]
  misc_feature (35)..(379): NCBI GI NO: 15227439 NR Description: expressed protein [Arabidopsis thaliana]
  misc_feature (42)..(383): NCBI GI NO: 15239049 NR Description: expressed protein [Arabidopsis thaliana]
  misc_feature (42)..(383): NCBI GI NO: 21554402 NR Description: unknown [Arabidopsis thaliana]
  misc_feature (42)..(383): NCBI GI NO: 23397043 NR Description: unknown protein [Arabidopsis thaliana]
  misc_feature (43)..(383): NCBI GI NO: 15239438 NR Description: expressed protein [Arabidopsis thaliana]
  misc_feature (43)..(383): NCBI GI NO: 21537379 NR Description: unknown [Arabidopsis thaliana]

SEQ ID NO: 35788 - protein, 366 aa, Zea mays subsp. mays; identical to SEQ ID NO: 29052
  peptide (1)..(366): Ceres Seq. ID no. 13498568
  misc_feature (76)..(340): NCBI GI NO: 23102218 NR Description: hypothetical protein [Azotobacter vinelandii]

SEQ ID NO: 35789 - DNA, 1593 bp, Zea mays subsp. mays
  misc_feature (1)..(1593): Ceres Seq. ID no. 12435837
atttccgtccatttcccaggttctaaccggttcctcaaaccctaaaacctccaaaccccagcaatggcggattccccttcgttccgtcgctacccgctcgcctcctccgtcgacctcgtccgctggctcccttcctcctccatctccccttccggtcgcctcctcgccgccgccgtccacgatcccacctccggctccttcgcctccagcatccgccttctccccctctccgaccctgtctcccggctcgcctccgtcccgctcccgtcccgcgccacggcactccgctgctcccatgctgcgctcgccgctgccacctcctcgggctcgctccacttcgttccctcctcattcgactcggacgccgcagtgtccgtccccggcggcgcgggcttccatgtcggtcctgtccggggcctcgactgcggcggggaggagtgggtcacagcgggagaagacggaagagtgcatgtggtcggcggtgtagctgacgggagagtggtaacgaggaggatgtgggacgggaaaggaatgtcagggtatgaagctgccagatgggcttcgccggtggagtttgccacgggtggagccggatgtggtgttcagtggtgggatcggaggaaaggggacgccatcgtggcgcagtgtaacggcatctggggccgtggcatagttactggcatggtgcattccattgacattcatccatcaagaaagcatatctgcgtggtgggaggttcatcggggaccgtatttgcctgggatctgcggcagccacaggagctgataccaatctctgttctaggtcttaatgaaacagctgagcctgtgtgtgaaagtgaggtttgggaggttcttttcgacacttacactaagtcttccgatatcatctcatctgcatctgcaagaatattgccagtgatgatgtgttcagaggatgggatccttgcagttgtcgaacaagataagagaccccttgaattgcttgctgaatcttgtgccatcaactccttcgacatagatcctcagaacccctctgtaagtccttggcttcacctggtcaaatgaacagtttttcttatttgtagataatgttactactgttatcgatttgtgcaggatgttgtttgcgcattagaatgggaatcggtcggtgtcctaactcgtggtagagatgcaatgtcagaagaatgaaaattttcatcacccagggatctcaatcagatttttttccaaggtggatgaaactgctatcagaaagaatcttctgaattctgagggcttccatattcagtcaccattctaatgcccgtgaccatgggcaacggtagaaggaataaagcgtgcatgacgaatgccttttcctgtctttgcatactaaccaacactgtcttgtaccgttggaagttttactctgttgtcatgggtagttgcagattgcagaaaccttttctgggctagcttcaagatgtgtaattgctcttggatgccaactgctgacagtttgaaggagtggtcacaaacaattcaatccttttagctgggggctgatgaactgaagctataattagtttcataatgtttgcttgtggt

SEQ ID NO: 35790 - protein, 334 aa, Zea mays subsp. mays
  peptide (1)..(334): Ceres Seq. ID no. 12435838
  misc_feature (60)..(324): NCBI GI NO: 18417678 NR Description: expressed protein; protein id: At4g30840
  misc_feature (60)..(324): NCBI GI NO: 21554881 NR Description: unknown [Arabidopsis thaliana]
  misc_feature (60)..(222): NCBI GI NO: 25372649 NR Description: hypothetical protein AT4g30840
  misc_feature (224)..(326): NCBI GI NO: 25372649 NR Description: hypothetical protein AT4g30840
  misc_feature (106)..(266): NCBI GI NO: 30851621 NR Description: 2610529I12Rik protein [Mus musculus]
MADSPSFRRYPLASSVDLVRWLPSSSISPSGRLLAAAVHDPTSGSFASSIRLLPLSDPVSRLASVPLPSRATALRCSHAALAAATSSGSLHFVPSSFDSDAAVSVPGGAGFHVGPVRGLDCGGEEWVTAGEDGRVHVVGGVADGRVVTRRMWDGKGMSGYEAARWASPVEFATGGAGCGVQWWDRRKGDAIVAQCNGIWGRGIVTGMVHSIDIHPSRKHICVVGGSSGTVFAWDLRQPQELIPISVLGLNETAEPVCESEVWEVLFDTYTKSSDIISSASARILPVMMCSEDGILAVVEQDKRPLELLAESCAINSFDIDPQNPSVSPWLHLVK

SEQ ID NO: 35791 - protein, 184 aa, Zea mays subsp. mays
  peptide (1)..(184): Ceres Seq. ID no. 12435839
  misc_feature (1)..(174): NCBI GI NO: 18417678 NR Description: expressed protein; protein id: At4g30840
  misc_feature (1)..(174): NCBI GI NO: 21554881 NR Description: unknown [Arabidopsis thaliana]
  misc_feature (1)..(72): NCBI GI NO: 25372649 NR Description: hypothetical protein AT4g30840
  misc_feature (74)..(176): NCBI GI NO: 25372649 NR Description: hypothetical protein AT4g30840
  misc_feature (1)..(116): NCBI GI NO: 30851621 NR Description: 2610529I12Rik protein [Mus musculus]
MWDGKGMSGYEAARWASPVEFATGGAGCGVQWWDRRKGDAIVAQCNGIWGRGIVTGMVHSIDIHPSRKHICVVGGSSGTVFAWDLRQPQELIPISVLGLNETAEPVCESEVWEVLFDTYTKSSDIISSASARILPVMMCSEDGILAVVEQDKRPLELLAESCAINSFDIDPQNPSVSPWLHLVK

SEQ ID NO: 35792 - protein, 178 aa, Zea mays subsp. mays
  peptide (1)..(178): Ceres Seq. ID no. 12435840
  misc_feature (1)..(168): NCBI GI NO: 18417678 NR Description: expressed protein; protein id: At4g30840
  misc_feature (1)..(168): NCBI GI NO: 21554881 NR Description: unknown [Arabidopsis thaliana]
  misc_feature (1)..(66): NCBI GI NO: 25372649 NR Description: hypothetical protein AT4g30840
  misc_feature (68)..(170): NCBI GI NO: 25372649 NR Description: hypothetical protein AT4g30840
  misc_feature (1)..(110): NCBI GI NO: 30851621 NR Description: 2610529I12Rik protein [Mus musculus]
MSGYEAARWASPVEFATGGAGCGVQWWDRRKGDAIVAQCNGIWGRGIVTGMVHSIDIHPSRKHICVVGGSSGTVFAWDLRQPQELIPISVLGLNETAEPVCESEVWEVLFDTYTKSSDIISSASARILPVMMCSEDGILAVVEQDKRPLELLAESCAINSFDIDPQNPSVSPWLHLVK

SEQ ID NO: 35793 - DNA, 1445 bp, Zea mays subsp. mays
  misc_feature (1)..(1445): Ceres Seq. ID no. 15178640
agagcagcagctaaagaagcaaagcaagtgtctgctcactcagtcctgcgcaagagctcgctctcggagaaaaaaacgcgggaggcgataatggagggaggtgccggtgcgagcgagaaagggaaggtgctggtcacgggggcgtcgggcttcgtcggctcctggctcgtcatgaagctcctccaggccggctacaccgtccgggcgaccgtgcgcgatcccgcgaacgttgggaagacgaagccattgatggaccttcccggagcaacggagcgcctgtccatatggaaagccgacctggcggaggaaggcagcttccacgacgccatcaggggctgcaccggcgtcttccacgtcgccacgcccatggacttcctgtccaaagaccctgagaatgaggtaatcaagccgacggtggaagggatgataagcatcatgcgggcatgcaaggaggccggcaccgtgcggcgcatcgtcttcacttcctccgccgggacggtcaacctggaggagcggcagaggcccgtctacgacgaggaaagctggaccgacgtcgacttctgccgtcgcgtcaagatgaccggatggatgtacttcgtgtctaaaaccctggcggagaaggcggccctggcgtacgcggcggagcacggcctggacctggtcaccatcatcccgacgctcgtggtcggcccgttcatcagcgcgtccatgccgcccagcctcatcaccgcgctggcgctcatcacggggaacgcgccccactactcgatcctcaagcaggtgcagctcatccacctcgacgacctctgcgacgccgagatcttcctcttcgagaacccggccgcggccgggcgctacgtctgctcctcgcacgacgtcaccatccacggcctcgccgccatgctcagggataggtaccccgagtacgacgtcccgcagaggttccccgggatccaggacgacctccagccggtgcgcttctcgtccaagaagctccaggacctcgggttcaccttcaggtacaagacgctggaggacatgttcgacgccgccatccggacttgccaggagaagggcctcatccccctcgccactgccgccggaggggacggctttgcctcggtgcgcgcacccggcgagacggaggcgacgattggcgcttaagcaacaatcacccggctctccccgtcgatgatgctatcagctatctatctcttcgactccgctgccaatacggaacttatttccatgttcaacgaattgttttatcccctggattacgtattgtttttatgttttatacccaaacaacgaatgtttctcagtattttactacagctagcccctatagtagagattctattatatgaataagctatctgtagaggctctggtgcaatatatatttcgagttatttggattactagcaaaaaaaaaaaaaaaa

SEQ ID NO: 35794 - protein, 387 aa, Zea mays subsp. mays
  peptide (1)..(387): Ceres Seq. ID no. 15178641
  misc_feature (43)..(337): Pfam Name: Pfam Description:  NAD dependent epimerase/dehydratase family
  misc_feature (31)..(387): NCBI GI NO: 1706374 NR Description: DIHYDROFLAVONOL-4-REDUCTASE
  misc_feature (31)..(387): NCBI GI NO: 7427700 NR Description: dihydrokaempferol 4-reductase (EC 1
  misc_feature (31)..(387): NCBI GI NO: 3287294 NR Description: dihydroflavonol4-reductase [Zea mays]
  misc_feature (31)..(387): NCBI GI NO: 7427698 NR Description: dihydrokaempferol 4-reductase (EC 1
  misc_feature (26)..(369): NCBI GI NO: 7427697 NR Description: dihydrokaempferol 4-reductase (EC 1
  misc_feature (36)..(387): NCBI GI NO: 7427699 NR Description: dihydrokaempferol 4-reductase (EC 1
  misc_feature (40)..(387): NCBI GI NO: 28912450 NR Description: dihydroflavonol 4-reductase [Triticum aestivum]
  misc_feature (40)..(387): NCBI GI NO: 28932727 NR Description: dihydroflavonol 4-reductase
  misc_feature (40)..(387): NCBI GI NO: 1706372 NR Description: DIHYDROFLAVONOL-4-REDUCTASE
  misc_feature (40)..(387): NCBI GI NO: 28883586 NR Description: dihydroflavonol 4-reductase
RAAAKEAKQVSAHSVLRKSSLSEKKTREAIMEGGAGASEKGKVLVTGASGFVGSWLVMKLLQAGYTVRATVRDPANVGKTKPLMDLPGATERLSIWKADLAEEGSFHDAIRGCTGVFHVATPMDFLSKDPENEVIKPTVEGMISIMRACKEAGTVRRIVFTSSAGTVNLEERQRPVYDEESWTDVDFCRRVKMTGWMYFVSKTLAEKAALAYAAEHGLDLVTIIPTLVVGPFISASMPPSLITALALITGNAPHYSILKQVQLIHLDDLCDAEIFLFENPAAAGRYVCSSHDVTIHGLAAMLRDRYPEYDVPQRFPGIQDDLQPVRFSSKKLQDLGFTFRYKTLEDMFDAAIRTCQEKGLIPLATAAGGDGFASVRAPGETEATIGA

SEQ ID NO: 35795 - protein, 357 aa, Zea mays subsp. mays
  peptide (1)..(357): Ceres Seq. ID no. 15178642
  misc_feature (13)..(307): Pfam Name: Pfam Description:  NAD dependent epimerase/dehydratase family
  misc_feature (1)..(357): NCBI GI NO: 1706374 NR Description: DIHYDROFLAVONOL-4-REDUCTASE
  misc_feature (1)..(357): NCBI GI NO: 7427700 NR Description: dihydrokaempferol 4-reductase (EC 1
  misc_feature (1)..(357): NCBI GI NO: 3287294 NR Description: dihydroflavonol4-reductase [Zea mays]
  misc_feature (1)..(357): NCBI GI NO: 7427698 NR Description: dihydrokaempferol 4-reductase (EC 1
  misc_feature (1)..(339): NCBI GI NO: 7427697 NR Description: dihydrokaempferol 4-reductase (EC 1
  misc_feature (6)..(357): NCBI GI NO: 7427699 NR Description: dihydrokaempferol 4-reductase (EC 1
  misc_feature (10)..(357): NCBI GI NO: 28912450 NR Description: dihydroflavonol 4-reductase [Triticum aestivum]
  misc_feature (10)..(357): NCBI GI NO: 28932727 NR Description: dihydroflavonol 4-reductase
  misc_feature (10)..(357): NCBI GI NO: 1706372 NR Description: DIHYDROFLAVONOL-4-REDUCTASE
  misc_feature (10)..(357): NCBI GI NO: 28883586 NR Description: dihydroflavonol 4-reductase
MEGGAGASEKGKVLVTGASGFVGSWLVMKLLQAGYTVRATVRDPANVGKTKPLMDLPGATERLSIWKADLAEEGSFHDAIRGCTGVFHVATPMDFLSKDPENEVIKPTVEGMISIMRACKEAGTVRRIVFTSSAGTVNLEERQRPVYDEESWTDVDFCRRVKMTGWMYFVSKTLAEKAALAYAAEHGLDLVTIIPTLVVGPFISASMPPSLITALALITGNAPHYSILKQVQLIHLDDLCDAEIFLFENPAAAGRYVCSSHDVTIHGLAAMLRDRYPEYDVPQRFPGIQDDLQPVRFSSKKLQDLGFTFRYKTLEDMFDAAIRTCQEKGLIPLATAAGGDGFASVRAPGETEATIGA

SEQ ID NO: 35796 - protein, 330 aa, Zea mays subsp. mays
  peptide (1)..(330): Ceres Seq. ID no. 15178643
  misc_feature (1)..(280): Pfam Name: Pfam Description:  NAD dependent epimerase/dehydratase family
  misc_feature (1)..(330): NCBI GI NO: 1706374 NR Description: DIHYDROFLAVONOL-4-REDUCTASE
  misc_feature (1)..(330): NCBI GI NO: 7427700 NR Description: dihydrokaempferol 4-reductase (EC 1
  misc_feature (1)..(330): NCBI GI NO: 3287294 NR Description: dihydroflavonol4-reductase [Zea mays]
  misc_feature (1)..(330): NCBI GI NO: 7427698 NR Description: dihydrokaempferol 4-reductase (EC 1
  misc_feature (1)..(312): NCBI GI NO: 7427697 NR Description: dihydrokaempferol 4-reductase (EC 1
  misc_feature (1)..(330): NCBI GI NO: 7427699 NR Description: dihydrokaempferol 4-reductase (EC 1
  misc_feature (1)..(330): NCBI GI NO: 28912450 NR Description: dihydroflavonol 4-reductase [Triticum aestivum]
  misc_feature (1)..(330): NCBI GI NO: 28932727 NR Description: dihydroflavonol 4-reductase
  misc_feature (1)..(330): NCBI GI NO: 1706372 NR Description: DIHYDROFLAVONOL-4-REDUCTASE
  misc_feature (1)..(330): NCBI GI NO: 28883586 NR Description: dihydroflavonol 4-reductase
MKLLQAGYTVRATVRDPANVGKTKPLMDLPGATERLSIWKADLAEEGSFHDAIRGCTGVFHVATPMDFLSKDPENEVIKPTVEGMISIMRACKEAGTVRRIVFTSSAGTVNLEERQRPVYDEESWTDVDFCRRVKMTGWMYFVSKTLAEKAALAYAAEHGLDLVTIIPTLVVGPFISASMPPSLITALALITGNAPHYSILKQVQLIHLDDLCDAEIFLFENPAAAGRYVCSSHDVTIHGLAAMLRDRYPEYDVPQRFPGIQDDLQPVRFSSKKLQDLGFTFRYKTLEDMFDAAIRTCQEKGLIPLATAAGGDGFASVRAPGETEATIGA

SEQ ID NO: 35797 - DNA, 1359 bp, Zea mays subsp. mays; identical to SEQ ID NO: 28104
  misc_feature (1)..(1359): Ceres Seq. ID no. 12408140

SEQ ID NO: 35798 - protein, 246 aa, Zea mays subsp. mays; identical to SEQ ID NO: 28105
  peptide (1)..(246): Ceres Seq. ID no. 12408141
  misc_feature (151)..(246): Pfam Name: Pfam Description:  Chaperonin 10 Kd subunit
  misc_feature (4)..(246): NCBI GI NO: 15242045 NR Description: chloroplast Cpn21 protein; protein id: At5g20720
  misc_feature (1)..(246): NCBI GI NO: 7331143 NR Description: chaperonin 21 precursor [Lycopersicon esculentum]
  misc_feature (4)..(246): NCBI GI NO: 25453528 NR Description: chaperonin 10 [imported] - Arabidopsis thaliana
  misc_feature (2)..(246): NCBI GI NO: 21780187 NR Description: cp10-like protein [Gossypium hirsutum]
  misc_feature (35)..(246): NCBI GI NO: 399241 NR Description: 20 kDa chaperonin, chloroplast precursor
  misc_feature (150)..(245): NCBI GI NO: 22297730 NR Description: 10kD chaperonin
  misc_feature (152)..(246): NCBI GI NO: 3599923 NR Description: GroES/HSP10 homolog [Lawsonia intracellularis]
  misc_feature (55)..(146): NCBI GI NO: 2493659 NR Description: 10 kDa chaperonin (Protein Cpn10) (groES protein)
  misc_feature (55)..(146): NCBI GI NO: 20807075 NR Description: Co-chaperonin GroES (HSP10)
  misc_feature (54)..(145): NCBI GI NO: 23113174 NR Description: hypothetical protein

SEQ ID NO: 35799 - DNA, 1540 bp, Zea mays subsp. mays
  misc_feature (1)..(1540): Ceres Seq. ID no. 12435829
ggggacctcttctcatcgtcatctccgccgacggaagctgcgtgcgctcgtcgtctttatgctgttccatccaggcttcagttcacaaataaccgccgcactgctggctgctgttaccagcttccttgacgatcgaccagtccaaagctttcgtcatctctttgatcccacgcggcctcacccggctccggctccggctcagcaatcaattccccatacgaattactaatctctctgatttcctttcagctcatcggcatgccgcaggcagcagcagcagcagcagcagcagccgtgcacggcaaggaccccagcaccgtccgtccggccgcgctgcccctgaagctcctccgccctctcctcctcgtggcggtgctcggcacgggcttcctcgccgccgtggccctgctcgtcggcggccccgcctactcgtccgcgctcccgcgcccgccggtcgccctgccgcccgcgccgccgtcgggcggcgggaagcagcagccgctggagcggtgggcgcgggcgccggcgtcccgcgtggcacaacatgaccgacgacgagctgctgtgggcggcgtcgtggcgccccagcgtccggcgctacccgtaccgccggacgcccaaggtggccttcatgttcctgacccgcggcccgctgccgctggcgccgctgtgggagcgcttcttcgccggcgccgggggcggggacgccggcctcttctccgtctacgtgcacgccacgccggggtaccgccccgacttcgcgccggcgtccgccttctaccgccgccaagtgcccagccaggtggccgagtggggcgagccgagcatgttcgacgcggagcggcggctgctggcgaacgcgctgctggacccgggcaacgagcgcttcgtgctgctgtccgagtcgtgcgtgccgctgtacggcttcccggcggtgtacagctacctgacgcggtcgcgggagagcttcgtgggcgcgttcgacgacccgggcccgggaggccggggccggtaccagggcgggctggccccggaggtggtccgcgagcagttccgcaagggcgcagtggttcgagctggaccgcgccctcgccgtcgacgttgtcgccgacggccgctactaccccaagttccgggagcactgccggccgccgtgctacgcggacgagcactacctgccgacggcgctctccatcctggcccccgcgcggatcgccaaccgcagcgtcacgtgggtggactggtcccgcggcggcgcgcacccggccacgttcggggaggccgacgtcggcgaggcgttcctcaggcggctcacggcgcccgggaagggccagggcaactgcacctacaacggccagccggcgcaggtgtgcttcctgttcgcaaggaagctggcgcccggcacgctgcagccgctgctcaggctcgccccgaagctgctcggatacggctgactgtcactgtcactctgactgctcacctctgaatctgaatctgaatcttctccaaagtgacacaaagacacctctgaatctgattt

SEQ ID NO: 35800 - protein, 427 aa, Zea mays subsp. mays
  peptide (1)..(427): Ceres Seq. ID no. 12435830
  misc_feature (69)..(292): Pfam Name: DUF390 Pfam Description: Protein of unknown function
  misc_feature (89)..(370): NCBI GI NO: 23106243 NR Description: hypothetical protein [Azotobacter vinelandii]
  misc_feature (246)..(405): NCBI GI NO: 13592175 NR Description: ppg3 [Leishmania major]
  misc_feature (6)..(396): NCBI GI NO: 7018571 NR Description: hypothetical protein L8325.10 [Leishmania major]
  misc_feature (266)..(403): NCBI GI NO: 28574039 NR Description: Salivary gland secretion 1 CG3047-PA
  misc_feature (270)..(407): NCBI GI NO: 15901602 NR Description: cell wall surface anchor family protein
  misc_feature (270)..(407): NCBI GI NO: 15901602 NR Description: cell wall surface anchor family protein
  misc_feature (256)..(398): NCBI GI NO: 13592175 NR Description: ppg3 [Leishmania major]
  misc_feature (261)..(368): NCBI GI NO: 28574039 NR Description: Salivary gland secretion 1 CG3047-PA
  misc_feature (16)..(363): NCBI GI NO: 27375632 NR Description: blr0521 [Bradyrhizobium japonicum]
  misc_feature (246)..(398): NCBI GI NO: 13592175 NR Description: ppg3 [Leishmania major]
MPQAAAAAAAAAVHGKDPSTVRPAALPLKLLRPLLLVAVLGTGFLAAVALLVGGPAYSSALPRPPVALPPAPPSGGGKQQPLERWARAPASRVAQHDRRRAAVGGVVAPQRPALPVPPDAQGGLHVPDPRPAAAGAAVGALLRRRRGRGRRPLLRLRARHAGVPPRLRAGVRLLPPPSAQPGGRVGRAEHVRRGAAAAGERAAGPGQRALRAAVRVVRAAVRLPGGVQLPDAVAGELRGRVRRPGPGRPGPVPGRAGPGGGPRAVPQGRSGSSWTAPSPSTLSPTAATTPSSGSTAGRRATRTSTTCRRRSPSWPPRGSPTAASRGWTGPAAARTRPRSGRPTSARRSSGGSRRPGRARATAPTTASRRRCASCSQGSWRPARCSRCSGSPRSCSDTADCHCHSDCSPLNLNLNLLQSDTKTPLNLI

SEQ ID NO: 35801 - protein, 313 aa, Zea mays subsp. mays
  peptide (1)..(313): Ceres Seq. ID no. 12435831
  misc_feature (66)..(174): Pfam Name: Pfam Description:  Arabidopsis protein of unknown function, DUF266
  misc_feature (1)..(174): NCBI GI NO: 18402952 NR Description: expressed protein; protein id: At3g21310
  misc_feature (1)..(174): NCBI GI NO: 21554566 NR Description: unknown [Arabidopsis thaliana]
  misc_feature (1)..(174): NCBI GI NO: 15239155 NR Description: putative protein; protein id: At5g11730
  misc_feature (1)..(174): NCBI GI NO: 15218028 NR Description: hypothetical protein; protein id: At1g51770.1
  misc_feature (1)..(174): NCBI GI NO: 15239557 NR Description: putative protein; protein id: At5g25970.1
  misc_feature (1)..(174): NCBI GI NO: 38344090 NR Description: OSJNBb0056F09.13
  misc_feature (1)..(174): NCBI GI NO: 9280235 NR Description: gb|AAD40142
  misc_feature (1)..(174): NCBI GI NO: 15218485 NR Description: unknown protein; protein id: At1g10280.1
  misc_feature (1)..(174): NCBI GI NO: 34895606 NR Description: OSJNBa0083M16.15
  misc_feature (1)..(174): NCBI GI NO: 34907318 NR Description: contains ESTsAU096118
MTDDELLWAASWRPSVRRYPYRRTPKVAFMFLTRGPLPLAPLWERFFAGAGGGDAGLFSVYVHATPGYRPDFAPASAFYRRQVPSQVAEWGEPSMFDAERRLLANALLDPGNERFVLLSESCVPLYGFPAVYSYLTRSRESFVGAFDDPGPGGRGRYQGGLAPEVVREQFRKGAVVRAGPRPRRRRCRRRPLLPQVPGALPAAVLRGRALPADGALHPGPRADRQPQRHVGGLVPRRRAPGHVRGGRRRRGVPQAAHGAREGPGQLHLQRPAGAGVLPVRKEAGARHAAAAAQARPEAARIRLTVTVTLTAHL

SEQ ID NO: 35802 - protein, 284 aa, Zea mays subsp. mays
  peptide (1)..(284): Ceres Seq. ID no. 12435832
  misc_feature (37)..(145): Pfam Name: Pfam Description:  Arabidopsis protein of unknown function, DUF266
  misc_feature (1)..(145): NCBI GI NO: 18402952 NR Description: expressed protein; protein id: At3g21310
  misc_feature (1)..(145): NCBI GI NO: 21554566 NR Description: unknown [Arabidopsis thaliana]
  misc_feature (1)..(145): NCBI GI NO: 15239155 NR Description: putative protein; protein id: At5g11730
  misc_feature (1)..(145): NCBI GI NO: 15218028 NR Description: hypothetical protein; protein id: At1g51770.1
  misc_feature (1)..(145): NCBI GI NO: 15239557 NR Description: putative protein; protein id: At5g25970.1
  misc_feature (1)..(145): NCBI GI NO: 38344090 NR Description: OSJNBb0056F09.13
  misc_feature (1)..(145): NCBI GI NO: 9280235 NR Description: gb|AAD40142
  misc_feature (1)..(145): NCBI GI NO: 15218485 NR Description: unknown protein; protein id: At1g10280.1
  misc_feature (1)..(145): NCBI GI NO: 34895606 NR Description: OSJNBa0083M16.15
  misc_feature (1)..(145): NCBI GI NO: 34907318 NR Description: contains ESTsAU096118
MFLTRGPLPLAPLWERFFAGAGGGDAGLFSVYVHATPGYRPDFAPASAFYRRQVPSQVAEWGEPSMFDAERRLLANALLDPGNERFVLLSESCVPLYGFPAVYSYLTRSRESFVGAFDDPGPGGRGRYQGGLAPEVVREQFRKGAVVRAGPRPRRRRCRRRPLLPQVPGALPAAVLRGRALPADGALHPGPRADRQPQRHVGGLVPRRRAPGHVRGGRRRRGVPQAAHGAREGPGQLHLQRPAGAGVLPVRKEAGARHAAAAAQARPEAARIRLTVTVTLTAHL

SEQ ID NO: 35803 - DNA, 1002 bp, Zea mays subsp. mays
  misc_feature (1)..(1002): Ceres Seq. ID no. 12454907
atccgtccgtccatccaatgcgatggtgtcgttggcgcgccggccgctctccgccgccgtacctgcgggcaacctcctcggcatccatctcttccggtgccccgacgccgttggcatcgtcgccaagctctcggaatgcatcgcctcccgcggtggcaacatccacagcgtcgacgtcttcgtccccgacgacaaacccgtcttctactcccgcagtgagtttacctacaatccaaggctctggtctcgtcatgagctccacaaggatttcctcaatctctcccgctgcttcaatgcgcaaacctccaccgtacgagttcccgatcttgaccccaaatacaacatctccatcctcgcatcaaagcaggaccactgcttgttcgatttgctctatagatggcaagaaggcaggcttccagtacacatcaattgtgtcattagcaaccatgatagaccacaagataatcatgtacggcgttttctccagaggcatggaatcccataccactacttacccaccgcacctgccaacaaaagagagaaagagatcttggaattgatccagggtacagattttgttgtgctggcaagatacatgcagatactctcagaaaacttgttaaaagcatatggtaaagacattatcaatattcatcatggccttcttccctcatttaagggagggaatccttcaagacaggccttcagtgctggggtgaagttaatcggggcaactagccatttcgttactccagaacttgatgctgggccaatcattgaacagatggttgaacgagtctctcaccgagacacgttacagagttttgttgtcaagtctgagaaccttgagaagcagtgcttagcagaggctatcaagtcatattgcgagcttcgtgtcctaccatatgaactcaggaagactgtcgtgttctgatctgagctccctttattttctgtcttattgtacttttatatggattgataaaatgaatttttttagct

SEQ ID NO: 35804 - protein, 310 aa, Zea mays subsp. mays
  peptide (1)..(310): Ceres Seq. ID no. 12454908
  misc_feature (113)..(291): Pfam Name: Pfam Description:  Formyl transferase
  misc_feature (27)..(310): NCBI GI NO: 15236046 NR Description: phosphoribosylglycinamide formyltransferase-like
  misc_feature (16)..(310): NCBI GI NO: 18422794 NR Description: Expressed protein; protein id: At5g47435
  misc_feature (45)..(310): NCBI GI NO: 7433570 NR Description: probable formyltransferase purU - Arabidopsisthaliana
  misc_feature (28)..(310): NCBI GI NO: 15606867 NR Description: formyltetrahydrofolate deformylase
  misc_feature (33)..(310): NCBI GI NO: 15599510 NR Description: formyltetrahydrofolate deformylase
  misc_feature (16)..(310): NCBI GI NO: 21674639 NR Description: formyltetrahydrofolate deformylase
  misc_feature (33)..(310): NCBI GI NO: 27381066 NR Description: formyltetrahydrofolate deformylase
  misc_feature (33)..(310): NCBI GI NO: 23105027 NR Description: hypothetical protein [Azotobacter vinelandii]
  misc_feature (15)..(310): NCBI GI NO: 37523894 NR Description: formyltetrahydrofolate deformylase
  misc_feature (33)..(310): NCBI GI NO: 16127860 NR Description: formyltetrahydrofolate deformylase
SVRPSNAMVSLARRPLSAAVPAGNLLGIHLFRCPDAVGIVAKLSECIASRGGNIHSVDVFVPDDKPVFYSRSEFTYNPRLWSRHELHKDFLNLSRCFNAQTSTVRVPDLDPKYNISILASKQDHCLFDLLYRWQEGRLPVHINCVISNHDRPQDNHVRRFLQRHGIPYHYLPTAPANKREKEILELIQGTDFVVLARYMQILSENLLKAYGKDIINIHHGLLPSFKGGNPSRQAFSAGVKLIGATSHFVTPELDAGPIIEQMVERVSHRDTLQSFVVKSENLEKQCLAEAIKSYCELRVLPYELRKTVVF

SEQ ID NO: 35805 - protein, 303 aa, Zea mays subsp. mays
  peptide (1)..(303): Ceres Seq. ID no. 12454909
  misc_feature (106)..(284): Pfam Name: Pfam Description:  Formyl transferase
  misc_feature (20)..(303): NCBI GI NO: 15236046 NR Description: phosphoribosylglycinamide formyltransferase-like
  misc_feature (9)..(303): NCBI GI NO: 18422794 NR Description: Expressed protein; protein id: At5g47435
  misc_feature (38)..(303): NCBI GI NO: 7433570 NR Description: probable formyltransferase purU - Arabidopsisthaliana
  misc_feature (21)..(303): NCBI GI NO: 15606867 NR Description: formyltetrahydrofolate deformylase
  misc_feature (26)..(303): NCBI GI NO: 15599510 NR Description: formyltetrahydrofolate deformylase
  misc_feature (9)..(303): NCBI GI NO: 21674639 NR Description: formyltetrahydrofolate deformylase
  misc_feature (26)..(303): NCBI GI NO: 27381066 NR Description: formyltetrahydrofolate deformylase
  misc_feature (26)..(303): NCBI GI NO: 23105027 NR Description: hypothetical protein [Azotobacter vinelandii]
  misc_feature (8)..(303): NCBI GI NO: 37523894 NR Description: formyltetrahydrofolate deformylase
  misc_feature (26)..(303): NCBI GI NO: 16127860 NR Description: formyltetrahydrofolate deformylase
MVSLARRPLSAAVPAGNLLGIHLFRCPDAVGIVAKLSECIASRGGNIHSVDVFVPDDKPVFYSRSEFTYNPRLWSRHELHKDFLNLSRCFNAQTSTVRVPDLDPKYNISILASKQDHCLFDLLYRWQEGRLPVHINCVISNHDRPQDNHVRRFLQRHGIPYHYLPTAPANKREKEILELIQGTDFVVLARYMQILSENLLKAYGKDIINIHHGLLPSFKGGNPSRQAFSAGVKLIGATSHFVTPELDAGPIIEQMVERVSHRDTLQSFVVKSENLEKQCLAEAIKSYCELRVLPYELRKTVVF

SEQ ID NO: 35806 - protein, 185 aa, Zea mays subsp. mays
  peptide (1)..(185): Ceres Seq. ID no. 12454910
PSVHPMRWCRWRAGRSPPPYLRATSSASISSGAPTPLASSPSSRNASPPAVATSTASTSSSPTTNPSSTPAVSLPTIQGSGLVMSSTRISSISPAASMRKPPPYEFPILTPNTTSPSSHQSRTTACSICSIDGKKAGFQYTSIVSLATMIDHKIIMYGVFSRGMESHTTTYPPHLPTKERKRSWN

SEQ ID NO: 35807 - DNA, 2394 bp, Zea mays subsp. mays
  misc_feature (1)..(2394): Ceres Seq. ID no. 12567160
  misc_feature (1713)..(1713): n is a, c, t, g, unknown, or other
  misc_feature (1903)..(1903): n is a, c, t, g, unknown, or other
  misc_feature (1523)..(1523): n is a, c, t, g, unknown, or other
  misc_feature (1522)..(1522): n is a, c, t, g, unknown, or other
  misc_feature (481)..(481): n is a, c, t, g, unknown, or other
  misc_feature (1736)..(1736): n is a, c, t, g, unknown, or other
  misc_feature (1672)..(1672): n is a, c, t, g, unknown, or other
  misc_feature (1647)..(1647): n is a, c, t, g, unknown, or other
  misc_feature (1535)..(1535): n is a, c, t, g, unknown, or other
  misc_feature (1785)..(1785): n is a, c, t, g, unknown, or other
  misc_feature (601)..(601): n is a, c, t, g, unknown, or other
  misc_feature (1572)..(1572): n is a, c, t, g, unknown, or other
  misc_feature (1694)..(1694): n is a, c, t, g, unknown, or other
  misc_feature (1972)..(1972): n is a, c, t, g, unknown, or other
  misc_feature (1870)..(1870): n is a, c, t, g, unknown, or other
  misc_feature (1596)..(1596): n is a, c, t, g, unknown, or other
  misc_feature (1506)..(1506): n is a, c, t, g, unknown, or other
accacatcccacgccgagcgcgacgccagcagcaggctagctccgctgtccgctccgccgctcactagctagctgctggactgcgcctccctccatcgcgccggcgcgcgcgcctagctagcggagccgccttttcatggtccccgccgtggtcgggacgagatgcctcgcctcgcattcctccgccgctccctccccgcgaggcttctcgcgcgagcgtgtggtggtggtggtggagtccgggggagccctggccaggtggcgcgggacgaggaggccggaggcagcggcggaatgagcgggcggtcgtcggcgggtgggccgtccggcggggagtgctacgcgtgcacgcagcccggggtgccggcgttccactccacgacgtgcgaccaggtgcactcgccggactgggacgccgacgcggggtcctcgctcgtgccggtccaagggccaggcgcaggcggcggcggcgccgcggcancggcacgcggcgcggtggctgttggggcccgtgctggacccgcggagcaggcgcgtgcagcgctggaaccgctggatcctgctgggccgcgccgccgcgctggcggtggacccgctcttnttctacgcgctctccatcggccgcgccggccagccctgcctctacatggacgccgggctcgcctccgcggtcacggcgctgcggacctgcgccgacgtggcgcacctcgcgcacgtgctcctgcagctccgcctcgcctacgtctcccgcgagtccctcgtcgtcgggtgcggcaagctcgtgtgggacgcccgcgccgtcgccgcgcactacgcacgctccgtcaagggcctctgcttcgacctcttcgtcatcctccccatcccgcaggttatcttctggctggttataccaaagttaatcagggaggagcaggttaagcttatcatgacaatactgctgctcatgttcatagttcaatttctccccaaggtctaccatagtatacacatcatgaggaaaatgcagaagattgcgggtgggtgctggtatgttcttgcgatccagcgcatcgcttcctgcctccaggaagaatgcaagagaaacaacagttgcgatctaatatcgctagcttgttccaaggagatatgttttcaccctccgtggtcatcgaatgttaacggattcgcgtgcgatacgaacatgacctcctttagccaacaaaatgtgtctacttgcttgagtggaaaaggttccttcgcttatggaatctatttgggggctcttcctgttatatcgagcaattcgcttgctgtcaaaatactgtatcctatattttggggcctcatgacactcagtacttttggtaacgatcttgccccaacaagcaatggtattgaggtgatattcagcataatcaatgtcctcagtggccttatgctcttcacgttgctgatcggaaacatacaggtatttctgcacgcggtcctggcaaggaagcggaagatgcagctgcggttccgggnacatggaatggtggannaggcggaggcanctgccgtcccggctgaggcaaagggtgcgcaaatacnagcgcgaacgctgggccgccgtcncgggagacgaggagatggagatgatcaaggatctgcctgaagggctgagangggacatcaagcgctacctgtgccntgagctagttaagcaggttccnctgttccatggcatggacnacctgatcctggacaacatctgngaccggctgcggcctctggtgttgtccagcggggagaaggtgatccggnagggcgaccccgtgcagcgcatggtgttcatcctgcagggcaagctccggagcacgcagccgctgaccaaaggcgtggtggcgangtgcatgctgggcgcgggcagcttcctgggcgncgagctgctgtcgtggtgcctgcgccgccgccttcttggaccggctccccgcgtcgtcggccacgttcnagtgcgtggaccccgcgcaggcgttctgcctcggcgcgccggacctgcggttcatcaccgagcacttccggtacaacttcgccaacgagaagctcaagcgcacggcgcggtactactcgtccaactggcggacgtgggccgccgtcaacatccagctcgcgtggcgcaggtacagggcccggacgtcggcggacctggcggcgcaggccgcgcctccgttggtgggcgggcccgacgacggggaccggcggctcagacactacgcggccatgttcatgtcgctacggccgcatgaccacctagagtgagcaggagggaccatcctagctgtgccggccgcgtcatggtgactgtacagtgtgcactgtaatagtatattgctgccatcttttgcgtaagtgaattagtggttccgaattgtc

SEQ ID NO: 35808 - protein, 329 aa, Zea mays subsp. mays
  peptide (1)..(329): Ceres Seq. ID no. 12567161
  misc_feature (8)..(267): Pfam Name: Pfam Description:  Ion transport protein
  misc_feature (1)..(75): NCBI GI NO: 13236666 NR Description: putative cyclic nucleotide and calmodulin-regulatedion channel protein
  misc_feature (123)..(286): NCBI GI NO: 13236666 NR Description: putative cyclic nucleotide and calmodulin-regulatedion channel protein
  misc_feature (1)..(137): NCBI GI NO: 15242291 NR Description: cyclic nucleotide-regulated ion channel
  misc_feature (123)..(286): NCBI GI NO: 15242291 NR Description: cyclic nucleotide-regulated ion channel
  misc_feature (73)..(191): NCBI GI NO: 13236666 NR Description: putative cyclic nucleotide and calmodulin-regulatedion channel protein
  misc_feature (129)..(286): NCBI GI NO: 30961811 NR Description: putative cyclic nucleotide and calmodulin-regulatedion channel protein
  misc_feature (1)..(137): NCBI GI NO: 15239581 NR Description: cyclic nucleotide-regulated ion channel
  misc_feature (124)..(286): NCBI GI NO: 15239581 NR Description: cyclic nucleotide-regulated ion channel
  misc_feature (1)..(137): NCBI GI NO: 34910098 NR Description: putative cyclic nucleotide and calmodulin-regulatedion channel
  misc_feature (125)..(286): NCBI GI NO: 34910098 NR Description: putative cyclic nucleotide and calmodulin-regulatedion channel
  misc_feature (287)..(287): Xaa is any aa, unknown or other
  misc_feature (292)..(292): Xaa is any aa, unknown or other
  misc_feature (293)..(293): Xaa is any aa, unknown or other
  misc_feature (297)..(297): Xaa is any aa, unknown or other
  misc_feature (309)..(309): Xaa is any aa, unknown or other
  misc_feature (317)..(317): Xaa is any aa, unknown or other
MDAGLASAVTALRTCADVAHLAHVLLQLRLAYVSRESLVVGCGKLVWDARAVAAHYARSVKGLCFDLFVILPIPQVIFWLVIPKLIREEQVKLIMTILLLMFIVQFLPKVYHSIHIMRKMQKIAGGCWYVLAIQRIASCLQEECKRNNSCDLISLACSKEICFHPPWSSNVNGFACDTNMTSFSQQNVSTCLSGKGSFAYGIYLGALPVISSNSLAVKILYPIFWGLMTLSTFGNDLAPTSNGIEVIFSIINVLSGLMLFTLLIGNIQVFLHAVLARKRKMQLRFRXHGMVXXAEAXAVPAEAKGAQIXARTLGRRXGRRGDGDDQGSA

SEQ ID NO: 35809 - protein, 252 aa, Zea mays subsp. mays
  peptide (1)..(252): Ceres Seq. ID no. 12567162
  misc_feature (40)..(95): NCBI GI NO: 15242291 NR Description: cyclic nucleotide-regulated ion channel
  misc_feature (1)..(109): NCBI GI NO: 13236666 NR Description: putative cyclic nucleotide and calmodulin-regulatedion channel protein
  misc_feature (107)..(107): Xaa is any aa, unknown or other
  misc_feature (147)..(147): Xaa is any aa, unknown or other
MPRLAFLRRSLPARLLARACGGGGGVRGSPGQVARDEEAGGSGGMSGRSSAGGPSGGECYACTQPGVPAFHSTTCDQVHSPDWDADAGSSLVPVQGPGAGGGGAAAXARGAVAVGARAGPAEQARAALEPLDPAGPRRRAGGGPALXLRALHRPRRPALPLHGRRARLRGHGAADLRRRGAPRARAPAAPPRLRLPRVPRRRVRQARVGRPRRRRALRTLRQGPLLRPLRHPPHPAGYLLAGYTKVNQGGAG

SEQ ID NO: 35810 - protein, 252 aa, Zea mays subsp. mays
  peptide (1)..(252): Ceres Seq. ID no. 12567163
  misc_feature (78)..(148): Pfam Name: Pfam Description:  Cyclic nucleotide-binding domain
  misc_feature (1)..(148): NCBI GI NO: 13236666 NR Description: putative cyclic nucleotide and calmodulin-regulatedion channel protein
  misc_feature (1)..(148): NCBI GI NO: 15242291 NR Description: cyclic nucleotide-regulated ion channel
  misc_feature (1)..(148): NCBI GI NO: 30961811 NR Description: putative cyclic nucleotide and calmodulin-regulatedion channel protein
  misc_feature (1)..(148): NCBI GI NO: 15239581 NR Description: cyclic nucleotide-regulated ion channel
  misc_feature (1)..(148): NCBI GI NO: 34910098 NR Description: putative cyclic nucleotide and calmodulin-regulatedion channel
  misc_feature (1)..(141): NCBI GI NO: 30961805 NR Description: putative cyclic nucleotide and calmodulin-regulatedion channel protein
  misc_feature (2)..(142): NCBI GI NO: 15226370 NR Description: cyclic nucleotide-regulated ion channel, putative
  misc_feature (2)..(139): NCBI GI NO: 25412226 NR Description: hypothetical protein At2g24610
  misc_feature (2)..(139): NCBI GI NO: 30682497 NR Description: cyclic nucleotide-regulated ion channel, putative
  misc_feature (2)..(139): NCBI GI NO: 15219100 NR Description: cyclic nucleotide-regulated ion channel, putative
  misc_feature (5)..(5): Xaa is any aa, unknown or other
  misc_feature (9)..(9): Xaa is any aa, unknown or other
  misc_feature (22)..(22): Xaa is any aa, unknown or other
  misc_feature (30)..(30): Xaa is any aa, unknown or other
  misc_feature (47)..(47): Xaa is any aa, unknown or other
  misc_feature (55)..(55): Xaa is any aa, unknown or other
  misc_feature (62)..(62): Xaa is any aa, unknown or other
  misc_feature (69)..(69): Xaa is any aa, unknown or other
  misc_feature (76)..(76): Xaa is any aa, unknown or other
  misc_feature (93)..(93): Xaa is any aa, unknown or other
  misc_feature (121)..(121): Xaa is any aa, unknown or other
  misc_feature (132)..(132): Xaa is any aa, unknown or other
  misc_feature (155)..(155): Xaa is any aa, unknown or other
MEWWXRRRXLPSRLRQRVRKYXRERWAAVXGDEEMEMIKDLPEGLRXDIKRYLCXELVKQVXLFHGMDXLILDNIXDRLRPLVLSSGEKVIRXGDPVQRMVFILQGKLRSTQPLTKGVVAXCMLGAGSFLGXELLSWCLRRRLLGPAPRVVGHVXVRGPRAGVLPRRAGPAVHHRALPVQLRQREAQAHGAVLLVQLADVGRRQHPARVAQVQGPDVGGPGGAGRASVGGRARRRGPAAQTLRGHVHVATAA

SEQ ID NO: 35811 - DNA, 1071 bp, Zea mays subsp. mays
  misc_feature (1)..(1071): Ceres Seq. ID no. 12435826
attaacaaaacgcctcccgaagcagacagcctcactccgcgcgcccgcgcagcgaagcagggagcatggagctgaggccgccgcgcctgcgaccgtgagcacgctctgtagccagccgggtccggctgggcggccatggcagccaccgttctcttcactccggcgcagtgccaccgcgccaccgcgacgacgagcgggcgaggagccccctcgcattgcgccctggcccctgggcaccggcgcccggggcggggatcggtgagggcggtgcctcccgagcagagcagcttgcctcaggcggcggctgctgtctacgggactgctggcgacgtcaaggccgcgctgtaccgagcgctggacggcgccaacagggggatattcgggatgacgtccgccaagcgctcggagatccatggcctggtggagctgctcgagtccaggaaccccacgccggagcccaccgccaagctgcaggacaaggtggatggatgctggaaactcatctacagcacgatctccatactggggaagaagagaaccaagttagggctgcgagatttcatcagcctaggggacttcctccagataattgacgtcaaacaggaaaaggcggtgaatgtggtagagttcagcgcgagagcactgaagatactgacggggaagctcaccatcgaggcttcgtacagagttaccagccaaacaagagtggatatcaagctcgagagctcaaccatcacccctgagcagctgatgaacatatttcagaagaactacgacatgctcctggaaatattcaatccagagggctggctggagataacatatgttgatgaatctctacggattggacgagatgacaaagaaaacatattcgtgctggagagagcagacctgccagacgtccgatgacgcgcagttcatgcgcacaggcggtccgtaattttgtgacgaggagcgagtgtaacacgcagaaaacatagcctctgcaaatatataaatatggtatatccgacagctaggactcttgcatggttattggcagttcgatgcagacaatctactacttgaagt

SEQ ID NO: 35812 - protein, 257 aa, Zea mays subsp. mays
  peptide (1)..(257): Ceres Seq. ID no. 12435827
  misc_feature (66)..(189): Pfam Name: Pfam Description:  PAP_fibrillin
  misc_feature (10)..(230): NCBI GI NO: 32489298 NR Description: OSJNBa0028I23.21
  misc_feature (62)..(254): NCBI GI NO: 30682868 NR Description: plastid-lipid associated protein PAP/fibrillinfamily
  misc_feature (62)..(189): NCBI GI NO: 9758960 NR Description: gene_id:MYH9
  misc_feature (65)..(250): NCBI GI NO: 16329838 NR Description: fibrillin [Synechocystis sp. PCC 6803]
  misc_feature (67)..(250): NCBI GI NO: 23126201 NR Description: hypothetical protein [Nostoc punctiforme]
  misc_feature (67)..(250): NCBI GI NO: 22297962 NR Description: fibrillin [Thermosynechococcus elongatus BP-1]
  misc_feature (67)..(251): NCBI GI NO: 5020103 NR Description: fibrillin [Nostoc sp. PCC 8009]
  misc_feature (67)..(250): NCBI GI NO: 17231810 NR Description: fibrillin [Nostoc sp. PCC 7120]
  misc_feature (67)..(248): NCBI GI NO: 23041005 NR Description: hypothetical protein
  misc_feature (91)..(253): NCBI GI NO: 23039408 NR Description: hypothetical protein
MAATVLFTPAQCHRATATTSGRGAPSHCALAPGHRRPGRGSVRAVPPEQSSLPQAAAAVYGTAGDVKAALYRALDGANRGIFGMTSAKRSEIHGLVELLESRNPTPEPTAKLQDKVDGCWKLIYSTISILGKKRTKLGLRDFISLGDFLQIIDVKQEKAVNVVEFSARALKILTGKLTIEASYRVTSQTRVDIKLESSTITPEQLMNIFQKNYDMLLEIFNPEGWLEITYVDESLRIGRDDKENIFVLERADLPDVR

SEQ ID NO: 35813 - protein, 174 aa, Zea mays subsp. mays
  peptide (1)..(174): Ceres Seq. ID no. 12435828
  misc_feature (1)..(106): Pfam Name: Pfam Description:  PAP_fibrillin
  misc_feature (1)..(147): NCBI GI NO: 32489298 NR Description: OSJNBa0028I23.21
  misc_feature (1)..(171): NCBI GI NO: 30682868 NR Description: plastid-lipid associated protein PAP/fibrillinfamily
  misc_feature (1)..(106): NCBI GI NO: 9758960 NR Description: gene_id:MYH9
  misc_feature (1)..(167): NCBI GI NO: 16329838 NR Description: fibrillin [Synechocystis sp. PCC 6803]
  misc_feature (1)..(167): NCBI GI NO: 23126201 NR Description: hypothetical protein [Nostoc punctiforme]
  misc_feature (1)..(167): NCBI GI NO: 22297962 NR Description: fibrillin [Thermosynechococcus elongatus BP-1]
  misc_feature (1)..(168): NCBI GI NO: 5020103 NR Description: fibrillin [Nostoc sp. PCC 8009]
  misc_feature (1)..(167): NCBI GI NO: 17231810 NR Description: fibrillin [Nostoc sp. PCC 7120]
  misc_feature (1)..(165): NCBI GI NO: 23041005 NR Description: hypothetical protein
  misc_feature (8)..(170): NCBI GI NO: 23039408 NR Description: hypothetical protein
MTSAKRSEIHGLVELLESRNPTPEPTAKLQDKVDGCWKLIYSTISILGKKRTKLGLRDFISLGDFLQIIDVKQEKAVNVVEFSARALKILTGKLTIEASYRVTSQTRVDIKLESSTITPEQLMNIFQKNYDMLLEIFNPEGWLEITYVDESLRIGRDDKENIFVLERADLPDVR

SEQ ID NO: 35814 - DNA, 2450 bp, Zea mays subsp. mays
  misc_feature (1)..(2450): Ceres Seq. ID no. 12435822
atcacacatccaccgccgccgccaccaccaccacccgccctatacccgtatataattactcgtacccggacgccaccgccgcctgcgccatgggcgactcctcggtggccggcgcgctcgtgccgtccgtgcccaagccggagcccgcgccgtccggtgacacctccgcggcggccgcggcgactacagcggcgctggcgatgccggaggaggcgggtatgcgcgcggcgtcggcgtcgcctcaggggcctgcggaggagggggagggccccgccgatagggaccttctctgcccgatctgcatggccgtcatcaaggacgccttcctcaccgcatgcggccacagcttctgctacatgtgcatcgtcacgcatctcagcaacaagagcgactgcccctgctgcggccactaccttaccaaggcccagctctaccccaactttctccttgacaaggttctgaagaaaatatcagcccaacaaatagcaaaaacagcatcgccaatcgatcaatttcgatgtgcattgcaacagggaaatgaaatgggggttaaagagttggatagccttatgactttgattgctgagaagaagcggcaaatggaacaacaagaatcagagacaaatatgcaaatattgctagtcttcttacactgccttagaaagcaaaagctagaagagttgaatgagattcaaactgatctacaatacatcaaagaggatataagttctgtggagagacatagggcagaattatatcgcacaaaagaaaggtactccatgaagctgcgcatgcttttagatgagcctactgcacaaaaaatgtggccctcttctatagacaaagctagctgtcgctttcttcccaactctcggacaccacttagtggatcatgtccaggaactttacagaataagaagcttgatttgaaagctcaagtaagccatcaaggatttcaaaggagagatgctctaacttcttctgatcctcctaactcccctatacaatcgggtaatgttattgctaggaagaggcgagttcaagcacagttcaatgagcttcaagaatactacctgcaaagacgtcgtactggagcacaggcacgcagacaggaagaaagagatatagttgcaatgaatagagaaggctatcatgcaggtcttcaggatttccagtctgtgctaacaacgttcactcgatacagtcgtctacgtgtcattgcggaactaagacatggagacttgtttcactctgccaatattgtatccagtattgaatttgatcgtgatgatgaactatttgctaccgctggagtctcgaaacgtattaaagtcttcgaattttccactgttgttaatgaaccatcagatgtgcattgcccagttgttgaaatggctaccagatctaaacttagctgcctaagctggaacaagtactcaaaaaatattattgcaagcagtgactatgagggtatagtaactgtgtgggatgttcagacccgtcagagtgtgatggaatatgaagagcatgagaagagagcatggagtgttgatttttctcgcacagactcttcaatgctagtatctgggagtgatgattgcaaggtgaaagtgtggtgcacaaatcaagaagcaagtgtgatcaatattgatatgaaagcaaatatttgctcggttaaatataatcctggatcaagcttctacgttgcagtcggatctgctgatcaccatattcattactttgatttacgtaatccaagttcgcctgtccatattttcggggggcacaagaaagcagtatcgtatgtgaaattcttatctaacaatgagcttgcgtctgcgtcaacagatagcacattacgcttatgggatgtcaaggataactgcccggtacggacattcagagggcacaaaaatgaaaagaactttgttggcttgtctgtgaacaatgaatatattgcttgtggaagtgagacaaatgaggtttttgtttatcacaaggctatctcgaaaccggcagcaagccatagatttgtatcttctgacccggatgatgccgatgatgatcctggttcttatttcattagtgctgtctgctggaagagtgatagccctacgatgttgactgctaacagtcaggggaccataaaagttcttgtacttgctccttgatgtcatggagggcgttcaagaggttcacagtactgtccagttgtttcctttcgtgtcattatattcccccaaaattgggaacgggggcataattgatctccggttagggaatgaagttttgcagatggtcagctgacgtagggttttgaggtatcagaatgtgcatagtcatgtttatgttgtataggtgtaattgtgtaaagcagccaagttattggttacaagtgtaacacgagaaatacacattaatataaaaaaaacctccagctcgtttgtgct

SEQ ID NO: 35815 - protein, 722 aa, Zea mays subsp. mays
  peptide (1)..(722): Ceres Seq. ID no. 12435823
  misc_feature (97)..(134): Pfam Name: RING finger Pfam Description: Zinc finger, C3HC4 type
  misc_feature (204)..(722): NCBI GI NO: 13925701 NR Description: COP1 [Oryza sativa subsp. indica]
  misc_feature (47)..(721): NCBI GI NO: 4090943 NR Description: COP1 homolog [Lycopersicon esculentum]
  misc_feature (82)..(721): NCBI GI NO: 15225760 NR Description: COP1 regulatory protein; protein id: At2g32950.1
  misc_feature (82)..(721): NCBI GI NO: 402685 NR Description: regulatory protein
  misc_feature (52)..(721): NCBI GI NO: 11127996 NR Description: COP1 [Ipomoea nil]
  misc_feature (92)..(721): NCBI GI NO: 3121867 NR Description: COP1 regulatory protein
  misc_feature (92)..(721): NCBI GI NO: 7688063 NR Description: constitutively photomorphogenic 1 protein
  misc_feature (85)..(721): NCBI GI NO: 15029364 NR Description: photoregulatory zinc-finger protein COP1
  misc_feature (326)..(720): NCBI GI NO: 21359963 NR Description: constitutive photomorphogenic protein
  misc_feature (27)..(245): NCBI GI NO: 21359963 NR Description: constitutive photomorphogenic protein
HTSTAAATTTTRPIPVYNYSYPDATAACAMGDSSVAGALVPSVPKPEPAPSGDTSAAAAATTAALAMPEEAGMRAASASPQGPAEEGEGPADRDLLCPICMAVIKDAFLTACGHSFCYMCIVTHLSNKSDCPCCGHYLTKAQLYPNFLLDKVLKKISAQQIAKTASPIDQFRCALQQGNEMGVKELDSLMTLIAEKKRQMEQQESETNMQILLVFLHCLRKQKLEELNEIQTDLQYIKEDISSVERHRAELYRTKERYSMKLRMLLDEPTAQKMWPSSIDKASCRFLPNSRTPLSGSCPGTLQNKKLDLKAQVSHQGFQRRDALTSSDPPNSPIQSGNVIARKRRVQAQFNELQEYYLQRRRTGAQARRQEERDIVAMNREGYHAGLQDFQSVLTTFTRYSRLRVIAELRHGDLFHSANIVSSIEFDRDDELFATAGVSKRIKVFEFSTVVNEPSDVHCPVVEMATRSKLSCLSWNKYSKNIIASSDYEGIVTVWDVQTRQSVMEYEEHEKRAWSVDFSRTDSSMLVSGSDDCKVKVWCTNQEASVINIDMKANICSVKYNPGSSFYVAVGSADHHIHYFDLRNPSSPVHIFGGHKKAVSYVKFLSNNELASASTDSTLRLWDVKDNCPVRTFRGHKNEKNFVGLSVNNEYIACGSETNEVFVYHKAISKPAASHRFVSSDPDDADDDPGSYFISAVCWKSDSPTMLTANSQGTIKVLVLAP

SEQ ID NO: 35816 - protein, 693 aa, Zea mays subsp. mays
  peptide (1)..(693): Ceres Seq. ID no. 12435824
  misc_feature (68)..(105): Pfam Name: RING finger Pfam Description: Zinc finger, C3HC4 type
  misc_feature (175)..(693): NCBI GI NO: 13925701 NR Description: COP1 [Oryza sativa subsp. indica]
  misc_feature (18)..(692): NCBI GI NO: 4090943 NR Description: COP1 homolog [Lycopersicon esculentum]
  misc_feature (53)..(692): NCBI GI NO: 15225760 NR Description: COP1 regulatory protein; protein id: At2g32950.1
  misc_feature (53)..(692): NCBI GI NO: 402685 NR Description: regulatory protein
  misc_feature (23)..(692): NCBI GI NO: 11127996 NR Description: COP1 [Ipomoea nil]
  misc_feature (63)..(692): NCBI GI NO: 3121867 NR Description: COP1 regulatory protein
  misc_feature (63)..(692): NCBI GI NO: 7688063 NR Description: constitutively photomorphogenic 1 protein
  misc_feature (56)..(692): NCBI GI NO: 15029364 NR Description: photoregulatory zinc-finger protein COP1
  misc_feature (297)..(691): NCBI GI NO: 21359963 NR Description: constitutive photomorphogenic protein
  misc_feature (1)..(216): NCBI GI NO: 21359963 NR Description: constitutive photomorphogenic protein
MGDSSVAGALVPSVPKPEPAPSGDTSAAAAATTAALAMPEEAGMRAASASPQGPAEEGEGPADRDLLCPICMAVIKDAFLTACGHSFCYMCIVTHLSNKSDCPCCGHYLTKAQLYPNFLLDKVLKKISAQQIAKTASPIDQFRCALQQGNEMGVKELDSLMTLIAEKKRQMEQQESETNMQILLVFLHCLRKQKLEELNEIQTDLQYIKEDISSVERHRAELYRTKERYSMKLRMLLDEPTAQKMWPSSIDKASCRFLPNSRTPLSGSCPGTLQNKKLDLKAQVSHQGFQRRDALTSSDPPNSPIQSGNVIARKRRVQAQFNELQEYYLQRRRTGAQARRQEERDIVAMNREGYHAGLQDFQSVLTTFTRYSRLRVIAELRHGDLFHSANIVSSIEFDRDDELFATAGVSKRIKVFEFSTVVNEPSDVHCPVVEMATRSKLSCLSWNKYSKNIIASSDYEGIVTVWDVQTRQSVMEYEEHEKRAWSVDFSRTDSSMLVSGSDDCKVKVWCTNQEASVINIDMKANICSVKYNPGSSFYVAVGSADHHIHYFDLRNPSSPVHIFGGHKKAVSYVKFLSNNELASASTDSTLRLWDVKDNCPVRTFRGHKNEKNFVGLSVNNEYIACGSETNEVFVYHKAISKPAASHRFVSSDPDDADDDPGSYFISAVCWKSDSPTMLTANSQGTIKVLVLAP

SEQ ID NO: 35817 - protein, 656 aa, Zea mays subsp. mays
  peptide (1)..(656): Ceres Seq. ID no. 12435825
  misc_feature (31)..(68): Pfam Name: RING finger Pfam Description: Zinc finger, C3HC4 type
  misc_feature (138)..(656): NCBI GI NO: 13925701 NR Description: COP1 [Oryza sativa subsp. indica]
  misc_feature (1)..(655): NCBI GI NO: 4090943 NR Description: COP1 homolog [Lycopersicon esculentum]
  misc_feature (16)..(655): NCBI GI NO: 15225760 NR Description: COP1 regulatory protein; protein id: At2g32950.1
  misc_feature (16)..(655): NCBI GI NO: 402685 NR Description: regulatory protein
  misc_feature (1)..(655): NCBI GI NO: 11127996 NR Description: COP1 [Ipomoea nil]
  misc_feature (26)..(655): NCBI GI NO: 3121867 NR Description: COP1 regulatory protein
  misc_feature (26)..(655): NCBI GI NO: 7688063 NR Description: constitutively photomorphogenic 1 protein
  misc_feature (19)..(655): NCBI GI NO: 15029364 NR Description: photoregulatory zinc-finger protein COP1
  misc_feature (260)..(654): NCBI GI NO: 21359963 NR Description: constitutive photomorphogenic protein
  misc_feature (1)..(179): NCBI GI NO: 21359963 NR Description: constitutive photomorphogenic protein
MPEEAGMRAASASPQGPAEEGEGPADRDLLCPICMAVIKDAFLTACGHSFCYMCIVTHLSNKSDCPCCGHYLTKAQLYPNFLLDKVLKKISAQQIAKTASPIDQFRCALQQGNEMGVKELDSLMTLIAEKKRQMEQQESETNMQILLVFLHCLRKQKLEELNEIQTDLQYIKEDISSVERHRAELYRTKERYSMKLRMLLDEPTAQKMWPSSIDKASCRFLPNSRTPLSGSCPGTLQNKKLDLKAQVSHQGFQRRDALTSSDPPNSPIQSGNVIARKRRVQAQFNELQEYYLQRRRTGAQARRQEERDIVAMNREGYHAGLQDFQSVLTTFTRYSRLRVIAELRHGDLFHSANIVSSIEFDRDDELFATAGVSKRIKVFEFSTVVNEPSDVHCPVVEMATRSKLSCLSWNKYSKNIIASSDYEGIVTVWDVQTRQSVMEYEEHEKRAWSVDFSRTDSSMLVSGSDDCKVKVWCTNQEASVINIDMKANICSVKYNPGSSFYVAVGSADHHIHYFDLRNPSSPVHIFGGHKKAVSYVKFLSNNELASASTDSTLRLWDVKDNCPVRTFRGHKNEKNFVGLSVNNEYIACGSETNEVFVYHKAISKPAASHRFVSSDPDDADDDPGSYFISAVCWKSDSPTMLTANSQGTIKVLVLAP

SEQ ID NO: 35818 - DNA, 396 bp, Zea mays subsp. mays
  misc_feature (1)..(396): Ceres Seq. ID no. 3010931
  misc_feature (366)..(366): n is a, c, t, g, unknown, or other
caactttcagtcaagttttgttcaacaagggtctgattgagacttccatgaaactgatcgatttgtcgttgctgtcatgtatgtgaacttatggtttagaagcagctaagtttccaacatgttacatggtagggaatgtatttgctaacactatttgctagcactacaagttccgtatgccctatgtgatagatggaaagattgaatgaagggctgtcattatttgatgcaatactgattgttccaatgtttcaaattgtttggaccttcttctctatttgtacaggatttgtttactttcaagaatatcaagtaagttcttgtttattataatcggataatgaagtkaawcatgcatttcctaantataaactgatgaatctgtttttctgctgt

SEQ ID NO: 35819 - protein, 46 aa, Zea mays subsp. mays
  peptide (1)..(46): Ceres Seq. ID no. 3010932
  misc_feature (1)..(45): NCBI GI NO: 15231596 NR Description: unknown protein; protein id: At3g26670
MERLNEGLSLFDAILIVPMFQIVWTFFSICTGFVYFQEYQVSSCLL

SEQ ID NO: 35820 - DNA, 1105 bp, Zea mays subsp. mays
  misc_feature (1)..(1105): Ceres Seq. ID no. 14305301
acaagctcgcttttttaaaatctgtccctgcaattctctcctctgttcccactcattaagataccaccgcctcccgccgcccgccgcccgccgccgacgagcaccgcagcctgacacagagccgcgggcgagccatcgcgtgcggcctcgcccgggatggcgaccatggagagcctgatcgggctggtgaaccggatccagcgcgcgtgcaccgtcctcggcgaccacggcggcggcggcggtgagggctccctctgggaggcgctcccctccgtcgctgtcgttggcgggcagagttccgggaagtcgtcggtgcttgagagcatagtagggagggacttcctgccccgtggatctggtatcgtcacgaggcggcctttagtgctgcagctccacaagacagatggtgggcacgagtatgctgagtttctccacgccccgcggaagcggttcaccgactttgctgctgtgaggaaagagattgctgatgaaacagaccgcattactgggaaaactaaagctatttcaaatgttcccatccatttgagtatatattcgccacatgttgttaacttgacacttattgatcttcctggactgacaaaggtcgctgtagaggggcaagcagaatctattgttcaagatattgaaaacatggttcgatcttatgttgacaagccaaattgcatcatcttggctatctccccagctaaccaagatatagcaacgtcagatgctatcaagcttgccagggatgtcgatccttcaggtgacaggacatttggagtcttaacaaagcttgatttgatggacaagggtaccaatgccgttgatgtacttgaagggagacaatatcgcttacaacacccctgggttggaattgttaatcgctcacaagctgatatcaacaagaatgttgatatgctttcagcaagacgcaaagaaaaagagtactttgagagtagtcctgaatatggtcacttggcacataaaatgggtgcagagtatcttgccaagcttctgtcacagcatttagaggctgtgatcagggccaaaattccaagtattatagccttgattaacaaaacaattgatgaaatagaag

SEQ ID NO: 35821 - protein, 316 aa, Zea mays subsp. mays
  peptide (1)..(316): Ceres Seq. ID no. 14305302
  misc_feature (6)..(223): Pfam Name: Pfam Description:  Dynamin family
  misc_feature (1)..(315): NCBI GI NO: 18071348 NR Description: putative GTP-binding protein
  misc_feature (1)..(315): NCBI GI NO: 37536976 NR Description: putative phragmoplastin
  misc_feature (1)..(315): NCBI GI NO: 15223914 NR Description: dynamin -related [Arabidopsis thaliana]
  misc_feature (1)..(315): NCBI GI NO: 21537304 NR Description: dynamin, putative [Arabidopsis thaliana]
  misc_feature (1)..(315): NCBI GI NO: 6651403 NR Description: dynamin-like protein 5 [Arabidopsis thaliana]
  misc_feature (1)..(315): NCBI GI NO: 18411520 NR Description: dynamin-related protein 4 (ADL4)
  misc_feature (4)..(315): NCBI GI NO: 11357275 NR Description: dynamin-like protein 4
  misc_feature (4)..(315): NCBI GI NO: 19569772 NR Description: dynamin-like protein C [Arabidopsis thaliana]
  misc_feature (1)..(315): NCBI GI NO: 6651401 NR Description: dynamin-like protein 4 [Arabidopsis thaliana]
  misc_feature (138)..(315): NCBI GI NO: 8778229 NR Description: F10B6.23 [Arabidopsis thaliana]
MATMESLIGLVNRIQRACTVLGDHGGGGGEGSLWEALPSVAVVGGQSSGKSSVLESIVGRDFLPRGSGIVTRRPLVLQLHKTDGGHEYAEFLHAPRKRFTDFAAVRKEIADETDRITGKTKAISNVPIHLSIYSPHVVNLTLIDLPGLTKVAVEGQAESIVQDIENMVRSYVDKPNCIILAISPANQDIATSDAIKLARDVDPSGDRTFGVLTKLDLMDKGTNAVDVLEGRQYRLQHPWVGIVNRSQADINKNVDMLSARRKEKEYFESSPEYGHLAHKMGAEYLAKLLSQHLEAVIRAKIPSIIALINKTIDEIE

SEQ ID NO: 35822 - protein, 313 aa, Zea mays subsp. mays
  peptide (1)..(313): Ceres Seq. ID no. 14305303
  misc_feature (3)..(220): Pfam Name: Pfam Description:  Dynamin family
  misc_feature (1)..(312): NCBI GI NO: 18071348 NR Description: putative GTP-binding protein
  misc_feature (1)..(312): NCBI GI NO: 37536976 NR Description: putative phragmoplastin
  misc_feature (1)..(312): NCBI GI NO: 15223914 NR Description: dynamin -related [Arabidopsis thaliana]
  misc_feature (1)..(312): NCBI GI NO: 21537304 NR Description: dynamin, putative [Arabidopsis thaliana]
  misc_feature (1)..(312): NCBI GI NO: 6651403 NR Description: dynamin-like protein 5 [Arabidopsis thaliana]
  misc_feature (1)..(312): NCBI GI NO: 18411520 NR Description: dynamin-related protein 4 (ADL4)
  misc_feature (1)..(312): NCBI GI NO: 11357275 NR Description: dynamin-like protein 4
  misc_feature (1)..(312): NCBI GI NO: 19569772 NR Description: dynamin-like protein C [Arabidopsis thaliana]
  misc_feature (1)..(312): NCBI GI NO: 6651401 NR Description: dynamin-like protein 4 [Arabidopsis thaliana]
  misc_feature (135)..(312): NCBI GI NO: 8778229 NR Description: F10B6.23 [Arabidopsis thaliana]
MESLIGLVNRIQRACTVLGDHGGGGGEGSLWEALPSVAVVGGQSSGKSSVLESIVGRDFLPRGSGIVTRRPLVLQLHKTDGGHEYAEFLHAPRKRFTDFAAVRKEIADETDRITGKTKAISNVPIHLSIYSPHVVNLTLIDLPGLTKVAVEGQAESIVQDIENMVRSYVDKPNCIILAISPANQDIATSDAIKLARDVDPSGDRTFGVLTKLDLMDKGTNAVDVLEGRQYRLQHPWVGIVNRSQADINKNVDMLSARRKEKEYFESSPEYGHLAHKMGAEYLAKLLSQHLEAVIRAKIPSIIALINKTIDEIE

SEQ ID NO: 35823 - DNA, 486 bp, Zea mays subsp. mays
  misc_feature (1)..(486): Ceres Seq. ID no. 3011241
  misc_feature (436)..(436): n is a, c, t, g, unknown, or other
cccaactcgaacctcagtcaggcagcgtgaggagggagagttcaaggaccgaggcggcgtcgggcgagatgaagcttaacgtcaagaccctcaagggcaccaacttcgagatcgaggcgagccccgatgcgtcggttgctgacgtgaagaggatcattgagaccactcagggtcagagtacctaccgggcggaccagcaaatgcttatataccaagggaaaattctcaaggatgagaccactttggaaagcaacggagttgctgagaacagcttccttgttataatgttgtccaaggctaaggcatcgtcgagtggagcttctaccactactgctgcaaaagctcctgcaactctggcccaacctgctgccccggtgccccctgctgcatcagttgcaagaacaccaacacaggctcctgttgccacagctgaaanctgatgatgctgatgtgtacagtcaggcagcttcaaaccttgtatctggc

SEQ ID NO: 35824 - protein, 145 aa, Zea mays subsp. mays
  peptide (1)..(145): Ceres Seq. ID no. 3011242
  misc_feature (23)..(100): Pfam Name: Pfam Description:  Ubiquitin family
  misc_feature (23)..(139): NCBI GI NO: 7446459 NR Description: RAD23 protein, isoform I - carrot
  misc_feature (23)..(142): NCBI GI NO: 7446462 NR Description: RAD23 protein homolog - rice
  misc_feature (23)..(141): NCBI GI NO: 5640111 NR Description: RAD23 protein [Lycopersicon esculentum]
  misc_feature (23)..(143): NCBI GI NO: 38175472 NR Description: putative osRAD23
  misc_feature (23)..(139): NCBI GI NO: 15232924 NR Description: putative RAD23; protein id: At3g02540
  misc_feature (23)..(143): NCBI GI NO: 14335004 NR Description: unknown protein [Arabidopsis thaliana]
  misc_feature (23)..(143): NCBI GI NO: 15240922 NR Description: DNA repair protein RAD23 homolog
  misc_feature (23)..(143): NCBI GI NO: 30409730 NR Description: RAD23-like protein [Arabidopsis thaliana]
  misc_feature (23)..(132): NCBI GI NO: 7446460 NR Description: RAD23 protein, isoform II - carrot
  misc_feature (23)..(136): NCBI GI NO: 25518044 NR Description: T24D18.27 protein - Arabidopsis thaliana
  misc_feature (145)..(145): Xaa is any aa, unknown or other
QLEPQSGSVRRESSRTEAASGEMKLNVKTLKGTNFEIEASPDASVADVKRIIETTQGQSTYRADQQMLIYQGKILKDETTLESNGVAENSFLVIMLSKAKASSSGASTTTAAKAPATLAQPAAPVPPAASVARTPTQAPVATAEX

SEQ ID NO: 35825 - protein, 123 aa, Zea mays subsp. mays
  peptide (1)..(123): Ceres Seq. ID no. 3011243
  misc_feature (1)..(78): Pfam Name: Pfam Description:  Ubiquitin family
  misc_feature (1)..(117): NCBI GI NO: 7446459 NR Description: RAD23 protein, isoform I - carrot
  misc_feature (1)..(120): NCBI GI NO: 7446462 NR Description: RAD23 protein homolog - rice
  misc_feature (1)..(119): NCBI GI NO: 5640111 NR Description: RAD23 protein [Lycopersicon esculentum]
  misc_feature (1)..(121): NCBI GI NO: 38175472 NR Description: putative osRAD23
  misc_feature (1)..(117): NCBI GI NO: 15232924 NR Description: putative RAD23; protein id: At3g02540
  misc_feature (1)..(121): NCBI GI NO: 14335004 NR Description: unknown protein [Arabidopsis thaliana]
  misc_feature (1)..(121): NCBI GI NO: 15240922 NR Description: DNA repair protein RAD23 homolog
  misc_feature (1)..(121): NCBI GI NO: 30409730 NR Description: RAD23-like protein [Arabidopsis thaliana]
  misc_feature (1)..(110): NCBI GI NO: 7446460 NR Description: RAD23 protein, isoform II - carrot
  misc_feature (1)..(114): NCBI GI NO: 25518044 NR Description: T24D18.27 protein - Arabidopsis thaliana
  misc_feature (123)..(123): Xaa is any aa, unknown or other
MKLNVKTLKGTNFEIEASPDASVADVKRIIETTQGQSTYRADQQMLIYQGKILKDETTLESNGVAENSFLVIMLSKAKASSSGASTTTAAKAPATLAQPAAPVPPAASVARTPTQAPVATAEX

SEQ ID NO: 35826 - protein, 79 aa, Zea mays subsp. mays
  peptide (1)..(79): Ceres Seq. ID no. 3011244
  misc_feature (1)..(73): NCBI GI NO: 7446459 NR Description: RAD23 protein, isoform I - carrot
  misc_feature (1)..(76): NCBI GI NO: 7446462 NR Description: RAD23 protein homolog - rice
  misc_feature (1)..(75): NCBI GI NO: 5640111 NR Description: RAD23 protein [Lycopersicon esculentum]
  misc_feature (1)..(77): NCBI GI NO: 38175472 NR Description: putative osRAD23
  misc_feature (1)..(73): NCBI GI NO: 15232924 NR Description: putative RAD23; protein id: At3g02540
  misc_feature (1)..(77): NCBI GI NO: 14335004 NR Description: unknown protein [Arabidopsis thaliana]
  misc_feature (1)..(77): NCBI GI NO: 15240922 NR Description: DNA repair protein RAD23 homolog
  misc_feature (1)..(77): NCBI GI NO: 30409730 NR Description: RAD23-like protein [Arabidopsis thaliana]
  misc_feature (1)..(66): NCBI GI NO: 7446460 NR Description: RAD23 protein, isoform II - carrot
  misc_feature (1)..(70): NCBI GI NO: 25518044 NR Description: T24D18.27 protein - Arabidopsis thaliana
  misc_feature (79)..(79): Xaa is any aa, unknown or other
MLIYQGKILKDETTLESNGVAENSFLVIMLSKAKASSSGASTTTAAKAPATLAQPAAPVPPAASVARTPTQAPVATAEX

SEQ ID NO: 35827 - DNA, 1913 bp, Zea mays subsp. mays
  misc_feature (1)..(1913): Ceres Seq. ID no. 12425465
aacacaagcatgcaagtccatcagcttctcggcttatggtgccagaccgacgtgcctagtagcgtactatcttagcttcaagagaccgaccaggcaagatccattgatcgatggagctgcttcctctgctcacgtggctcctccttgcgcacgccctggcctgcctggcctggacggccgccgcgcggcgccggcagtctcggtgctacctcctggactacgtctgccacaagcccagcgacgaccgcaagctgtccacggagacggccggcaacgtgatccagcgcaacgcgcggctggggctcaccgactaccgcttcctcctccgcgtcatcgtccgctccggcatcggcgaggagacctacgccccgcgcaacatcctggagggccgcgaggactcgcccaccctggaggacgcggtggacgagatggacgccttcttcgacgaggccatcgccgagctcttcgcccggaccggcctcgcgccccgcgacgtggacgtgctcgtcttcaacgtctccatgctctccccggcgccgtcgctgtcgtccaggatcgtgcgccgctacggcctgcgcgaggacgtggcggcgtacaacctcacgggcatggggtgcagcgcgggcctgatcgcgctggacctggcccggaacgcgctccggacgcgtccccgggcgctggcgctggtggtgtcgtccgagtccatcgcgcccaactggtactccggcaccgacaagactatgatgctggccaactgcctgttccgcagcggcggctccgcggtgctggtgaccaacgacccggcgcggcgcgggcaggccaagatggagctcagctgcctggtgcgcgccaacatcggcgccagcgacgacgcgcacgcgtgcgcgctgcagcgcgaggacggcgagggccgcgtcgggatcagcctgagcaaggcgctccccaaggccgccgtgcgcgccttcgccgtcaacctgcgccgcctcgcgccgcgcgtgctccccgtgggcgagctcgcgcggttcgccgcgcgtctcctcgcccggaggctcttcacgacgtccccgcacctgcgtcagcagcacctatcgggcggcaagcagaagggcgacgcggcggcggccccaaagatcaacttcaaggccggggtggaccacttctgcctccaccccggcggcacggccgtcatcgaggcggtgaagaagagcctggacctggaggacgaggacgtggagccggcgcggatgacgctgcaccggtgggggaacacgtcggcgagcagcctgtggtacgtgctgtcttacatggaggccaaagggcggctcaaggtcggggacagggtgctcatggtcacgttcgggtcggggttcaagtgcaacagctgcgtgtgggaggtgaccggcgacatggccgacaagggggcgtgggccgactgcatcgacgcctacccgccggagaagctcgccaacccgtacttggacaagttcggttggatcaacgatgtcgacggcgataccctgatgctctaacggtacggtatacgatcgaggaccgctctccaccggcggaaatgacgacaacggcggaagcagtaaaaagcaggctagctgttgttcagaacgacaggccggtgatgctagcttgcagcctgcgtaggtgtatttatgcccttggttttactgggcctgtcgttctgaacaatatagccctatttatttaccacccaattatatatgtgtagccgatgcagcagtagcacaatatattcttcttcttcttctgaattgttttctatagcaaaaggaaaaaacatatatagcttttttagaacagaagatcgatcggatctccatgtatacagaaacgattgcaagaacaaacaatataatatcaagtgtacttttacccgcctg

SEQ ID NO: 35828 - protein, 579 aa, Zea mays subsp. mays
  peptide (1)..(579): Ceres Seq. ID no. 12425466
  misc_feature (72)..(494): Pfam Name: Pfam Description:  High molecular weight glutenin subunit
  misc_feature (94)..(509): NCBI GI NO: 29247944 NR Description: GLP_26_54603_52153 [Giardia lamblia ATCC 50803]
  misc_feature (17)..(500): NCBI GI NO: 79833 NR Description: hypothetical 119
TQACKSISFSAYGARPTCLVAYYLSFKRPTRQDPLIDGAASSAHVAPPCARPGLPGLDGRRAAPAVSVLPPGLRLPQAQRRPQAVHGDGRQRDPAQRAAGAHRLPLPPPRHRPLRHRRGDLRPAQHPGGPRGLAHPGGRGGRDGRLLRRGHRRALRPDRPRAPRRGRARLQRLHALPGAVAVVQDRAPLRPARGRGGVQPHGHGVQRGPDRAGPGPERAPDASPGAGAGGVVRVHRAQLVLRHRQDYDAGQLPVPQRRLRGAGDQRPGAARAGQDGAQLPGARQHRRQRRRARVRAAARGRRGPRRDQPEQGAPQGRRARLRRQPAPPRAARAPRGRARAVRRASPRPEALHDVPAPASAAPIGRQAEGRRGGGPKDQLQGRGGPLLPPPRRHGRHRGGEEEPGPGGRGRGAGADDAAPVGEHVGEQPVVRAVLHGGQRAAQGRGQGAHGHVRVGVQVQQLRVGGDRRHGRQGGVGRLHRRLPAGEARQPVLGQVRLDQRCRRRYPDALTVRYTIEDRSPPAEMTTTAEAVKSRLAVVQNDRPVMLACSLRRCIYALGFTGPVVLNNIALFIYHPIIYV

SEQ ID NO: 35829 - protein, 472 aa, Zea mays subsp. mays
  peptide (1)..(472): Ceres Seq. ID no. 12425467
  misc_feature (288)..(429): Pfam Name: Pfam Description:  Chalcone and stilbene synthases
  misc_feature (1)..(472): NCBI GI NO: 40882703 NR Description: putative fatty acid elongase
  misc_feature (1)..(468): NCBI GI NO: 40882682 NR Description: putative fatty acid elongase
  misc_feature (1)..(465): NCBI GI NO: 37535300 NR Description: putative fatty acid elongase 3-ketoacyl-CoAsynthase
  misc_feature (1)..(469): NCBI GI NO: 15226916 NR Description: putative fatty acid elongase; protein id:At2g28630
  misc_feature (1)..(469): NCBI GI NO: 21536949 NR Description: putative fatty acid elongase
  misc_feature (1)..(472): NCBI GI NO: 15222994 NR Description: fatty acid elongase 3-ketoacyl-CoA synthase
  misc_feature (1)..(464): NCBI GI NO: 15238194 NR Description: fatty acid elongase - like protein
  misc_feature (13)..(315): NCBI GI NO: 4091810 NR Description: fatty acid elongase 3-ketoacyl-CoA synthase 1
  misc_feature (13)..(315): NCBI GI NO: 22329274 NR Description: fatty acid elongase 3-ketoacyl-CoA synthase 1
  misc_feature (342)..(447): NCBI GI NO: 4091810 NR Description: fatty acid elongase 3-ketoacyl-CoA synthase 1
MELLPLLTWLLLAHALACLAWTAAARRRQSRCYLLDYVCHKPSDDRKLSTETAGNVIQRNARLGLTDYRFLLRVIVRSGIGEETYAPRNILEGREDSPTLEDAVDEMDAFFDEAIAELFARTGLAPRDVDVLVFNVSMLSPAPSLSSRIVRRYGLREDVAAYNLTGMGCSAGLIALDLARNALRTRPRALALVVSSESIAPNWYSGTDKTMMLANCLFRSGGSAVLVTNDPARRGQAKMELSCLVRANIGASDDAHACALQREDGEGRVGISLSKALPKAAVRAFAVNLRRLAPRVLPVGELARFAARLLARRLFTTSPHLRQQHLSGGKQKGDAAAAPKINFKAGVDHFCLHPGGTAVIEAVKKSLDLEDEDVEPARMTLHRWGNTSASSLWYVLSYMEAKGRLKVGDRVLMVTFGSGFKCNSCVWEVTGDMADKGAWADCIDAYPPEKLANPYLDKFGWINDVDGDTLML

SEQ ID NO: 35830 - protein, 366 aa, Zea mays subsp. mays
  peptide (1)..(366): Ceres Seq. ID no. 12425468
  misc_feature (182)..(323): Pfam Name: Pfam Description:  Chalcone and stilbene synthases
  misc_feature (1)..(366): NCBI GI NO: 40882703 NR Description: putative fatty acid elongase
  misc_feature (1)..(362): NCBI GI NO: 40882682 NR Description: putative fatty acid elongase
  misc_feature (1)..(359): NCBI GI NO: 37535300 NR Description: putative fatty acid elongase 3-ketoacyl-CoAsynthase
  misc_feature (1)..(363): NCBI GI NO: 15226916 NR Description: putative fatty acid elongase; protein id:At2g28630
  misc_feature (1)..(363): NCBI GI NO: 21536949 NR Description: putative fatty acid elongase
  misc_feature (1)..(366): NCBI GI NO: 15222994 NR Description: fatty acid elongase 3-ketoacyl-CoA synthase
  misc_feature (1)..(358): NCBI GI NO: 15238194 NR Description: fatty acid elongase - like protein
  misc_feature (1)..(209): NCBI GI NO: 4091810 NR Description: fatty acid elongase 3-ketoacyl-CoA synthase 1
  misc_feature (1)..(209): NCBI GI NO: 22329274 NR Description: fatty acid elongase 3-ketoacyl-CoA synthase 1
  misc_feature (236)..(341): NCBI GI NO: 4091810 NR Description: fatty acid elongase 3-ketoacyl-CoA synthase 1
MDAFFDEAIAELFARTGLAPRDVDVLVFNVSMLSPAPSLSSRIVRRYGLREDVAAYNLTGMGCSAGLIALDLARNALRTRPRALALVVSSESIAPNWYSGTDKTMMLANCLFRSGGSAVLVTNDPARRGQAKMELSCLVRANIGASDDAHACALQREDGEGRVGISLSKALPKAAVRAFAVNLRRLAPRVLPVGELARFAARLLARRLFTTSPHLRQQHLSGGKQKGDAAAAPKINFKAGVDHFCLHPGGTAVIEAVKKSLDLEDEDVEPARMTLHRWGNTSASSLWYVLSYMEAKGRLKVGDRVLMVTFGSGFKCNSCVWEVTGDMADKGAWADCIDAYPPEKLANPYLDKFGWINDVDGDTLML

SEQ ID NO: 35831 - DNA, 1485 bp, Zea mays subsp. mays
  misc_feature (1)..(1485): Ceres Seq. ID no. 12450637
aatcctaatcccctccgcctcatccccttcaaccccacgtctctctcgccgaaggctccggcctcgtcgggatccggtgctggattgacgcaatggcgccgctccacgccgcgctgccgccgccctcctccgccgccgctcaccaccacgcggcagccccgcctgtcttcctcgcccgctcgccgtaccacccccgcagggcggcggcctcctgcccgctcgccgtcgctgccgctccctcgtcgagaaaagcgttcttgtcgtgcccgctgctgggccactggaccacggccgcgccgccgcgcgccatcccctcctcgtcgtcgtcgtcgaccccggcgctcatcgcgtccgtgcaggacctgtatgacttcatctgctgcggcccgctggtggacaggatcggctacaccagtgagaagatcaccgagtccatcgaccgctggcttctcgccggggctagggtggcgcgcctcttccgcctcaacgagctccagctgtcggacgccgagaaggcccggatataccacttctacatccccgtcttcctctggtgcgaggacgaggtcatggtgcacagagccaggtacaacgacggcgatgacatcccgccattggtgatcggggtcagcgctccccaaggaagtgggaagacgactcttgtgttcgcacttgattatctttttcgggttgctggtaggaattctgccacattgtctatagacgacttctatctgacagcaaaagaacagaatgaattgagggacagaaatcctgcaaatgctcttttagagttccgcgggaatgctggaagccacgatctccaactctcagtggaaacactcgagtcactgatcaagctaacgaaggaaggtatgaagatgaaggttccacggtatgacaagtctgcgtttgggggaaggggtgaccgggctgatccttctgtatggccagaggttgaagggcccttagaggttgttctgttcgaaggatggatgcttggatttaaacctcttccaaatgaagttgtgaaagaagtggatccacagctggaggtggttaacaagaaccttgaagcatactctgatgcttgggacaggttcatccagtcatggattgttattaaaataagagaacccggtagcgtttaccagtggagactgcaggcagaggtcgctatgagagcagatggaaagcctggaatgtctgatgaggaggttatggattttgtatcacgctacctaccggcataccatgcatatctgccaacactgtacaaagaggggccgaatggttcgaatccagatcatctgctggtcatcgacatagacgaaaataggaaccctatctgtggtggatcatgggacatctcatgtttgtgaaactacttttatgatgggccgtcaaacaccactggcctcttgttgccctacactctggtagtgtaaatctgtgaattccatgtaaatatgaatttcgcttcct

SEQ ID NO: 35832 - protein, 429 aa, Zea mays subsp. mays
  peptide (1)..(429): Ceres Seq. ID no. 12450638
  misc_feature (176)..(408): Pfam Name: Pfam Description:  Phosphoribulokinase / Uridine kinase family
  misc_feature (1)..(295): NCBI GI NO: 34911206 NR Description: P0019E03.19
  misc_feature (319)..(421): NCBI GI NO: 34911206 NR Description: P0019E03.19
  misc_feature (85)..(419): NCBI GI NO: 30699506 NR Description: auxin-regulated protein [Arabidopsis thaliana]
  misc_feature (85)..(419): NCBI GI NO: 16226442 NR Description: At1g80380/F5I6_13 [Arabidopsis thaliana]
  misc_feature (203)..(419): NCBI GI NO: 25406658 NR Description: unknown protein F5I6.13
  misc_feature (85)..(210): NCBI GI NO: 25406658 NR Description: unknown protein F5I6.13
  misc_feature (266)..(419): NCBI GI NO: 18412831 NR Description: auxin-regulated protein; protein id: At1g80380
  misc_feature (85)..(173): NCBI GI NO: 18412831 NR Description: auxin-regulated protein; protein id: At1g80380
  misc_feature (266)..(419): NCBI GI NO: 21537005 NR Description: unknown [Arabidopsis thaliana]
  misc_feature (85)..(173): NCBI GI NO: 21537005 NR Description: unknown [Arabidopsis thaliana]
MAPLHAALPPPSSAAAHHHAAAPPVFLARSPYHPRRAAASCPLAVAAAPSSRKAFLSCPLLGHWTTAAPPRAIPSSSSSSTPALIASVQDLYDFICCGPLVDRIGYTSEKITESIDRWLLAGARVARLFRLNELQLSDAEKARIYHFYIPVFLWCEDEVMVHRARYNDGDDIPPLVIGVSAPQGSGKTTLVFALDYLFRVAGRNSATLSIDDFYLTAKEQNELRDRNPANALLEFRGNAGSHDLQLSVETLESLIKLTKEGMKMKVPRYDKSAFGGRGDRADPSVWPEVEGPLEVVLFEGWMLGFKPLPNEVVKEVDPQLEVVNKNLEAYSDAWDRFIQSWIVIKIREPGSVYQWRLQAEVAMRADGKPGMSDEEVMDFVSRYLPAYHAYLPTLYKEGPNGSNPDHLLVIDIDENRNPICGGSWDISCL

SEQ ID NO: 35833 - protein, 270 aa, Zea mays subsp. mays
  peptide (1)..(270): Ceres Seq. ID no. 12450639
  misc_feature (17)..(249): Pfam Name: Pfam Description:  Phosphoribulokinase / Uridine kinase family
  misc_feature (1)..(136): NCBI GI NO: 34911206 NR Description: P0019E03.19
  misc_feature (160)..(262): NCBI GI NO: 34911206 NR Description: P0019E03.19
  misc_feature (1)..(260): NCBI GI NO: 30699506 NR Description: auxin-regulated protein [Arabidopsis thaliana]
  misc_feature (1)..(260): NCBI GI NO: 16226442 NR Description: At1g80380/F5I6_13 [Arabidopsis thaliana]
  misc_feature (44)..(260): NCBI GI NO: 25406658 NR Description: unknown protein F5I6.13
  misc_feature (1)..(51): NCBI GI NO: 25406658 NR Description: unknown protein F5I6.13
  misc_feature (107)..(260): NCBI GI NO: 18412831 NR Description: auxin-regulated protein; protein id: At1g80380
  misc_feature (1)..(14): NCBI GI NO: 18412831 NR Description: auxin-regulated protein; protein id: At1g80380
  misc_feature (107)..(260): NCBI GI NO: 21537005 NR Description: unknown [Arabidopsis thaliana]
  misc_feature (1)..(14): NCBI GI NO: 21537005 NR Description: unknown [Arabidopsis thaliana]
MVHRARYNDGDDIPPLVIGVSAPQGSGKTTLVFALDYLFRVAGRNSATLSIDDFYLTAKEQNELRDRNPANALLEFRGNAGSHDLQLSVETLESLIKLTKEGMKMKVPRYDKSAFGGRGDRADPSVWPEVEGPLEVVLFEGWMLGFKPLPNEVVKEVDPQLEVVNKNLEAYSDAWDRFIQSWIVIKIREPGSVYQWRLQAEVAMRADGKPGMSDEEVMDFVSRYLPAYHAYLPTLYKEGPNGSNPDHLLVIDIDENRNPICGGSWDISCL

SEQ ID NO: 35834 - DNA, 1117 bp, Zea mays subsp. mays
  misc_feature (1)..(1117): Ceres Seq. ID no. 12436168
gcatttgatttctttgcaggtgcagccgtgcaggtgaggtgatcgcgcgtggatgggagttcagacaatgtcgtcccactcccacggcgacgacggccgccgcggcctcccgcggcagggctcggtctacggcctcacgctgaccgaggtggagacgcagctgggcgagccgctgcggaccatgaacctggacgacctcctgcgcaccgttctcccggcctccgccgccgccgccgccgcaggcccgcccccgcccccggccccggcggccaagaagacggtggacgaggtgtggcgcgacatccagagcgccggcggcggcggcggcggccgtcagccctccatgggcgagatgacgctggaggacttcctctcccgcgccggcgtcgccgtcgatgccgccccgcattggatgcaccagtacccgcagcagcagcagcagtacgcgctgccgcggcccctgccgcttcccggcccggctctggacgccgcgtaccacggcgaccggcccggtgttttcctctcgcactcgcaggtggccgggcggaagcgcgccgccacggcggccgtggccggggacggcgtcgtggagaggacggtggagcggcggcagaagcgcatgatcaagaaccgcgagtccgcggcgaggtcccgggccaggaagcaggcgtacaccaacgagctggagaacaaggtggcccggctggaggaggagaacaagcgtctcattgagctcaaggtgctgaaaccactggagccactggagccgccaccggcggagcagaacaagaagcagccgccgccgcaaccgaagaggaagcagccgcagccaccgccaccgccgccgccgccgattcagcagctgccgccgaagcaccgccacgacctccggcgaacgaattccgccactttctgatgacgagggcacgggggggggggggggctctctgcctctctctagggcgtctacggggggtactgtactgtactgtactgtacttgggatgctttgagatgtgaatgaacaaaaccctgctctgcttgcagagactctggtggtctgtggatgggtgcgtgcgtgccgccgttgcagtgaaagctagcagtgttgatgtgc

SEQ ID NO: 35835 - protein, 287 aa, Zea mays subsp. mays
  peptide (1)..(287): Ceres Seq. ID no. 12436169
  misc_feature (6)..(287): NCBI GI NO: 33146493 NR Description: putative bZIP protein DPBF3
  misc_feature (122)..(225): NCBI GI NO: 34909206 NR Description: putative promoter-binding factor-like protein
  misc_feature (69)..(117): NCBI GI NO: 34909206 NR Description: putative promoter-binding factor-like protein
  misc_feature (15)..(64): NCBI GI NO: 34909206 NR Description: putative promoter-binding factor-like protein
  misc_feature (17)..(241): NCBI GI NO: 18405590 NR Description: bZIP family transcription factor
  misc_feature (17)..(241): NCBI GI NO: 26451276 NR Description: putative bZIP transcription factor AtbZIP12 / DPBF4
  misc_feature (38)..(241): NCBI GI NO: 21694632 NR Description: basic leucine zipper transcription factor
  misc_feature (44)..(241): NCBI GI NO: 7487620 NR Description: probable bZIP transcription factor
  misc_feature (120)..(241): NCBI GI NO: 13346155 NR Description: bZIP protein DPBF3 [Arabidopsis thaliana]
  misc_feature (120)..(241): NCBI GI NO: 15230146 NR Description: ABA-responsive element binding protein 3
MGVQTMSSHSHGDDGRRGLPRQGSVYGLTLTEVETQLGEPLRTMNLDDLLRTVLPASAAAAAAGPPPPPAPAAKKTVDEVWRDIQSAGGGGGGRQPSMGEMTLEDFLSRAGVAVDAAPHWMHQYPQQQQQYALPRPLPLPGPALDAAYHGDRPGVFLSHSQVAGRKRAATAAVAGDGVVERTVERRQKRMIKNRESAARSRARKQAYTNELENKVARLEEENKRLIELKVLKPLEPLEPPPAEQNKKQPPPQPKRKQPQPPPPPPPPIQQLPPKHRHDLRRTNSATF

SEQ ID NO: 35836 - protein, 282 aa, Zea mays subsp. mays
  peptide (1)..(282): Ceres Seq. ID no. 12436170
  misc_feature (1)..(282): NCBI GI NO: 33146493 NR Description: putative bZIP protein DPBF3
  misc_feature (117)..(220): NCBI GI NO: 34909206 NR Description: putative promoter-binding factor-like protein
  misc_feature (64)..(112): NCBI GI NO: 34909206 NR Description: putative promoter-binding factor-like protein
  misc_feature (10)..(59): NCBI GI NO: 34909206 NR Description: putative promoter-binding factor-like protein
  misc_feature (12)..(236): NCBI GI NO: 18405590 NR Description: bZIP family transcription factor
  misc_feature (12)..(236): NCBI GI NO: 26451276 NR Description: putative bZIP transcription factor AtbZIP12 / DPBF4
  misc_feature (33)..(236): NCBI GI NO: 21694632 NR Description: basic leucine zipper transcription factor
  misc_feature (39)..(236): NCBI GI NO: 7487620 NR Description: probable bZIP transcription factor
  misc_feature (115)..(236): NCBI GI NO: 13346155 NR Description: bZIP protein DPBF3 [Arabidopsis thaliana]
  misc_feature (115)..(236): NCBI GI NO: 15230146 NR Description: ABA-responsive element binding protein 3
MSSHSHGDDGRRGLPRQGSVYGLTLTEVETQLGEPLRTMNLDDLLRTVLPASAAAAAAGPPPPPAPAAKKTVDEVWRDIQSAGGGGGGRQPSMGEMTLEDFLSRAGVAVDAAPHWMHQYPQQQQQYALPRPLPLPGPALDAAYHGDRPGVFLSHSQVAGRKRAATAAVAGDGVVERTVERRQKRMIKNRESAARSRARKQAYTNELENKVARLEEENKRLIELKVLKPLEPLEPPPAEQNKKQPPPQPKRKQPQPPPPPPPPIQQLPPKHRHDLRRTNSATF

SEQ ID NO: 35837 - protein, 244 aa, Zea mays subsp. mays
  peptide (1)..(244): Ceres Seq. ID no. 12436171
  misc_feature (1)..(244): NCBI GI NO: 33146493 NR Description: putative bZIP protein DPBF3
  misc_feature (79)..(182): NCBI GI NO: 34909206 NR Description: putative promoter-binding factor-like protein
  misc_feature (26)..(74): NCBI GI NO: 34909206 NR Description: putative promoter-binding factor-like protein
  misc_feature (1)..(21): NCBI GI NO: 34909206 NR Description: putative promoter-binding factor-like protein
  misc_feature (1)..(198): NCBI GI NO: 18405590 NR Description: bZIP family transcription factor
  misc_feature (1)..(198): NCBI GI NO: 26451276 NR Description: putative bZIP transcription factor AtbZIP12 / DPBF4
  misc_feature (1)..(198): NCBI GI NO: 21694632 NR Description: basic leucine zipper transcription factor
  misc_feature (1)..(198): NCBI GI NO: 7487620 NR Description: probable bZIP transcription factor
  misc_feature (77)..(198): NCBI GI NO: 13346155 NR Description: bZIP protein DPBF3 [Arabidopsis thaliana]
  misc_feature (77)..(198): NCBI GI NO: 15230146 NR Description: ABA-responsive element binding protein 3
MNLDDLLRTVLPASAAAAAAGPPPPPAPAAKKTVDEVWRDIQSAGGGGGGRQPSMGEMTLEDFLSRAGVAVDAAPHWMHQYPQQQQQYALPRPLPLPGPALDAAYHGDRPGVFLSHSQVAGRKRAATAAVAGDGVVERTVERRQKRMIKNRESAARSRARKQAYTNELENKVARLEEENKRLIELKVLKPLEPLEPPPAEQNKKQPPPQPKRKQPQPPPPPPPPIQQLPPKHRHDLRRTNSATF

SEQ ID NO: 35838 - DNA, 795 bp, Zea mays subsp. mays
  misc_feature (1)..(795): Ceres Seq. ID no. 12419382
agaaggaagatgcatggcagatctatgcggcgcactacattgtgatctgatgatgcagttcaaaaaaccaaaaagtaaatgcaatgcagctgcagctacaaggaatcgtcatctttgtgagagccttgcagacagttgctttcctattaatcaaggtcttgctgccagccgtcttcatgaatttttcttgcgccagttttgtgatgctcacacttgcagtaagggaacaaaacctttccccaaaggtggcaggaaacaaacaaacaggttatacctcgctctctccattttgacgctgatacttttgccgctgttctatctaattgtgttcctgcaccagagggaaatgaggaaaggtacccaagatctaaaacggttttcgaaaattgggcagaagaaaaagccatcctagtgtccaacagtcacaacgttctcgagcccatggagccaaggatgagctggataaggaacgtggtatgcagtgtgaaatgtttttatgggcagggaagaaatttccctcatttccaggacgggaacaatgtccgcaggtcgaggaatgctggcttcgaccttttcttttctttttctttcttttttgtttcgacatgtagatgcaaacttcgagaggcaagcatgtgtggtctttgtgagattacggcgatatgaagtcctattgataatttaaggatttttgggaggcctcaggcttaaaaaccaatgtcagtaaatgtagtatgactcctatccaatgtaatgatcaatgtgttggtgaggcacaatctttattcccttgct

SEQ ID NO: 35839 - protein, 136 aa, Zea mays subsp. mays
  peptide (1)..(136): Ceres Seq. ID no. 12419383
  misc_feature (3)..(136): NCBI GI NO: 18424689 NR Description: expressed protein; protein id: At5g63280
  misc_feature (2)..(135): NCBI GI NO: 15237477 NR Description: zinc finger - like protein; protein id: At5g40710
  misc_feature (2)..(135): NCBI GI NO: 26452757 NR Description: putative zinc finger protein
  misc_feature (3)..(136): NCBI GI NO: 10177309 NR Description: gene_id:MDC12.25~unknown protein
EGRCMADLCGALHCDLMMQFKKPKSKCNAAAATRNRHLCESLADSCFPINQGLAASRLHEFFLRQFCDAHTCSKGTKPFPKGGRKQTNRLYLALSILTLILLPLFYLIVFLHQREMRKGTQDLKRFSKIGQKKKPS

SEQ ID NO: 35840 - protein, 132 aa, Zea mays subsp. mays
  peptide (1)..(132): Ceres Seq. ID no. 12419384
  misc_feature (1)..(132): NCBI GI NO: 18424689 NR Description: expressed protein; protein id: At5g63280
  misc_feature (1)..(131): NCBI GI NO: 15237477 NR Description: zinc finger - like protein; protein id: At5g40710
  misc_feature (1)..(131): NCBI GI NO: 26452757 NR Description: putative zinc finger protein
  misc_feature (1)..(132): NCBI GI NO: 10177309 NR Description: gene_id:MDC12.25~unknown protein
MADLCGALHCDLMMQFKKPKSKCNAAAATRNRHLCESLADSCFPINQGLAASRLHEFFLRQFCDAHTCSKGTKPFPKGGRKQTNRLYLALSILTLILLPLFYLIVFLHQREMRKGTQDLKRFSKIGQKKKPS

SEQ ID NO: 35841 - protein, 120 aa, Zea mays subsp. mays
  peptide (1)..(120): Ceres Seq. ID no. 12419385
  misc_feature (1)..(120): NCBI GI NO: 18424689 NR Description: expressed protein; protein id: At5g63280
  misc_feature (1)..(119): NCBI GI NO: 15237477 NR Description: zinc finger - like protein; protein id: At5g40710
  misc_feature (1)..(119): NCBI GI NO: 26452757 NR Description: putative zinc finger protein
  misc_feature (1)..(120): NCBI GI NO: 10177309 NR Description: gene_id:MDC12.25~unknown protein
MMQFKKPKSKCNAAAATRNRHLCESLADSCFPINQGLAASRLHEFFLRQFCDAHTCSKGTKPFPKGGRKQTNRLYLALSILTLILLPLFYLIVFLHQREMRKGTQDLKRFSKIGQKKKPS

SEQ ID NO: 35842 - DNA, 1616 bp, Zea mays subsp. mays
  misc_feature (1)..(1616): Ceres Seq. ID no. 12436397
  misc_feature (1579)..(1579): n is a, c, t, g, unknown, or other
  misc_feature (1524)..(1524): n is a, c, t, g, unknown, or other
  misc_feature (1598)..(1598): n is a, c, t, g, unknown, or other
accaacacaacaacatctcctccattctcctagctccagcaacaaacaggacacaacaccttctcctcctcattcttctaccatagctagctagctagcttcacatcagcagctacatactcaccgatagatacagacctcagagcatcacactacagagtacagacctagctcagagcacacatccagccatggggctcctccctaccgaccgcatggatagcctcttctccccgcgctgcgtgtgggtgaccgggcccatcatcgtgggcgcggggccgtcggggctagccgtggcggcgtgcctgcgggagcagggcgtgccgttcgtcgtcctggagcgcgccgactgtatcgcctcgctgtggcaacggcgcacgtacaaccgcctcaagctgcacctacccaagcagttctgccagctcccgcgcatgccgttcccggaagactacccggagtacccgacccgccgccagttcgtcgactacctcgagcgctacgccgccgagttcgagatcaagccggagttcggcaccaccgtgctgtcggcgcgctacgacgagacgtcgggcctctggcgcgtcgtcaccaacggcggagccggcggcgacatggagtacatcgggcgctggctcgtggtcgccacgggcgagaacgcggaggccgtggtgcccgacatcccgggcctcgccggcttcgacggcgaggtgacccacgtgagcgagtacaagtccggcgaggcctacgccggcaagcgcgtgctggtggtcggctgcggcaactccgggatggaggtgtcgctggacctggccgagcacggcgcgcgcccggccatggtggtgcgcgacgccgtccacgtcctcccgcgcgaggtgctgggcacgtccaccttcgggctcgccgtgctgctcatgcgctggctcccgctctggctcgtcgactggctcatggtgctcctcggcgtggctcgtcctcggcaacctcgccaggctcggcctccgccgccccgccgccggcccgctccagctcaaggagacgcacggccgcacaccagtcctcgactacggcgcgctcgcgcgcatccgcgccggcgacatcaccgtcgtccctgcggtgacacggttcgccggcaagggcggacaggttgaggtcgccgacggccgcacgctcggcttcgacgccgtcatcctcgccaccggatatcgcagcaacgtgccgcagtggctccagggcaacgatttcttcaacaaggacggataccccaagacggcgttcccgcacgggtggaagggcgagagtgggctgtacgccgtggggttcacccggcgcggcctctccggcgcctccgccgacgccgtgcgcatcgccacggacctcgggaacgtctggagggaggagaccaagcccaccaagagggccggcgcctgccacaggcgctgcatctcggtcgtcttctaatccgatcggccacacctgggagcatgcatgacgatgattgaagctaacttttctgaagcgcagaanaaaaaaaaaaaaaaaaaaaaaaaaaaaaaaaaaaaaaaaaaaaaaaaaaaaaaangaaaaaaaaaaaaaaaaantttcgttcccgtcaacct

SEQ ID NO: 35843 - protein, 318 aa, Zea mays subsp. mays
  peptide (1)..(318): Ceres Seq. ID no. 12436398
  misc_feature (22)..(250): Pfam Name: Pfam Description:  Pyridine nucleotide-disulphide oxidoreductase
  misc_feature (1)..(256): NCBI GI NO: 38346518 NR Description: OSJNBa0027H09.13
  misc_feature (10)..(256): NCBI GI NO: 15219671 NR Description: putative dimethylaniline monooxygenase
  misc_feature (10)..(256): NCBI GI NO: 15240026 NR Description: dimethylaniline monooxygenase-like
  misc_feature (7)..(256): NCBI GI NO: 15235409 NR Description: putative protein; protein id: At4g28720.1
  misc_feature (16)..(256): NCBI GI NO: 33147034 NR Description: putative dimethylaniline monooxygenase
  misc_feature (12)..(256): NCBI GI NO: 15219767 NR Description: putative dimethylaniline monooxygenase
  misc_feature (10)..(256): NCBI GI NO: 15225816 NR Description: putative flavin-containing monooxygenase
  misc_feature (2)..(262): NCBI GI NO: 22327064 NR Description: putative protein; protein id: At5g25620
  misc_feature (15)..(256): NCBI GI NO: 15239020 NR Description: putative protein; protein id: At5g11320.1
  misc_feature (18)..(256): NCBI GI NO: 15010541 NR Description: flavin monoxygenase-like protein floozy
MGLLPTDRMDSLFSPRCVWVTGPIIVGAGPSGLAVAACLREQGVPFVVLERADCIASLWQRRTYNRLKLHLPKQFCQLPRMPFPEDYPEYPTRRQFVDYLERYAAEFEIKPEFGTTVLSARYDETSGLWRVVTNGGAGGDMEYIGRWLVVATGENAEAVVPDIPGLAGFDGEVTHVSEYKSGEAYAGKRVLVVGCGNSGMEVSLDLAEHGARPAMVVRDAVHVLPREVLGTSTFGLAVLLMRWLPLWLVDWLMVLLGVARPRQPRQARPPPPRRRPAPAQGDARPHTSPRLRRARAHPRRRHHRRPCGDTVRRQGRTG

SEQ ID NO: 35844 - protein, 310 aa, Zea mays subsp. mays
  peptide (1)..(310): Ceres Seq. ID no. 12436399
  misc_feature (14)..(242): Pfam Name: Pfam Description:  Pyridine nucleotide-disulphide oxidoreductase
  misc_feature (1)..(248): NCBI GI NO: 38346518 NR Description: OSJNBa0027H09.13
  misc_feature (2)..(248): NCBI GI NO: 15219671 NR Description: putative dimethylaniline monooxygenase
  misc_feature (2)..(248): NCBI GI NO: 15240026 NR Description: dimethylaniline monooxygenase-like
  misc_feature (1)..(248): NCBI GI NO: 15235409 NR Description: putative protein; protein id: At4g28720.1
  misc_feature (8)..(248): NCBI GI NO: 33147034 NR Description: putative dimethylaniline monooxygenase
  misc_feature (4)..(248): NCBI GI NO: 15219767 NR Description: putative dimethylaniline monooxygenase
  misc_feature (2)..(248): NCBI GI NO: 15225816 NR Description: putative flavin-containing monooxygenase
  misc_feature (1)..(254): NCBI GI NO: 22327064 NR Description: putative protein; protein id: At5g25620
  misc_feature (7)..(248): NCBI GI NO: 15239020 NR Description: putative protein; protein id: At5g11320.1
  misc_feature (10)..(248): NCBI GI NO: 15010541 NR Description: flavin monoxygenase-like protein floozy
MDSLFSPRCVWVTGPIIVGAGPSGLAVAACLREQGVPFVVLERADCIASLWQRRTYNRLKLHLPKQFCQLPRMPFPEDYPEYPTRRQFVDYLERYAAEFEIKPEFGTTVLSARYDETSGLWRVVTNGGAGGDMEYIGRWLVVATGENAEAVVPDIPGLAGFDGEVTHVSEYKSGEAYAGKRVLVVGCGNSGMEVSLDLAEHGARPAMVVRDAVHVLPREVLGTSTFGLAVLLMRWLPLWLVDWLMVLLGVARPRQPRQARPPPPRRRPAPAQGDARPHTSPRLRRARAHPRRRHHRRPCGDTVRRQGRTG

SEQ ID NO: 35845 - protein, 238 aa, Zea mays subsp. mays
  peptide (1)..(238): Ceres Seq. ID no. 12436400
  misc_feature (1)..(170): Pfam Name: Pfam Description:  Pyridine nucleotide-disulphide oxidoreductase
  misc_feature (1)..(176): NCBI GI NO: 38346518 NR Description: OSJNBa0027H09.13
  misc_feature (1)..(176): NCBI GI NO: 15219671 NR Description: putative dimethylaniline monooxygenase
  misc_feature (1)..(176): NCBI GI NO: 15240026 NR Description: dimethylaniline monooxygenase-like
  misc_feature (1)..(176): NCBI GI NO: 15235409 NR Description: putative protein; protein id: At4g28720.1
  misc_feature (1)..(176): NCBI GI NO: 33147034 NR Description: putative dimethylaniline monooxygenase
  misc_feature (1)..(176): NCBI GI NO: 15219767 NR Description: putative dimethylaniline monooxygenase
  misc_feature (1)..(176): NCBI GI NO: 15225816 NR Description: putative flavin-containing monooxygenase
  misc_feature (1)..(182): NCBI GI NO: 22327064 NR Description: putative protein; protein id: At5g25620
  misc_feature (1)..(176): NCBI GI NO: 15239020 NR Description: putative protein; protein id: At5g11320.1
  misc_feature (1)..(176): NCBI GI NO: 15010541 NR Description: flavin monoxygenase-like protein floozy
MPFPEDYPEYPTRRQFVDYLERYAAEFEIKPEFGTTVLSARYDETSGLWRVVTNGGAGGDMEYIGRWLVVATGENAEAVVPDIPGLAGFDGEVTHVSEYKSGEAYAGKRVLVVGCGNSGMEVSLDLAEHGARPAMVVRDAVHVLPREVLGTSTFGLAVLLMRWLPLWLVDWLMVLLGVARPRQPRQARPPPPRRRPAPAQGDARPHTSPRLRRARAHPRRRHHRRPCGDTVRRQGRTG

SEQ ID NO: 35846 - DNA, 1925 bp, Zea mays subsp. mays
  misc_feature (1)..(1925): Ceres Seq. ID no. 12425449
gtgtttccagccttccaggcgcctctgctgcctgcgcctgcgcgcgtcgtgaaggcgtgaacggcagctcggctcggcgcaggccccccgcccgcgccggcatcgcgtcgcggccgccgcgcgagccccatgctgcgttgctgccgcacgacacgtcacttcggctgcggcgtggttgtgtggactcctctcgctcctggccctcgccggcgctgcgtcggctgcggatggggcggagggtgagtgggagccgctgatacggatgccgacggcgaaggggagtgacgctgcttctgctccggctgctgaggatgatgaagtggggacgaggtgggccgtgctcgtcgccggatccttcggttatgggaactaccggcaccaggccgatgtgtgccatgcgtaccagatactgcagaagggaggagtgaagaaggagaacattgtggtgttcatgtatgatgatattgcccacaacattctgaaccctaggcctggagttatcattaaccatcctaaaggagcaaatgtttatgatggtgttccaaaggattacacaggtgatcaggtcactactgaaaacttctttgctgtcctcttgggcaatagaagtgctaccactggagggagtaagaaggtgatagacagcaaacctaatgaccacatcttcatctattactcagatcatgggggtcctggagttcttggtatgccgaacctgccatatctgtatgctggtgacttcatcaaggtcttgaaaaagaagcatgcttccaatagctactcaaaaatggttatatatgttgaagcatgtgaaagtggcagtatctttgaggggttaatgcctgaagatctaaatatttatgtcacaacagcctcaaatccagttgaaaatagttggggaacttactgccctgggatggaaccatcaccccctcctgagtacattacctgtttaggtgatttgtacagtgtttcttggatggaagacagtgaaacccacaatctaaagaaggaaaccatcaaggatcagtatgaagtggtgaaaacaagaacctcaaactcaaataagtacaaagagggttctcatgttatggagtatggtgataagaccttcaaggatgagaagctttccttttatcaaggttttgatcctgctaatgccaacattgcaaacatgctgctttggccaggcccaaagggtgcagtcaatcaaagagatgctgatcttctcttcatgtggaagaggtacgagcagttaaatggggggaccgaagagaagctgagggctctcatagagattaaagaaactgttcagcacaggaagcatcttgacagcagtatcgatttcgttgggaggctcgtcttcggatttgagaaagggccttcgatgcttgaggctgttagaacctctggtcaaccattagtcgatgactgggactgtttgaagaggatggtgcggattttcgagtcccagtgtggttcacttactcagtacggcatgaagtacatgagagcgtttgcaaacatctgcaacagtggtatatctgagatgaaaatgagggagtcgagcatcagcgcttgcagcagctacaactcggcgaggtggagcccgatggctcggggacacagtgcttgatggtaaagatcaaatagcaaagccccccgaggtctgctgccccatgtccctgtgagcgagctcgtatcatctggggactgtggacccatcgacggttgtacatatcatgcacttgtgctcgtgcctatgtaaagtagtaataccaactcaactctgatcttcatccaagtaccgaaatgattaaaagatcagatgtgaatgctgttgcgatgggtgatcgcaagtaggccataatcagtggaccgaaaatgatgacccaaatcaaggtagtgctcctctgatcgatagc

SEQ ID NO: 35847 - protein, 457 aa, Zea mays subsp. mays
  peptide (1)..(457): Ceres Seq. ID no. 12425450
  misc_feature (1)..(338): Pfam Name: Pfam Description:  Peptidase C13 family
  misc_feature (1)..(457): NCBI GI NO: 30465961 NR Description: vacuolar processing enzyme
  misc_feature (1)..(457): NCBI GI NO: 26006020 NR Description: asparaginyl endopeptidase REP-2
  misc_feature (5)..(457): NCBI GI NO: 17864752 NR Description: C13 cysteine proteinase precursor
  misc_feature (1)..(457): NCBI GI NO: 9622221 NR Description: asparaginyl endopeptidase [Sesamum indicum]
  misc_feature (1)..(457): NCBI GI NO: 2414681 NR Description: cysteine proteinase precursor [Vicia narbonensis]
  misc_feature (1)..(457): NCBI GI NO: 1351409 NR Description: Vacuolar processing enzyme precursor (VPE)
  misc_feature (1)..(457): NCBI GI NO: 1351410 NR Description: Vacuolar processing enzyme precursor (VPE)
  misc_feature (42)..(456): NCBI GI NO: 4154279 NR Description: C13 endopeptidase NP1 precursor [Hordeum vulgare]
  misc_feature (1)..(457): NCBI GI NO: 9622155 NR Description: seed maturation protein PM40 [Glycine max]
  misc_feature (1)..(457): NCBI GI NO: 15221556 NR Description: beta-VPE; protein id: At1g62710
MPTAKGSDAASAPAAEDDEVGTRWAVLVAGSFGYGNYRHQADVCHAYQILQKGGVKKENIVVFMYDDIAHNILNPRPGVIINHPKGANVYDGVPKDYTGDQVTTENFFAVLLGNRSATTGGSKKVIDSKPNDHIFIYYSDHGGPGVLGMPNLPYLYAGDFIKVLKKKHASNSYSKMVIYVEACESGSIFEGLMPEDLNIYVTTASNPVENSWGTYCPGMEPSPPPEYITCLGDLYSVSWMEDSETHNLKKETIKDQYEVVKTRTSNSNKYKEGSHVMEYGDKTFKDEKLSFYQGFDPANANIANMLLWPGPKGAVNQRDADLLFMWKRYEQLNGGTEEKLRALIEIKETVQHRKHLDSSIDFVGRLVFGFEKGPSMLEAVRTSGQPLVDDWDCLKRMVRIFESQCGSLTQYGMKYMRAFANICNSGISEMKMRESSISACSSYNSARWSPMARGHSA

SEQ ID NO: 35848 - protein, 394 aa, Zea mays subsp. mays
  peptide (1)..(394): Ceres Seq. ID no. 12425451
  misc_feature (1)..(275): Pfam Name: Pfam Description:  Peptidase C13 family
  misc_feature (1)..(394): NCBI GI NO: 30465961 NR Description: vacuolar processing enzyme
  misc_feature (1)..(394): NCBI GI NO: 26006020 NR Description: asparaginyl endopeptidase REP-2
  misc_feature (1)..(394): NCBI GI NO: 17864752 NR Description: C13 cysteine proteinase precursor
  misc_feature (1)..(394): NCBI GI NO: 9622221 NR Description: asparaginyl endopeptidase [Sesamum indicum]
  misc_feature (1)..(394): NCBI GI NO: 2414681 NR Description: cysteine proteinase precursor [Vicia narbonensis]
  misc_feature (1)..(394): NCBI GI NO: 1351409 NR Description: Vacuolar processing enzyme precursor (VPE)
  misc_feature (1)..(394): NCBI GI NO: 1351410 NR Description: Vacuolar processing enzyme precursor (VPE)
  misc_feature (1)..(393): NCBI GI NO: 4154279 NR Description: C13 endopeptidase NP1 precursor [Hordeum vulgare]
  misc_feature (1)..(394): NCBI GI NO: 9622155 NR Description: seed maturation protein PM40 [Glycine max]
  misc_feature (1)..(394): NCBI GI NO: 15221556 NR Description: beta-VPE; protein id: At1g62710
MYDDIAHNILNPRPGVIINHPKGANVYDGVPKDYTGDQVTTENFFAVLLGNRSATTGGSKKVIDSKPNDHIFIYYSDHGGPGVLGMPNLPYLYAGDFIKVLKKKHASNSYSKMVIYVEACESGSIFEGLMPEDLNIYVTTASNPVENSWGTYCPGMEPSPPPEYITCLGDLYSVSWMEDSETHNLKKETIKDQYEVVKTRTSNSNKYKEGSHVMEYGDKTFKDEKLSFYQGFDPANANIANMLLWPGPKGAVNQRDADLLFMWKRYEQLNGGTEEKLRALIEIKETVQHRKHLDSSIDFVGRLVFGFEKGPSMLEAVRTSGQPLVDDWDCLKRMVRIFESQCGSLTQYGMKYMRAFANICNSGISEMKMRESSISACSSYNSARWSPMARGHSA

SEQ ID NO: 35849 - protein, 309 aa, Zea mays subsp. mays
  peptide (1)..(309): Ceres Seq. ID no. 12425452
  misc_feature (1)..(190): Pfam Name: Pfam Description:  Peptidase C13 family
  misc_feature (1)..(309): NCBI GI NO: 30465961 NR Description: vacuolar processing enzyme
  misc_feature (1)..(309): NCBI GI NO: 26006020 NR Description: asparaginyl endopeptidase REP-2
  misc_feature (1)..(309): NCBI GI NO: 17864752 NR Description: C13 cysteine proteinase precursor
  misc_feature (1)..(309): NCBI GI NO: 9622221 NR Description: asparaginyl endopeptidase [Sesamum indicum]
  misc_feature (1)..(309): NCBI GI NO: 2414681 NR Description: cysteine proteinase precursor [Vicia narbonensis]
  misc_feature (1)..(309): NCBI GI NO: 1351409 NR Description: Vacuolar processing enzyme precursor (VPE)
  misc_feature (1)..(309): NCBI GI NO: 1351410 NR Description: Vacuolar processing enzyme precursor (VPE)
  misc_feature (1)..(308): NCBI GI NO: 4154279 NR Description: C13 endopeptidase NP1 precursor [Hordeum vulgare]
  misc_feature (1)..(309): NCBI GI NO: 9622155 NR Description: seed maturation protein PM40 [Glycine max]
  misc_feature (1)..(309): NCBI GI NO: 15221556 NR Description: beta-VPE; protein id: At1g62710
MPNLPYLYAGDFIKVLKKKHASNSYSKMVIYVEACESGSIFEGLMPEDLNIYVTTASNPVENSWGTYCPGMEPSPPPEYITCLGDLYSVSWMEDSETHNLKKETIKDQYEVVKTRTSNSNKYKEGSHVMEYGDKTFKDEKLSFYQGFDPANANIANMLLWPGPKGAVNQRDADLLFMWKRYEQLNGGTEEKLRALIEIKETVQHRKHLDSSIDFVGRLVFGFEKGPSMLEAVRTSGQPLVDDWDCLKRMVRIFESQCGSLTQYGMKYMRAFANICNSGISEMKMRESSISACSSYNSARWSPMARGHSA

SEQ ID NO: 35850 - DNA, 1261 bp, Zea mays subsp. mays
  misc_feature (1)..(1261): Ceres Seq. ID no. 12450620
agttcattcccatttcccaacccaaaccagcggctggcacggacgccggcgagccgcgcggcccggaggaccactgcctcctgcatatagccggcttccgcggccatgtcatccgtacacttctttcctgcctcctcccagaccccggtccccgcctgccttctcaaaacctctccaaagtcacccctcccgtgcccccgcacccttgccaccaccgctctccagagtgttggcggcaattgcaatgcgtggcaccgcccgcacctacggctgcagcggagggtccgcacccctgcagcaccgtccgacgcgccgcctgtgggccccgatggcgggagcgggggcggcggcgcggggggagggagtggaggggaggatgaggaggaggagggggagaagaagaagggactgttgcccgagtggatgaacttgacaacagaggacgccaagacggtgctggccgcggtagctatctcgctcgctttccgaaccttcgtcgccgagccgcgcttcatcccctcgctctccatgttccccaccttcgacgtcggtgaccgcatcgtcgccgagaaggttacttactactttaggaagccatgtgttaatgatataataattttcaaaagccctccagtgctgcaggaggttgggtatactgataatgatgttttcattaaaagagtagttgccagggagggagatgttgttgaggttcatgaaggaaaactcgttgtgaatgcaagtaccagaaaactctgtttttgtgatgggagataaccgaaacaacagctacgattcacatgtgtggggccctcttccagcaaaaaacatattggggagatcaatttttcggtattggcctcctggtcgaatagggggtactaccaagggttgcttcagccctgaattaagccctggagcaaagccagaatcacttactgatgtcaaatcgacaaagtaggagattgagaagttagttttggtggtgcctgatgtgcaggggaagcttcggttattcttcgtggtagaatgtcacagaggaatcctgtgttgtgtggcaggtagttctattagaacccagagagaggaagacaatttgattctcattgagtcattgattggattggccaaaaggcacagaaaccattttgtctcagggtttcttgtccttttgccttgctgtatacgtacgtattagggaaacttgataccatgatggctgacctagttaagctgcaaaaaagtatggttccactgttgc

SEQ ID NO: 35851 - protein, 223 aa, Zea mays subsp. mays
  peptide (1)..(223): Ceres Seq. ID no. 12450621
  misc_feature (110)..(215): Pfam Name: Pfam Description:  Signal peptidase I
  misc_feature (67)..(215): NCBI GI NO: 9294054 NR Description: contains similarity to signal peptidase
  misc_feature (67)..(215): NCBI GI NO: 30687572 NR Description: chloroplast thylakoidal processing peptidase -related
  misc_feature (67)..(215): NCBI GI NO: 25082936 NR Description: chloroplast thylakoidal processing peptidase
  misc_feature (101)..(211): NCBI GI NO: 15222236 NR Description: chloroplast thylakoidal processing peptidase
  misc_feature (70)..(211): NCBI GI NO: 25408074 NR Description: probable signal peptidase I
  misc_feature (70)..(211): NCBI GI NO: 30684587 NR Description: signal peptidase I -related [Arabidopsis thaliana]
  misc_feature (101)..(211): NCBI GI NO: 21553622 NR Description: chloroplast thylakoidal processing peptidase
  misc_feature (104)..(211): NCBI GI NO: 23042815 NR Description: hypothetical protein
  misc_feature (94)..(211): NCBI GI NO: 17230467 NR Description: signal peptidase I [Nostoc sp. PCC 7120]
  misc_feature (91)..(211): NCBI GI NO: 23125131 NR Description: hypothetical protein [Nostoc punctiforme]
MSSVHFFPASSQTPVPACLLKTSPKSPLPCPRTLATTALQSVGGNCNAWHRPHLRLQRRVRTPAAPSDAPPVGPDGGSGGGGAGGGSGGEDEEEEGEKKKGLLPEWMNLTTEDAKTVLAAVAISLAFRTFVAEPRFIPSLSMFPTFDVGDRIVAEKVTYYFRKPCVNDIIIFKSPPVLQEVGYTDNDVFIKRVVAREGDVVEVHEGKLVVNASTRKLCFCDGR

SEQ ID NO: 35852 - protein, 141 aa, Zea mays subsp. mays
  peptide (1)..(141): Ceres Seq. ID no. 12450622
VHSHFPTQTSGWHGRRRAARPGGPLPPAYSRLPRPCHPYTSFLPPPRPRSPPAFSKPLQSHPSRAPAPLPPPLSRVLAAIAMRGTARTYGCSGGSAPLQHRPTRRLWAPMAGAGAAARGEGVEGRMRRRRGRRRRDCCPSG

SEQ ID NO: 35853 - protein, 125 aa, Zea mays subsp. mays
  peptide (1)..(125): Ceres Seq. ID no. 12450623
FIPISQPKPAAGTDAGEPRGPEDHCLLHIAGFRGHVIRTLLSCLLPDPGPRLPSQNLSKVTPPVPPHPCHHRSPECWRQLQCVAPPAPTAAAEGPHPCSTVRRAACGPRWRERGRRRGGREWRGG

SEQ ID NO: 35854 - DNA, 2550 bp, Zea mays subsp. mays
  misc_feature (1)..(2550): Ceres Seq. ID no. 13599007
agaacatcctaatcgaaaaaccgcacacggctccgctgcttcgcgactcctctccggctctccgcacaggactccaaccgcctcgccgttgcatcgccgcgggcgtcaacctaggctgctgccggtaccggtgcgtccccagccatggctcggccgccgcaggaggcgatcgacaccttcgtcagcatcaccggcgccgacgaggtcaccgcagtccgcgtgctcgaggaacatggtcatgatctaaatgaagctgtgaatgcttattttaatgaaggagataggaccaccaccagaatcaatcagaatcctgtgcctgccactgccagttatgatgacatgatggagctggatgaaccacttgatcccatgttcaacagacctttgttccctagaactttgggcaacccttttgcccttttggatccaggttttgctgacataactgctggtgatatatttggacgtggaccccgagttacacaacctagggacgtgaggcagatacctattgaagttaaggacagcaatactcaaacaggcagttctggtcagggtcccattattgaggatgttactggacgtgaatcttttatggtccagaggtccatgggaccgttatagttgaygaagatgatgaagacttgccattaacactatctgctcaggatcctaagatcccaagcagtgctttgcacccaaaccatttcatgcctagtgcgcctccagtggttgatgttagtgaccataacaatgatatagaagaggagatgattaaggcagcaattgaagcttcaaaaagggaagctgacgggatgaaaaatgttctaagtagtggtcaatctgaaaacatgtcacgtggcagaggtgatcatgagcttgctcgggcggtttctttgtccttggaggtagccttttaacttctaagatgtagctatgtatttttgttcatatacctatacctgcaatgtgttttttatgtggctatcagacagcagagcgagagagagctctgcgccaagagggaatgtatgtagcagatcactctcctgacttatctgataaagaaggcggtcaaggaggaagtgggataagcgaaaggtgaagtcacatttccaaatgggtagaacagtggtagtgtgtggattattacttatttataatcaattaatggctcaatttctgttcccctatcatttgtttttttgtatggtttcatttgcatggaagccatgcatcgtgtgggatatgatattgtttccctgtttgtgtgggtcacttctcatgcaatgttttagcgagcttttcctaacctttgtaagtataatctgtgtctaattggaatatacttggtagcagctgattcctcatacatgtccattcttattgtaggcgaggactaactacaggagaagtgggaacttctgagcaaacagtagatgaagagaacttccaagaggacaatgaagatggtgaagaacaacctttagttaggactcgttctaggcgacttcgaggcagaactattgagccagcagaaactgttcaaagggctgacagcccgccctcaagtccccaacctcatgttcaaattggtcatcagcgtaatgtggggtttccttcagtagagtggggtggtatttcttctgaagagcgtgatgaagctcttatgcttgaggctgcaatgtttggtgggattcctgaaggagcaccatatccattttccttcccagcccatggcaggtcgactcactatcccctagtagcacgtcctccatcaccatcattaacggcacagcggttgttaagggagcagcaggatgatgagtatcttgctgctctccaagctgatcgagaaaaagagttgaaggctgtgcaggaggctgaacttcgcagggtagaggaagctgcagcaagagaggctgctcttgaacgtcaaaagaaagaagaggaggagaagctaaagaaacaacgtgaggaagaggagttggaatccaagcttgcagccaaacaagcatcactacctaaggagccactacaaaatgacgagggggctgtcacagtggtagtccgcatgcctgatggtagtcgtcgaggacggcgctttctcaaatctgacaggcttcagtatctttttgatttcatagacatcagccggactttcaaaccaggaacttatagactggcgaggtcttatcccaggcgtgccttcactgaattggagagccagatgtcactgagcgatctcggtctcactagcaagcaggaagctctgttcctagaaaaactgtctgcgtagagtacaaggttctggagttatggtcgagtagtatatgcacttataaaatcggtcatttagatcgtgcctggcgtgtgttcatgaaaatactgcagcggttgaatgattactgatctctagagatcccgtcgccatcttctgtgctctgaaacggaggtgtttcgatctgactgtgcagatgggcagttctacattcagatttcagaacaactgtagctcttgcggttttaagacttgagtatggtttactc

SEQ ID NO: 35855 - protein, 209 aa, Zea mays subsp. mays
  peptide (1)..(209): Ceres Seq. ID no. 15222489
  misc_feature (125)..(205): Pfam Name: Pfam Description:  UBX domain
  misc_feature (1)..(205): NCBI GI NO: 18416058 NR Description: expressed protein [Arabidopsis thaliana]
  misc_feature (1)..(205): NCBI GI NO: 7487672 NR Description: hypothetical protein T5C23
  misc_feature (1)..(205): NCBI GI NO: 7486575 NR Description: hypothetical protein F7H19
  misc_feature (1)..(205): NCBI GI NO: 18413644 NR Description: expressed protein [Arabidopsis thaliana]
  misc_feature (1)..(105): NCBI GI NO: 13160609 NR Description: Ara4-interacting protein [Arabidopsis thaliana]
  misc_feature (79)..(207): NCBI GI NO: 30678726 NR Description: expressed protein [Arabidopsis thaliana]
  misc_feature (101)..(156): NCBI GI NO: 4325337 NR Description: F15P23.3 gene product [Arabidopsis thaliana]
  misc_feature (1)..(65): NCBI GI NO: 30678726 NR Description: expressed protein [Arabidopsis thaliana]
  misc_feature (46)..(205): NCBI GI NO: 7486906 NR Description: hypothetical protein T12H20
  misc_feature (46)..(205): NCBI GI NO: 15236931 NR Description: expressed protein [Arabidopsis thaliana]
MLEAAMFGGIPEGAPYPFSFPAHGRSTHYPLVARPPSPSLTAQRLLREQQDDEYLAALQADREKELKAVQEAELRRVEEAAAREAALERQKKEEEEKLKKQREEEELESKLAAKQASLPKEPLQNDEGAVTVVVRMPDGSRRGRRFLKSDRLQYLFDFIDISRTFKPGTYRLARSYPRRAFTELESQMSLSDLGLTSKQEALFLEKLSA

SEQ ID NO: 35856 - protein, 204 aa, Zea mays subsp. mays
  peptide (1)..(204): Ceres Seq. ID no. 15222490
  misc_feature (120)..(200): Pfam Name: Pfam Description:  UBX domain
  misc_feature (1)..(200): NCBI GI NO: 18416058 NR Description: expressed protein [Arabidopsis thaliana]
  misc_feature (1)..(200): NCBI GI NO: 7487672 NR Description: hypothetical protein T5C23
  misc_feature (1)..(200): NCBI GI NO: 7486575 NR Description: hypothetical protein F7H19
  misc_feature (1)..(200): NCBI GI NO: 18413644 NR Description: expressed protein [Arabidopsis thaliana]
  misc_feature (1)..(100): NCBI GI NO: 13160609 NR Description: Ara4-interacting protein [Arabidopsis thaliana]
  misc_feature (74)..(202): NCBI GI NO: 30678726 NR Description: expressed protein [Arabidopsis thaliana]
  misc_feature (96)..(151): NCBI GI NO: 4325337 NR Description: F15P23.3 gene product [Arabidopsis thaliana]
  misc_feature (1)..(60): NCBI GI NO: 30678726 NR Description: expressed protein [Arabidopsis thaliana]
  misc_feature (41)..(200): NCBI GI NO: 7486906 NR Description: hypothetical protein T12H20
  misc_feature (41)..(200): NCBI GI NO: 15236931 NR Description: expressed protein [Arabidopsis thaliana]
MFGGIPEGAPYPFSFPAHGRSTHYPLVARPPSPSLTAQRLLREQQDDEYLAALQADREKELKAVQEAELRRVEEAAAREAALERQKKEEEEKLKKQREEEELESKLAAKQASLPKEPLQNDEGAVTVVVRMPDGSRRGRRFLKSDRLQYLFDFIDISRTFKPGTYRLARSYPRRAFTELESQMSLSDLGLTSKQEALFLEKLSA

SEQ ID NO: 35857 - protein, 159 aa, Zea mays subsp. mays
  peptide (1)..(159): Ceres Seq. ID no. 15222491
  misc_feature (1)..(145): NCBI GI NO: 18416058 NR Description: expressed protein [Arabidopsis thaliana]
  misc_feature (64)..(159): NCBI GI NO: 7487672 NR Description: hypothetical protein T5C23
  misc_feature (1)..(145): NCBI GI NO: 7486575 NR Description: hypothetical protein F7H19
  misc_feature (1)..(159): NCBI GI NO: 13160609 NR Description: Ara4-interacting protein [Arabidopsis thaliana]
  misc_feature (1)..(48): NCBI GI NO: 30678726 NR Description: expressed protein [Arabidopsis thaliana]
  misc_feature (1)..(48): NCBI GI NO: 4325337 NR Description: F15P23.3 gene product [Arabidopsis thaliana]
MARPPQEAIDTFVSITGADEVTAVRVLEEHGHDLNEAVNAYFNEGDRTTTRINQNPVPATASYDDMMELDEPLDPMFNRPLFPRTLGNPFALLDPGFADITAGDIFGRGPRVTQPRDVRQIPIEVKDSNTQTGSSGQGPIIEDVTGRESFMVQRSMGPL

SEQ ID NO: 35858 - DNA, 2347 bp, Zea mays subsp. mays
  misc_feature (1)..(2347): Ceres Seq. ID no. 12450495
ataattggtgcctttcttgataagttgatatacaaccgtggatccttggaacttcgatttagttagtgactccgtaggtatcagataaccaaaaaaagaggaatcacgtgaactaccggttatatttcccctggatttcgacaaagctttttaggaaatttcgtactttttttcatggagaaatttcgaagacaccaatgaagttctcgcataaaataataaaaaaaccctaagcatgctcgattttcatttttttttttgccatgaacaactgctagtcaagcacaaaacaaggatttcctaattctccacactcgacaaccattattttcacagcttcaagaactctcaacttcccctcaccccaacccaaaagaagtgaatacaaccataaccttcacagcttcaagaacttttcaacttcaaggaaatttctaaacagtaattcttttttaagctggtgaggtgtcccggccctcctgtttcctgaaaaaaaagcacgactgaactagatgttattaggtccgcacatgaattgcatacgaaatgttttcctgactggggctaaattgctagtttagccatggggcagacgcatcttttgttgctcgcttgtttctgggtcctgtcaacatgctccttgctacttgatgcttcctccgatggactgttaagaatcaacctgaacaagaagagactggacaaggaagctttgactgctgcgaaattggcgaagaaggagagcaaccttcgaaggtctgtgggtgctgaccagtatctcagtgcctcaactgatgacatagtccctttggacaactacctggacacccagtactttggacagatcagcatcggcacgccaccacagaacttcacagtgatattcgacactggaagctccaacttgtgggttccctcatccaagtgctacttttcgatagcatgctacttacaccacagatacaagtcaaccaagtcgaagacttacacaaagaatggagaatcttgtacgataacatatggttctgggcaaatcgctggcttcttcagtgaggacaatgtgttggttggcaaccttgttgtgcaaaatcagaaatttattgagacaactcgagaaaccagccctactttcatcattgggaagtttgatggaattcttggtctcggatttcctgaaatttctgtaggaggagcccctccaatttggcagagcatgaaacagcagaaactggtcgcaaaggatgtcttctctttctggcttaatcgtgaccctgatgcatcttctggaggaggcgagcttgtctttggtggtgttgacccaaaacactacaaaggggaccatacatatgttcccgttacacgcaaaggctactggcagtttgacatgggagatcttattattggtggccactcaactggtttctgtgctggtggctgtgctgctattgtggactcagggacttcattgcttgctggtccaactaccatagtggctcaagtcaatcatgcaattggggctgagggaatcatcagtacagaatgcaaagaagtggtgagcgagtatggagagatgatccttgagttgctcatatcgcagacaagcccacagaaagtgtgcactcagattggtctctgtgtatttgatggtgcccattctgtcagcaatccaattgaatctgttgttgagaaacagaagcgtggttctgatcttttctgtactgcttgtgagatggctgttgtctggatacagaatcagctccgtgaaaacaagacaaaagaactcattttgaattatgctaatcagctctgtgagcgtctccctagccccaatggcgagtcaactgttgattgccatcagatctcaaagatgccaaatcttgcattcaccatagcaaacaagactttcaccttaacaccagagcagtacatagtgaagctggagcaagcaggacaaactatctgcatcagtgggtttatggcatttgacgtaccgcctcctcgtggtcctctctggatacttggtgatgtttttatgggtgcctaccacactgtttttgacttcggtgagaacaggattgggtttgccaaatctgcatgaggactggagttctgcgctttagtagcatgtccagtttgttatccgggtattgtacatatatatgttgccaactggtgtaatccgcagtgtttaatagtatatattcatgcagaaatctagaagattgtggcatgatatgtgtttgcaaatggagctatgctatgtatggagctccaggacctagagttttatgtaaagggagacgatgaggattagggcttttaacctattctcatcacgttattgtcc

SEQ ID NO: 35859 - protein, 504 aa, Zea mays subsp. mays
  peptide (1)..(504): Ceres Seq. ID no. 12450496
  misc_feature (29)..(359): Pfam Name: Pfam Description:  Eukaryotic aspartyl protease
  misc_feature (1)..(504): NCBI GI NO: 1168537 NR Description: Aspartic proteinase precursor
  misc_feature (1)..(504): NCBI GI NO: 7435839 NR Description: aspartic proteinase precursor
  misc_feature (1)..(503): NCBI GI NO: 15425751 NR Description: aspartic proteinase 2 [Glycine max]
  misc_feature (12)..(504): NCBI GI NO: 21616051 NR Description: aspartic proteinase [Theobroma cacao]
  misc_feature (1)..(504): NCBI GI NO: 12231174 NR Description: aspartic proteinase 2 [Nepenthes alata]
  misc_feature (1)..(504): NCBI GI NO: 13897888 NR Description: putative aspartic protease [Ipomoea batatas]
  misc_feature (1)..(504): NCBI GI NO: 12231178 NR Description: aspartic proteinase 4 [Nepenthes alata]
  misc_feature (6)..(504): NCBI GI NO: 1168536 NR Description: Phytepsin precursor (Aspartic proteinase)
  misc_feature (6)..(504): NCBI GI NO: 2499819 NR Description: Aspartic proteinase oryzasin 1 precursor
  misc_feature (76)..(316): NCBI GI NO: 3378673 NR Description: Cathepsin D [Podarcis sicula]
MGQTHLLLLACFWVLSTCSLLLDASSDGLLRINLNKKRLDKEALTAAKLAKKESNLRRSVGADQYLSASTDDIVPLDNYLDTQYFGQISIGTPPQNFTVIFDTGSSNLWVPSSKCYFSIACYLHHRYKSTKSKTYTKNGESCTITYGSGQIAGFFSEDNVLVGNLVVQNQKFIETTRETSPTFIIGKFDGILGLGFPEISVGGAPPIWQSMKQQKLVAKDVFSFWLNRDPDASSGGGELVFGGVDPKHYKGDHTYVPVTRKGYWQFDMGDLIIGGHSTGFCAGGCAAIVDSGTSLLAGPTTIVAQVNHAIGAEGIISTECKEVVSEYGEMILELLISQTSPQKVCTQIGLCVFDGAHSVSNPIESVVEKQKRGSDLFCTACEMAVVWIQNQLRENKTKELILNYANQLCERLPSPNGESTVDCHQISKMPNLAFTIANKTFTLTPEQYIVKLEQAGQTICISGFMAFDVPPPRGPLWILGDVFMGAYHTVFDFGENRIGFAKSA

SEQ ID NO: 35860 - protein, 294 aa, Zea mays subsp. mays; identical to SEQ ID NO: 34875
  peptide (1)..(294): Ceres Seq. ID no. 12450497
  misc_feature (1)..(149): Pfam Name: Pfam Description:  Eukaryotic aspartyl protease
  misc_feature (1)..(294): NCBI GI NO: 1168537 NR Description: Aspartic proteinase precursor
  misc_feature (1)..(294): NCBI GI NO: 7435839 NR Description: aspartic proteinase precursor
  misc_feature (1)..(293): NCBI GI NO: 15425751 NR Description: aspartic proteinase 2 [Glycine max]
  misc_feature (1)..(294): NCBI GI NO: 21616051 NR Description: aspartic proteinase [Theobroma cacao]
  misc_feature (1)..(294): NCBI GI NO: 12231174 NR Description: aspartic proteinase 2 [Nepenthes alata]
  misc_feature (1)..(294): NCBI GI NO: 13897888 NR Description: putative aspartic protease [Ipomoea batatas]
  misc_feature (1)..(294): NCBI GI NO: 12231178 NR Description: aspartic proteinase 4 [Nepenthes alata]
  misc_feature (1)..(294): NCBI GI NO: 1168536 NR Description: Phytepsin precursor (Aspartic proteinase)
  misc_feature (1)..(294): NCBI GI NO: 2499819 NR Description: Aspartic proteinase oryzasin 1 precursor
  misc_feature (1)..(106): NCBI GI NO: 3378673 NR Description: Cathepsin D [Podarcis sicula]

SEQ ID NO: 35861 - DNA, 2285 bp, Zea mays subsp. mays
  misc_feature (1)..(2285): Ceres Seq. ID no. 13622799
ggatctttcgctttccttaccccgttagcgttcctgcttgatacactacgactgcagattctttggcagaccgctaccaagtgcaagtgtgcaacgcacacacatcactcacagtctcacggtgtctctgtgcgcgcgcgtgggacacaggagggagagagacacagagaagggggcgggacgatcagctctagctcagctggtatcgtctaaactgcataaaaggggagggaaaaaaagttgcaatgatgcatcccggcgcatagatagagagagagagagaagagagagccccgactcgagagccaagaacgccgtgtgttgtgtttgtgtgcatctatctccgtacacgcacgctcgtacgcaccagctagcacgaccgccatggccgccaccaggagagccttcttccacagcgccgtcgacggcattgcgcgcgccgggccgggggaggccgagcggctgccggcgccgccgcaggtcgggcgaccggtggaaggcgccagcagcatggtcttgggcttccccgtgccgcggcccacgatgccggaccgccggccggccgccgtcacccagcagttctttccgcccactactacggccgcgcagcaggcgacgatggaggagcaatgccacgtgcccgccggtagcgcggcggagcagtgggtccggtcgtcggcgtccaggaagagccggcgcggcccgcggtcacggagctcgcagtaccgcggcgtcaccttctaccgccgcaccggccgctgggagtcccacatctgggactgtgggaaacaggtgtacttgggtggattcgacacggcgcaggccgctgcgagggcctacgaccaagccgcgatcaagttccgcggcctgaacgcggacatcaacttcaccctggacgactacaaggacgagatgaagaagatgaaggacttgagcaaggaggagttcgtgttggtgctccggcggcagggcgccggcttcgtcaggggcagctccaggttccggggagtcacccagcacaagtgcggcaagtgggaggccaggatcggccagctcatgggcaagaagtatgtgtacctgggcctgtatgacacagagacggaggctgcccaggcatatgacaaggctgccatcaagtgctacggcaaggaggcggtgaccaacttcgatgcccagagctacgacaaggagctccagtcgcagccctgggacggcgagctggatctcgagctcagtctgggctgcgccagcagcgatccgtccacggtcgccgtcgaggcgttcagccccgcgacgagcagcagtagccgcaagcagaggacgatgacgctgacgctcggtctgccggaggaggaggagacgggcgccggctaccctcaccctgctgccggcatgttcgggcgcccggctgatggccacgtccacgtagcaccgccgccacaccggcaatggcagcagcagcagcagggacagcacgcagctccagatgcggcgcctgagcgacgagcggcagagccagcagatcggcagcggtggggccggggcgcgcgctggcccatcgccagcgccagcggcattaactgggcctgggcgccgccgtacgccaccgcccgcgccggcaccgacgacgacgacgccagcagcgccgccgctgcagcatcatcaggattcccactgtggcagctgggtgcggcgtcgtccaggtccagctggcccagctgctgagcctttcctgtcgtcccgcgccaccaacagtgacgctgctgggccacgtactgacggcgactggtgacctgctggaaccgccgccggcctgtttcccttttctaggtaaaagcagtggcagaggggcgagctagcgacagcgtgcctcgtcatccatcgtccctgcgccgtggctggcggggtgggaaaaagtctgagcagttttgagcgtccggaggagctcgagatttcctccctcgaatagtcacttggggtggccactagttattatttctttccttccccctcgttgattctgctacccattatagcctctgtatctagctacatgcatgatgctgctctagcgctgttggacgttgatggcacggtgtacggatatgggacagggttcgtgtgaccccatgtccactgctaggcctgtttccaaatggagtatttctgcagtaccatggcttatagaaatgccgagtattttaaaccattaggtgcttggttactttcccaaaaactaggttttcaaagctatggtataatgaataccacggtatatatttttc

SEQ ID NO: 35862 - protein, 446 aa, Zea mays subsp. mays
  peptide (1)..(446): Ceres Seq. ID no. 13622800
  misc_feature (111)..(174): Pfam Name: Pfam Description:  AP2 domain
  misc_feature (1)..(446): NCBI GI NO: 7489716 NR Description: APETALA2-like protein Glossy15 - maize
  misc_feature (24)..(289): NCBI GI NO: 38345500 NR Description: OSJNBa0010D21.13
  misc_feature (41)..(294): NCBI GI NO: 28894445 NR Description: LIPLESS2 [Antirrhinum majus]
  misc_feature (86)..(293): NCBI GI NO: 28894443 NR Description: LIPLESS1 [Antirrhinum majus]
  misc_feature (88)..(290): NCBI GI NO: 13173164 NR Description: APETAL2-like protein [Pisum sativum]
  misc_feature (86)..(318): NCBI GI NO: 21717332 NR Description: transcription factor AHAP2 [Malus x domestica]
  misc_feature (92)..(290): NCBI GI NO: 5081555 NR Description: PHAP2A protein [Petunia x hybrida]
  misc_feature (101)..(293): NCBI GI NO: 15234566 NR Description: floral homeotic protein APETALA2
  misc_feature (59)..(308): NCBI GI NO: 28876023 NR Description: putative transcription factor AP2 family protein
  misc_feature (59)..(308): NCBI GI NO: 29124121 NR Description: APETALA2-like protein
MAATRRAFFHSAVDGIARAGPGEAERLPAPPQVGRPVEGASSMVLGFPVPRPTMPDRRPAAVTQQFFPPTTTAAQQATMEEQCHVPAGSAAEQWVRSSASRKSRRGPRSRSSQYRGVTFYRRTGRWESHIWDCGKQVYLGGFDTAQAAARAYDQAAIKFRGLNADINFTLDDYKDEMKKMKDLSKEEFVLVLRRQGAGFVRGSSRFRGVTQHKCGKWEARIGQLMGKKYVYLGLYDTETEAAQAYDKAAIKCYGKEAVTNFDAQSYDKELQSQPWDGELDLELSLGCASSDPSTVAVEAFSPATSSSSRKQRTMTLTLGLPEEEETGAGYPHPAAGMFGRPADGHVHVAPPPHRQWQQQQQGQHAAPDAAPERRAAEPADRQRWGRGARWPIASASGINWAWAPPYATARAGTDDDDASSAAAAASSGFPLWQLGAASSRSSWPSC

SEQ ID NO: 35863 - protein, 404 aa, Zea mays subsp. mays
  peptide (1)..(404): Ceres Seq. ID no. 13622801
  misc_feature (69)..(132): Pfam Name: Pfam Description:  AP2 domain
  misc_feature (1)..(404): NCBI GI NO: 7489716 NR Description: APETALA2-like protein Glossy15 - maize
  misc_feature (1)..(247): NCBI GI NO: 38345500 NR Description: OSJNBa0010D21.13
  misc_feature (1)..(252): NCBI GI NO: 28894445 NR Description: LIPLESS2 [Antirrhinum majus]
  misc_feature (44)..(251): NCBI GI NO: 28894443 NR Description: LIPLESS1 [Antirrhinum majus]
  misc_feature (46)..(248): NCBI GI NO: 13173164 NR Description: APETAL2-like protein [Pisum sativum]
  misc_feature (44)..(276): NCBI GI NO: 21717332 NR Description: transcription factor AHAP2 [Malus x domestica]
  misc_feature (50)..(248): NCBI GI NO: 5081555 NR Description: PHAP2A protein [Petunia x hybrida]
  misc_feature (59)..(251): NCBI GI NO: 15234566 NR Description: floral homeotic protein APETALA2
  misc_feature (17)..(266): NCBI GI NO: 28876023 NR Description: putative transcription factor AP2 family protein
  misc_feature (17)..(266): NCBI GI NO: 29124121 NR Description: APETALA2-like protein
MVLGFPVPRPTMPDRRPAAVTQQFFPPTTTAAQQATMEEQCHVPAGSAAEQWVRSSASRKSRRGPRSRSSQYRGVTFYRRTGRWESHIWDCGKQVYLGGFDTAQAAARAYDQAAIKFRGLNADINFTLDDYKDEMKKMKDLSKEEFVLVLRRQGAGFVRGSSRFRGVTQHKCGKWEARIGQLMGKKYVYLGLYDTETEAAQAYDKAAIKCYGKEAVTNFDAQSYDKELQSQPWDGELDLELSLGCASSDPSTVAVEAFSPATSSSSRKQRTMTLTLGLPEEEETGAGYPHPAAGMFGRPADGHVHVAPPPHRQWQQQQQGQHAAPDAAPERRAAEPADRQRWGRGARWPIASASGINWAWAPPYATARAGTDDDDASSAAAAASSGFPLWQLGAASSRSSWPSC

SEQ ID NO: 35864 - protein, 393 aa, Zea mays subsp. mays
  peptide (1)..(393): Ceres Seq. ID no. 13622802
  misc_feature (58)..(121): Pfam Name: Pfam Description:  AP2 domain
  misc_feature (1)..(393): NCBI GI NO: 7489716 NR Description: APETALA2-like protein Glossy15 - maize
  misc_feature (1)..(236): NCBI GI NO: 38345500 NR Description: OSJNBa0010D21.13
  misc_feature (1)..(241): NCBI GI NO: 28894445 NR Description: LIPLESS2 [Antirrhinum majus]
  misc_feature (33)..(240): NCBI GI NO: 28894443 NR Description: LIPLESS1 [Antirrhinum majus]
  misc_feature (35)..(237): NCBI GI NO: 13173164 NR Description: APETAL2-like protein [Pisum sativum]
  misc_feature (33)..(265): NCBI GI NO: 21717332 NR Description: transcription factor AHAP2 [Malus x domestica]
  misc_feature (39)..(237): NCBI GI NO: 5081555 NR Description: PHAP2A protein [Petunia x hybrida]
  misc_feature (48)..(240): NCBI GI NO: 15234566 NR Description: floral homeotic protein APETALA2
  misc_feature (6)..(255): NCBI GI NO: 28876023 NR Description: putative transcription factor AP2 family protein
  misc_feature (6)..(255): NCBI GI NO: 29124121 NR Description: APETALA2-like protein
MPDRRPAAVTQQFFPPTTTAAQQATMEEQCHVPAGSAAEQWVRSSASRKSRRGPRSRSSQYRGVTFYRRTGRWESHIWDCGKQVYLGGFDTAQAAARAYDQAAIKFRGLNADINFTLDDYKDEMKKMKDLSKEEFVLVLRRQGAGFVRGSSRFRGVTQHKCGKWEARIGQLMGKKYVYLGLYDTETEAAQAYDKAAIKCYGKEAVTNFDAQSYDKELQSQPWDGELDLELSLGCASSDPSTVAVEAFSPATSSSSRKQRTMTLTLGLPEEEETGAGYPHPAAGMFGRPADGHVHVAPPPHRQWQQQQQGQHAAPDAAPERRAAEPADRQRWGRGARWPIASASGINWAWAPPYATARAGTDDDDASSAAAAASSGFPLWQLGAASSRSSWPSC

SEQ ID NO: 35865 - DNA, 1888 bp, Zea mays subsp. mays
  misc_feature (1)..(1888): Ceres Seq. ID no. 12454903
  misc_feature (1614)..(1614): n is a, c, t, g, unknown, or other
acactggcacgtactccagagacgagcgcgcgcgcgcggagcaggccgggtccataaattatgagctcgccctttggaaccgagaggcgtttcctacccaccttaccttatcattattagctccaagcaagtcgcacacgacacagacacacacacatcatcatcatcaacaacctgacatggccggcgacggggcggacgccgcgcacggcgcgtcggcgcggctggagggcgtgctgacggatgcgtcgaccccgtgggcgcggcgcgcgtggggcgcggccgccatcgagctgccgctgctgacgcggctggcggcgccggcggttgtgatgtacatgatcaactacctcatgtccatgtcgacgcagatcttctcgggccacctcggcaacctggagctcgccgccgcctcgctcggcaacaccggcgtgcagatgttcgcctacggactcatgctgggcatgggcagcgcggtggagacgctgtgcgggcaggcgtacggcgcccacaagtacgagatgctgggcatctacctgcagcggtcggccgtgctgctgtgcgcgacgggcgtgccgctggccgtgatctacggcttctcggagccgatcctggtgttcctggggcagtcgccggagatcgcccgcgcggcggccatcttcgtgtacggcctgatcccgcagatcttcgcgtacgccatcaacttcccgatccagaagttcatgcaggcagcagagcatcgtgctcccgagcgcgtacatctccaccgcgtcgctggcgctgcacctgctgctgagctgggtggtggtctacaaggtggggctgggcctgctgggggcctccctggtgctgagcctcagctggtggctcctcgtcgcggcgcagttcgcgtacatcgtgatgagccccaggtgccgccacacctggaccggcttcacctggcaggccttctcgggcctctgggacttcctcaagctctccgccgcgtccgccgtcatgctctgcctcgagacctggtactatcaggtcctggtgctcatcgccggcttgctccccaaccctgaacttgcattggacgcgctgtctgtatgcatgactgttaatgggtgggtgttcatgatcgcagtagggttcaacgccgctgccagcgtgagagtgagcaatgagctcggcgccggccaccccaagtccgcgtatttctcggtgtgggtagtgaccgcgctgtcgacgctcatatctatcatgctcggcgttctggtcctctgcctgcgcaactacatcagctacttgttcacggagggcgaggtggtgtccaacgcggtggccgatctctgcccgctgcttgccgtcacgctcgttctcaacggcatccagcctgtgctgtcaggtgtcgccgttgggtgcgggtggcagcagttcgtggcctacgtgaacattggctgctactacatagtcggcgtccccctcggcgccgtgctcgggttcgtcttcaagctcggtgtgaagggcatttgggctgggatgatcggagggacttgcatgcagacggctattctagtgtgggtcaccttgagaactgactggaacaaggaggtagaggaagcacatgaatangttgcacaagtgggaggctaacaagacgacggagccccttcttgcgggggtcagcaatgacaaataaataacgtaactgcgcgcggatgatcgatcgatccacaatatcaatcaatctccggccttcaccagtactagttcccttcatgcataatgttgggaactggcgtctttagattttctgtgcagtaaattaaatgaaccacggtaacgtcaatgtaaacgaatcacgcatgtttggtttgcttatttcttccgttttaatgcttaacgt

SEQ ID NO: 35866 - protein, 353 aa, Zea mays subsp. mays
  peptide (1)..(353): Ceres Seq. ID no. 12454904
  misc_feature (72)..(274): NCBI GI NO: 15233127 NR Description: integral membrane protein, putative
  misc_feature (72)..(274): NCBI GI NO: 20466556 NR Description: integral membrane protein, putative
  misc_feature (74)..(243): NCBI GI NO: 18407368 NR Description: expressed protein; protein id: At1g61890
  misc_feature (74)..(243): NCBI GI NO: 15081773 NR Description: At1g61890/F8K4_9 [Arabidopsis thaliana]
  misc_feature (71)..(243): NCBI GI NO: 15221073 NR Description: unknown protein; protein id: At1g11670.1
  misc_feature (71)..(243): NCBI GI NO: 22655139 NR Description: unknown protein [Arabidopsis thaliana]
  misc_feature (75)..(249): NCBI GI NO: 18415793 NR Description: putative protein; protein id: At4g21910.1
  misc_feature (75)..(249): NCBI GI NO: 21553843 NR Description: unknown [Arabidopsis thaliana]
  misc_feature (93)..(274): NCBI GI NO: 34901880 NR Description: putative Multidrug resistance protein norM
  misc_feature (75)..(249): NCBI GI NO: 7487826 NR Description: hypothetical protein T8O5
TGTYSRDERARAEQAGSINYELALWNREAFPTHLTLSLLAPSKSHTTQTHTHHHHQQPDMAGDGADAAHGASARLEGVLTDASTPWARRAWGAAAIELPLLTRLAAPAVVMYMINYLMSMSTQIFSGHLGNLELAAASLGNTGVQMFAYGLMLGMGSAVETLCGQAYGAHKYEMLGIYLQRSAVLLCATGVPLAVIYGFSEPILVFLGQSPEIARAAAIFVYGLIPQIFAYAINFPIQKFMQAAEHRAPERVHLHRVAGAAPAAELGGGLQGGAGPAGGLPGAEPQLVAPRRGAVRVHRDEPQVPPHLDRLHLAGLLGPLGLPQALRRVRRHALPRDLVLSGPGAHRRLAPQP

SEQ ID NO: 35867 - protein, 294 aa, Zea mays subsp. mays
  peptide (1)..(294): Ceres Seq. ID no. 12454905
  misc_feature (13)..(215): NCBI GI NO: 15233127 NR Description: integral membrane protein, putative
  misc_feature (13)..(215): NCBI GI NO: 20466556 NR Description: integral membrane protein, putative
  misc_feature (15)..(184): NCBI GI NO: 18407368 NR Description: expressed protein; protein id: At1g61890
  misc_feature (15)..(184): NCBI GI NO: 15081773 NR Description: At1g61890/F8K4_9 [Arabidopsis thaliana]
  misc_feature (12)..(184): NCBI GI NO: 15221073 NR Description: unknown protein; protein id: At1g11670.1
  misc_feature (12)..(184): NCBI GI NO: 22655139 NR Description: unknown protein [Arabidopsis thaliana]
  misc_feature (16)..(190): NCBI GI NO: 18415793 NR Description: putative protein; protein id: At4g21910.1
  misc_feature (16)..(190): NCBI GI NO: 21553843 NR Description: unknown [Arabidopsis thaliana]
  misc_feature (34)..(215): NCBI GI NO: 34901880 NR Description: putative Multidrug resistance protein norM
  misc_feature (16)..(190): NCBI GI NO: 7487826 NR Description: hypothetical protein T8O5
MAGDGADAAHGASARLEGVLTDASTPWARRAWGAAAIELPLLTRLAAPAVVMYMINYLMSMSTQIFSGHLGNLELAAASLGNTGVQMFAYGLMLGMGSAVETLCGQAYGAHKYEMLGIYLQRSAVLLCATGVPLAVIYGFSEPILVFLGQSPEIARAAAIFVYGLIPQIFAYAINFPIQKFMQAAEHRAPERVHLHRVAGAAPAAELGGGLQGGAGPAGGLPGAEPQLVAPRRGAVRVHRDEPQVPPHLDRLHLAGLLGPLGLPQALRRVRRHALPRDLVLSGPGAHRRLAPQP

SEQ ID NO: 35868 - protein, 244 aa, Zea mays subsp. mays
  peptide (1)..(244): Ceres Seq. ID no. 12454906
  misc_feature (1)..(235): NCBI GI NO: 15233127 NR Description: integral membrane protein, putative
  misc_feature (1)..(235): NCBI GI NO: 20466556 NR Description: integral membrane protein, putative
  misc_feature (1)..(241): NCBI GI NO: 18407368 NR Description: expressed protein; protein id: At1g61890
  misc_feature (1)..(241): NCBI GI NO: 15081773 NR Description: At1g61890/F8K4_9 [Arabidopsis thaliana]
  misc_feature (1)..(241): NCBI GI NO: 15221073 NR Description: unknown protein; protein id: At1g11670.1
  misc_feature (1)..(241): NCBI GI NO: 22655139 NR Description: unknown protein [Arabidopsis thaliana]
  misc_feature (1)..(237): NCBI GI NO: 18415793 NR Description: putative protein; protein id: At4g21910.1
  misc_feature (1)..(237): NCBI GI NO: 21553843 NR Description: unknown [Arabidopsis thaliana]
  misc_feature (1)..(202): NCBI GI NO: 34901880 NR Description: putative Multidrug resistance protein norM
  misc_feature (1)..(211): NCBI GI NO: 7487826 NR Description: hypothetical protein T8O5
  misc_feature (238)..(238): Xaa is any aa, unknown or other
MSPRCRHTWTGFTWQAFSGLWDFLKLSAASAVMLCLETWYYQVLVLIAGLLPNPELALDALSVCMTVNGWVFMIAVGFNAAASVRVSNELGAGHPKSAYFSVWVVTALSTLISIMLGVLVLCLRNYISYLFTEGEVVSNAVADLCPLLAVTLVLNGIQPVLSGVAVGCGWQQFVAYVNIGCYYIVGVPLGAVLGFVFKLGVKGIWAGMIGGTCMQTAILVWVTLRTDWNKEVEEAHEXVAQVGG

SEQ ID NO: 35869 - DNA, 1417 bp, Zea mays subsp. mays
  misc_feature (1)..(1417): Ceres Seq. ID no. 12436145
aaacggaggctggactggattcttgaagaggcttccattccatgggggtaaagcgatcccatttccactcctgcctgttgtctgcctccaaggcaacagttttttagtttgcttgcgctctcctgccttcggttcaccgcctctccatgaatgcaagcaagccgccttttaaatacgaggctctcgcttgttactgaagctgcgcggcgtcttgtgcctcggaacctgccaactgccattggaagtgtttctctacagtctacaaatacgtcgcgcgccatggacggcgactcgaagaagctgagggtgtggttttctggagtaggaaagggaggtggaggtggacgccagtcttcagcggcaccaccgcaagaaagcgcgcctattggaagagcggaaatgaacagcagcggggaatttgatgctgcattcgcagccacaattgcagcagcagcatttgcaattgctgcccgtgaagagaagcttgcagctcagaagaagtctgtccccatcgaggaggtgccacgagccctgtcgctagtcaagagagctggaagcaccaaaaaacctgcgggaggcaacaaaatctcaagatggtttagcggcaaggagcctctagaacacgacgacgacggtccagtgagcaggccactgaaaccagcacctggaaagcccgagggtatgcctgcagatcacaaggtggcacccaagattcttgagacttctctgagtgtgaggaagggttcagggtcctccggcaagacaacagacaggaaagggagcaagaagtttgagcaagaacatgttcagaaagcgccatcgatcatcaggccatctacatcataccattctagacggaatggagaagacgcagcaggagtagctgctattggcggcacgagatctaaggctgatgagtgggagaaggcaaagcttgcaaaagttagagaggagtacgaaaagatgatggagaccatagctgaatgggaaactgagaagaaggtgaaggcgagacgccataaagaacagagagagactgtgctggacagaaagagagcaaaagcactagaagaatacaaccaggagatgacaaggatcagcaagattgctggaggagcaaggtcgatggcagaggaacgaaaatacaacgacgagaataagatcaaagagaaggcgcacaagatacgatccacaagaaagcctccccgcacatgtgcttgcttttgagaatagttctatacactgaaatttggaaccgtatgaaagaagtgtgatttgaagtcactattgtaaaagtcacacaatagtgacgtactgtattgtaatatgtatttggctttgacaagatattagtgtagagttgtatcccccttcaaaaagagagttgtatccaacacgcaacatattgacgctttcc

SEQ ID NO: 35870 - protein, 358 aa, Zea mays subsp. mays
  peptide (1)..(358): Ceres Seq. ID no. 12436146
  misc_feature (254)..(355): Pfam Name: Pfam Description:  Remorin, C-terminal region
  misc_feature (254)..(358): NCBI GI NO: 37532756 NR Description: hypothetical protein
  misc_feature (88)..(358): NCBI GI NO: 15222980 NR Description: hypothetical protein; protein id: At1g13920.1
  misc_feature (205)..(358): NCBI GI NO: 15240195 NR Description: putative protein; protein id: At5g61280.1
  misc_feature (252)..(358): NCBI GI NO: 8778390 NR Description: F16A14.13 [Arabidopsis thaliana]
  misc_feature (255)..(355): NCBI GI NO: 12597780 NR Description: hypothetical protein [Arabidopsis thaliana]
  misc_feature (255)..(355): NCBI GI NO: 30697834 NR Description: predicted protein [Arabidopsis thaliana]
  misc_feature (264)..(355): NCBI GI NO: 12325086 NR Description: hypothetical protein; 34983-33172
  misc_feature (257)..(352): NCBI GI NO: 15229057 NR Description: remorin -like protein; protein id: At3g48940.1
  misc_feature (161)..(358): NCBI GI NO: 15233068 NR Description: putative DNA-binding protein; protein id:At3g61260
  misc_feature (257)..(358): NCBI GI NO: 15225899 NR Description: remorin; protein id: At2g45820
MQASRLLNTRLSLVTEAARRLVPRNLPTAIGSVSLQSTNTSRAMDGDSKKLRVWFSGVGKGGGGGRQSSAAPPQESAPIGRAEMNSSGEFDAAFAATIAAAAFAIAAREEKLAAQKKSVPIEEVPRALSLVKRAGSTKKPAGGNKISRWFSGKEPLEHDDDGPVSRPLKPAPGKPEGMPADHKVAPKILETSLSVRKGSGSSGKTTDRKGSKKFEQEHVQKAPSIIRPSTSYHSRRNGEDAAGVAAIGGTRSKADEWEKAKLAKVREEYEKMMETIAEWETEKKVKARRHKEQRETVLDRKRAKALEEYNQEMTRISKIAGGARSMAEERKYNDENKIKEKAHKIRSTRKPPRTCACF

SEQ ID NO: 35871 - protein, 315 aa, Zea mays subsp. mays
  peptide (1)..(315): Ceres Seq. ID no. 12436147
  misc_feature (211)..(312): Pfam Name: Pfam Description:  Remorin, C-terminal region
  misc_feature (211)..(315): NCBI GI NO: 37532756 NR Description: hypothetical protein
  misc_feature (45)..(315): NCBI GI NO: 15222980 NR Description: hypothetical protein; protein id: At1g13920.1
  misc_feature (162)..(315): NCBI GI NO: 15240195 NR Description: putative protein; protein id: At5g61280.1
  misc_feature (209)..(315): NCBI GI NO: 8778390 NR Description: F16A14.13 [Arabidopsis thaliana]
  misc_feature (212)..(312): NCBI GI NO: 12597780 NR Description: hypothetical protein [Arabidopsis thaliana]
  misc_feature (212)..(312): NCBI GI NO: 30697834 NR Description: predicted protein [Arabidopsis thaliana]
  misc_feature (221)..(312): NCBI GI NO: 12325086 NR Description: hypothetical protein; 34983-33172
  misc_feature (214)..(309): NCBI GI NO: 15229057 NR Description: remorin -like protein; protein id: At3g48940.1
  misc_feature (118)..(315): NCBI GI NO: 15233068 NR Description: putative DNA-binding protein; protein id:At3g61260
  misc_feature (214)..(315): NCBI GI NO: 15225899 NR Description: remorin; protein id: At2g45820
MDGDSKKLRVWFSGVGKGGGGGRQSSAAPPQESAPIGRAEMNSSGEFDAAFAATIAAAAFAIAAREEKLAAQKKSVPIEEVPRALSLVKRAGSTKKPAGGNKISRWFSGKEPLEHDDDGPVSRPLKPAPGKPEGMPADHKVAPKILETSLSVRKGSGSSGKTTDRKGSKKFEQEHVQKAPSIIRPSTSYHSRRNGEDAAGVAAIGGTRSKADEWEKAKLAKVREEYEKMMETIAEWETEKKVKARRHKEQRETVLDRKRAKALEEYNQEMTRISKIAGGARSMAEERKYNDENKIKEKAHKIRSTRKPPRTCACF

SEQ ID NO: 35872 - protein, 275 aa, Zea mays subsp. mays
  peptide (1)..(275): Ceres Seq. ID no. 12436148
  misc_feature (171)..(272): Pfam Name: Pfam Description:  Remorin, C-terminal region
  misc_feature (171)..(275): NCBI GI NO: 37532756 NR Description: hypothetical protein
  misc_feature (5)..(275): NCBI GI NO: 15222980 NR Description: hypothetical protein; protein id: At1g13920.1
  misc_feature (122)..(275): NCBI GI NO: 15240195 NR Description: putative protein; protein id: At5g61280.1
  misc_feature (169)..(275): NCBI GI NO: 8778390 NR Description: F16A14.13 [Arabidopsis thaliana]
  misc_feature (172)..(272): NCBI GI NO: 12597780 NR Description: hypothetical protein [Arabidopsis thaliana]
  misc_feature (172)..(272): NCBI GI NO: 30697834 NR Description: predicted protein [Arabidopsis thaliana]
  misc_feature (181)..(272): NCBI GI NO: 12325086 NR Description: hypothetical protein; 34983-33172
  misc_feature (174)..(269): NCBI GI NO: 15229057 NR Description: remorin -like protein; protein id: At3g48940.1
  misc_feature (78)..(275): NCBI GI NO: 15233068 NR Description: putative DNA-binding protein; protein id:At3g61260
  misc_feature (174)..(275): NCBI GI NO: 15225899 NR Description: remorin; protein id: At2g45820
MNSSGEFDAAFAATIAAAAFAIAAREEKLAAQKKSVPIEEVPRALSLVKRAGSTKKPAGGNKISRWFSGKEPLEHDDDGPVSRPLKPAPGKPEGMPADHKVAPKILETSLSVRKGSGSSGKTTDRKGSKKFEQEHVQKAPSIIRPSTSYHSRRNGEDAAGVAAIGGTRSKADEWEKAKLAKVREEYEKMMETIAEWETEKKVKARRHKEQRETVLDRKRAKALEEYNQEMTRISKIAGGARSMAEERKYNDENKIKEKAHKIRSTRKPPRTCACF

SEQ ID NO: 35873 - DNA, 457 bp, Zea mays subsp. mays
  misc_feature (1)..(457): Ceres Seq. ID no. 3011619
cacacctcctcaaccgccgcctccaagaccctagtaccgaaccccaacctcgtcccgctccggctcgtccgccacttcccggccatggccgccaccgccgcagacgagttcgtgaagggccgcgtcttccccaacggcgtcgccgtcatcacgctcgaccgacccaaggccctcaacgccatgaacctcgaaatggatgttagatacaaggcacttcttgatgaatgggaaacaaatccaagtgtcaagtgtattcttgtggaaagcagctcttctcgtgccttctcagcaggtattcacagtagagtactctttaatttgtaagatacatgagtatgcaaaaccttatatatgcttgatggatggagtgacaatgggatttggaattgggctatcagggcatggccgctaccgcattattacagagagaacactcctagccatgcctgaaaatggt

SEQ ID NO: 35874 - protein, 107 aa, Zea mays subsp. mays
  peptide (1)..(107): Ceres Seq. ID no. 3011620
  misc_feature (48)..(99): Pfam Name: Pfam Description:  Enoyl-CoA hydratase/isomerase family
  misc_feature (29)..(99): NCBI GI NO: 15235689 NR Description: 3-hydroxyisobutyryl-coenzyme A hydrolase
  misc_feature (22)..(98): NCBI GI NO: 22977745 NR Description: hypothetical protein [Ralstonia metallidurans]
  misc_feature (24)..(99): NCBI GI NO: 11994698 NR Description: 3-hydroxyisobutyryl-coenzyme A hydrolase-like
  misc_feature (31)..(99): NCBI GI NO: 15230101 NR Description: 3-hydroxyisobutyryl-coenzyme A hydrolase, putative
  misc_feature (50)..(106): NCBI GI NO: 23013936 NR Description: hypothetical protein
  misc_feature (50)..(98): NCBI GI NO: 23016278 NR Description: hypothetical protein
  misc_feature (49)..(98): NCBI GI NO: 31208011 NR Description: ENSANGP00000024573 [Anopheles gambiae]
  misc_feature (22)..(98): NCBI GI NO: 22122625 NR Description: RIKEN cDNA 2610509I15 [Mus musculus]
  misc_feature (46)..(98): NCBI GI NO: 22965338 NR Description: hypothetical protein [Rhodopseudomonas palustris]
  misc_feature (47)..(104): NCBI GI NO: 22968519 NR Description: hypothetical protein [Rhodospirillum rubrum]
HTSSTAASKTLVPNPNLVPLRLVRHFPAMAATAADEFVKGRVFPNGVAVITLDRPKALNAMNLEMDVRYKALLDEWETNPSVKCILVESSSSRAFSAGIHSRVLFNL

SEQ ID NO: 35875 - protein, 87 aa, Zea mays subsp. mays
  peptide (1)..(87): Ceres Seq. ID no. 3011621
  misc_feature (31)..(86): Pfam Name: Pfam Description:  Enoyl-CoA hydratase/isomerase family
  misc_feature (31)..(86): NCBI GI NO: 15235689 NR Description: 3-hydroxyisobutyryl-coenzyme A hydrolase
  misc_feature (32)..(85): NCBI GI NO: 22977745 NR Description: hypothetical protein [Ralstonia metallidurans]
  misc_feature (16)..(86): NCBI GI NO: 15230101 NR Description: 3-hydroxyisobutyryl-coenzyme A hydrolase, putative
  misc_feature (16)..(86): NCBI GI NO: 11994698 NR Description: 3-hydroxyisobutyryl-coenzyme A hydrolase-like
  misc_feature (33)..(86): NCBI GI NO: 23013936 NR Description: hypothetical protein
  misc_feature (37)..(86): NCBI GI NO: 23016278 NR Description: hypothetical protein
  misc_feature (30)..(85): NCBI GI NO: 31208011 NR Description: ENSANGP00000024573 [Anopheles gambiae]
  misc_feature (30)..(86): NCBI GI NO: 22122625 NR Description: RIKEN cDNA 2610509I15 [Mus musculus]
  misc_feature (37)..(86): NCBI GI NO: 22965338 NR Description: hypothetical protein [Rhodopseudomonas palustris]
  misc_feature (34)..(86): NCBI GI NO: 22968519 NR Description: hypothetical protein [Rhodospirillum rubrum]
MLDTRHFLMNGKQIQVSSVFLWKAALLVPSQQVFTVEYSLICKIHEYAKPYICLMDGVTMGFGIGLSGHGRYRIITERTLLAMPENG

SEQ ID NO: 35876 - protein, 79 aa, Zea mays subsp. mays
  peptide (1)..(79): Ceres Seq. ID no. 3011622
  misc_feature (20)..(71): Pfam Name: Pfam Description:  Enoyl-CoA hydratase/isomerase family
  misc_feature (1)..(71): NCBI GI NO: 15235689 NR Description: 3-hydroxyisobutyryl-coenzyme A hydrolase
  misc_feature (1)..(70): NCBI GI NO: 22977745 NR Description: hypothetical protein [Ralstonia metallidurans]
  misc_feature (1)..(71): NCBI GI NO: 11994698 NR Description: 3-hydroxyisobutyryl-coenzyme A hydrolase-like
  misc_feature (3)..(71): NCBI GI NO: 15230101 NR Description: 3-hydroxyisobutyryl-coenzyme A hydrolase, putative
  misc_feature (22)..(78): NCBI GI NO: 23013936 NR Description: hypothetical protein
  misc_feature (22)..(70): NCBI GI NO: 23016278 NR Description: hypothetical protein
  misc_feature (21)..(70): NCBI GI NO: 31208011 NR Description: ENSANGP00000024573 [Anopheles gambiae]
  misc_feature (1)..(70): NCBI GI NO: 22122625 NR Description: RIKEN cDNA 2610509I15 [Mus musculus]
  misc_feature (18)..(70): NCBI GI NO: 22965338 NR Description: hypothetical protein [Rhodopseudomonas palustris]
  misc_feature (19)..(76): NCBI GI NO: 22968519 NR Description: hypothetical protein [Rhodospirillum rubrum]
MAATAADEFVKGRVFPNGVAVITLDRPKALNAMNLEMDVRYKALLDEWETNPSVKCILVESSSSRAFSAGIHSRVLFNL

SEQ ID NO: 35877 - DNA, 2187 bp, Zea mays subsp. mays
  misc_feature (1)..(2187): Ceres Seq. ID no. 13666028
accgaaccaaacaacacacgtcaaagcggaaaacctcagaaaaccacaataaatcatcctcgtccaccactgcccccgctctgctgcaactccactcggcccggccgctctttccacccaccttgatcctctgatccgttggtgcttgaccgatccatggacacccacatcggatccgtgaacggggcggcgtcgaaccagacggttggctgcccggcgtcggcgccggggtgcccgatggcgtccacgccggcgcagcccgcggcgaccctgtcggcgggggaggcgtcgctggggcgccacctcgcgcgtcgcctcgtgcaggtcggcgtcaacgatgtattcgcggttccgggggacttcaacctcacgctgctcgaccacctgatcgccgagcccggcctgcgcctcgtcggctgctgcaacgagctcaacgccgggtacgccgccgacgggtacgcgcgcgcgcgcggcgtcggggcctgcgccgtcacgttcacagtcggggggctcagcgtgctcaacgccatcgcgggcgcctacagcgagaacctgcccgtcatctgcatcgccggcgggcccaactccaacgactacgggaccaaccgcatcctccaccacaccatcggcctccccgacttctcgcaggagctccgctgcttccagaccgtcacctgccatcaggcggtggtgaacaatctggatgacgcgcacgagcagatcgacacggccattgccacggcactgagggagagcaagcccgtgtacctcagcatcagctgcaacctccctgggctgcctcatcctaccttcagccgcgacccagtgcccttcttcctcacccccaggacgagcaacaagatggggctagaggctgcagtggaggcaactgtcgaattcctgaacaaggcggtgaagccagtccttgtcgccggccccaaactgcgtgtggcaaaggcaggaaaggcatttgtcgatatggtagatgccagtggctatgcctatgccgtgatgccatcggccaagggtcttgtgccagagactcacccccacttcatcggcacctactggggcgccgtcagcaccgccttctgtgcggagattgttgagtccgcagatgcctacctctttgcaggccccattttcaatgactacagctctgttggctactcattcctcctcaagaaggaaaaggccatcatcgtccagcctgagcgtgtgatagtggggaatgggccggcattcggatgtgtgatgatgaaagagttcttgtctgaattggctaagagggttaataagaacaccactgcctatgagaattacaagaggatctttgtacctgagggccagccgctggaaagcgagccaaatgagccactgcgagtgaatgtgctcttcaagcacgtccagaagatgttgactggtgatagtgcggtgattgctgagactggtgactcctggttcaactgccagaagcttaagctgccagaaggctgtgggtatgaattccaaatgcagtatggttcgattggatggtcagtgggtgcattgctcggatatgctcagggtgcgaaccacaagcgtgtgattgccttcattggtgatgggagcttccaggttacagcacaggatgtgtcaactatgctgcgatgtgagcagaacagcataatcttcctgatcaacaacggtgggtacacgattgaggtggaaatccatgacgggccatacaacgtcatcaagaactggaactacactggctttgtggacgccatccacaatggcttgggcaagtgctggacctccaaggtgaagagcgaggaggacctgacggctgccattgagacagcgctaggggagaagaaggactgcctgtgcttcatcgaggtgatcgcgcacaaggacgacaccagcaaagagctgctggaatggggctctagggtttctgccgccaactcccgaccaccaaatcctcagtagaagtccgcaggctccaagcctcggagtgtcattagtgatagtaagctgtagcacggtgggggctcaaccgaataacctgaacgcattgccctttctgttacgtgttttattttattgtgtttctgtggtcgtatatctgttttgtgacgtgttccctgcttctcccatgtgaattccagaagaactatgagaaaattcaggttggttgtc

SEQ ID NO: 35878 - protein, 606 aa, Zea mays subsp. mays
  peptide (1)..(606): Ceres Seq. ID no. 13666029
  misc_feature (1)..(606): NCBI GI NO: 1706328 NR Description: Pyruvate decarboxylase isozyme 2 (PDC)
  misc_feature (1)..(606): NCBI GI NO: 29373077 NR Description: pyruvate decarboxylase 1 [Lotus corniculatus]
  misc_feature (33)..(606): NCBI GI NO: 10732644 NR Description: pyruvate decarboxylase 1 [Vitis vinifera]
  misc_feature (20)..(606): NCBI GI NO: 24745919 NR Description: pyruvate decarboxylase [Solanum tuberosum]
  misc_feature (1)..(606): NCBI GI NO: 10121330 NR Description: pyruvate decarboxylase [Fragaria x ananassa]
  misc_feature (1)..(606): NCBI GI NO: 17225598 NR Description: pyruvate decarboxylase [Fragaria x ananassa]
  misc_feature (9)..(606): NCBI GI NO: 3970823 NR Description: pyruvate decarboxylase [Zea mays]
  misc_feature (9)..(606): NCBI GI NO: 118390 NR Description: Pyruvate decarboxylase isozyme 1 (PDC)
  misc_feature (45)..(569): NCBI GI NO: 11268382 NR Description: probable pyruvate decarboxylase (EC 4
  misc_feature (43)..(532): NCBI GI NO: 2501327 NR Description: Pyruvate decarboxylase
MDTHIGSVNGAASNQTVGCPASAPGCPMASTPAQPAATLSAGEASLGRHLARRLVQVGVNDVFAVPGDFNLTLLDHLIAEPGLRLVGCCNELNAGYAADGYARARGVGACAVTFTVGGLSVLNAIAGAYSENLPVICIAGGPNSNDYGTNRILHHTIGLPDFSQELRCFQTVTCHQAVVNNLDDAHEQIDTAIATALRESKPVYLSISCNLPGLPHPTFSRDPVPFFLTPRTSNKMGLEAAVEATVEFLNKAVKPVLVAGPKLRVAKAGKAFVDMVDASGYAYAVMPSAKGLVPETHPHFIGTYWGAVSTAFCAEIVESADAYLFAGPIFNDYSSVGYSFLLKKEKAIIVQPERVIVGNGPAFGCVMMKEFLSELAKRVNKNTTAYENYKRIFVPEGQPLESEPNEPLRVNVLFKHVQKMLTGDSAVIAETGDSWFNCQKLKLPEGCGYEFQMQYGSIGWSVGALLGYAQGANHKRVIAFIGDGSFQVTAQDVSTMLRCEQNSIIFLINNGGYTIEVEIHDGPYNVIKNWNYTGFVDAIHNGLGKCWTSKVKSEEDLTAAIETALGEKKDCLCFIEVIAHKDDTSKELLEWGSRVSAANSRPPNPQ

SEQ ID NO: 35879 - protein, 579 aa, Zea mays subsp. mays
  peptide (1)..(579): Ceres Seq. ID no. 13666030
  misc_feature (1)..(579): NCBI GI NO: 1706328 NR Description: Pyruvate decarboxylase isozyme 2 (PDC)
  misc_feature (1)..(579): NCBI GI NO: 29373077 NR Description: pyruvate decarboxylase 1 [Lotus corniculatus]
  misc_feature (6)..(579): NCBI GI NO: 10732644 NR Description: pyruvate decarboxylase 1 [Vitis vinifera]
  misc_feature (1)..(579): NCBI GI NO: 24745919 NR Description: pyruvate decarboxylase [Solanum tuberosum]
  misc_feature (1)..(579): NCBI GI NO: 10121330 NR Description: pyruvate decarboxylase [Fragaria x ananassa]
  misc_feature (1)..(579): NCBI GI NO: 17225598 NR Description: pyruvate decarboxylase [Fragaria x ananassa]
  misc_feature (1)..(579): NCBI GI NO: 3970823 NR Description: pyruvate decarboxylase [Zea mays]
  misc_feature (1)..(579): NCBI GI NO: 118390 NR Description: Pyruvate decarboxylase isozyme 1 (PDC)
  misc_feature (18)..(542): NCBI GI NO: 11268382 NR Description: probable pyruvate decarboxylase (EC 4
  misc_feature (16)..(505): NCBI GI NO: 2501327 NR Description: Pyruvate decarboxylase
MASTPAQPAATLSAGEASLGRHLARRLVQVGVNDVFAVPGDFNLTLLDHLIAEPGLRLVGCCNELNAGYAADGYARARGVGACAVTFTVGGLSVLNAIAGAYSENLPVICIAGGPNSNDYGTNRILHHTIGLPDFSQELRCFQTVTCHQAVVNNLDDAHEQIDTAIATALRESKPVYLSISCNLPGLPHPTFSRDPVPFFLTPRTSNKMGLEAAVEATVEFLNKAVKPVLVAGPKLRVAKAGKAFVDMVDASGYAYAVMPSAKGLVPETHPHFIGTYWGAVSTAFCAEIVESADAYLFAGPIFNDYSSVGYSFLLKKEKAIIVQPERVIVGNGPAFGCVMMKEFLSELAKRVNKNTTAYENYKRIFVPEGQPLESEPNEPLRVNVLFKHVQKMLTGDSAVIAETGDSWFNCQKLKLPEGCGYEFQMQYGSIGWSVGALLGYAQGANHKRVIAFIGDGSFQVTAQDVSTMLRCEQNSIIFLINNGGYTIEVEIHDGPYNVIKNWNYTGFVDAIHNGLGKCWTSKVKSEEDLTAAIETALGEKKDCLCFIEVIAHKDDTSKELLEWGSRVSAANSRPPNPQ

SEQ ID NO: 35880 - protein, 371 aa, Zea mays subsp. mays
  peptide (1)..(371): Ceres Seq. ID no. 13666031
  misc_feature (1)..(371): NCBI GI NO: 1706328 NR Description: Pyruvate decarboxylase isozyme 2 (PDC)
  misc_feature (1)..(371): NCBI GI NO: 29373077 NR Description: pyruvate decarboxylase 1 [Lotus corniculatus]
  misc_feature (1)..(371): NCBI GI NO: 10732644 NR Description: pyruvate decarboxylase 1 [Vitis vinifera]
  misc_feature (1)..(371): NCBI GI NO: 24745919 NR Description: pyruvate decarboxylase [Solanum tuberosum]
  misc_feature (1)..(371): NCBI GI NO: 10121330 NR Description: pyruvate decarboxylase [Fragaria x ananassa]
  misc_feature (1)..(371): NCBI GI NO: 17225598 NR Description: pyruvate decarboxylase [Fragaria x ananassa]
  misc_feature (1)..(371): NCBI GI NO: 3970823 NR Description: pyruvate decarboxylase [Zea mays]
  misc_feature (1)..(371): NCBI GI NO: 118390 NR Description: Pyruvate decarboxylase isozyme 1 (PDC)
  misc_feature (1)..(334): NCBI GI NO: 11268382 NR Description: probable pyruvate decarboxylase (EC 4
  misc_feature (1)..(297): NCBI GI NO: 2501327 NR Description: Pyruvate decarboxylase
MGLEAAVEATVEFLNKAVKPVLVAGPKLRVAKAGKAFVDMVDASGYAYAVMPSAKGLVPETHPHFIGTYWGAVSTAFCAEIVESADAYLFAGPIFNDYSSVGYSFLLKKEKAIIVQPERVIVGNGPAFGCVMMKEFLSELAKRVNKNTTAYENYKRIFVPEGQPLESEPNEPLRVNVLFKHVQKMLTGDSAVIAETGDSWFNCQKLKLPEGCGYEFQMQYGSIGWSVGALLGYAQGANHKRVIAFIGDGSFQVTAQDVSTMLRCEQNSIIFLINNGGYTIEVEIHDGPYNVIKNWNYTGFVDAIHNGLGKCWTSKVKSEEDLTAAIETALGEKKDCLCFIEVIAHKDDTSKELLEWGSRVSAANSRPPNPQ

SEQ ID NO: 35881 - DNA, 2591 bp, Zea mays subsp. mays
  misc_feature (1)..(2591): Ceres Seq. ID no. 12435670
atcacaacaaaaggcgcaagcaccgcacggagagcaagcaagaaagcatccactgcactgccactacctaacaatggcccgcgcctacgtgtttctcgtcgtgctcctcctggccgctgtcatcgtggcaccgttcgcgggagcgacgcgtgtcgacgtcgttgagggcaggtccatggcgtccgccgacgcgccggaggccgccgcaccatcacccgggcctgactctgcctcgtcaccggactcctcgtcggaagcgccctccagcagcagctcctcggactagatagctctagccgcaggtcaggcatatatcaactgggcagcaaagatggcagtgggactggacactggtgtgccgtgggtgatgtgcaaggaggaggatgcacctgatccagtgatcaatgcgtgtaatggtttctactgtgatgcattttctcctaacaaaccttacaagcccacaatgtggactgaagcttggagtggctggttcacagaatttggtgggaccatccgccaacgaccggttgaagatctcgcatttgctgttgctcgatttgtacaaaagggtggctcttttatcaattactacatgtatcatggaggaacaaattttggacgcactgctgggggtcccttcatcacaacaagctatgattatgatgctccaattgatgaatatggacttattagagaaccaaagcacagtcatcttaaagaactccacagagctgttaagttatgtgaacaggctttggtttctgttgaccccacaattactacccttggaactatgcaagaggcccatgtcttccgatctccatctggttgtgcagctttccttgcaaactacaattctaactcccatgcaaaagttgtgttcaacaatgagcaatacagcctcccaccttggtcaattagcatccttcctgattgcaagaatgtagtttttaacagtgccacagttggtgttcagacatctcagatgcaaatgtggggagatggtgccacatcgatgatgtgggagaggtacgatgaggaggttgattctctggcagctgctccattgctcaccacaactggtttgcttgagcagcttaacgtcaccagagacagcagtgattatctgtggtacattaccagtgttgacataagcccatctgaaaactttctacaaggtggtggcaagcctccgtctctgagtgttcagtctgctggtcacgccttgcatgtctttgtcaacggacaacttcaaggttcttcgtatggtaccagggaggatcgaagaattaaatataatggcaatgttaaccttcgagctggtactaacaaaatcgcactactgagtgttgcttgcggattgccgaatgttggagtgcattatgagacgtggaacaccggcgtcggtggtcctgtcgtgcttcatggattgaatgaaggttcgcgagaccttacttggcagacctggtcctatcaggttggcctgaaaggcgagcagatgaatctgaactccgtagaaggctcaggctcagttgaatggatgcaagggtcactgatagctcagaagcaacagccgttggcctggtaaggcttacttcgagactcccagcggggacgagccattggctttggatatgggcagcatgggcaagggacaggtctggataaacggacaaagcattggacgctactggacagcgtatgcagacggggactgcaaagggtgcagctacaccgggaccttccgggcacccaagtgccaagcaggctgcggccagcccacccagcgttggtaccatgtgccaaggtcctggctgcagcccagcagaaacctactggtagtcttggaggaactgggtggtggggactcgtcgaagatcgccctagccaagaggtcggtctcgagcgtctgtgccgacgtgtccgaggaccatccgaacatcaagaagtggcagatcgagagctacggcgagcgcgagcaccgcagggccaaggtgcacctgaggtgcgcgcacgggcagtccatctccgcgatcagattcgcgagcttcgggacgcctgtgggcacctgcggcaacttccagcagggaggctgccactcggctagctctcacgctgtgctagagaagagatgcattgggctctagagatgcgtcgtcgccatctcccccgacaacttcggaggagacccctgcccgagcgtgacgaagagggtggcggtcgaggcggtgtgctctcccgccgcttaggcttagcctgcccgcccgcccctacttctccgactcaccgagcaacggatttgaaggccgaaaccgatgtgtgtggagagtggaactgtaagtatcgacttgcattggtcggagggaggtttagcattcgtccgtctgattccggtttaggattggtgctctgctacgtctccatgaactgttcaaagcggccagctgggtccagggatggagctgtagagagagtaggagtagaagactgatcatgcgttcttttgctgttgtgtgttagtagtagctgtgtacctacccgtgacacatctcgtttttcttgaaacggaggaagacgcaggtgaagcgtgc

SEQ ID NO: 35882 - protein, 418 aa, Zea mays subsp. mays
  peptide (1)..(418): Ceres Seq. ID no. 12435671
  misc_feature (1)..(418): Pfam Name: Pfam Description:  Glycosyl hydrolases family 35
  misc_feature (1)..(418): NCBI GI NO: 15081596 NR Description: putative beta-galactosidase BG1 [Vitis vinifera]
  misc_feature (1)..(418): NCBI GI NO: 18419821 NR Description: glycosyl hydrolase family 35
  misc_feature (1)..(418): NCBI GI NO: 25326166 NR Description: beta-galactosidase like protein
  misc_feature (1)..(418): NCBI GI NO: 7939625 NR Description: putative beta-galactosidase
  misc_feature (1)..(418): NCBI GI NO: 30690633 NR Description: glycosyl hydrolase family 35 (beta-galactosidase)
  misc_feature (1)..(418): NCBI GI NO: 7488063 NR Description: probable beta-galactosidase (EC 3
  misc_feature (1)..(418): NCBI GI NO: 14970839 NR Description: beta-galactosidase [Fragaria x ananassa]
  misc_feature (1)..(418): NCBI GI NO: 3204134 NR Description: beta-galactosidase [Cicer arietinum]
  misc_feature (1)..(418): NCBI GI NO: 4138137 NR Description: ss-galactosidase [Lycopersicon esculentum]
  misc_feature (1)..(418): NCBI GI NO: 15231354 NR Description: glycosyl hydrolase family 35
MAVGLDTGVPWVMCKEEDAPDPVINACNGFYCDAFSPNKPYKPTMWTEAWSGWFTEFGGTIRQRPVEDLAFAVARFVQKGGSFINYYMYHGGTNFGRTAGGPFITTSYDYDAPIDEYGLIREPKHSHLKELHRAVKLCEQALVSVDPTITTLGTMQEAHVFRSPSGCAAFLANYNSNSHAKVVFNNEQYSLPPWSISILPDCKNVVFNSATVGVQTSQMQMWGDGATSMMWERYDEEVDSLAAAPLLTTTGLLEQLNVTRDSSDYLWYITSVDISPSENFLQGGGKPPSLSVQSAGHALHVFVNGQLQGSSYGTREDRRIKYNGNVNLRAGTNKIALLSVACGLPNVGVHYETWNTGVGGPVVLHGLNEGSRDLTWQTWSYQVGLKGEQMNLNSVEGSGSVEWMQGSLIAQKQQPLAW

SEQ ID NO: 35883 - protein, 406 aa, Zea mays subsp. mays
  peptide (1)..(406): Ceres Seq. ID no. 12435672
  misc_feature (1)..(406): Pfam Name: Pfam Description:  Glycosyl hydrolases family 35
  misc_feature (1)..(406): NCBI GI NO: 15081596 NR Description: putative beta-galactosidase BG1 [Vitis vinifera]
  misc_feature (1)..(406): NCBI GI NO: 18419821 NR Description: glycosyl hydrolase family 35
  misc_feature (1)..(406): NCBI GI NO: 25326166 NR Description: beta-galactosidase like protein
  misc_feature (1)..(406): NCBI GI NO: 7939625 NR Description: putative beta-galactosidase
  misc_feature (1)..(406): NCBI GI NO: 30690633 NR Description: glycosyl hydrolase family 35 (beta-galactosidase)
  misc_feature (1)..(406): NCBI GI NO: 7488063 NR Description: probable beta-galactosidase (EC 3
  misc_feature (1)..(406): NCBI GI NO: 14970839 NR Description: beta-galactosidase [Fragaria x ananassa]
  misc_feature (1)..(406): NCBI GI NO: 3204134 NR Description: beta-galactosidase [Cicer arietinum]
  misc_feature (1)..(406): NCBI GI NO: 4138137 NR Description: ss-galactosidase [Lycopersicon esculentum]
  misc_feature (1)..(406): NCBI GI NO: 15231354 NR Description: glycosyl hydrolase family 35
MCKEEDAPDPVINACNGFYCDAFSPNKPYKPTMWTEAWSGWFTEFGGTIRQRPVEDLAFAVARFVQKGGSFINYYMYHGGTNFGRTAGGPFITTSYDYDAPIDEYGLIREPKHSHLKELHRAVKLCEQALVSVDPTITTLGTMQEAHVFRSPSGCAAFLANYNSNSHAKVVFNNEQYSLPPWSISILPDCKNVVFNSATVGVQTSQMQMWGDGATSMMWERYDEEVDSLAAAPLLTTTGLLEQLNVTRDSSDYLWYITSVDISPSENFLQGGGKPPSLSVQSAGHALHVFVNGQLQGSSYGTREDRRIKYNGNVNLRAGTNKIALLSVACGLPNVGVHYETWNTGVGGPVVLHGLNEGSRDLTWQTWSYQVGLKGEQMNLNSVEGSGSVEWMQGSLIAQKQQPLAW

SEQ ID NO: 35884 - protein, 374 aa, Zea mays subsp. mays
  peptide (1)..(374): Ceres Seq. ID no. 12435673
  misc_feature (1)..(374): Pfam Name: Pfam Description:  Glycosyl hydrolases family 35
  misc_feature (1)..(374): NCBI GI NO: 15081596 NR Description: putative beta-galactosidase BG1 [Vitis vinifera]
  misc_feature (1)..(374): NCBI GI NO: 18419821 NR Description: glycosyl hydrolase family 35
  misc_feature (1)..(374): NCBI GI NO: 25326166 NR Description: beta-galactosidase like protein
  misc_feature (1)..(374): NCBI GI NO: 7939625 NR Description: putative beta-galactosidase
  misc_feature (1)..(374): NCBI GI NO: 30690633 NR Description: glycosyl hydrolase family 35 (beta-galactosidase)
  misc_feature (1)..(374): NCBI GI NO: 7488063 NR Description: probable beta-galactosidase (EC 3
  misc_feature (1)..(374): NCBI GI NO: 14970839 NR Description: beta-galactosidase [Fragaria x ananassa]
  misc_feature (1)..(374): NCBI GI NO: 3204134 NR Description: beta-galactosidase [Cicer arietinum]
  misc_feature (1)..(374): NCBI GI NO: 4138137 NR Description: ss-galactosidase [Lycopersicon esculentum]
  misc_feature (1)..(374): NCBI GI NO: 15231354 NR Description: glycosyl hydrolase family 35
MWTEAWSGWFTEFGGTIRQRPVEDLAFAVARFVQKGGSFINYYMYHGGTNFGRTAGGPFITTSYDYDAPIDEYGLIREPKHSHLKELHRAVKLCEQALVSVDPTITTLGTMQEAHVFRSPSGCAAFLANYNSNSHAKVVFNNEQYSLPPWSISILPDCKNVVFNSATVGVQTSQMQMWGDGATSMMWERYDEEVDSLAAAPLLTTTGLLEQLNVTRDSSDYLWYITSVDISPSENFLQGGGKPPSLSVQSAGHALHVFVNGQLQGSSYGTREDRRIKYNGNVNLRAGTNKIALLSVACGLPNVGVHYETWNTGVGGPVVLHGLNEGSRDLTWQTWSYQVGLKGEQMNLNSVEGSGSVEWMQGSLIAQKQQPLAW

SEQ ID NO: 35885 - DNA, 1980 bp, Zea mays subsp. mays; identical to SEQ ID NO: 34386
  misc_feature (1)..(1980): Ceres Seq. ID no. 12450491

SEQ ID NO: 35886 - protein, 546 aa, Zea mays subsp. mays; identical to SEQ ID NO: 34387
  peptide (1)..(546): Ceres Seq. ID no. 12450492
  misc_feature (94)..(352): Pfam Name: Pfam Description:  Protein kinase domain
  misc_feature (80)..(545): NCBI GI NO: 15236560 NR Description: calcium-dependent protein kinase
  misc_feature (80)..(545): NCBI GI NO: 15450437 NR Description: AT4g23650/F9D16_120 [Arabidopsis thaliana]
  misc_feature (25)..(544): NCBI GI NO: 14970920 NR Description: calcium dependent calmodulin independent proteinkinase
  misc_feature (17)..(544): NCBI GI NO: 18175903 NR Description: putative calcium-dependent protein kinase
  misc_feature (17)..(544): NCBI GI NO: 15239888 NR Description: calcium-dependent protein kinase
  misc_feature (63)..(544): NCBI GI NO: 15239716 NR Description: calcium-dependent protein kinase - like
  misc_feature (80)..(544): NCBI GI NO: 5162878 NR Description: calcium-dependent protein kinase
  misc_feature (80)..(544): NCBI GI NO: 5162877 NR Description: calcium-dependent protein kinase
  misc_feature (21)..(535): NCBI GI NO: 7428009 NR Description: calcium-dependent protein kinase (EC 2
  misc_feature (12)..(532): NCBI GI NO: 23616997 NR Description: CDP2_ORYSA Calcium-dependent protein kinase

SEQ ID NO: 35887 - protein, 530 aa, Zea mays subsp. mays; identical to SEQ ID NO: 34388
  peptide (1)..(530): Ceres Seq. ID no. 12450493
  misc_feature (78)..(336): Pfam Name: Pfam Description:  Protein kinase domain
  misc_feature (64)..(529): NCBI GI NO: 15236560 NR Description: calcium-dependent protein kinase
  misc_feature (64)..(529): NCBI GI NO: 15450437 NR Description: AT4g23650/F9D16_120 [Arabidopsis thaliana]
  misc_feature (9)..(528): NCBI GI NO: 14970920 NR Description: calcium dependent calmodulin independent proteinkinase
  misc_feature (1)..(528): NCBI GI NO: 18175903 NR Description: putative calcium-dependent protein kinase
  misc_feature (1)..(528): NCBI GI NO: 15239888 NR Description: calcium-dependent protein kinase
  misc_feature (47)..(528): NCBI GI NO: 15239716 NR Description: calcium-dependent protein kinase - like
  misc_feature (64)..(528): NCBI GI NO: 5162878 NR Description: calcium-dependent protein kinase
  misc_feature (64)..(528): NCBI GI NO: 5162877 NR Description: calcium-dependent protein kinase
  misc_feature (5)..(519): NCBI GI NO: 7428009 NR Description: calcium-dependent protein kinase (EC 2
  misc_feature (1)..(516): NCBI GI NO: 23616997 NR Description: CDP2_ORYSA Calcium-dependent protein kinase

SEQ ID NO: 35888 - protein, 460 aa, Zea mays subsp. mays; identical to SEQ ID NO: 34389
  peptide (1)..(460): Ceres Seq. ID no. 12450494
  misc_feature (8)..(266): Pfam Name: Pfam Description:  Protein kinase domain
  misc_feature (1)..(459): NCBI GI NO: 15236560 NR Description: calcium-dependent protein kinase
  misc_feature (1)..(459): NCBI GI NO: 15450437 NR Description: AT4g23650/F9D16_120 [Arabidopsis thaliana]
  misc_feature (1)..(458): NCBI GI NO: 14970920 NR Description: calcium dependent calmodulin independent proteinkinase
  misc_feature (1)..(458): NCBI GI NO: 18175903 NR Description: putative calcium-dependent protein kinase
  misc_feature (1)..(458): NCBI GI NO: 15239888 NR Description: calcium-dependent protein kinase
  misc_feature (1)..(458): NCBI GI NO: 15239716 NR Description: calcium-dependent protein kinase - like
  misc_feature (1)..(458): NCBI GI NO: 5162878 NR Description: calcium-dependent protein kinase
  misc_feature (1)..(458): NCBI GI NO: 5162877 NR Description: calcium-dependent protein kinase
  misc_feature (1)..(449): NCBI GI NO: 7428009 NR Description: calcium-dependent protein kinase (EC 2
  misc_feature (1)..(446): NCBI GI NO: 23616997 NR Description: CDP2_ORYSA Calcium-dependent protein kinase

SEQ ID NO: 35889 - DNA, 1738 bp, Zea mays subsp. mays
  misc_feature (1)..(1738): Ceres Seq. ID no. 12454899
  misc_feature (1728)..(1728): n is a, c, t, g, unknown, or other
atggactctcctctaatggagcccctactagtgcccaacaaccacagtcccggtccggttgtcgccgccacgccgggagaacacggcggtgctgcggtcgacgagagcagcaccctcgtggatgctgccagtggcacggatgagagccacagggcactcgccgacgccgacgtgaagatgaacgacgatggcgacgtacaaggggacgagctgtccgcgtccgtgcagcgccggctggacgagagcagcgccgtggagggggaggatgaagaggaggagattggtgacgacgcggaggccgacgacatggcggcgcgcatgggacggcgcctggcggcgctgcccgggaatgcgcatgagagcgagccgttcaccatcttccgcgtggcggggcccatgcgcgaccgcaaccggcacctctacgagccgcagatgatctccatcgggcccttccaccgtggcgccggccggcacctcgccgccatggaggagcacaagtggcggtacctccgcgacattctggcccgccccggcggcgcgacgctggcctcgtacgcccgcgccgcgcgctcgatggaggcctccgcgcgccgccggtacgcggagcccgtgctgctgcccgcggccgagttcgccgagatgctcctcctggacggctgcttcctggtggagttcttcctcaaggggcaggagagcgcggaggacgcgctcatcgacgcctcgtgggcgatgcagaacgtgtacaacgacatgctgctgctcgagaaccagctccccttcttcgtgctcgagcgcttctacgacctggccacgggcgggctcggccgggactacttcgtcaccaacgtcctcgtcaactacctcaccgtggacatgtgcgtcggcccgcgggaccccgagagcacgcggccccccgacggtgagatccaccacctgctgcacctctactactactggttcctgccaccggaggaccgggacgggagcggcacgggcagcaaggacaaggaagacggcgaggcgctcgaggaactgatgtccacgtctgcggatgagcgcatgccgtggcagctgccgccggcgtcggagctgaaggactccggggtgacgttccgcgccaagaagtcgccgcggagcatggtggacgtgaccttcgaccgccgcagcggcgcgctgtagatcccggccgtggagagctacacgaaccacgccatcttcgcgaacctgctggcgtacgagcagagccggggccggtgggagctgcagcgcctggtgagctacgtgctgctgatggcgtccgtggtggacgcgcggcgcgacgtggaggtcctgcagcgggccggcgtgttcgtgcgcggggacgaggagacggcggcgttctacgcgcacctgggcgagctgtgcccgccgcccgagttcgtcaacaactgctacgccgacctgttccgcgacgtcctggagtactgtgggcgcagctggaacaggcaccgcgccgtgctggtgcacgactacttcagcaacccgtggaccagcatgtccgccgccgccgccgtcttcctgcttgtcctcaccgtcgtgcagacggtctacaccgtgctgccatactacagccagaattaaccgggcaaaaaacaaaaaaggcgttttgccgccgtcacacagaccgggtgtcgccctctgttttttctttttttttgcctgcaactacaagaaaccctatgatttttncttggctcct

SEQ ID NO: 35890 - protein, 392 aa, Zea mays subsp. mays
  peptide (1)..(392): Ceres Seq. ID no. 12454900
  misc_feature (121)..(326): Pfam Name: Pfam Description:  Plant protein of unknown function
  misc_feature (41)..(322): NCBI GI NO: 38175550 NR Description: unknown protein
  misc_feature (98)..(326): NCBI GI NO: 34914152 NR Description: P0496H05.27
  misc_feature (303)..(392): NCBI GI NO: 34914152 NR Description: P0496H05.27
  misc_feature (103)..(326): NCBI GI NO: 34914138 NR Description: P0496H05.18
  misc_feature (361)..(392): NCBI GI NO: 34914138 NR Description: P0496H05.18
  misc_feature (125)..(392): NCBI GI NO: 34894670 NR Description: B1153F04.26
  misc_feature (106)..(392): NCBI GI NO: 15227658 NR Description: hypothetical protein; protein id: At2g36430
  misc_feature (73)..(392): NCBI GI NO: 34894658 NR Description: B1153F04.19
  misc_feature (68)..(392): NCBI GI NO: 15229684 NR Description: putative protein; protein id: At3g50150.1
  misc_feature (118)..(392): NCBI GI NO: 34894664 NR Description: B1153F04.22
MDSPLMEPLLVPNNHSPGPVVAATPGEHGGAAVDESSTLVDAASGTDESHRALADADVKMNDDGDVQGDELSASVQRRLDESSAVEGEDEEEEIGDDAEADDMAARMGRRLAALPGNAHESEPFTIFRVAGPMRDRNRHLYEPQMISIGPFHRGAGRHLAAMEEHKWRYLRDILARPGGATLASYARAARSMEASARRRYAEPVLLPAAEFAEMLLLDGCFLVEFFLKGQESAEDALIDASWAMQNVYNDMLLLENQLPFFVLERFYDLATGGLGRDYFVTNVLVNYLTVDMCVGPRDPESTRPPDGEIHHLLHLYYYWFLPPEDRDGSGTGSKDKEDGEALEELMSTSADERMPWQLPPASELKDSGVTFRAKKSPRSMVDVTFDRRSGAL

SEQ ID NO: 35891 - protein, 387 aa, Zea mays subsp. mays
  peptide (1)..(387): Ceres Seq. ID no. 12454901
  misc_feature (116)..(321): Pfam Name: Pfam Description:  Plant protein of unknown function
  misc_feature (36)..(317): NCBI GI NO: 38175550 NR Description: unknown protein
  misc_feature (93)..(321): NCBI GI NO: 34914152 NR Description: P0496H05.27
  misc_feature (298)..(387): NCBI GI NO: 34914152 NR Description: P0496H05.27
  misc_feature (98)..(321): NCBI GI NO: 34914138 NR Description: P0496H05.18
  misc_feature (356)..(387): NCBI GI NO: 34914138 NR Description: P0496H05.18
  misc_feature (120)..(387): NCBI GI NO: 34894670 NR Description: B1153F04.26
  misc_feature (101)..(387): NCBI GI NO: 15227658 NR Description: hypothetical protein; protein id: At2g36430
  misc_feature (68)..(387): NCBI GI NO: 34894658 NR Description: B1153F04.19
  misc_feature (63)..(387): NCBI GI NO: 15229684 NR Description: putative protein; protein id: At3g50150.1
  misc_feature (113)..(387): NCBI GI NO: 34894664 NR Description: B1153F04.22
MEPLLVPNNHSPGPVVAATPGEHGGAAVDESSTLVDAASGTDESHRALADADVKMNDDGDVQGDELSASVQRRLDESSAVEGEDEEEEIGDDAEADDMAARMGRRLAALPGNAHESEPFTIFRVAGPMRDRNRHLYEPQMISIGPFHRGAGRHLAAMEEHKWRYLRDILARPGGATLASYARAARSMEASARRRYAEPVLLPAAEFAEMLLLDGCFLVEFFLKGQESAEDALIDASWAMQNVYNDMLLLENQLPFFVLERFYDLATGGLGRDYFVTNVLVNYLTVDMCVGPRDPESTRPPDGEIHHLLHLYYYWFLPPEDRDGSGTGSKDKEDGEALEELMSTSADERMPWQLPPASELKDSGVTFRAKKSPRSMVDVTFDRRSGAL

SEQ ID NO: 35892 - protein, 333 aa, Zea mays subsp. mays
  peptide (1)..(333): Ceres Seq. ID no. 12454902
  misc_feature (62)..(267): Pfam Name: Pfam Description:  Plant protein of unknown function
  misc_feature (1)..(263): NCBI GI NO: 38175550 NR Description: unknown protein
  misc_feature (39)..(267): NCBI GI NO: 34914152 NR Description: P0496H05.27
  misc_feature (244)..(333): NCBI GI NO: 34914152 NR Description: P0496H05.27
  misc_feature (44)..(267): NCBI GI NO: 34914138 NR Description: P0496H05.18
  misc_feature (302)..(333): NCBI GI NO: 34914138 NR Description: P0496H05.18
  misc_feature (66)..(333): NCBI GI NO: 34894670 NR Description: B1153F04.26
  misc_feature (47)..(333): NCBI GI NO: 15227658 NR Description: hypothetical protein; protein id: At2g36430
  misc_feature (14)..(333): NCBI GI NO: 34894658 NR Description: B1153F04.19
  misc_feature (9)..(333): NCBI GI NO: 15229684 NR Description: putative protein; protein id: At3g50150.1
  misc_feature (59)..(333): NCBI GI NO: 34894664 NR Description: B1153F04.22
MNDDGDVQGDELSASVQRRLDESSAVEGEDEEEEIGDDAEADDMAARMGRRLAALPGNAHESEPFTIFRVAGPMRDRNRHLYEPQMISIGPFHRGAGRHLAAMEEHKWRYLRDILARPGGATLASYARAARSMEASARRRYAEPVLLPAAEFAEMLLLDGCFLVEFFLKGQESAEDALIDASWAMQNVYNDMLLLENQLPFFVLERFYDLATGGLGRDYFVTNVLVNYLTVDMCVGPRDPESTRPPDGEIHHLLHLYYYWFLPPEDRDGSGTGSKDKEDGEALEELMSTSADERMPWQLPPASELKDSGVTFRAKKSPRSMVDVTFDRRSGAL

SEQ ID NO: 35893 - DNA, 1761 bp, Zea mays subsp. mays
  misc_feature (1)..(1761): Ceres Seq. ID no. 12450583
  misc_feature (902)..(902): n is a, c, t, g, unknown, or other
  misc_feature (1429)..(1429): n is a, c, t, g, unknown, or other
  misc_feature (1714)..(1714): n is a, c, t, g, unknown, or other
  misc_feature (1483)..(1483): n is a, c, t, g, unknown, or other
  misc_feature (1723)..(1723): n is a, c, t, g, unknown, or other
  misc_feature (476)..(476): n is a, c, t, g, unknown, or other
  misc_feature (1503)..(1503): n is a, c, t, g, unknown, or other
  misc_feature (1745)..(1745): n is a, c, t, g, unknown, or other
  misc_feature (498)..(498): n is a, c, t, g, unknown, or other
aaccagcacaacgaagtcccgcgcacgcaaagaagtcacgtccaaactgaaggtgacaacatggagtccgcgccgtcaacggcggcggtcatggagcgcgagcgcctcacggccgagctggccttcgcggaggccgacgcagagcctagcagcttcgtcgtcaagatccggtgtcggctgccggacttcgcgcgcagcgtcaacctcaagtacgtccgcctcggcctgcgctctggcgccatccctgcgccctcctcatgggtcccgctcgcgctcgcgccgtcgctcctcgtcgcggcggcatactcgctcgttggcgcggacaagttctactcactcgacctgctcacctgcatcgcgtggctcgccgcggcggtgctgctgctcaccgtgtatttcctcatgcgcccaaggccggtgtacctcgtggacttcgcgtgctacaggccgggcaacgagcacgccatctccaaggngggcttcctggacatgacagancagcacgggctgcttcaacgcggaggcactcgagttccagaccaagatcaccaagcgctccggactcggcgatcggacgtacctcccgccgggcatccaggcacggccgccgcggctgtctatggaggaggcgcgcgcggaggccgaggccgtcatgttcggctgcctcgactcgctattctcggccacgggcatcgacccacgccgcgatgtgcgcgtgctcatcgtcaactgcagcctcttcaacccgacgccgtcgctggcgtccatggtagtgcaccgctacaagatgcgggaggacgtcaagtcgttcaaccttggaggcatggggtgcagcgcagggctcatcgccgtggacctcgccagggacatgctgcaggcgaaccccgggtgctacgccgtcntggtgagcaccgagaacatcacgctgaactggtacttcggcaacgaccgctccatgctgctgtccaactgcatcttccgcatgggcggcgctgccgcgctgctgtccaaccgccgcgccgacgccgggcgcgccaagtacaggctgctacacacggtacgcacccacaagggcgccgcggacgagtgctacggctgcgtgtaccagcgcgaggacggcaccggccgcgtcggcgtgtcgctggcgcgcgagctcatggccgtcgccggggacgcgctcaagacgaacatcaccaccctgggcccgctggtgctcccgatatcggagcagctcaagttcctcaagtccctcgtgctccgccgcgccctccgctcccgcggtgtccgtccgtacatcccggacttccggcgcgcgtttgaacacttctgcgtgcacgccggcgggcgcgccgtgctggaggaggtgcagcgcagcctggggctcagggacgcggacatggagcccagcaggtgcaccctgcaccgcttnggcaacaccagcagcagctcgctctggtacgagctcgcctacgccgaggccaanggccgcgtccgccgcggccnccgcgtgtggcagatcggattcggatccggattcaagtgcaacagtgctgtctggcgcgcgctccgcgacgtgccgcccgtgcacgccgacggcgccggcggtggcagcaactgcaacccgtgggtggacagcattcagagctacccgccaaaagagtacatctgatcgccatcttctttgtggtgaattaatcacgtcctgttggatcanttgtactanccgcgacgcagtagtgcacganaactgtatgtatggtg

SEQ ID NO: 35894 - protein, 439 aa, Zea mays subsp. mays
  peptide (1)..(439): Ceres Seq. ID no. 12450584
  misc_feature (41)..(191): NCBI GI NO: 37531254 NR Description: putative senescence-associated protein 15
  misc_feature (31)..(165): NCBI GI NO: 3551960 NR Description: senescence-associated protein 15
  misc_feature (31)..(169): NCBI GI NO: 4091810 NR Description: fatty acid elongase 3-ketoacyl-CoA synthase 1
  misc_feature (31)..(169): NCBI GI NO: 22329274 NR Description: fatty acid elongase 3-ketoacyl-CoA synthase 1
  misc_feature (20)..(163): NCBI GI NO: 29417540 NR Description: beta-ketoacyl-CoA-synthase [Marchantia polymorpha]
  misc_feature (58)..(162): NCBI GI NO: 9714501 NR Description: putative fatty acid elongase [Zea mays]
  misc_feature (60)..(170): NCBI GI NO: 15239981 NR Description: beta-ketoacyl-CoA synthase; protein id:At5g43760
  misc_feature (60)..(170): NCBI GI NO: 14334714 NR Description: putative beta-ketoacyl-CoA synthase
  misc_feature (59)..(170): NCBI GI NO: 15219676 NR Description: putative beta-ketoacyl-CoA synthase
  misc_feature (46)..(169): NCBI GI NO: 15225767 NR Description: putative beta-ketoacyl-CoA synthase
  misc_feature (159)..(159): Xaa is any aa, unknown or other
  misc_feature (166)..(166): Xaa is any aa, unknown or other
  misc_feature (301)..(301): Xaa is any aa, unknown or other
NQHNEVPRTQRSHVQTEGDNMESAPSTAAVMERERLTAELAFAEADAEPSSFVVKIRCRLPDFARSVNLKYVRLGLRSGAIPAPSSWVPLALAPSLLVAAAYSLVGADKFYSLDLLTCIAWLAAAVLLLTVYFLMRPRPVYLVDFACYRPGNEHAISKXGFLDMTXQHGLLQRGGTRVPDQDHQALRTRRSDVPPAGHPGTAAAAVYGGGARGGRGRHVRLPRLAILGHGHRPTPRCARAHRQLQPLQPDAVAGVHGSAPLQDAGGRQVVQPWRHGVQRRAHRRGPRQGHAAGEPRVLRRXGEHREHHAELVLRQRPLHAAVQLHLPHGRRCRAAVQPPRRRRARQVQAATHGTHPQGRRGRVLRLRVPARGRHRPRRRVAGARAHGRRRGRAQDEHHHPGPAGAPDIGAAQVPQVPRAPPRPPLPRCPSVHPGLPARV

SEQ ID NO: 35895 - protein, 419 aa, Zea mays subsp. mays
  peptide (1)..(419): Ceres Seq. ID no. 12450585
  misc_feature (21)..(171): NCBI GI NO: 37531254 NR Description: putative senescence-associated protein 15
  misc_feature (11)..(145): NCBI GI NO: 3551960 NR Description: senescence-associated protein 15
  misc_feature (11)..(149): NCBI GI NO: 4091810 NR Description: fatty acid elongase 3-ketoacyl-CoA synthase 1
  misc_feature (11)..(149): NCBI GI NO: 22329274 NR Description: fatty acid elongase 3-ketoacyl-CoA synthase 1
  misc_feature (1)..(143): NCBI GI NO: 29417540 NR Description: beta-ketoacyl-CoA-synthase [Marchantia polymorpha]
  misc_feature (38)..(142): NCBI GI NO: 9714501 NR Description: putative fatty acid elongase [Zea mays]
  misc_feature (40)..(150): NCBI GI NO: 15239981 NR Description: beta-ketoacyl-CoA synthase; protein id:At5g43760
  misc_feature (40)..(150): NCBI GI NO: 14334714 NR Description: putative beta-ketoacyl-CoA synthase
  misc_feature (39)..(150): NCBI GI NO: 15219676 NR Description: putative beta-ketoacyl-CoA synthase
  misc_feature (26)..(149): NCBI GI NO: 15225767 NR Description: putative beta-ketoacyl-CoA synthase
  misc_feature (139)..(139): Xaa is any aa, unknown or other
  misc_feature (146)..(146): Xaa is any aa, unknown or other
  misc_feature (281)..(281): Xaa is any aa, unknown or other
MESAPSTAAVMERERLTAELAFAEADAEPSSFVVKIRCRLPDFARSVNLKYVRLGLRSGAIPAPSSWVPLALAPSLLVAAAYSLVGADKFYSLDLLTCIAWLAAAVLLLTVYFLMRPRPVYLVDFACYRPGNEHAISKXGFLDMTXQHGLLQRGGTRVPDQDHQALRTRRSDVPPAGHPGTAAAAVYGGGARGGRGRHVRLPRLAILGHGHRPTPRCARAHRQLQPLQPDAVAGVHGSAPLQDAGGRQVVQPWRHGVQRRAHRRGPRQGHAAGEPRVLRRXGEHREHHAELVLRQRPLHAAVQLHLPHGRRCRAAVQPPRRRRARQVQAATHGTHPQGRRGRVLRLRVPARGRHRPRRRVAGARAHGRRRGRAQDEHHHPGPAGAPDIGAAQVPQVPRAPPRPPLPRCPSVHPGLPARV

SEQ ID NO: 35896 - protein, 409 aa, Zea mays subsp. mays
  peptide (1)..(409): Ceres Seq. ID no. 12450586
  misc_feature (11)..(161): NCBI GI NO: 37531254 NR Description: putative senescence-associated protein 15
  misc_feature (1)..(135): NCBI GI NO: 3551960 NR Description: senescence-associated protein 15
  misc_feature (1)..(139): NCBI GI NO: 4091810 NR Description: fatty acid elongase 3-ketoacyl-CoA synthase 1
  misc_feature (1)..(139): NCBI GI NO: 22329274 NR Description: fatty acid elongase 3-ketoacyl-CoA synthase 1
  misc_feature (1)..(133): NCBI GI NO: 29417540 NR Description: beta-ketoacyl-CoA-synthase [Marchantia polymorpha]
  misc_feature (28)..(132): NCBI GI NO: 9714501 NR Description: putative fatty acid elongase [Zea mays]
  misc_feature (30)..(140): NCBI GI NO: 15239981 NR Description: beta-ketoacyl-CoA synthase; protein id:At5g43760
  misc_feature (30)..(140): NCBI GI NO: 14334714 NR Description: putative beta-ketoacyl-CoA synthase
  misc_feature (29)..(140): NCBI GI NO: 15219676 NR Description: putative beta-ketoacyl-CoA synthase
  misc_feature (16)..(139): NCBI GI NO: 15225767 NR Description: putative beta-ketoacyl-CoA synthase
  misc_feature (129)..(129): Xaa is any aa, unknown or other
  misc_feature (136)..(136): Xaa is any aa, unknown or other
  misc_feature (271)..(271): Xaa is any aa, unknown or other
MERERLTAELAFAEADAEPSSFVVKIRCRLPDFARSVNLKYVRLGLRSGAIPAPSSWVPLALAPSLLVAAAYSLVGADKFYSLDLLTCIAWLAAAVLLLTVYFLMRPRPVYLVDFACYRPGNEHAISKXGFLDMTXQHGLLQRGGTRVPDQDHQALRTRRSDVPPAGHPGTAAAAVYGGGARGGRGRHVRLPRLAILGHGHRPTPRCARAHRQLQPLQPDAVAGVHGSAPLQDAGGRQVVQPWRHGVQRRAHRRGPRQGHAAGEPRVLRRXGEHREHHAELVLRQRPLHAAVQLHLPHGRRCRAAVQPPRRRRARQVQAATHGTHPQGRRGRVLRLRVPARGRHRPRRRVAGARAHGRRRGRAQDEHHHPGPAGAPDIGAAQVPQVPRAPPRPPLPRCPSVHPGLPARV

SEQ ID NO: 35897 - protein, 349 aa, Zea mays subsp. mays
  peptide (1)..(349): Ceres Seq. ID no. 12450587
  misc_feature (171)..(317): Pfam Name: Pfam Description:  Chalcone and stilbene synthases
  misc_feature (1)..(330): NCBI GI NO: 37531254 NR Description: putative senescence-associated protein 15
  misc_feature (1)..(346): NCBI GI NO: 3551960 NR Description: senescence-associated protein 15
  misc_feature (1)..(346): NCBI GI NO: 4091810 NR Description: fatty acid elongase 3-ketoacyl-CoA synthase 1
  misc_feature (1)..(346): NCBI GI NO: 22329274 NR Description: fatty acid elongase 3-ketoacyl-CoA synthase 1
  misc_feature (1)..(344): NCBI GI NO: 29417540 NR Description: beta-ketoacyl-CoA-synthase [Marchantia polymorpha]
  misc_feature (1)..(344): NCBI GI NO: 9714501 NR Description: putative fatty acid elongase [Zea mays]
  misc_feature (1)..(344): NCBI GI NO: 15239981 NR Description: beta-ketoacyl-CoA synthase; protein id:At5g43760
  misc_feature (1)..(344): NCBI GI NO: 14334714 NR Description: putative beta-ketoacyl-CoA synthase
  misc_feature (1)..(344): NCBI GI NO: 15219676 NR Description: putative beta-ketoacyl-CoA synthase
  misc_feature (1)..(344): NCBI GI NO: 15225767 NR Description: putative beta-ketoacyl-CoA synthase
  misc_feature (95)..(95): Xaa is any aa, unknown or other
  misc_feature (270)..(270): Xaa is any aa, unknown or other
  misc_feature (288)..(288): Xaa is any aa, unknown or other
  misc_feature (295)..(295): Xaa is any aa, unknown or other
MEEARAEAEAVMFGCLDSLFSATGIDPRRDVRVLIVNCSLFNPTPSLASMVVHRYKMREDVKSFNLGGMGCSAGLIAVDLARDMLQANPGCYAVXVSTENITLNWYFGNDRSMLLSNCIFRMGGAAALLSNRRADAGRAKYRLLHTVRTHKGAADECYGCVYQREDGTGRVGVSLARELMAVAGDALKTNITTLGPLVLPISEQLKFLKSLVLRRALRSRGVRPYIPDFRRAFEHFCVHAGGRAVLEEVQRSLGLRDADMEPSRCTLHRXGNTSSSSLWYELAYAEAXGRVRRGXRVWQIGFGSGFKCNSAVWRALRDVPPVHADGAGGGSNCNPWVDSIQSYPPKEYI

SEQ ID NO: 35898 - DNA, 1477 bp, Zea mays subsp. mays; identical to SEQ ID NO: 23723
  misc_feature (1)..(1477): Ceres Seq. ID no. 12405682

SEQ ID NO: 35899 - protein, 304 aa, Zea mays subsp. mays; identical to SEQ ID NO: 23724
  peptide (1)..(304): Ceres Seq. ID no. 12405683
  misc_feature (72)..(292): NCBI GI NO: 15229211 NR Description: unknown protein; protein id: At3g04020.1

SEQ ID NO: 35900 - protein, 254 aa, Zea mays subsp. mays; identical to SEQ ID NO: 23725
  peptide (1)..(254): Ceres Seq. ID no. 12405684
  misc_feature (22)..(242): NCBI GI NO: 15229211 NR Description: unknown protein; protein id: At3g04020.1

SEQ ID NO: 35901 - protein, 239 aa, Zea mays subsp. mays; identical to SEQ ID NO: 23726
  peptide (1)..(239): Ceres Seq. ID no. 12405685
  misc_feature (7)..(227): NCBI GI NO: 15229211 NR Description: unknown protein; protein id: At3g04020.1

SEQ ID NO: 35902 - DNA, 1711 bp, Zea mays subsp. mays; identical to SEQ ID NO: 28223
  misc_feature (1)..(1711): Ceres Seq. ID no. 12566006

SEQ ID NO: 35903 - protein, 441 aa, Zea mays subsp. mays; identical to SEQ ID NO: 28224
  peptide (1)..(441): Ceres Seq. ID no. 12566007
  misc_feature (243)..(405): Pfam Name: Pfam Description:  MatE
  misc_feature (4)..(405): NCBI GI NO: 37532026 NR Description: putative membrane protein
  misc_feature (1)..(405): NCBI GI NO: 16924114 NR Description: putative multidrug efflux protein [Oryza sativa]
  misc_feature (10)..(406): NCBI GI NO: 15220246 NR Description: unknown protein; protein id: At1g47530
  misc_feature (10)..(406): NCBI GI NO: 16604505 NR Description: At1g47530/F16N3_20 [Arabidopsis thaliana]
  misc_feature (1)..(406): NCBI GI NO: 15220701 NR Description: conserved hypothetical protein
  misc_feature (11)..(406): NCBI GI NO: 15222119 NR Description: unknown protein; protein id: At1g12950.1
  misc_feature (11)..(406): NCBI GI NO: 15231577 NR Description: integral membrane protein, putative
  misc_feature (11)..(406): NCBI GI NO: 15240824 NR Description: putative transmembrane protein
  misc_feature (7)..(337): NCBI GI NO: 34909838 NR Description: P0403C05.27
  misc_feature (11)..(406): NCBI GI NO: 30686958 NR Description: MATE efflux protein family [Arabidopsis thaliana]

SEQ ID NO: 35904 - protein, 373 aa, Zea mays subsp. mays; identical to SEQ ID NO: 28225
  peptide (1)..(373): Ceres Seq. ID no. 12566008
  misc_feature (175)..(337): Pfam Name: Pfam Description:  MatE
  misc_feature (1)..(337): NCBI GI NO: 37532026 NR Description: putative membrane protein
  misc_feature (1)..(337): NCBI GI NO: 16924114 NR Description: putative multidrug efflux protein [Oryza sativa]
  misc_feature (1)..(338): NCBI GI NO: 15220246 NR Description: unknown protein; protein id: At1g47530
  misc_feature (1)..(338): NCBI GI NO: 16604505 NR Description: At1g47530/F16N3_20 [Arabidopsis thaliana]
  misc_feature (1)..(338): NCBI GI NO: 15220701 NR Description: conserved hypothetical protein
  misc_feature (1)..(338): NCBI GI NO: 15222119 NR Description: unknown protein; protein id: At1g12950.1
  misc_feature (1)..(338): NCBI GI NO: 15231577 NR Description: integral membrane protein, putative
  misc_feature (1)..(338): NCBI GI NO: 15240824 NR Description: putative transmembrane protein
  misc_feature (1)..(269): NCBI GI NO: 34909838 NR Description: P0403C05.27
  misc_feature (1)..(338): NCBI GI NO: 30686958 NR Description: MATE efflux protein family [Arabidopsis thaliana]

SEQ ID NO: 35905 - protein, 288 aa, Zea mays subsp. mays; identical to SEQ ID NO: 28226
  peptide (1)..(288): Ceres Seq. ID no. 12566009
  misc_feature (90)..(252): Pfam Name: Pfam Description:  MatE
  misc_feature (1)..(252): NCBI GI NO: 37532026 NR Description: putative membrane protein
  misc_feature (1)..(252): NCBI GI NO: 16924114 NR Description: putative multidrug efflux protein [Oryza sativa]
  misc_feature (1)..(253): NCBI GI NO: 15220246 NR Description: unknown protein; protein id: At1g47530
  misc_feature (1)..(253): NCBI GI NO: 16604505 NR Description: At1g47530/F16N3_20 [Arabidopsis thaliana]
  misc_feature (1)..(253): NCBI GI NO: 15220701 NR Description: conserved hypothetical protein
  misc_feature (1)..(253): NCBI GI NO: 15222119 NR Description: unknown protein; protein id: At1g12950.1
  misc_feature (1)..(253): NCBI GI NO: 15231577 NR Description: integral membrane protein, putative
  misc_feature (1)..(253): NCBI GI NO: 15240824 NR Description: putative transmembrane protein
  misc_feature (1)..(184): NCBI GI NO: 34909838 NR Description: P0403C05.27
  misc_feature (1)..(253): NCBI GI NO: 30686958 NR Description: MATE efflux protein family [Arabidopsis thaliana]

SEQ ID NO: 35906 - DNA, 1010 bp, Zea mays subsp. mays
  misc_feature (1)..(1010): Ceres Seq. ID no. 12450604
  misc_feature (627)..(627): n is a, c, t, g, unknown, or other
  misc_feature (667)..(667): n is a, c, t, g, unknown, or other
  misc_feature (676)..(676): n is a, c, t, g, unknown, or other
  misc_feature (856)..(856): n is a, c, t, g, unknown, or other
  misc_feature (614)..(614): n is a, c, t, g, unknown, or other
  misc_feature (745)..(745): n is a, c, t, g, unknown, or other
  misc_feature (689)..(689): n is a, c, t, g, unknown, or other
  misc_feature (619)..(619): n is a, c, t, g, unknown, or other
acgagtgcactgcgcacaacgctgtgcgtgtgcggtgtgcgctcgacgattccagacattgcccacgggccacggccgccaaacacagctgccggaactgcacgccctcctcgctccactgatccaaagctgcgcctgcgctcgctccaaggtacccatgggatcccaccaccactacacctccgcctcgcaattcgtcttcgccgccgtcgattccaaccccaaccccaggcccagctacagccacaagcccaagaccaccgtgcaaatccccatcacgtctctaccagaacgggctcgggcgggaccgcccgacgcggcggccgccgccaagatccaggcggccttgcggggctacctggtcatgcggcacgccgcggccgtgcgcggggccgacgccgaggcgacgcggctcgagcggctgctccggcggcaggagaccgtggacgccgtccgcggcgacgagcgcgagcgggcccggttctccgaggcgctcatggccgtgctgctccgcctggacgccgtgccgggacgctacccggccgtgcgggacgcgcggcgcgccgtgagccgccgcgtcgtcggcctgcaggaagtgttcgacgctgttgtcncggcncctgcagngcagacttgcggggttccggctagcctggagcaggtcctngaagggatntggggcatcgganaggcgcctgttccggtgccgccggcgcaggcgatggccgcggtggaggaggaagtnaggaggggcggatcatactgggcaaggttttttggtggagtgggctggccgtgactgtgactctgtgagtgtgtagcgaggagggtacctgggtactagaatggctatagnctactgctgtgccgtactcggctgcacatgtattttgagatgtgtcgtattgtataccaaagtgccatgttgctgttaatgacgtgagagaaaaactgtaagtcaccatttggatcctttatttcagggctcgtttgtcggcaatgttttaccg

SEQ ID NO: 35907 - protein, 265 aa, Zea mays subsp. mays
  peptide (1)..(265): Ceres Seq. ID no. 12450605
  misc_feature (128)..(203): Pfam Name: Pfam Description:  BAG domain
  misc_feature (84)..(258): NCBI GI NO: 25402702 NR Description: protein F12F1.7 [imported] - Arabidopsis thaliana
  misc_feature (84)..(203): NCBI GI NO: 15221182 NR Description: hypothetical protein; protein id: At1g12060.1
  misc_feature (205)..(205): Xaa is any aa, unknown or other
  misc_feature (206)..(206): Xaa is any aa, unknown or other
  misc_feature (209)..(209): Xaa is any aa, unknown or other
  misc_feature (222)..(222): Xaa is any aa, unknown or other
  misc_feature (225)..(225): Xaa is any aa, unknown or other
  misc_feature (230)..(230): Xaa is any aa, unknown or other
  misc_feature (248)..(248): Xaa is any aa, unknown or other
RVHCAQRCACAVCARRFQTLPTGHGRQTQLPELHALLAPLIQSCACARSKVPMGSHHHYTSASQFVFAAVDSNPNPRPSYSHKPKTTVQIPITSLPERARAGPPDAAAAAKIQAALRGYLVMRHAAAVRGADAEATRLERLLRRQETVDAVRGDERERARFSEALMAVLLRLDAVPGRYPAVRDARRAVSRRVVGLQEVFDAVVXXPAXQTCGVPASLEQVXEGXWGIGXAPVPVPPAQAMAAVEEEXRRGGSYWARFFGGVGWP

SEQ ID NO: 35908 - protein, 216 aa, Zea mays subsp. mays
  peptide (1)..(216): Ceres Seq. ID no. 12450606
  misc_feature (24)..(216): NCBI GI NO: 29247944 NR Description: GLP_26_54603_52153 [Giardia lamblia ATCC 50803]
  misc_feature (14)..(216): NCBI GI NO: 22960369 NR Description: hypothetical protein [Rhodobacter sphaeroides]
  misc_feature (50)..(216): NCBI GI NO: 29830954 NR Description: putative GntR-family transcriptional regulator
  misc_feature (18)..(216): NCBI GI NO: 23104258 NR Description: hypothetical protein [Azotobacter vinelandii]
  misc_feature (205)..(205): Xaa is any aa, unknown or other
  misc_feature (207)..(207): Xaa is any aa, unknown or other
  misc_feature (209)..(209): Xaa is any aa, unknown or other
TSALRTTLCVCGVRSTIPDIAHGPRPPNTAAGTARPPRSTDPKLRLRSLQGTHGIPPPLHLRLAIRLRRRRFQPQPQAQLQPQAQDHRANPHHVSTRTGSGGTARRGGRRQDPGGLAGLPGHAARRGRARGRRRGDAARAAAPAAGDRGRRPRRRARAGPVLRGAHGRAAPPGRRAGTLPGRAGRAARREPPRRRPAGSVRRCCXGXCXADLRGSG

SEQ ID NO: 35909 - protein, 213 aa, Zea mays subsp. mays
  peptide (1)..(213): Ceres Seq. ID no. 12450607
  misc_feature (76)..(151): Pfam Name: Pfam Description:  BAG domain
  misc_feature (32)..(206): NCBI GI NO: 25402702 NR Description: protein F12F1.7 [imported] - Arabidopsis thaliana
  misc_feature (32)..(151): NCBI GI NO: 15221182 NR Description: hypothetical protein; protein id: At1g12060.1
  misc_feature (153)..(153): Xaa is any aa, unknown or other
  misc_feature (154)..(154): Xaa is any aa, unknown or other
  misc_feature (157)..(157): Xaa is any aa, unknown or other
  misc_feature (170)..(170): Xaa is any aa, unknown or other
  misc_feature (173)..(173): Xaa is any aa, unknown or other
  misc_feature (178)..(178): Xaa is any aa, unknown or other
  misc_feature (196)..(196): Xaa is any aa, unknown or other
MGSHHHYTSASQFVFAAVDSNPNPRPSYSHKPKTTVQIPITSLPERARAGPPDAAAAAKIQAALRGYLVMRHAAAVRGADAEATRLERLLRRQETVDAVRGDERERARFSEALMAVLLRLDAVPGRYPAVRDARRAVSRRVVGLQEVFDAVVXXPAXQTCGVPASLEQVXEGXWGIGXAPVPVPPAQAMAAVEEEXRRGGSYWARFFGGVGWP

SEQ ID NO: 35910 - DNA, 1884 bp, Zea mays subsp. mays
  misc_feature (1)..(1884): Ceres Seq. ID no. 12425457
aaaaaaacccaaaaaaacaattggcagcgcaaccgcccacagctcgtgacgaggcgacccaacccccccgtagcggcggcggcggcggcgagcaatcctccggtccggccggcggaaacactagcggcgggaggcagagcgtccaatggcggaggacgggggcaaggccgcggcggcgactgcggcggaggcgggaggcggaggagccaaggagggcggcgaggagaggaccgtcaagctcttcgtgggccaggtgcccaagcacatggccgaggccgacctgctcgccttgttccgcgaggtagccgccgtcgacgaggtcaccgtcatcaaggacaaggccaccaaggtctcccgagggtgctgcttcgtcatatgcccctcaagggaggaagctgacaaggcggtgaatgcctaccacaacaagcaaaccctctctggggtatgcgagcatactactaaccttgttctggcatcaagtcctttgcaagtaaaatatgctgatggagagttggagaggcttgaacataagcttttcattggaatgcttccgaaaaatgttacggacactgagttgactgatttgttttccaaatatgggaatgtcacggatttgcaaattttgagaggttcacaacaaacaaacaaagctggctgtgccttcattaaatatcaaacaaaagatcaagcattggcagctattgaagctctaaacgggaaacacaaaatagagggttctagcgtgccgttggttgtcaaatgggctgatacagaaaaggaaaggcaggctcggaaagcacaaaaagctcagtcacagctatctcatatacccaatgcaagtccaatgcagcagcactcttcagtatttggtgctttacagatgggatatatgcctcaatacaatggatttggttatcagccaacagggacatacggacttatgcagtaccctctatctcctatgcaaaatcaaggccccttccagaatatggtccaacctcttaatcaagggaactcgataagaggagtcaatcctgaagtgtctcccagttcagttcaaaggtcatttaatgcaatgcagctaggcagcccttatcctgctatgcctggtatgcagtatcctggatcatatcccggtggtcccatgggcaaccgtcatttgggaaattctcacaatccgattaaagttccaaattcgaatgccaattccactgtttcttctagtcccagcagcaatgctggtgggcaggttgaaggtcctcctggagccaacctatttatttatcatatcccacaagaatacggtgaccaggagctttccagcgccttccagagtttcggaagagtagtaagcgctaaggtgttcgtggacaaagcaacgggcgtgagcaaatgcttcggtttcgtgagctacgactctcctgcctccgcgcaggcagccatcaacaggatgaacggctaccagttaggcggtaaaaaactcaaggtacaactgaagagagaaaacaacaccaagcacagtagtaaaccgttttgacagacaaggcagcagccgtccggtacccggtacatattaattgaccatcaacacattgcagcagcagccttcagggcctggggagggaagagacccgtgtaccccctctttgttcaccttcacattcttggagattcgtcagtcagctcagctcgtgtaattcattgcagcagacataggccgtagcagcagtttgtaccatgatcagatcacttgtacacatgattcattcaattgttactgacagccggctttcatcctagaataattcgctgtgacaaccttatcatttgctgacgaatgaagtcaggtagacttgttcatctatggaatgatggcaactttcg

SEQ ID NO: 35911 - protein, 463 aa, Zea mays subsp. mays
  peptide (1)..(463): Ceres Seq. ID no. 12425458
  misc_feature (130)..(202): Pfam Name: a.k.a. RRM, RBD, or RNP domain Pfam Description: RNA recognition motif.
  misc_feature (2)..(463): NCBI GI NO: 34907248 NR Description: putative ribonucleoprotein
  misc_feature (14)..(462): NCBI GI NO: 18412143 NR Description: RNA-binding CELF protein, putative
  misc_feature (14)..(461): NCBI GI NO: 7488303 NR Description: ribonucleoprotein homolog T4I9
  misc_feature (14)..(424): NCBI GI NO: 30679366 NR Description: RNA-binding protein, putative
  misc_feature (26)..(461): NCBI GI NO: 25386552 NR Description: protein F21B7.8 [imported] - Arabidopsis thaliana
  misc_feature (26)..(319): NCBI GI NO: 7488302 NR Description: ribonucleoprotein homolog F21B7
  misc_feature (371)..(461): NCBI GI NO: 7488302 NR Description: ribonucleoprotein homolog F21B7
  misc_feature (19)..(453): NCBI GI NO: 33354192 NR Description: putative CUG triplet repeat RNA-binding protein 1
  misc_feature (26)..(351): NCBI GI NO: 22329313 NR Description: RNA-binding CELF protein, putative
  misc_feature (26)..(321): NCBI GI NO: 28422663 NR Description: Similar to RIKEN cDNA 4930415M08 gene
MAEDGGKAAAATAAEAGGGGAKEGGEERTVKLFVGQVPKHMAEADLLALFREVAAVDEVTVIKDKATKVSRGCCFVICPSREEADKAVNAYHNKQTLSGVCEHTTNLVLASSPLQVKYADGELERLEHKLFIGMLPKNVTDTELTDLFSKYGNVTDLQILRGSQQTNKAGCAFIKYQTKDQALAAIEALNGKHKIEGSSVPLVVKWADTEKERQARKAQKAQSQLSHIPNASPMQQHSSVFGALQMGYMPQYNGFGYQPTGTYGLMQYPLSPMQNQGPFQNMVQPLNQGNSIRGVNPEVSPSSVQRSFNAMQLGSPYPAMPGMQYPGSYPGGPMGNRHLGNSHNPIKVPNSNANSTVSSSPSSNAGGQVEGPPGANLFIYHIPQEYGDQELSSAFQSFGRVVSAKVFVDKATGVSKCFGFVSYDSPASAQAAINRMNGYQLGGKKLKVQLKRENNTKHSSKPF

SEQ ID NO: 35912 - protein, 423 aa, Zea mays subsp. mays
  peptide (1)..(423): Ceres Seq. ID no. 12425459
  misc_feature (90)..(162): Pfam Name: a.k.a. RRM, RBD, or RNP domain Pfam Description: RNA recognition motif.
  misc_feature (1)..(423): NCBI GI NO: 34907248 NR Description: putative ribonucleoprotein
  misc_feature (1)..(422): NCBI GI NO: 18412143 NR Description: RNA-binding CELF protein, putative
  misc_feature (1)..(421): NCBI GI NO: 7488303 NR Description: ribonucleoprotein homolog T4I9
  misc_feature (1)..(384): NCBI GI NO: 30679366 NR Description: RNA-binding protein, putative
  misc_feature (1)..(421): NCBI GI NO: 25386552 NR Description: protein F21B7.8 [imported] - Arabidopsis thaliana
  misc_feature (1)..(279): NCBI GI NO: 7488302 NR Description: ribonucleoprotein homolog F21B7
  misc_feature (331)..(421): NCBI GI NO: 7488302 NR Description: ribonucleoprotein homolog F21B7
  misc_feature (1)..(413): NCBI GI NO: 33354192 NR Description: putative CUG triplet repeat RNA-binding protein 1
  misc_feature (1)..(311): NCBI GI NO: 22329313 NR Description: RNA-binding CELF protein, putative
  misc_feature (1)..(281): NCBI GI NO: 28422663 NR Description: Similar to RIKEN cDNA 4930415M08 gene
MAEADLLALFREVAAVDEVTVIKDKATKVSRGCCFVICPSREEADKAVNAYHNKQTLSGVCEHTTNLVLASSPLQVKYADGELERLEHKLFIGMLPKNVTDTELTDLFSKYGNVTDLQILRGSQQTNKAGCAFIKYQTKDQALAAIEALNGKHKIEGSSVPLVVKWADTEKERQARKAQKAQSQLSHIPNASPMQQHSSVFGALQMGYMPQYNGFGYQPTGTYGLMQYPLSPMQNQGPFQNMVQPLNQGNSIRGVNPEVSPSSVQRSFNAMQLGSPYPAMPGMQYPGSYPGGPMGNRHLGNSHNPIKVPNSNANSTVSSSPSSNAGGQVEGPPGANLFIYHIPQEYGDQELSSAFQSFGRVVSAKVFVDKATGVSKCFGFVSYDSPASAQAAINRMNGYQLGGKKLKVQLKRENNTKHSSKPF

SEQ ID NO: 35913 - protein, 330 aa, Zea mays subsp. mays
  peptide (1)..(330): Ceres Seq. ID no. 12425460
  misc_feature (1)..(69): Pfam Name: a.k.a. RRM, RBD, or RNP domain Pfam Description: RNA recognition motif.
  misc_feature (1)..(330): NCBI GI NO: 34907248 NR Description: putative ribonucleoprotein
  misc_feature (1)..(329): NCBI GI NO: 18412143 NR Description: RNA-binding CELF protein, putative
  misc_feature (1)..(328): NCBI GI NO: 7488303 NR Description: ribonucleoprotein homolog T4I9
  misc_feature (1)..(291): NCBI GI NO: 30679366 NR Description: RNA-binding protein, putative
  misc_feature (1)..(328): NCBI GI NO: 25386552 NR Description: protein F21B7.8 [imported] - Arabidopsis thaliana
  misc_feature (1)..(186): NCBI GI NO: 7488302 NR Description: ribonucleoprotein homolog F21B7
  misc_feature (238)..(328): NCBI GI NO: 7488302 NR Description: ribonucleoprotein homolog F21B7
  misc_feature (1)..(320): NCBI GI NO: 33354192 NR Description: putative CUG triplet repeat RNA-binding protein 1
  misc_feature (1)..(218): NCBI GI NO: 22329313 NR Description: RNA-binding CELF protein, putative
  misc_feature (1)..(188): NCBI GI NO: 28422663 NR Description: Similar to RIKEN cDNA 4930415M08 gene
MLPKNVTDTELTDLFSKYGNVTDLQILRGSQQTNKAGCAFIKYQTKDQALAAIEALNGKHKIEGSSVPLVVKWADTEKERQARKAQKAQSQLSHIPNASPMQQHSSVFGALQMGYMPQYNGFGYQPTGTYGLMQYPLSPMQNQGPFQNMVQPLNQGNSIRGVNPEVSPSSVQRSFNAMQLGSPYPAMPGMQYPGSYPGGPMGNRHLGNSHNPIKVPNSNANSTVSSSPSSNAGGQVEGPPGANLFIYHIPQEYGDQELSSAFQSFGRVVSAKVFVDKATGVSKCFGFVSYDSPASAQAAINRMNGYQLGGKKLKVQLKRENNTKHSSKPF

SEQ ID NO: 35914 - DNA, 1063 bp, Zea mays subsp. mays; identical to SEQ ID NO: 22140
  misc_feature (1)..(1063): Ceres Seq. ID no. 13586635

SEQ ID NO: 35915 - protein, 292 aa, Zea mays subsp. mays; identical to SEQ ID NO: 22141
  peptide (1)..(292): Ceres Seq. ID no. 13586636
  misc_feature (154)..(276): Pfam Name: Pfam Description:  alpha/beta hydrolase fold
  misc_feature (94)..(275): NCBI GI NO: 34902880 NR Description: unnamed protein product
  misc_feature (94)..(277): NCBI GI NO: 34897302 NR Description: putative hydrolase
  misc_feature (97)..(276): NCBI GI NO: 25044843 NR Description: epoxide hydrolase [Ananas comosus]
  misc_feature (124)..(276): NCBI GI NO: 18411917 NR Description: epoxide hydrolase, putative [Arabidopsis thaliana]
  misc_feature (97)..(276): NCBI GI NO: 7489256 NR Description: probable epoxide hydrolase (EC 3
  misc_feature (97)..(277): NCBI GI NO: 15230018 NR Description: epoxide hydrolase, putative [Arabidopsis thaliana]
  misc_feature (94)..(267): NCBI GI NO: 34902882 NR Description: unnamed protein product
  misc_feature (94)..(276): NCBI GI NO: 34897298 NR Description: putative hydrolase
  misc_feature (99)..(276): NCBI GI NO: 15225781 NR Description: epoxide hydrolase (ATsEH) [Arabidopsis thaliana]
  misc_feature (99)..(276): NCBI GI NO: 16226396 NR Description: At2g26740/F18A8.11 [Arabidopsis thaliana]

SEQ ID NO: 35916 - protein, 243 aa, Zea mays subsp. mays; identical to SEQ ID NO: 22142
  peptide (1)..(243): Ceres Seq. ID no. 13586637
  misc_feature (105)..(227): Pfam Name: Pfam Description:  alpha/beta hydrolase fold
  misc_feature (45)..(226): NCBI GI NO: 34902880 NR Description: unnamed protein product
  misc_feature (45)..(228): NCBI GI NO: 34897302 NR Description: putative hydrolase
  misc_feature (48)..(227): NCBI GI NO: 25044843 NR Description: epoxide hydrolase [Ananas comosus]
  misc_feature (75)..(227): NCBI GI NO: 18411917 NR Description: epoxide hydrolase, putative [Arabidopsis thaliana]
  misc_feature (48)..(227): NCBI GI NO: 7489256 NR Description: probable epoxide hydrolase (EC 3
  misc_feature (48)..(228): NCBI GI NO: 15230018 NR Description: epoxide hydrolase, putative [Arabidopsis thaliana]
  misc_feature (45)..(218): NCBI GI NO: 34902882 NR Description: unnamed protein product
  misc_feature (45)..(227): NCBI GI NO: 34897298 NR Description: putative hydrolase
  misc_feature (50)..(227): NCBI GI NO: 15225781 NR Description: epoxide hydrolase (ATsEH) [Arabidopsis thaliana]
  misc_feature (50)..(227): NCBI GI NO: 16226396 NR Description: At2g26740/F18A8.11 [Arabidopsis thaliana]

SEQ ID NO: 35917 - protein, 215 aa, Zea mays subsp. mays; identical to SEQ ID NO: 22143
  peptide (1)..(215): Ceres Seq. ID no. 13586638
  misc_feature (77)..(199): Pfam Name: Pfam Description:  alpha/beta hydrolase fold
  misc_feature (17)..(198): NCBI GI NO: 34902880 NR Description: unnamed protein product
  misc_feature (17)..(200): NCBI GI NO: 34897302 NR Description: putative hydrolase
  misc_feature (20)..(199): NCBI GI NO: 25044843 NR Description: epoxide hydrolase [Ananas comosus]
  misc_feature (47)..(199): NCBI GI NO: 18411917 NR Description: epoxide hydrolase, putative [Arabidopsis thaliana]
  misc_feature (20)..(199): NCBI GI NO: 7489256 NR Description: probable epoxide hydrolase (EC 3
  misc_feature (20)..(200): NCBI GI NO: 15230018 NR Description: epoxide hydrolase, putative [Arabidopsis thaliana]
  misc_feature (17)..(190): NCBI GI NO: 34902882 NR Description: unnamed protein product
  misc_feature (17)..(199): NCBI GI NO: 34897298 NR Description: putative hydrolase
  misc_feature (22)..(199): NCBI GI NO: 15225781 NR Description: epoxide hydrolase (ATsEH) [Arabidopsis thaliana]
  misc_feature (22)..(199): NCBI GI NO: 16226396 NR Description: At2g26740/F18A8.11 [Arabidopsis thaliana]

SEQ ID NO: 35918 - DNA, 2385 bp, Zea mays subsp. mays
  misc_feature (1)..(2385): Ceres Seq. ID no. 12436349
aaaacattgcctccaaaaaaaatataaaaaaaacggagccagcccaaaccgcgcgccagaaatccccgagagctgaacagagctcagagctgccatgcgttccccgagccaccacgaccgagacctcctcctcctcctcctcgtactcgcggcggccgtcggttcccgcagcgacgatacgcacgcgtgccggtcgcggccgtacctctgcggcggcgtgaacatcagctacccgttccacctcgccagcgacgccacggcggtcccgggccacgatggcgagtcctactgcggctacccgggcctcgccgtcagctgcgacggcggcaacaaggccgtcctgaacctcggcgaccacgactacacagtctcgcgcatagactacgccaaccagaccgtctcgctcgccgacgcgggggccagcagcggatgccccgtcgtggaccacaacgtgacgatcccgcaggacgtccggctgtccctcctccacagcatcgactacctcctcttcttcgccggctgctccttcggcccgggcgccggccccgaccccaggccgccgaagccgccgtccatcgagcccgtcacctgcggcgagtctggcgacctgggcaagccggccgccgccatgacgttcgtgctcccgcgcgccgaggtgcctccgggcgactgggcgagcgcgtgccggaaggtcttccaggtgccggtgctcaagggctccgtcccgcccgacgcccagcacgacccgctgtggacgagcggcggcgggtacggcgaggcgctccgcgcggggttccagctcggctgggaccgcggctctggcccgtgcgcccgatgcgagcagtccggcggcaagtgcgggtacggccgcgccggcgagttcctgggatgcctctgcgccggcagccgcgtggacggcggcggcgactgcagtaagatgtcagccggctcctccgatctgccttggttcgggccaaaaagtaaaacagcagttattgccggtgtcgcggctggcgctggtgttgcaatacttgctgctgccatttttttgttcgtgaggcgcaagagaaagcagaagagagtggtcaactcgtcttcgaagctcctcaagtacagcggctctggcgggaccccgcgttcacgggtcggtgacatggagtccggcagcatcgaggacccgcctacgcatctcttcacctacgaggagcttgaggaggcgaccagttgcttcgacgaaaacagagagctcggtgacggtggcttcggcaccgtctacaaagggtacctcaaggacgggcgcgtggtggcggtgaaacggctgtacaacaacagctaccggcgcgtggagcagttccagaacgaggcggccatcctgtcggggctacgccaccccaacctcgtcatgttctacggctgcacgtccagccagagccgcgagctgctgctggtgtacgagttcgtggccaacggcacggtcgccgaccacctgcacgggcagcgggccgccgagcgcgccctcccgtggccgctccgcctcggcgtcgccgtggagtccgccgcggcgctcacctacctgcacgccatcgagccgcccgtggtgcaccgcgacgtcaagaccaccaacatcctcctggacgccgactaccacgtcaaggtcgccgacttcggcctctcccgcctcttccccctcgacgtcacgcacgtctccaccgctccccagggcacgccagggtatgtagatccagagtaccaccagtgctaccagctgacggacaagagcgacgtgtacagtttcggagtggtcctggtggagctcatctcgtccaagcccgccgtcgacgtcacccggcaccgcaacgagatcaacctggccggcatggccatcagcaagatccagaagtgccagctggaggagctcgtcgacatcgacctgggctacgagtccgacccggccaccaagaaggcgatgacggcggtcgccgagctggccttccgttgcctgcagcagaacggcgagatgcgcccgccgatcaaggaggtgctcgaggtgctcaggagcattcagggcgaataccagacggggaaggacggagacaaaaacaagggacggacccctctctcccaccacggttcatgctccgtgggagagcagggccacgacgcccaacaccagcagggactagaccagtcggtcagtgtcaaggactggagaccggagaagttgctgctgctgtgtgactgtgaggcatgccagattgcctgtcatttgttttcaggcttcgcggtccggttcctgctgatgtatatatttgttttgttgggtctgtcagagctgagggaatgtacatatatgtgaaagagtggtgaatgatatatataatacac

SEQ ID NO: 35919 - protein, 753 aa, Zea mays subsp. mays
  peptide (1)..(753): Ceres Seq. ID no. 12436350
  misc_feature (6)..(674): NCBI GI NO: 34911340 NR Description: P0034C09.1
  misc_feature (230)..(659): NCBI GI NO: 24417464 NR Description: unknown [Arabidopsis thaliana]
  misc_feature (28)..(126): NCBI GI NO: 24417464 NR Description: unknown [Arabidopsis thaliana]
  misc_feature (310)..(657): NCBI GI NO: 25402857 NR Description: protein F15H18.11
  misc_feature (192)..(269): NCBI GI NO: 25402857 NR Description: protein F15H18.11
  misc_feature (209)..(680): NCBI GI NO: 15408730 NR Description: P0443D08.12
  misc_feature (305)..(674): NCBI GI NO: 15408726 NR Description: P0443D08.8
  misc_feature (66)..(657): NCBI GI NO: 10177797 NR Description: contains similarity to proteinkinase~gene_id:MXA21
  misc_feature (62)..(659): NCBI GI NO: 30697422 NR Description: serine/threonine protein kinase family
  misc_feature (62)..(659): NCBI GI NO: 12597754 NR Description: protein kinase, putative [Arabidopsis thaliana]
MRSPSHHDRDLLLLLLVLAAAVGSRSDDTHACRSRPYLCGGVNISYPFHLASDATAVPGHDGESYCGYPGLAVSCDGGNKAVLNLGDHDYTVSRIDYANQTVSLADAGASSGCPVVDHNVTIPQDVRLSLLHSIDYLLFFAGCSFGPGAGPDPRPPKPPSIEPVTCGESGDLGKPAAAMTFVLPRAEVPPGDWASACRKVFQVPVLKGSVPPDAQHDPLWTSGGGYGEALRAGFQLGWDRGSGPCARCEQSGGKCGYGRAGEFLGCLCAGSRVDGGGDCSKMSAGSSDLPWFGPKSKTAVIAGVAAGAGVAILAAAIFLFVRRKRKQKRVVNSSSKLLKYSGSGGTPRSRVGDMESGSIEDPPTHLFTYEELEEATSCFDENRELGDGGFGTVYKGYLKDGRVVAVKRLYNNSYRRVEQFQNEAAILSGLRHPNLVMFYGCTSSQSRELLLVYEFVANGTVADHLHGQRAAERALPWPLRLGVAVESAAALTYLHAIEPPVVHRDVKTTNILLDADYHVKVADFGLSRLFPLDVTHVSTAPQGTPGYVDPEYHQCYQLTDKSDVYSFGVVLVELISSKPAVDVTRHRNEINLAGMAISKIQKCQLEELVDIDLGYESDPATKKAMTAVAELAFRCLQQNGEMRPPIKEVLEVLRSIQGEYQTGKDGDKNKGRTPLSHHGSCSVGEQGHDAQHQQGLDQSVSVKDWRPEKLLLLCDCEACQIACHLFSGFAVRFLLMYIFVLLGLSELRECTYM

SEQ ID NO: 35920 - protein, 575 aa, Zea mays subsp. mays
  peptide (1)..(575): Ceres Seq. ID no. 12436351
  misc_feature (1)..(496): NCBI GI NO: 34911340 NR Description: P0034C09.1
  misc_feature (52)..(481): NCBI GI NO: 24417464 NR Description: unknown [Arabidopsis thaliana]
  misc_feature (132)..(479): NCBI GI NO: 25402857 NR Description: protein F15H18.11
  misc_feature (14)..(91): NCBI GI NO: 25402857 NR Description: protein F15H18.11
  misc_feature (31)..(502): NCBI GI NO: 15408730 NR Description: P0443D08.12
  misc_feature (127)..(496): NCBI GI NO: 15408726 NR Description: P0443D08.8
  misc_feature (1)..(479): NCBI GI NO: 10177797 NR Description: contains similarity to proteinkinase~gene_id:MXA21
  misc_feature (1)..(481): NCBI GI NO: 30697422 NR Description: serine/threonine protein kinase family
  misc_feature (1)..(481): NCBI GI NO: 12597754 NR Description: protein kinase, putative [Arabidopsis thaliana]
  misc_feature (1)..(481): NCBI GI NO: 25404646 NR Description: probable wall-associated kinase T4O24.5
MTFVLPRAEVPPGDWASACRKVFQVPVLKGSVPPDAQHDPLWTSGGGYGEALRAGFQLGWDRGSGPCARCEQSGGKCGYGRAGEFLGCLCAGSRVDGGGDCSKMSAGSSDLPWFGPKSKTAVIAGVAAGAGVAILAAAIFLFVRRKRKQKRVVNSSSKLLKYSGSGGTPRSRVGDMESGSIEDPPTHLFTYEELEEATSCFDENRELGDGGFGTVYKGYLKDGRVVAVKRLYNNSYRRVEQFQNEAAILSGLRHPNLVMFYGCTSSQSRELLLVYEFVANGTVADHLHGQRAAERALPWPLRLGVAVESAAALTYLHAIEPPVVHRDVKTTNILLDADYHVKVADFGLSRLFPLDVTHVSTAPQGTPGYVDPEYHQCYQLTDKSDVYSFGVVLVELISSKPAVDVTRHRNEINLAGMAISKIQKCQLEELVDIDLGYESDPATKKAMTAVAELAFRCLQQNGEMRPPIKEVLEVLRSIQGEYQTGKDGDKNKGRTPLSHHGSCSVGEQGHDAQHQQGLDQSVSVKDWRPEKLLLLCDCEACQIACHLFSGFAVRFLLMYIFVLLGLSELRECTYM

SEQ ID NO: 35921 - protein, 472 aa, Zea mays subsp. mays
  peptide (1)..(472): Ceres Seq. ID no. 12436352
  misc_feature (1)..(393): NCBI GI NO: 34911340 NR Description: P0034C09.1
  misc_feature (1)..(378): NCBI GI NO: 24417464 NR Description: unknown [Arabidopsis thaliana]
  misc_feature (29)..(376): NCBI GI NO: 25402857 NR Description: protein F15H18.11
  misc_feature (1)..(399): NCBI GI NO: 15408730 NR Description: P0443D08.12
  misc_feature (24)..(393): NCBI GI NO: 15408726 NR Description: P0443D08.8
  misc_feature (1)..(376): NCBI GI NO: 10177797 NR Description: contains similarity to proteinkinase~gene_id:MXA21
  misc_feature (1)..(378): NCBI GI NO: 30697422 NR Description: serine/threonine protein kinase family
  misc_feature (1)..(378): NCBI GI NO: 12597754 NR Description: protein kinase, putative [Arabidopsis thaliana]
  misc_feature (1)..(378): NCBI GI NO: 25404646 NR Description: probable wall-associated kinase T4O24.5
  misc_feature (1)..(376): NCBI GI NO: 22327431 NR Description: protein kinase - like protein
MSAGSSDLPWFGPKSKTAVIAGVAAGAGVAILAAAIFLFVRRKRKQKRVVNSSSKLLKYSGSGGTPRSRVGDMESGSIEDPPTHLFTYEELEEATSCFDENRELGDGGFGTVYKGYLKDGRVVAVKRLYNNSYRRVEQFQNEAAILSGLRHPNLVMFYGCTSSQSRELLLVYEFVANGTVADHLHGQRAAERALPWPLRLGVAVESAAALTYLHAIEPPVVHRDVKTTNILLDADYHVKVADFGLSRLFPLDVTHVSTAPQGTPGYVDPEYHQCYQLTDKSDVYSFGVVLVELISSKPAVDVTRHRNEINLAGMAISKIQKCQLEELVDIDLGYESDPATKKAMTAVAELAFRCLQQNGEMRPPIKEVLEVLRSIQGEYQTGKDGDKNKGRTPLSHHGSCSVGEQGHDAQHQQGLDQSVSVKDWRPEKLLLLCDCEACQIACHLFSGFAVRFLLMYIFVLLGLSELRECTYM

SEQ ID NO: 35922 - DNA, 925 bp, Zea mays subsp. mays
  misc_feature (1)..(925): Ceres Seq. ID no. 12436172
  misc_feature (511)..(511): n is a, c, t, g, unknown, or other
tattagctataattgatgtttagtacatatagtataaaaggcaaggtttttgttacaaagaaaatattctctgtttgtgtgtgtgtttgcttaagtgttatggattattcattttttgtaaatttagtgatacttttatttgacctgctgcacacctagctaatagttcatttctctgttggcatagcaagaagtggtacacaggttcatttggacaaggaaactcttattatgcaagaaattttcccatgcccaaaaaggattcttcagcaggtggagcttcgaagttaccaaaagaatatgcagaaccatgggactatagccatgattatcctgttactctcccactaaggaagccctactctggaaatcctgaaattctggatgaggaagaatttggagaatcttctgccagcaggacccaagatgatgaattatctgcagcagagcagcttggattaatggatatgtcgtcggaatcacagttcctcttcttccagttgccatcctntcttcctttaccgaggcagccacaatcagttgctgaccctaacgaagtccgcgatgagaaacgtgagggcatgaggccatcatcgcacaatggctcgaaactcaaagaggttcctgaaggctatatggggaaaatgctcgtatataagagtggtaaagtgaagatgaagataggagacactctctttgatgtttcatttggctcgaattgcatgttttcccaggaggttgcagcaatcaacatcagagaaaaacattgctgtacggtgggagagatcagcaagcgtgcaatcatcaccccagatattaactacatgttgggttctgttgacaagatggaagaatagtccattggtttctttcgcgcaaaccatatagaccatattatgccattacaagatagttttgctttctt

SEQ ID NO: 35923 - protein, 202 aa, Zea mays subsp. mays
  peptide (1)..(202): Ceres Seq. ID no. 12436173
  misc_feature (85)..(190): Pfam Name: Pfam Description:  RNA polymerase III RPC4
  misc_feature (1)..(201): NCBI GI NO: 21740741 NR Description: OSJNBa0072K14.6
  misc_feature (1)..(200): NCBI GI NO: 15242400 NR Description: putative protein; protein id: At5g09380.1
  misc_feature (17)..(153): NCBI GI NO: 7486060 NR Description: hypothetical protein F24A6
  misc_feature (17)..(153): NCBI GI NO: 15234965 NR Description: hypothetical protein; protein id: At4g25180.1
  misc_feature (152)..(201): NCBI GI NO: 7486060 NR Description: hypothetical protein F24A6
  misc_feature (152)..(201): NCBI GI NO: 15234965 NR Description: hypothetical protein; protein id: At4g25180.1
  misc_feature (46)..(194): NCBI GI NO: 34907504 NR Description: B1099D03.22
  misc_feature (62)..(194): NCBI GI NO: 34874432 NR Description: similar to DNA-directed RNA polymerase III 47 kDapolypeptide
  misc_feature (62)..(194): NCBI GI NO: 4502437 NR Description: RNA polymerase III 53 kDa subunit RPC4
  misc_feature (62)..(194): NCBI GI NO: 29429159 NR Description: DNA-directed RNA polymerase III 47 kDa polypeptide
  misc_feature (88)..(88): Xaa is any aa, unknown or other
MPKKDSSAGGASKLPKEYAEPWDYSHDYPVTLPLRKPYSGNPEILDEEEFGESSASRTQDDELSAAEQLGLMDMSSESQFLFFQLPSXLPLPRQPQSVADPNEVRDEKREGMRPSSHNGSKLKEVPEGYMGKMLVYKSGKVKMKIGDTLFDVSFGSNCMFSQEVAAINIREKHCCTVGEISKRAIITPDINYMLGSVDKMEE

SEQ ID NO: 35924 - protein, 131 aa, Zea mays subsp. mays
  peptide (1)..(131): Ceres Seq. ID no. 12436174
  misc_feature (14)..(119): Pfam Name: Pfam Description:  RNA polymerase III RPC4
  misc_feature (1)..(130): NCBI GI NO: 21740741 NR Description: OSJNBa0072K14.6
  misc_feature (1)..(129): NCBI GI NO: 15242400 NR Description: putative protein; protein id: At5g09380.1
  misc_feature (1)..(82): NCBI GI NO: 7486060 NR Description: hypothetical protein F24A6
  misc_feature (1)..(82): NCBI GI NO: 15234965 NR Description: hypothetical protein; protein id: At4g25180.1
  misc_feature (81)..(130): NCBI GI NO: 7486060 NR Description: hypothetical protein F24A6
  misc_feature (81)..(130): NCBI GI NO: 15234965 NR Description: hypothetical protein; protein id: At4g25180.1
  misc_feature (1)..(123): NCBI GI NO: 34907504 NR Description: B1099D03.22
  misc_feature (1)..(123): NCBI GI NO: 34874432 NR Description: similar to DNA-directed RNA polymerase III 47 kDapolypeptide
  misc_feature (1)..(123): NCBI GI NO: 4502437 NR Description: RNA polymerase III 53 kDa subunit RPC4
  misc_feature (1)..(123): NCBI GI NO: 29429159 NR Description: DNA-directed RNA polymerase III 47 kDa polypeptide
  misc_feature (17)..(17): Xaa is any aa, unknown or other
MDMSSESQFLFFQLPSXLPLPRQPQSVADPNEVRDEKREGMRPSSHNGSKLKEVPEGYMGKMLVYKSGKVKMKIGDTLFDVSFGSNCMFSQEVAAINIREKHCCTVGEISKRAIITPDINYMLGSVDKMEE

SEQ ID NO: 35925 - protein, 129 aa, Zea mays subsp. mays
  peptide (1)..(129): Ceres Seq. ID no. 12436175
  misc_feature (12)..(117): Pfam Name: Pfam Description:  RNA polymerase III RPC4
  misc_feature (1)..(128): NCBI GI NO: 21740741 NR Description: OSJNBa0072K14.6
  misc_feature (1)..(127): NCBI GI NO: 15242400 NR Description: putative protein; protein id: At5g09380.1
  misc_feature (1)..(80): NCBI GI NO: 7486060 NR Description: hypothetical protein F24A6
  misc_feature (1)..(80): NCBI GI NO: 15234965 NR Description: hypothetical protein; protein id: At4g25180.1
  misc_feature (79)..(128): NCBI GI NO: 7486060 NR Description: hypothetical protein F24A6
  misc_feature (79)..(128): NCBI GI NO: 15234965 NR Description: hypothetical protein; protein id: At4g25180.1
  misc_feature (1)..(121): NCBI GI NO: 34907504 NR Description: B1099D03.22
  misc_feature (1)..(121): NCBI GI NO: 34874432 NR Description: similar to DNA-directed RNA polymerase III 47 kDapolypeptide
  misc_feature (1)..(121): NCBI GI NO: 4502437 NR Description: RNA polymerase III 53 kDa subunit RPC4
  misc_feature (1)..(121): NCBI GI NO: 29429159 NR Description: DNA-directed RNA polymerase III 47 kDa polypeptide
  misc_feature (15)..(15): Xaa is any aa, unknown or other
MSSESQFLFFQLPSXLPLPRQPQSVADPNEVRDEKREGMRPSSHNGSKLKEVPEGYMGKMLVYKSGKVKMKIGDTLFDVSFGSNCMFSQEVAAINIREKHCCTVGEISKRAIITPDINYMLGSVDKMEE

SEQ ID NO: 35926 - DNA, 423 bp, Zea mays subsp. mays
  misc_feature (1)..(423): Ceres Seq. ID no. 3114586
aaaatatatatatcctcgctttccttcccgtcgccgcctgaaaccgctgcgctctcggcttggatagcaagggtctcagtctctcagagggagcaagaagaggatctgagggtgagatggcgatcgaccacgagtccccgttcaaggagctccgcctcaagaaccgaaggatcatgggcggcggcggccctgaccctgagccggaggaggaggaggaggagggcgtcacggcggcgtacgcggagcggtggccgcggtggctgcagccgctgctgtccgcgcgcttcttcgcgcagtgcaggacgcacagcgactccaaccgcagcggcgaatgcaacatgttctgcctggactgctcggccgccgggggcacgggcacgggcgcgggcgcgctctgctcgctgtgcctggcgcagcacgggc

SEQ ID NO: 35927 - protein, 141 aa, Zea mays subsp. mays
  peptide (1)..(141): Ceres Seq. ID no. 3114587
KIYISSLSFPSPPETAALSAWIARVSVSQREQEEDLRVRWRSTTSPRSRSSASRTEGSWAAAALTLSRRRRRRRASRRRTRSGGRGGCSRCCPRASSRSAGRTATPTAAANATCSAWTARPPGARARARARSARCAWRSTG

SEQ ID NO: 35928 - protein, 102 aa, Zea mays subsp. mays
  peptide (1)..(102): Ceres Seq. ID no. 3114588
  misc_feature (43)..(101): Pfam Name: Pfam Description:  Protein of unknown function, DUF597
  misc_feature (1)..(101): NCBI GI NO: 37537092 NR Description: unknown protein
  misc_feature (1)..(101): NCBI GI NO: 15236696 NR Description: putative protein; protein id: At4g17900.1
  misc_feature (43)..(101): NCBI GI NO: 38346725 NR Description: OSJNBa0086O06.23
  misc_feature (45)..(101): NCBI GI NO: 18398555 NR Description: expressed protein; protein id: At1g32700
  misc_feature (45)..(101): NCBI GI NO: 6714272 NR Description: F6N18.8 [Arabidopsis thaliana]
  misc_feature (34)..(101): NCBI GI NO: 5441885 NR Description: Similar to Arabidopsis thaliana BAC genomicsequence
  misc_feature (45)..(101): NCBI GI NO: 21554139 NR Description: unknown [Arabidopsis thaliana]
  misc_feature (44)..(101): NCBI GI NO: 15237491 NR Description: putative protein; protein id: At5g46710
  misc_feature (27)..(101): NCBI GI NO: 18394936 NR Description: expressed protein; protein id: At1g21000
  misc_feature (27)..(101): NCBI GI NO: 21537073 NR Description: unknown [Arabidopsis thaliana]
MAIDHESPFKELRLKNRRIMGGGGPDPEPEEEEEEGVTAAYAERWPRWLQPLLSARFFAQCRTHSDSNRSGECNMFCLDCSAAGGTGTGAGALCSLCLAQHG

SEQ ID NO: 35929 - protein, 83 aa, Zea mays subsp. mays
  peptide (1)..(83): Ceres Seq. ID no. 3114589
  misc_feature (24)..(82): Pfam Name: Pfam Description:  Protein of unknown function, DUF597
  misc_feature (1)..(82): NCBI GI NO: 37537092 NR Description: unknown protein
  misc_feature (1)..(82): NCBI GI NO: 15236696 NR Description: putative protein; protein id: At4g17900.1
  misc_feature (24)..(82): NCBI GI NO: 38346725 NR Description: OSJNBa0086O06.23
  misc_feature (26)..(82): NCBI GI NO: 18398555 NR Description: expressed protein; protein id: At1g32700
  misc_feature (26)..(82): NCBI GI NO: 6714272 NR Description: F6N18.8 [Arabidopsis thaliana]
  misc_feature (15)..(82): NCBI GI NO: 5441885 NR Description: Similar to Arabidopsis thaliana BAC genomicsequence
  misc_feature (26)..(82): NCBI GI NO: 21554139 NR Description: unknown [Arabidopsis thaliana]
  misc_feature (25)..(82): NCBI GI NO: 15237491 NR Description: putative protein; protein id: At5g46710
  misc_feature (8)..(82): NCBI GI NO: 18394936 NR Description: expressed protein; protein id: At1g21000
  misc_feature (8)..(82): NCBI GI NO: 21537073 NR Description: unknown [Arabidopsis thaliana]
MGGGGPDPEPEEEEEEGVTAAYAERWPRWLQPLLSARFFAQCRTHSDSNRSGECNMFCLDCSAAGGTGTGAGALCSLCLAQHG

SEQ ID NO: 35930 - DNA, 1315 bp, Zea mays subsp. mays
  misc_feature (1)..(1315): Ceres Seq. ID no. 13635214
  misc_feature (398)..(398): n is a, c, t, g, unknown, or other
  misc_feature (397)..(397): n is a, c, t, g, unknown, or other
  misc_feature (399)..(399): n is a, c, t, g, unknown, or other
gcatcccatctgctatcccttggttgccgcwkcctccaaagccactcccaaacccccgcttccagaaccttctcgaarctcyccgcckcytcctcyactmgcwccgatggcgaaggaaccratgcgcgtgctcgtcactggmgccgcaggrcaaattggatatgcyctkgttcccatgattgctaggggwgttatgcttggtgcagaccagcctgttattctgcacatgcttgayattccgccagcagctgaagcccttawtggtgttaagatggagtyggttgatgctgcrtttcctcttctgaagggagtygttgckacaactgatgttgtggaagcgctgcactggsgtsaatgtggccgtcatgswtggtggattccccaggaaggagggaannnaaaggaaaagatgttatgtckaaaaaatgtttcaatctacaaawcccaagcatctgctccttgaagcccatgcrgcycccaactgcaaggttctggtggttgccaacccagcraacaccaatgctcttatcttgaaagaatttgctccatcwattccwgakargaacgttacttgcctgacccgkctggaccacaacagggctcttggccagatttctgagagacttartgtccaagtyagtgatgtgaagaatgttatcatctggggtaaccactcgtccwctcagtaccctgatgttaaccatgccacagtgaagacttccactggggagaagcctgttcgtgagcttgtctgctgatgaygagtggctyaatggygaattcatcacaactgtccaacagcgtggtgctgcaatcatyaaagcgagaaagttctccagygctctctcrgctgctagctctgcttgtgaccayattcgtgattgggttcttggaacmcctgagggkacatttgtttccatgggtgtgtaytcygatggttcatayggtgttccttcyggactyatttaytcattcccagtaacatgcagtgggtgggtgaatggaaaatcgttcaaggcctcccgatygaygagytctcaaggaagaagawgggatgccactgcccaagagctgmcggargagaagacgcttgcttactcatgcctcgagtaaattctaccacayccagagagcaattgccaccccaatgttttgaataaaaaaagaaactccaactcsattcatagattctcwctcagaactgctgcacgtcgcagtgcaggcgtgttgctggcttcgcccacgcttctttttttgcctgtgatttgcgacgacatttatatttattgaaatcttgcagaatcgcttgacgatg

SEQ ID NO: 35931 - protein, 153 aa, Zea mays subsp. mays
  peptide (1)..(153): Ceres Seq. ID no. 15220341
  misc_feature (38)..(152): Pfam Name: Pfam Description:  lactate/malate dehydrogenase
  misc_feature (36)..(152): NCBI GI NO: 18202485 NR Description: Malate dehydrogenase, cytoplasmic
  misc_feature (36)..(152): NCBI GI NO: 37535388 NR Description: cytoplasmic malate dehydrogenase
  misc_feature (36)..(152): NCBI GI NO: 10334493 NR Description: cytosolic malate dehydrogenase [Cicer arietinum]
  misc_feature (36)..(152): NCBI GI NO: 15982948 NR Description: NAD-dependent malate dehydrogenase
  misc_feature (36)..(152): NCBI GI NO: 10798652 NR Description: malate dehydrogenase [Nicotiana tabacum]
  misc_feature (36)..(152): NCBI GI NO: 11133373 NR Description: Malate dehydrogenase, cytoplasmic
  misc_feature (36)..(152): NCBI GI NO: 12229778 NR Description: Malate dehydrogenase, cytoplasmic
  misc_feature (36)..(152): NCBI GI NO: 15219721 NR Description: malate dehydrogenase, cytosolic, putative
  misc_feature (36)..(152): NCBI GI NO: 15239843 NR Description: malate dehydrogenase, cytosolic, putative
  misc_feature (36)..(152): NCBI GI NO: 21593565 NR Description: cytosolic malate dehydrogenase
  misc_feature (10)..(10): Xaa is any aa, unknown or other
  misc_feature (11)..(11): Xaa is any aa, unknown or other
  misc_feature (26)..(26): Xaa is any aa, unknown or other
  misc_feature (27)..(27): Xaa is any aa, unknown or other
  misc_feature (29)..(29): Xaa is any aa, unknown or other
  misc_feature (30)..(30): Xaa is any aa, unknown or other
  misc_feature (32)..(32): Xaa is any aa, unknown or other
  misc_feature (33)..(33): Xaa is any aa, unknown or other
  misc_feature (34)..(34): Xaa is any aa, unknown or other
  misc_feature (40)..(40): Xaa is any aa, unknown or other
  misc_feature (47)..(47): Xaa is any aa, unknown or other
  misc_feature (50)..(50): Xaa is any aa, unknown or other
  misc_feature (55)..(55): Xaa is any aa, unknown or other
  misc_feature (56)..(56): Xaa is any aa, unknown or other
  misc_feature (63)..(63): Xaa is any aa, unknown or other
  misc_feature (78)..(78): Xaa is any aa, unknown or other
  misc_feature (87)..(87): Xaa is any aa, unknown or other
  misc_feature (93)..(93): Xaa is any aa, unknown or other
  misc_feature (97)..(97): Xaa is any aa, unknown or other
  misc_feature (104)..(104): Xaa is any aa, unknown or other
  misc_feature (106)..(106): Xaa is any aa, unknown or other
  misc_feature (117)..(117): Xaa is any aa, unknown or other
  misc_feature (118)..(118): Xaa is any aa, unknown or other
  misc_feature (123)..(123): Xaa is any aa, unknown or other
  misc_feature (132)..(132): Xaa is any aa, unknown or other
  misc_feature (133)..(133): Xaa is any aa, unknown or other
  misc_feature (140)..(140): Xaa is any aa, unknown or other
  misc_feature (148)..(148): Xaa is any aa, unknown or other
HPICYPLVAXXSKATPKPPLPEPSRXXPXXPXXXPMAKEXMRVLVTXAAXQIGYXXVPMIARXVMLGADQPVILHMLXIPPAAEALXGVKMEXVDAXFPLLKGXVXTTDVVEALHWXXCGRHXWWIPQEGGXXKEKMLCXKNVSIYKXQASAP

SEQ ID NO: 35932 - protein, 143 aa, Zea mays subsp. mays
  peptide (1)..(143): Ceres Seq. ID no. 15220342
  misc_feature (85)..(142): Pfam Name: Pfam Description:  lactate/malate dehydrogenase
  misc_feature (6)..(142): NCBI GI NO: 18202485 NR Description: Malate dehydrogenase, cytoplasmic
  misc_feature (6)..(142): NCBI GI NO: 37535388 NR Description: cytoplasmic malate dehydrogenase
  misc_feature (6)..(142): NCBI GI NO: 21593565 NR Description: cytosolic malate dehydrogenase
  misc_feature (6)..(142): NCBI GI NO: 15239843 NR Description: malate dehydrogenase, cytosolic, putative
  misc_feature (6)..(142): NCBI GI NO: 15982948 NR Description: NAD-dependent malate dehydrogenase
  misc_feature (6)..(142): NCBI GI NO: 10798652 NR Description: malate dehydrogenase [Nicotiana tabacum]
  misc_feature (6)..(142): NCBI GI NO: 10334493 NR Description: cytosolic malate dehydrogenase [Cicer arietinum]
  misc_feature (6)..(142): NCBI GI NO: 15219721 NR Description: malate dehydrogenase, cytosolic, putative
  misc_feature (6)..(142): NCBI GI NO: 11133373 NR Description: Malate dehydrogenase, cytoplasmic
  misc_feature (6)..(142): NCBI GI NO: 12229778 NR Description: Malate dehydrogenase, cytoplasmic
  misc_feature (8)..(8): Xaa is any aa, unknown or other
  misc_feature (9)..(9): Xaa is any aa, unknown or other
  misc_feature (15)..(15): Xaa is any aa, unknown or other
  misc_feature (24)..(24): Xaa is any aa, unknown or other
  misc_feature (25)..(25): Xaa is any aa, unknown or other
  misc_feature (32)..(32): Xaa is any aa, unknown or other
  misc_feature (39)..(39): Xaa is any aa, unknown or other
  misc_feature (49)..(49): Xaa is any aa, unknown or other
  misc_feature (50)..(50): Xaa is any aa, unknown or other
  misc_feature (62)..(62): Xaa is any aa, unknown or other
  misc_feature (75)..(75): Xaa is any aa, unknown or other
  misc_feature (77)..(77): Xaa is any aa, unknown or other
  misc_feature (78)..(78): Xaa is any aa, unknown or other
  misc_feature (79)..(79): Xaa is any aa, unknown or other
  misc_feature (86)..(86): Xaa is any aa, unknown or other
  misc_feature (101)..(101): Xaa is any aa, unknown or other
  misc_feature (104)..(104): Xaa is any aa, unknown or other
  misc_feature (119)..(119): Xaa is any aa, unknown or other
MLWKRCTXXNVAVMXGGFPRKEGXXRKRCYVXKMFQSTXPKHLLLEAHXXPNCKVLVVANPXNTNALILKEFAPXIXXXNVTCLTXLDHNRALGQISERLXVQXSDVKNVIIWGNHSSXQYPDVNHATVKTSTGEKPVRELVC

SEQ ID NO: 35933 - protein, 130 aa, Zea mays subsp. mays
  peptide (1)..(130): Ceres Seq. ID no. 15220343
  misc_feature (72)..(129): Pfam Name: Pfam Description:  lactate/malate dehydrogenase
  misc_feature (1)..(129): NCBI GI NO: 18202485 NR Description: Malate dehydrogenase, cytoplasmic
  misc_feature (1)..(129): NCBI GI NO: 37535388 NR Description: cytoplasmic malate dehydrogenase
  misc_feature (1)..(129): NCBI GI NO: 21593565 NR Description: cytosolic malate dehydrogenase
  misc_feature (1)..(129): NCBI GI NO: 15239843 NR Description: malate dehydrogenase, cytosolic, putative
  misc_feature (1)..(129): NCBI GI NO: 15982948 NR Description: NAD-dependent malate dehydrogenase
  misc_feature (1)..(129): NCBI GI NO: 10798652 NR Description: malate dehydrogenase [Nicotiana tabacum]
  misc_feature (1)..(129): NCBI GI NO: 10334493 NR Description: cytosolic malate dehydrogenase [Cicer arietinum]
  misc_feature (1)..(129): NCBI GI NO: 15219721 NR Description: malate dehydrogenase, cytosolic, putative
  misc_feature (1)..(129): NCBI GI NO: 11133373 NR Description: Malate dehydrogenase, cytoplasmic
  misc_feature (1)..(129): NCBI GI NO: 12229778 NR Description: Malate dehydrogenase, cytoplasmic
  misc_feature (2)..(2): Xaa is any aa, unknown or other
  misc_feature (11)..(11): Xaa is any aa, unknown or other
  misc_feature (12)..(12): Xaa is any aa, unknown or other
  misc_feature (19)..(19): Xaa is any aa, unknown or other
  misc_feature (26)..(26): Xaa is any aa, unknown or other
  misc_feature (36)..(36): Xaa is any aa, unknown or other
  misc_feature (37)..(37): Xaa is any aa, unknown or other
  misc_feature (49)..(49): Xaa is any aa, unknown or other
  misc_feature (62)..(62): Xaa is any aa, unknown or other
  misc_feature (64)..(64): Xaa is any aa, unknown or other
  misc_feature (65)..(65): Xaa is any aa, unknown or other
  misc_feature (66)..(66): Xaa is any aa, unknown or other
  misc_feature (73)..(73): Xaa is any aa, unknown or other
  misc_feature (88)..(88): Xaa is any aa, unknown or other
  misc_feature (91)..(91): Xaa is any aa, unknown or other
  misc_feature (106)..(106): Xaa is any aa, unknown or other
MXGGFPRKEGXXRKRCYVXKMFQSTXPKHLLLEAHXXPNCKVLVVANPXNTNALILKEFAPXIXXXNVTCLTXLDHNRALGQISERLXVQXSDVKNVIIWGNHSSXQYPDVNHATVKTSTGEKPVRELVC

SEQ ID NO: 35934 - DNA, 2372 bp, Zea mays subsp. mays
  misc_feature (1)..(2372): Ceres Seq. ID no. 12450487
aacgaattcctcctcgggctcccacctaatcgtgttcgccgcctgcctctcccaaaccctagcaacccacgatcgaacccaaatccgctcctcccacccgaggggattatgcgaaattccccgagattctagcccagcactagcagatcgatccatcgcttgcccacctgccggccaccaacccttgtagtctcagtcaatctgtagattgagactacgatgagcctgtcaccgctcgactcctcctccccgccggccgcggctgcggctgctgctacggaggtgcccctcgccccgggcttccgcttccaccccaccgacgaggagctcgtctcctactacctccgccgccgcgtcctcggccgccgcctccgcgtcgacgccatcgccgagatcgacctctaccgcctcgagccctgggacctcccctccctctcccgcatccgcagccgcgacgcccagtggtacttcttcgcccgtctcgaccgcaaggtcgccggcgctggcgccgggggccggggcggtcccggcaacaggaccaaccgcgctacgccgagggggtactggaagaccacgggcaaggaccgcgaggtgcaccaccgcggcaagcccgtcgggatgaagaagacgctcgtcttccacgccgggagggcgcctaagggcgagaggaccaactgggtcatgcacgagtaccgcctcctcgatgcagacggacctcaggatctgcatgtggtttgtagaatcttccagaagcatgggtctggaccacagaacggtgcgcagtatggtgcaccatacatggaagaggaatgggaagaggatgatgatgctattgagaatggttctacccacgatgcatctggtcaaattgctgcaaccacctgtgctgtagatgaggagtcaaatgaggacgatgagaatgcatattgtgaaacaaacagacctgctcgagtagaaccatctcatctgccttcggttcatgaaatgctcaatccaccagagatggctcctctccaaggtcaatattctaaagagacaagcgatggaagttgttctgatgttgctatttctctggaagagattttgcaggaacctttgtcaaatattagtgtggagaatatgcatagacttgaagggcagaatgccactgatgataacatcagtgttgataacttgttatcagcatatcccacgaaagataatggctacgtaggccagtataacactatgaatgggagtgctccagcagatgaagctcacgcacgctggcctttgagaacatatagtaatcagaattatgtcaatggccctcttgctgatgagttctttgacacagggaatgataccaatggggttgcatattccaggcagcagcaagctgatggctttccagcacctcgccaagttgatgaaagtatggtattttatgatgccccatctgattacaacttggtggatggaaaagatgacttcgtatatctgaacgacattctgaatgagccacttggaaatgaatcgctctttgatggagatgatatgatggcttactttgatgccacagagaatgatttcaagtatgacattttgggctctggtcagggtttggattatccacttgcagacatgccgttgaactttgcccaaaagagtgacaaggaagacaagtttacattcgaagggatctctgaggttccggaagcaaatcctcagtacggtgcatcctcatctggttcacatgaagatctgtatactgatactgaatttctaggtgtgccaacagatgacactgctgataaaacttacggaaatcgcctggccagcatgttaggctctatcccagctccacctgcaatggcctcagaattcccgccgtcaacagggaaatctgctgggatgctttcggctgtcagctcgagctcaattcgttttactgctggtatcatccaacttgatggcctcactttcagcagcggctccggtcagtggcccttgcagaagaatggagacttgagtttgcttgtctcttttgctgtggagggcgacgtggcatccaagctccctgttggtcttgggcgtgctactcggattagcaccgttcccatggtgctgcgcagtggtttttaccttttctttatgtcggccatgattctcttgtttagctacaaagtagggtcgtgtatctacagcaggtaagttgaagttgatggcgcctcttgtccggccagacctgtgggctgtttattttagttcaacacgtggatcattccctcagtgatgggggtatagcagtcgttcgacaccttttttacacatttaccattttgacctgtcaaaacatacagcaataaactttcgaactggtggtggtgatc

SEQ ID NO: 35935 - protein, 657 aa, Zea mays subsp. mays
  peptide (1)..(657): Ceres Seq. ID no. 12450488
  misc_feature (24)..(161): Pfam Name: NAM Pfam Description: No apical meristem
  misc_feature (134)..(612): NCBI GI NO: 29367359 NR Description: NAC-like protein
  misc_feature (185)..(657): NCBI GI NO: 29367359 NR Description: NAC-like protein
  misc_feature (24)..(202): NCBI GI NO: 21105746 NR Description: nam-like protein 9 [Petunia x hybrida]
  misc_feature (408)..(569): NCBI GI NO: 21105746 NR Description: nam-like protein 9 [Petunia x hybrida]
  misc_feature (24)..(427): NCBI GI NO: 15237699 NR Description: putative protein; protein id: At5g04410
  misc_feature (24)..(203): NCBI GI NO: 8567779 NR Description: NAC, putative [Arabidopsis thaliana]
  misc_feature (24)..(203): NCBI GI NO: 18398895 NR Description: expressed protein; protein id: At3g10500.1
  misc_feature (24)..(203): NCBI GI NO: 21593389 NR Description: NAC, putative [Arabidopsis thaliana]
  misc_feature (24)..(419): NCBI GI NO: 6456751 NR Description: NAC2 [Arabidopsis thaliana]
  misc_feature (13)..(287): NCBI GI NO: 21105744 NR Description: nam-like protein 8 [Petunia x hybrida]
MSLSPLDSSSPPAAAAAAATEVPLAPGFRFHPTDEELVSYYLRRRVLGRRLRVDAIAEIDLYRLEPWDLPSLSRIRSRDAQWYFFARLDRKVAGAGAGGRGGPGNRTNRATPRGYWKTTGKDREVHHRGKPVGMKKTLVFHAGRAPKGERTNWVMHEYRLLDADGPQDLHVVCRIFQKHGSGPQNGAQYGAPYMEEEWEEDDDAIENGSTHDASGQIAATTCAVDEESNEDDENAYCETNRPARVEPSHLPSVHEMLNPPEMAPLQGQYSKETSDGSCSDVAISLEEILQEPLSNISVENMHRLEGQNATDDNISVDNLLSAYPTKDNGYVGQYNTMNGSAPADEAHARWPLRTYSNQNYVNGPLADEFFDTGNDTNGVAYSRQQQADGFPAPRQVDESMVFYDAPSDYNLVDGKDDFVYLNDILNEPLGNESLFDGDDMMAYFDATENDFKYDILGSGQGLDYPLADMPLNFAQKSDKEDKFTFEGISEVPEANPQYGASSSGSHEDLYTDTEFLGVPTDDTADKTYGNRLASMLGSIPAPPAMASEFPPSTGKSAGMLSAVSSSSIRFTAGIIQLDGLTFSSGSGQWPLQKNGDLSLLVSFAVEGDVASKLPVGLGRATRISTVPMVLRSGFYLFFMSAMILLFSYKVGSCIYSR

SEQ ID NO: 35936 - protein, 524 aa, Zea mays subsp. mays
  peptide (1)..(524): Ceres Seq. ID no. 12450489
  misc_feature (1)..(479): NCBI GI NO: 29367359 NR Description: NAC-like protein
  misc_feature (52)..(524): NCBI GI NO: 29367359 NR Description: NAC-like protein
  misc_feature (1)..(69): NCBI GI NO: 21105746 NR Description: nam-like protein 9 [Petunia x hybrida]
  misc_feature (275)..(436): NCBI GI NO: 21105746 NR Description: nam-like protein 9 [Petunia x hybrida]
  misc_feature (1)..(294): NCBI GI NO: 15237699 NR Description: putative protein; protein id: At5g04410
  misc_feature (1)..(70): NCBI GI NO: 8567779 NR Description: NAC, putative [Arabidopsis thaliana]
  misc_feature (1)..(70): NCBI GI NO: 18398895 NR Description: expressed protein; protein id: At3g10500.1
  misc_feature (1)..(70): NCBI GI NO: 21593389 NR Description: NAC, putative [Arabidopsis thaliana]
  misc_feature (1)..(286): NCBI GI NO: 6456751 NR Description: NAC2 [Arabidopsis thaliana]
  misc_feature (1)..(154): NCBI GI NO: 21105744 NR Description: nam-like protein 8 [Petunia x hybrida]
MKKTLVFHAGRAPKGERTNWVMHEYRLLDADGPQDLHVVCRIFQKHGSGPQNGAQYGAPYMEEEWEEDDDAIENGSTHDASGQIAATTCAVDEESNEDDENAYCETNRPARVEPSHLPSVHEMLNPPEMAPLQGQYSKETSDGSCSDVAISLEEILQEPLSNISVENMHRLEGQNATDDNISVDNLLSAYPTKDNGYVGQYNTMNGSAPADEAHARWPLRTYSNQNYVNGPLADEFFDTGNDTNGVAYSRQQQADGFPAPRQVDESMVFYDAPSDYNLVDGKDDFVYLNDILNEPLGNESLFDGDDMMAYFDATENDFKYDILGSGQGLDYPLADMPLNFAQKSDKEDKFTFEGISEVPEANPQYGASSSGSHEDLYTDTEFLGVPTDDTADKTYGNRLASMLGSIPAPPAMASEFPPSTGKSAGMLSAVSSSSIRFTAGIIQLDGLTFSSGSGQWPLQKNGDLSLLVSFAVEGDVASKLPVGLGRATRISTVPMVLRSGFYLFFMSAMILLFSYKVGSCIYSR

SEQ ID NO: 35937 - protein, 503 aa, Zea mays subsp. mays
  peptide (1)..(503): Ceres Seq. ID no. 12450490
  misc_feature (1)..(458): NCBI GI NO: 29367359 NR Description: NAC-like protein
  misc_feature (31)..(503): NCBI GI NO: 29367359 NR Description: NAC-like protein
  misc_feature (1)..(48): NCBI GI NO: 21105746 NR Description: nam-like protein 9 [Petunia x hybrida]
  misc_feature (254)..(415): NCBI GI NO: 21105746 NR Description: nam-like protein 9 [Petunia x hybrida]
  misc_feature (1)..(273): NCBI GI NO: 15237699 NR Description: putative protein; protein id: At5g04410
  misc_feature (1)..(49): NCBI GI NO: 8567779 NR Description: NAC, putative [Arabidopsis thaliana]
  misc_feature (1)..(49): NCBI GI NO: 18398895 NR Description: expressed protein; protein id: At3g10500.1
  misc_feature (1)..(49): NCBI GI NO: 21593389 NR Description: NAC, putative [Arabidopsis thaliana]
  misc_feature (1)..(265): NCBI GI NO: 6456751 NR Description: NAC2 [Arabidopsis thaliana]
  misc_feature (1)..(133): NCBI GI NO: 21105744 NR Description: nam-like protein 8 [Petunia x hybrida]
MHEYRLLDADGPQDLHVVCRIFQKHGSGPQNGAQYGAPYMEEEWEEDDDAIENGSTHDASGQIAATTCAVDEESNEDDENAYCETNRPARVEPSHLPSVHEMLNPPEMAPLQGQYSKETSDGSCSDVAISLEEILQEPLSNISVENMHRLEGQNATDDNISVDNLLSAYPTKDNGYVGQYNTMNGSAPADEAHARWPLRTYSNQNYVNGPLADEFFDTGNDTNGVAYSRQQQADGFPAPRQVDESMVFYDAPSDYNLVDGKDDFVYLNDILNEPLGNESLFDGDDMMAYFDATENDFKYDILGSGQGLDYPLADMPLNFAQKSDKEDKFTFEGISEVPEANPQYGASSSGSHEDLYTDTEFLGVPTDDTADKTYGNRLASMLGSIPAPPAMASEFPPSTGKSAGMLSAVSSSSIRFTAGIIQLDGLTFSSGSGQWPLQKNGDLSLLVSFAVEGDVASKLPVGLGRATRISTVPMVLRSGFYLFFMSAMILLFSYKVGSCIYSR

SEQ ID NO: 35938 - DNA, 2703 bp, Zea mays subsp. mays
  misc_feature (1)..(2703): Ceres Seq. ID no. 15180196
tcccccgatgctgtttgaattcctgcgacactgttaccgagaacatcctaatcaaaagtgttgtctagcactctagctgcttctctcggttctcgcgactcccaaacggcaaaacgccaaaaccctagccgcggccattccggaattggccatggaggcgagggcgtcgccgcgtccgtcggtctccatcggtggcggcggcggcttcggagctgggcggggtgacggcagcgccttctcgtttctctcaaaggggtggcgcgaggtgcgggattccgccaccgccgacctgcgcctcatgcgcgcgagggctgattccctccgcacgctcgcggaccgcgagctcgagcacctcctcgcgtccgcctccactgcgctgacctccgcgccgccgccgccgctcgccgcgggggcgcccatagccgagttcgagttcgtgcgcacacggatccagcccaagatctccgaactgcggcgcccggtacgtgtcacaggagcgggagctcggccgcagggtgctcgaggggtgggcgccgcgcggggcggggaaacccgcgcgcgcacgtgtcgacctctctgggatcaccgccatccgcaacgccatcgtctctgaagtggatggcggggagcgctggaggcgcgtggtgtggaacggggaggcggaagaggggaaagaatgggaggtgctcaggatcatacgggacggcatcaaagagttcgagcgccggagccagaccaaggagatttttgagggattgcgcagtaccggcgagctcgtcgagaaattcaagtccagcctgaaatcattcaacatggagtctcaaggatccaaggaaatccaaccactggatctacctgaaatactggcaaatcttgtaaggcagtctgaaccatttttggatcaacttggtgtacggagagatcagtgtgacaaactagtggaggcattgtgtaggaaacaaaatcattccctttcagaaaacacatccttgcctgtaaatgataagtcatcagatgaacttgacttgagaatcgcaagcgtgcttcaaagttctggttatcatgctgatgatggtttctggagtgaacctacaaagtctgaggtctcagacgataaaagacatgtggctatagtcaccacagcaagtttaccatggatgacaggaacagcagttaatccattgttccgtgcagcatatctcgcaaaaggtactagacaagatgtgacactggtagtgccttggctttgcaaatcagaccaagaactggtatacccaaatagcatgacgttcagttcaccagaagagcaggaaacttatataaggagctggctggaggaaagactaggatttgaatcaaacttcaagatatccttttatcctggcaagttctcaaaagagcggcgtagcatcattccagctggtgatacgtctcagttcataccgtcaagagaagctgatatagcaatattggaagaaccagaacatctcaattggtatcatcatgggaaacgctggactgacaagttcaaccatgttgttggtgtagttcatacaaactacctggaatatatcaagagagagaagaatggagctcttcaggcctttctagttaaacacatcaacaattgggtgaccagagcatactgcgacaaggtcttacgtctttctgcagcaactcaagatttaccaaagtctattgtttgcaatgttcatggtgttaacccaaagttcctgaagattggagaagaaataactgccaatagggggagttgggagcctccattttccaagggagcatattttcttgggaagatggtttgggccaaaggttatagggaactcatagatttgatggctaaacataaaagcgatttagaaggattcaagttagatgtatacggaagtggtgaggactcgcaagaagttcaatccactgccaggaggttagatttgagtctcaattttttcaagggaagggatcatgctgataattcactccatgggtacaaggttttcataaatccgagcattagtgatgtcctgtgcacagcaacggcagaggctcttgcaatggggaaattcgtgatctgcgcagaacatccatcaaatgagtttttcatgtcatttccgaactgtttgacatacaagacttcagaggagtttgttgcgagagtgaaagaggcaatggatagagaaccccaaccgctaacccctgagcaaagatacaacctttcgtgggaggcagcgactgagagattcatggagtactcagaccttgacaaggttctgaacaatgaggctgctcagcctggacaaggtaggaaaagaaagaataaaagaacctcacagcctaatttgtccgacataatggatggcggtctagcgttggcccatcgatgcttaactggcaatgaggttctcaggctggcaaccggagccattcctggtacccgggactacgataagcagcactgtgtggatatgggtctcttgcctcctcaagtacagcaccctgtatatggctggtgatgactgatgagcacccaaagctaatcgtaggtatatatgtacataatacaccatgtcgctcttatgtcgactaatgtttggagtattgtaattgtagcatgcatgacgacctttgcccattgttttgtactctgtaataaggttctttctccttaaattggagttttatcgc

SEQ ID NO: 35939 - protein, 572 aa, Zea mays subsp. mays
  peptide (1)..(572): Ceres Seq. ID no. 15180197
  misc_feature (318)..(478): Pfam Name: Pfam Description:  Glycosyl transferases group 1
  misc_feature (1)..(572): NCBI GI NO: 38344037 NR Description: OJ991214_12.18
  misc_feature (1)..(572): NCBI GI NO: 15229824 NR Description: digalactosyldiacylglycerol synthase 1
  misc_feature (109)..(572): NCBI GI NO: 27542603 NR Description: digalactosyldiacylglycerol synthase
  misc_feature (1)..(397): NCBI GI NO: 30681840 NR Description: digalactosyldiacylglycerol synthase 1
  misc_feature (102)..(559): NCBI GI NO: 34902044 NR Description: name [Oryza sativa (japonica cultivar-group)]
  misc_feature (99)..(560): NCBI GI NO: 22328179 NR Description: UDP-galactose:MGDG galactosyltransferase
  misc_feature (175)..(368): NCBI GI NO: 7486557 NR Description: hypothetical protein F6N23
  misc_feature (396)..(560): NCBI GI NO: 7486557 NR Description: hypothetical protein F6N23
  misc_feature (99)..(137): NCBI GI NO: 7486557 NR Description: hypothetical protein F6N23
  misc_feature (335)..(560): NCBI GI NO: 18141114 NR Description: digalactosyldiacylglycerol synthase
MESQGSKEIQPLDLPEILANLVRQSEPFLDQLGVRRDQCDKLVEALCRKQNHSLSENTSLPVNDKSSDELDLRIASVLQSSGYHADDGFWSEPTKSEVSDDKRHVAIVTTASLPWMTGTAVNPLFRAAYLAKGTRQDVTLVVPWLCKSDQELVYPNSMTFSSPEEQETYIRSWLEERLGFESNFKISFYPGKFSKERRSIIPAGDTSQFIPSREADIAILEEPEHLNWYHHGKRWTDKFNHVVGVVHTNYLEYIKREKNGALQAFLVKHINNWVTRAYCDKVLRLSAATQDLPKSIVCNVHGVNPKFLKIGEEITANRGSWEPPFSKGAYFLGKMVWAKGYRELIDLMAKHKSDLEGFKLDVYGSGEDSQEVQSTARRLDLSLNFFKGRDHADNSLHGYKVFINPSISDVLCTATAEALAMGKFVICAEHPSNEFFMSFPNCLTYKTSEEFVARVKEAMDREPQPLTPEQRYNLSWEAATERFMEYSDLDKVLNNEAAQPGQGRKRKNKRTSQPNLSDIMDGGLALAHRCLTGNEVLRLATGAIPGTRDYDKQHCVDMGLLPPQVQHPVYGW

SEQ ID NO: 35940 - protein, 457 aa, Zea mays subsp. mays
  peptide (1)..(457): Ceres Seq. ID no. 15180198
  misc_feature (203)..(363): Pfam Name: Pfam Description:  Glycosyl transferases group 1
  misc_feature (1)..(457): NCBI GI NO: 38344037 NR Description: OJ991214_12.18
  misc_feature (1)..(457): NCBI GI NO: 15229824 NR Description: digalactosyldiacylglycerol synthase 1
  misc_feature (1)..(457): NCBI GI NO: 27542603 NR Description: digalactosyldiacylglycerol synthase
  misc_feature (1)..(282): NCBI GI NO: 30681840 NR Description: digalactosyldiacylglycerol synthase 1
  misc_feature (1)..(444): NCBI GI NO: 34902044 NR Description: name [Oryza sativa (japonica cultivar-group)]
  misc_feature (1)..(445): NCBI GI NO: 22328179 NR Description: UDP-galactose:MGDG galactosyltransferase
  misc_feature (60)..(253): NCBI GI NO: 7486557 NR Description: hypothetical protein F6N23
  misc_feature (281)..(445): NCBI GI NO: 7486557 NR Description: hypothetical protein F6N23
  misc_feature (1)..(22): NCBI GI NO: 7486557 NR Description: hypothetical protein F6N23
  misc_feature (220)..(445): NCBI GI NO: 18141114 NR Description: digalactosyldiacylglycerol synthase
MTGTAVNPLFRAAYLAKGTRQDVTLVVPWLCKSDQELVYPNSMTFSSPEEQETYIRSWLEERLGFESNFKISFYPGKFSKERRSIIPAGDTSQFIPSREADIAILEEPEHLNWYHHGKRWTDKFNHVVGVVHTNYLEYIKREKNGALQAFLVKHINNWVTRAYCDKVLRLSAATQDLPKSIVCNVHGVNPKFLKIGEEITANRGSWEPPFSKGAYFLGKMVWAKGYRELIDLMAKHKSDLEGFKLDVYGSGEDSQEVQSTARRLDLSLNFFKGRDHADNSLHGYKVFINPSISDVLCTATAEALAMGKFVICAEHPSNEFFMSFPNCLTYKTSEEFVARVKEAMDREPQPLTPEQRYNLSWEAATERFMEYSDLDKVLNNEAAQPGQGRKRKNKRTSQPNLSDIMDGGLALAHRCLTGNEVLRLATGAIPGTRDYDKQHCVDMGLLPPQVQHPVYGW

SEQ ID NO: 35941 - protein, 415 aa, Zea mays subsp. mays
  peptide (1)..(415): Ceres Seq. ID no. 15180199
  misc_feature (161)..(321): Pfam Name: Pfam Description:  Glycosyl transferases group 1
  misc_feature (1)..(415): NCBI GI NO: 38344037 NR Description: OJ991214_12.18
  misc_feature (1)..(415): NCBI GI NO: 15229824 NR Description: digalactosyldiacylglycerol synthase 1
  misc_feature (1)..(415): NCBI GI NO: 27542603 NR Description: digalactosyldiacylglycerol synthase
  misc_feature (1)..(240): NCBI GI NO: 30681840 NR Description: digalactosyldiacylglycerol synthase 1
  misc_feature (1)..(402): NCBI GI NO: 34902044 NR Description: name [Oryza sativa (japonica cultivar-group)]
  misc_feature (1)..(403): NCBI GI NO: 22328179 NR Description: UDP-galactose:MGDG galactosyltransferase
  misc_feature (18)..(211): NCBI GI NO: 7486557 NR Description: hypothetical protein F6N23
  misc_feature (239)..(403): NCBI GI NO: 7486557 NR Description: hypothetical protein F6N23
  misc_feature (178)..(403): NCBI GI NO: 18141114 NR Description: digalactosyldiacylglycerol synthase
MTFSSPEEQETYIRSWLEERLGFESNFKISFYPGKFSKERRSIIPAGDTSQFIPSREADIAILEEPEHLNWYHHGKRWTDKFNHVVGVVHTNYLEYIKREKNGALQAFLVKHINNWVTRAYCDKVLRLSAATQDLPKSIVCNVHGVNPKFLKIGEEITANRGSWEPPFSKGAYFLGKMVWAKGYRELIDLMAKHKSDLEGFKLDVYGSGEDSQEVQSTARRLDLSLNFFKGRDHADNSLHGYKVFINPSISDVLCTATAEALAMGKFVICAEHPSNEFFMSFPNCLTYKTSEEFVARVKEAMDREPQPLTPEQRYNLSWEAATERFMEYSDLDKVLNNEAAQPGQGRKRKNKRTSQPNLSDIMDGGLALAHRCLTGNEVLRLATGAIPGTRDYDKQHCVDMGLLPPQVQHPVYGW

SEQ ID NO: 35942 - DNA, 1676 bp, Zea mays subsp. mays
  misc_feature (1)..(1676): Ceres Seq. ID no. 12450484
atctccatgagttgagcagcctgagcagatgaggtgaagtgagttggctgccagcgcgtgctgtatcttgtatggctgtactgtatcccccctcctctcgctaaccctttgtctccttcccccacaaaaccacctccgccccctcctcccaccagtacctgtgagttgtgagctccttgctgcggctgcttgctcccctcatctctagcctgtacactggttggagtggttgccagtgttctccccacctgctcctctcgatccactccatcccctttggccatgggtgtgcaagcatacatctacggtaattgcatgcttctcctgccttgaagcggaagccttagccttagcctgccgcctgggggaaaccttctgtttcgccgctgccgctgctgtggtataaaggtggaaggctgatccgtcgacggacggagtcccggcggagggaagattgctccgtcgccgcggtttcgcggccaagaaggtggcctacgcggtggaaaggggcggggcggggccgtgaaggaatcttgctccgacgccaatccctcctctgcccctcgattttcgggcggttgtcggtgctgcctttcgcagtaagaggtgggatctcgcgtccggcggcggcggcggcggcgttgctggatcgagcaacctccggcggtggcctgcgtacctgcgtggccgatctgtgcgtggctgttcatctcttcgccggcattgcgaggcgggctcgccgggcggtgtggattgcttgcggtgaggagtgcggaggagaggtgctgatccaagcggcgggcgggcgggcggctgcacgccaggtgttcgacgaaggaccccgaccgggccagccagccatgagggacttcccttcctgcttcggcgagagcggcgtccagatcgcggacgcgtcgtcgtcgtcgtccagcgccggcaagggcgcggcgcagaacctggtgacctgcctctaccagacgcagttctcgggccggccctgcgtgatctcgctcacgtggagcaggagcctcatggggcagggcctcagcgtcggcgtcgacgacctgtccggccactgcctctgcaaggcggacatcaagccgtggctcttctccaagaagaaggggtccaagagcctcgacgtcgaggacggcaagatcgacatcttctgggacctgtcgggcgccaagttcggcgctgggccagagccggtggaggggttctatgtcgcagtggtgttcgaccttgagctcgtgctcttgctcggcgacatgaagaaggatgcctacaggaagactggagccaaccggtcgatgctgaacgccgcgtttgtggcgaggagggagcacatatacggcaagaagacctactccgccaaggcgcagttctgcgacaatggccagttccatgacattgtcatagactgcgacaccgtcgacctgaaggatccgtgtcttgaaataagagttgacaagaagcccgtgatgctttaaagacccaccggcactggcagtgagtgttgctgcttgtgtaggctttggtacgtatgggctttatttgcttctggatgttgtgtactacttgggtttgttgaattattatgagcagttgcgtattgtaattcagctgggctacctggacattgttatgtattaataaatgctttgctttcttct

SEQ ID NO: 35943 - protein, 210 aa, Zea mays subsp. mays
  peptide (1)..(210): Ceres Seq. ID no. 12450485
  misc_feature (26)..(209): Pfam Name: DUF868 Pfam Description: Plant protein of unknown function
  misc_feature (1)..(209): NCBI GI NO: 30102999 NR Description: hypothetical protein
  misc_feature (1)..(209): NCBI GI NO: 15241702 NR Description: putative protein; protein id: At5g28150
  misc_feature (1)..(209): NCBI GI NO: 18397034 NR Description: expressed protein; protein id: At3g04860
  misc_feature (1)..(209): NCBI GI NO: 21593854 NR Description: unknown [Arabidopsis thaliana]
  misc_feature (1)..(209): NCBI GI NO: 34394221 NR Description: unknown protein
  misc_feature (75)..(210): NCBI GI NO: 20804936 NR Description: P0456E05.14
  misc_feature (5)..(72): NCBI GI NO: 20804936 NR Description: P0456E05.14
  misc_feature (30)..(204): NCBI GI NO: 15235452 NR Description: putative protein; protein id: At4g12690
  misc_feature (30)..(204): NCBI GI NO: 15228105 NR Description: hypothetical protein; protein id: At2g04220.1
  misc_feature (1)..(204): NCBI GI NO: 15238927 NR Description: putative protein; protein id: At5g48270.1
MRDFPSCFGESGVQIADASSSSSSAGKGAAQNLVTCLYQTQFSGRPCVISLTWSRSLMGQGLSVGVDDLSGHCLCKADIKPWLFSKKKGSKSLDVEDGKIDIFWDLSGAKFGAGPEPVEGFYVAVVFDLELVLLLGDMKKDAYRKTGANRSMLNAAFVARREHIYGKKTYSAKAQFCDNGQFHDIVIDCDTVDLKDPCLEIRVDKKPVML

SEQ ID NO: 35944 - protein, 153 aa, Zea mays subsp. mays
  peptide (1)..(153): Ceres Seq. ID no. 12450486
  misc_feature (1)..(152): Pfam Name: DUF868 Pfam Description: Plant protein of unknown function
  misc_feature (1)..(152): NCBI GI NO: 30102999 NR Description: hypothetical protein
  misc_feature (1)..(152): NCBI GI NO: 15241702 NR Description: putative protein; protein id: At5g28150
  misc_feature (1)..(152): NCBI GI NO: 18397034 NR Description: expressed protein; protein id: At3g04860
  misc_feature (1)..(152): NCBI GI NO: 21593854 NR Description: unknown [Arabidopsis thaliana]
  misc_feature (1)..(152): NCBI GI NO: 34394221 NR Description: unknown protein
  misc_feature (18)..(153): NCBI GI NO: 20804936 NR Description: P0456E05.14
  misc_feature (1)..(15): NCBI GI NO: 20804936 NR Description: P0456E05.14
  misc_feature (1)..(147): NCBI GI NO: 15235452 NR Description: putative protein; protein id: At4g12690
  misc_feature (1)..(147): NCBI GI NO: 15228105 NR Description: hypothetical protein; protein id: At2g04220.1
  misc_feature (1)..(147): NCBI GI NO: 15238927 NR Description: putative protein; protein id: At5g48270.1
MGQGLSVGVDDLSGHCLCKADIKPWLFSKKKGSKSLDVEDGKIDIFWDLSGAKFGAGPEPVEGFYVAVVFDLELVLLLGDMKKDAYRKTGANRSMLNAAFVARREHIYGKKTYSAKAQFCDNGQFHDIVIDCDTVDLKDPCLEIRVDKKPVML

SEQ ID NO: 35945 - DNA, 441 bp, Zea mays subsp. mays
  misc_feature (1)..(441): Ceres Seq. ID no. 4614339
agaacgccccagccttccacctcgaactccgcggcgcccagcgccctcggtaaccgccccccgccccgccacagagacaggtcgacgagacagacaaaggccggccgccatgggagaggacaagaaggcgggcaacaaggacgccgccggcggcgacaagaagaaggacgccggcgccggggccgcgccgcagcccatcgtgctgaaggtcgacttgcactgcgccggctgcgccaacaaggtccgcaaggccatcaagcacgccccaggtgtggagtcggtgacgccggacatggcggcgggtaaggtggtcgtgaccggtctggcggacgcggtggagctcaaggagcgcatcgaggccagggcgaagaagcccgtgcagatcgtctccgccggcgccggcccacccaagaaggagaaggacaaggagaaggawgaagg

SEQ ID NO: 35946 - protein, 146 aa, Zea mays subsp. mays
  peptide (1)..(146): Ceres Seq. ID no. 4614340
  misc_feature (37)..(144): NCBI GI NO: 37534752 NR Description: putative metal-binding protein
  misc_feature (37)..(143): NCBI GI NO: 22327990 NR Description: expressed protein; protein id: At5g60800.1
  misc_feature (25)..(145): NCBI GI NO: 38344582 NR Description: OSJNBa0053B21.14
  misc_feature (39)..(145): NCBI GI NO: 15241256 NR Description: copper chaperone
  misc_feature (90)..(144): NCBI GI NO: 29367499 NR Description: unknown [Oryza sativa (japonica cultivar-group)]
  misc_feature (37)..(139): NCBI GI NO: 15242741 NR Description: expressed protein; protein id: At5g03380
  misc_feature (23)..(144): NCBI GI NO: 24417342 NR Description: unknown [Arabidopsis thaliana]
  misc_feature (23)..(144): NCBI GI NO: 9758294 NR Description: contains similarity to ATFP3~gene_id:MLE2.16
  misc_feature (23)..(144): NCBI GI NO: 18424719 NR Description: copper chaperone
  misc_feature (32)..(139): NCBI GI NO: 18404283 NR Description: expressed protein; protein id: At2g36950
  misc_feature (145)..(145): Xaa is any aa, unknown or other
ERPSLPPRTPRRPAPSVTAPRPATETGRRDRQRPAAMGEDKKAGNKDAAGGDKKKDAGAGAAPQPIVLKVDLHCAGCANKVRKAIKHAPGVESVTPDMAAGKVVVTGLADAVELKERIEARAKKPVQIVSAGAGPPKKEKDKEKXE

SEQ ID NO: 35947 - protein, 110 aa, Zea mays subsp. mays
  peptide (1)..(110): Ceres Seq. ID no. 4614341
  misc_feature (1)..(108): NCBI GI NO: 37534752 NR Description: putative metal-binding protein
  misc_feature (1)..(107): NCBI GI NO: 22327990 NR Description: expressed protein; protein id: At5g60800.1
  misc_feature (1)..(109): NCBI GI NO: 38344582 NR Description: OSJNBa0053B21.14
  misc_feature (3)..(109): NCBI GI NO: 15241256 NR Description: copper chaperone
  misc_feature (54)..(108): NCBI GI NO: 29367499 NR Description: unknown [Oryza sativa (japonica cultivar-group)]
  misc_feature (1)..(103): NCBI GI NO: 15242741 NR Description: expressed protein; protein id: At5g03380
  misc_feature (1)..(108): NCBI GI NO: 24417342 NR Description: unknown [Arabidopsis thaliana]
  misc_feature (1)..(108): NCBI GI NO: 9758294 NR Description: contains similarity to ATFP3~gene_id:MLE2.16
  misc_feature (1)..(108): NCBI GI NO: 18424719 NR Description: copper chaperone
  misc_feature (1)..(103): NCBI GI NO: 18404283 NR Description: expressed protein; protein id: At2g36950
  misc_feature (109)..(109): Xaa is any aa, unknown or other
MGEDKKAGNKDAAGGDKKKDAGAGAAPQPIVLKVDLHCAGCANKVRKAIKHAPGVESVTPDMAAGKVVVTGLADAVELKERIEARAKKPVQIVSAGAGPPKKEKDKEKXE

SEQ ID NO: 35948 - protein, 101 aa, Zea mays subsp. mays
  peptide (1)..(101): Ceres Seq. ID no. 4614342
  misc_feature (25)..(101): NCBI GI NO: 9845301 NR Description: pr1 [Rat cytomegalovirus]
  misc_feature (4)..(101): NCBI GI NO: 30354095 NR Description: Similar to serine/arginine repetitive matrix 2
  misc_feature (4)..(101): NCBI GI NO: 23011993 NR Description: hypothetical protein
RTPQPSTSNSAAPSALGNRPPPRHRDRSTRQTKAGRHGRGQEGGQQGRRRRRQEEGRRRRGRAAAHRAEGRLALRRLRQQGPQGHQARPRCGVGDAGHGGG

SEQ ID NO: 35949 - DNA, 1845 bp, Zea mays subsp. mays
  misc_feature (1)..(1845): Ceres Seq. ID no. 12454887
  misc_feature (700)..(700): n is a, c, t, g, unknown, or other
  misc_feature (1418)..(1418): n is a, c, t, g, unknown, or other
agtcctgggccgctgctgccgcgcactgcctgcttcggccgagacgagccccccggcccccgtttcgctcccatctcgcgacactctgcccacagctcactcgcctccgtctctccccgtcaaaaaagccacccccgtcccccgcgccgcgccacccgcctttggcctctggctggcaccctttcccccgcctagaaacccgagctctccctctagccttctgccgcacacttccgagttccttccgccacaacatccacacgcaaacctcgcgatggccgcgtcggaatccgtgccgttctgcgtcaaagggggcggcggcggcgcgcccaggccgcacggccacctggtgctcccggcggggcgggtccgcgaggggcttgcgttcgcggcgggcgccgtggtggccgctctcgtgctcctctcctcggcctccgtcctcacgccgccgcccgtgcccaacatcgtctccctccccctgtcgtcgtcgcccgccaacgccaacgccgccatctcttcctcccctgccgtggccgtcggcgagggcccgcgcacgttctacgacgaccgggagctgtcgtacgccgtcggggggcagcgcgtcacgggctgggacgcgaagcgcgcggcgtggctgcggacccggggcctggacggcgcggcggtcgcggggcgggtggtgatggtgaccgggtcgcanccggagccatgcaaggggccggggggcgaccacgcgctgctgcggttcctcaagaataagctggactactgccgcctccacgggatcgagctcctgtacaacaccgcgctgctggagccgtccatggtggcgtactgggccaagatccccagcgtgcgcgccgcgatgctggcgcacccggacgccgagtgggtgtggtgggtggacgccgacgccgtgttcacggacatggacttctccctcccgctggagcggtaccgcgagagcagcctggtggtgtacgggtgggagcgggaggtgtacgaggagcggtcgtgggtggggctcaacgccggcgtcttcctcatccgtaactgccagtggtcgctggacctcatggacgcgtgggcgcgcatgggcccggcctcgccggagtacgcgcggtgggggaagacgctgcgcgaggagctggaggggaaacccaacgacgagtcggacgaccagtcggcgctcgtgtacctcctgtccaggcacctggagcgggagcggtgggcgaacgccacgttcctcgagtccgggtactacttccaggggtactgggcggagatcgtggacaggctcgacggcgtggccacgcgctacgaggccgtggagcgcggccgcgcagggggccgggccgggctccgccgccgccacgcggagcgggagcacctcctgtacgcggcggcgcgacgtgagncggtgcggcagcagcgagggaccggcggaggcgtgcccgggccggacggcggcggccagaaggggtggcgccgccccttcgtcacgcacttcacggggtgccagccctgcggcggcgcgcccaaccggatgtacacgcggaggcggtgcgccgaggggatccgccgcgccctggcgttcgcggacgaccaggtgctccgctcctacggcttccgacacgccgcgccgctcagcgacagcgtcacgccgctgccgttcgactaccccgccgcacactgatgggcggtcgcgttggtgggcggtgggttcggcaactggctatggctattggctaggttaattaaatgagacaaaaccatgaatgcgatgcaatgtgtcaagtcacagtgtgtgtactatacatttttgatttgggtgtcatccatatt

SEQ ID NO: 35950 - protein, 564 aa, Zea mays subsp. mays
  peptide (1)..(564): Ceres Seq. ID no. 12454888
  misc_feature (225)..(516): Pfam Name: Pfam Description:  galactosyl transferase GMA12/MNN10 family
  misc_feature (126)..(475): NCBI GI NO: 25486551 NR Description: alpha galactosyltransferase (EC 2.4.1.-)
  misc_feature (453)..(563): NCBI GI NO: 25486551 NR Description: alpha galactosyltransferase (EC 2.4.1.-)
  misc_feature (119)..(561): NCBI GI NO: 18400116 NR Description: Expressed protein; protein id: At2g22900
  misc_feature (111)..(561): NCBI GI NO: 22329223 NR Description: similar to alpha galactosyltransferase protein
  misc_feature (93)..(440): NCBI GI NO: 15240848 NR Description: alpha galactosyltransferase protein
  misc_feature (489)..(553): NCBI GI NO: 15240848 NR Description: alpha galactosyltransferase protein
  misc_feature (179)..(434): NCBI GI NO: 15228843 NR Description: alpha galactosyltransferase-like protein
  misc_feature (198)..(440): NCBI GI NO: 15221224 NR Description: putative alpha galactosyltransferase
  misc_feature (489)..(555): NCBI GI NO: 15228843 NR Description: alpha galactosyltransferase-like protein
  misc_feature (489)..(553): NCBI GI NO: 15221224 NR Description: putative alpha galactosyltransferase
  misc_feature (233)..(233): Xaa is any aa, unknown or other
  misc_feature (473)..(473): Xaa is any aa, unknown or other
VLGRCCRALPASAETSPPAPVSLPSRDTLPTAHSPPSLPVKKATPVPRAAPPAFGLWLAPFPPPRNPSSPSSLLPHTSEFLPPQHPHANLAMAASESVPFCVKGGGGGAPRPHGHLVLPAGRVREGLAFAAGAVVAALVLLSSASVLTPPPVPNIVSLPLSSSPANANAAISSSPAVAVGEGPRTFYDDRELSYAVGGQRVTGWDAKRAAWLRTRGLDGAAVAGRVVMVTGSXPEPCKGPGGDHALLRFLKNKLDYCRLHGIELLYNTALLEPSMVAYWAKIPSVRAAMLAHPDAEWVWWVDADAVFTDMDFSLPLERYRESSLVVYGWEREVYEERSWVGLNAGVFLIRNCQWSLDLMDAWARMGPASPEYARWGKTLREELEGKPNDESDDQSALVYLLSRHLERERWANATFLESGYYFQGYWAEIVDRLDGVATRYEAVERGRAGGRAGLRRRHAEREHLLYAAARREXVRQQRGTGGGVPGPDGGGQKGWRRPFVTHFTGCQPCGGAPNRMYTRRRCAEGIRRALAFADDQVLRSYGFRHAAPLSDSVTPLPFDYPAAH

SEQ ID NO: 35951 - protein, 473 aa, Zea mays subsp. mays
  peptide (1)..(473): Ceres Seq. ID no. 12454889
  misc_feature (134)..(425): Pfam Name: Pfam Description:  galactosyl transferase GMA12/MNN10 family
  misc_feature (35)..(384): NCBI GI NO: 25486551 NR Description: alpha galactosyltransferase (EC 2.4.1.-)
  misc_feature (362)..(472): NCBI GI NO: 25486551 NR Description: alpha galactosyltransferase (EC 2.4.1.-)
  misc_feature (28)..(470): NCBI GI NO: 18400116 NR Description: Expressed protein; protein id: At2g22900
  misc_feature (20)..(470): NCBI GI NO: 22329223 NR Description: similar to alpha galactosyltransferase protein
  misc_feature (2)..(349): NCBI GI NO: 15240848 NR Description: alpha galactosyltransferase protein
  misc_feature (398)..(462): NCBI GI NO: 15240848 NR Description: alpha galactosyltransferase protein
  misc_feature (88)..(343): NCBI GI NO: 15228843 NR Description: alpha galactosyltransferase-like protein
  misc_feature (107)..(349): NCBI GI NO: 15221224 NR Description: putative alpha galactosyltransferase
  misc_feature (398)..(464): NCBI GI NO: 15228843 NR Description: alpha galactosyltransferase-like protein
  misc_feature (398)..(462): NCBI GI NO: 15221224 NR Description: putative alpha galactosyltransferase
  misc_feature (142)..(142): Xaa is any aa, unknown or other
  misc_feature (382)..(382): Xaa is any aa, unknown or other
MAASESVPFCVKGGGGGAPRPHGHLVLPAGRVREGLAFAAGAVVAALVLLSSASVLTPPPVPNIVSLPLSSSPANANAAISSSPAVAVGEGPRTFYDDRELSYAVGGQRVTGWDAKRAAWLRTRGLDGAAVAGRVVMVTGSXPEPCKGPGGDHALLRFLKNKLDYCRLHGIELLYNTALLEPSMVAYWAKIPSVRAAMLAHPDAEWVWWVDADAVFTDMDFSLPLERYRESSLVVYGWEREVYEERSWVGLNAGVFLIRNCQWSLDLMDAWARMGPASPEYARWGKTLREELEGKPNDESDDQSALVYLLSRHLERERWANATFLESGYYFQGYWAEIVDRLDGVATRYEAVERGRAGGRAGLRRRHAEREHLLYAAARREXVRQQRGTGGGVPGPDGGGQKGWRRPFVTHFTGCQPCGGAPNRMYTRRRCAEGIRRALAFADDQVLRSYGFRHAAPLSDSVTPLPFDYPAAH

SEQ ID NO: 35952 - protein, 337 aa, Zea mays subsp. mays
  peptide (1)..(337): Ceres Seq. ID no. 12454890
  misc_feature (1)..(289): Pfam Name: Pfam Description:  galactosyl transferase GMA12/MNN10 family
  misc_feature (1)..(248): NCBI GI NO: 25486551 NR Description: alpha galactosyltransferase (EC 2.4.1.-)
  misc_feature (226)..(336): NCBI GI NO: 25486551 NR Description: alpha galactosyltransferase (EC 2.4.1.-)
  misc_feature (1)..(334): NCBI GI NO: 18400116 NR Description: Expressed protein; protein id: At2g22900
  misc_feature (1)..(334): NCBI GI NO: 22329223 NR Description: similar to alpha galactosyltransferase protein
  misc_feature (1)..(213): NCBI GI NO: 15240848 NR Description: alpha galactosyltransferase protein
  misc_feature (262)..(326): NCBI GI NO: 15240848 NR Description: alpha galactosyltransferase protein
  misc_feature (1)..(207): NCBI GI NO: 15228843 NR Description: alpha galactosyltransferase-like protein
  misc_feature (1)..(213): NCBI GI NO: 15221224 NR Description: putative alpha galactosyltransferase
  misc_feature (262)..(328): NCBI GI NO: 15228843 NR Description: alpha galactosyltransferase-like protein
  misc_feature (262)..(326): NCBI GI NO: 15221224 NR Description: putative alpha galactosyltransferase
  misc_feature (6)..(6): Xaa is any aa, unknown or other
  misc_feature (246)..(246): Xaa is any aa, unknown or other
MVTGSXPEPCKGPGGDHALLRFLKNKLDYCRLHGIELLYNTALLEPSMVAYWAKIPSVRAAMLAHPDAEWVWWVDADAVFTDMDFSLPLERYRESSLVVYGWEREVYEERSWVGLNAGVFLIRNCQWSLDLMDAWARMGPASPEYARWGKTLREELEGKPNDESDDQSALVYLLSRHLERERWANATFLESGYYFQGYWAEIVDRLDGVATRYEAVERGRAGGRAGLRRRHAEREHLLYAAARREXVRQQRGTGGGVPGPDGGGQKGWRRPFVTHFTGCQPCGGAPNRMYTRRRCAEGIRRALAFADDQVLRSYGFRHAAPLSDSVTPLPFDYPAAH

SEQ ID NO: 35953 - DNA, 1144 bp, Zea mays subsp. mays
  misc_feature (1)..(1144): Ceres Seq. ID no. 12436331
aaaaactttgctagctagctagctgaaaggctccggccgggcctggctggtacacacgcccagatccttgttgtgcacgtacgttccaaacttgctcatactactcagagcgcggcgacatgttcggctttctgaaacaacggaggcagaccccgtcagggttctcgtcgtcgtcagccgccgaggaggtcaccgccggcatcgatggctccggcctcgtcgcgatcgtcacgggcgcgtctagtgggatcggtgccgagacctgccgagttctggcgctgcggggcgttcgcgttgtgatgggcgtgaggacaccgtctgccggtgagcgcgtcaaggaagagatcgtgaagaacgtccccgctgccggaatcgcattttctcctttcaccctttcggatgatggaattgagttacaatttgcaacaaattaccttggccattttctactcactaatcttttacttgaaaagatgaaaatcacggccatggagagtggaatagaaggtagggttgtgattgttgcttctgacagctacaagcacacgtatcgagagggaattcgttttgataaactcaatgatgcatcaggctataaaggcatcctggcttatggccaatcgaagctggccaatatattgcgttccaatgaactttcttgccgcttgaaggaagaagatgcaaaagtagtagtcaactcactgcatccgggagttgttgccaccaacatcacgcgccatctgggtatcataaaagatattctttctccaattgctaaacttgtactaaggggtgttgaacaaggtgcagccaccgtttgttatctggcattgcatcctcaggttgctggagtcaccggcaaatactttgtggatttcaatgctgttgaactaaaaccgcctgcaactgacaagtagttgtccaaaaagctctgggattttagtgtcagcctactccagtgatataactgccgattagttctcctacgccagctggtaaataaaggtcgatctgaatgagagatcatgtttcagtaatagaacaaggtgatccagcagtgtaatatctactactacttattgtttgactagatatggatgccatatgtttgtaatttgaataaattgattggatacatttctgc

SEQ ID NO: 35954 - protein, 265 aa, Zea mays subsp. mays
  peptide (1)..(265): Ceres Seq. ID no. 12436332
  misc_feature (83)..(265): NCBI GI NO: 39546214 NR Description: OSJNBa0029L02.3
  misc_feature (83)..(265): NCBI GI NO: 11250521 NR Description: hypothetical protein T22P11
  misc_feature (83)..(265): NCBI GI NO: 18413950 NR Description: putative protein; protein id: At5g02540
  misc_feature (83)..(265): NCBI GI NO: 21554820 NR Description: putativepod-specific dehydrogenase SAC25
  misc_feature (83)..(265): NCBI GI NO: 20260302 NR Description: putative protein [Arabidopsis thaliana]
  misc_feature (83)..(265): NCBI GI NO: 629592 NR Description: hypothetical protein - rape
  misc_feature (83)..(265): NCBI GI NO: 15224306 NR Description: putative oxidoreductase; protein id: At2g37540
  misc_feature (83)..(265): NCBI GI NO: 15233359 NR Description: putative protein; protein id: At4g11410.1
  misc_feature (83)..(265): NCBI GI NO: 34895876 NR Description: P0009G03.18
  misc_feature (83)..(265): NCBI GI NO: 30686197 NR Description: short-chain dehydrogenase/reductase family protein
MFGFLKQRRQTPSGFSSSSAAEEVTAGIDGSGLVAIVTGASSGIGAETCRVLALRGVRVVMGVRTPSAGERVKEEIVKNVPAAGIAFSPFTLSDDGIELQFATNYLGHFLLTNLLLEKMKITAMESGIEGRVVIVASDSYKHTYREGIRFDKLNDASGYKGILAYGQSKLANILRSNELSCRLKEEDAKVVVNSLHPGVVATNITRHLGIIKDILSPIAKLVLRGVEQGAATVCYLALHPQVAGVTGKYFVDFNAVELKPPATDK

SEQ ID NO: 35955 - protein, 205 aa, Zea mays subsp. mays
  peptide (1)..(205): Ceres Seq. ID no. 12436333
  misc_feature (23)..(205): NCBI GI NO: 39546214 NR Description: OSJNBa0029L02.3
  misc_feature (23)..(205): NCBI GI NO: 11250521 NR Description: hypothetical protein T22P11
  misc_feature (23)..(205): NCBI GI NO: 20260302 NR Description: putative protein [Arabidopsis thaliana]
  misc_feature (23)..(205): NCBI GI NO: 18413950 NR Description: putative protein; protein id: At5g02540
  misc_feature (23)..(205): NCBI GI NO: 21554820 NR Description: putativepod-specific dehydrogenase SAC25
  misc_feature (23)..(205): NCBI GI NO: 629592 NR Description: hypothetical protein - rape
  misc_feature (23)..(205): NCBI GI NO: 15224306 NR Description: putative oxidoreductase; protein id: At2g37540
  misc_feature (23)..(205): NCBI GI NO: 15233359 NR Description: putative protein; protein id: At4g11410.1
  misc_feature (23)..(205): NCBI GI NO: 34895876 NR Description: P0009G03.18
  misc_feature (23)..(205): NCBI GI NO: 30686197 NR Description: short-chain dehydrogenase/reductase family protein
MGVRTPSAGERVKEEIVKNVPAAGIAFSPFTLSDDGIELQFATNYLGHFLLTNLLLEKMKITAMESGIEGRVVIVASDSYKHTYREGIRFDKLNDASGYKGILAYGQSKLANILRSNELSCRLKEEDAKVVVNSLHPGVVATNITRHLGIIKDILSPIAKLVLRGVEQGAATVCYLALHPQVAGVTGKYFVDFNAVELKPPATDK

SEQ ID NO: 35956 - protein, 147 aa, Zea mays subsp. mays
  peptide (1)..(147): Ceres Seq. ID no. 12436334
  misc_feature (1)..(147): NCBI GI NO: 39546214 NR Description: OSJNBa0029L02.3
  misc_feature (1)..(147): NCBI GI NO: 11250521 NR Description: hypothetical protein T22P11
  misc_feature (1)..(147): NCBI GI NO: 21554820 NR Description: putativepod-specific dehydrogenase SAC25
  misc_feature (1)..(147): NCBI GI NO: 20260302 NR Description: putative protein [Arabidopsis thaliana]
  misc_feature (1)..(147): NCBI GI NO: 18413950 NR Description: putative protein; protein id: At5g02540
  misc_feature (1)..(147): NCBI GI NO: 629592 NR Description: hypothetical protein - rape
  misc_feature (1)..(147): NCBI GI NO: 15224306 NR Description: putative oxidoreductase; protein id: At2g37540
  misc_feature (1)..(147): NCBI GI NO: 15233359 NR Description: putative protein; protein id: At4g11410.1
  misc_feature (1)..(147): NCBI GI NO: 34895876 NR Description: P0009G03.18
  misc_feature (1)..(147): NCBI GI NO: 30686197 NR Description: short-chain dehydrogenase/reductase family protein
MKITAMESGIEGRVVIVASDSYKHTYREGIRFDKLNDASGYKGILAYGQSKLANILRSNELSCRLKEEDAKVVVNSLHPGVVATNITRHLGIIKDILSPIAKLVLRGVEQGAATVCYLALHPQVAGVTGKYFVDFNAVELKPPATDK

SEQ ID NO: 35957 - DNA, 1564 bp, Zea mays subsp. mays
  misc_feature (1)..(1564): Ceres Seq. ID no. 12443313
ataaatgcacccccacttgtcccttttccctcctcctccagctcctctctgggctgtggtggctgtggctcccaagcacacggcccgcacgagcagttggaacagattcctcgaccgcgtcgccccggaacccagttcttggcatccggtgcctagcttcgtcgcccctccggcaaagaccacctccagccctccacctcccgcggtagcgcttgctgctagtgagctagtatatttctgaaaccggaaacccgcgacacgggaccgagttcttgggagcggattcggctcgctgcaggctgaggctaccggcgcgctcttctccacggcggcggagagccagccagtagttgcgaccggaggcgggcatgggcgcgggcgtgtcgggcctgccgggcgcggagcccggcggcaaggtggcgcgcggcgccgggctgggcgacctcccggagctgtgcaccgcggaggtgctgctccgcctcggcgcgccggacatatgccggctcgcgcggctcaacctagcgttccgcggcgccgcgggcgcggacttcgtgtgggaggccaagctgccggggaactacgcccggctcctgcgcttcgtggacgaggccgaggaggagggagggagtgggcgggattggagcgcggtggggaggaaagacgtctttgcgaggctcgccagacctgtgccgttcgacggtggcaaaagggaattctggctggagaagaacgaaggtgggatctgcatggccttgtcgtcgaaagcgctggtcattactgggattgacgatagaagatactggattaacatgccaacatctgaatctaggttccactccactgcatacctgcagcaaatctggtggttcgaggtggtgggagaggtggacttctgcttcccggctgggacggcctacagcctctacttcaggctccacctcggcaagtcctccacgcgcttcggccgccgggtctgcagctcggagcaggtccacggctgggacaagaagcccgtgcggttccagctctccacgtcggacggccagcacgccgtgtcccagtgctacctggacgagcctggacgctggatcctgtaccacgtcggcgatttcgacgcgccgccgagctctggtcagccgaccaggctcaagttttcgttagcgcagatcgactgcacccacacgaaaggtggcctctgtgtcgattcggtgctcgtgtatcccaaggggtttcagccggaacgggtggtcagggctcggaaatgaccgtgtgtcggcatttggtagctatagaggcactgcgcattagagcgagctgtcgagagatatgagtagcctgccatttttttttagcttgggctaattgtattctgaaagcgtttatacatagcatagtagcacactggacttttttttttgtttgatagcattagtgtgtgcgcgttactttgccatttctcatgaaggccatggcaaataaggaacctttgtacgtgtacctagctccggtacatcgcgtttgcatcggcacacaatgaagccaggaaggtctcctgttttatttc

SEQ ID NO: 35958 - protein, 298 aa, Zea mays subsp. mays
  peptide (1)..(298): Ceres Seq. ID no. 12443314
  misc_feature (23)..(68): Pfam Name: Pfam Description:  F-box domain
  misc_feature (1)..(298): NCBI GI NO: 37536186 NR Description: unknown protein
  misc_feature (26)..(291): NCBI GI NO: 38567911 NR Description: OSJNBa0088I22.7
  misc_feature (1)..(286): NCBI GI NO: 30695337 NR Description: F-box protein (lectin-related)
  misc_feature (23)..(286): NCBI GI NO: 23397334 NR Description: unknown protein [Arabidopsis thaliana]
  misc_feature (22)..(285): NCBI GI NO: 15221677 NR Description: unknown protein; protein id: At1g63090.1
  misc_feature (22)..(285): NCBI GI NO: 15222051 NR Description: hypothetical protein; protein id: At1g12710.1
  misc_feature (1)..(287): NCBI GI NO: 15231726 NR Description: putative protein; protein id: At3g53000.1
  misc_feature (1)..(285): NCBI GI NO: 15242282 NR Description: putative protein; protein id: At5g52120
  misc_feature (109)..(285): NCBI GI NO: 27754673 NR Description: unknown protein [Arabidopsis thaliana]
  misc_feature (17)..(230): NCBI GI NO: 15226908 NR Description: putative phloem-specific lectin
MGAGVSGLPGAEPGGKVARGAGLGDLPELCTAEVLLRLGAPDICRLARLNLAFRGAAGADFVWEAKLPGNYARLLRFVDEAEEEGGSGRDWSAVGRKDVFARLARPVPFDGGKREFWLEKNEGGICMALSSKALVITGIDDRRYWINMPTSESRFHSTAYLQQIWWFEVVGEVDFCFPAGTAYSLYFRLHLGKSSTRFGRRVCSSEQVHGWDKKPVRFQLSTSDGQHAVSQCYLDEPGRWILYHVGDFDAPPSSGQPTRLKFSLAQIDCTHTKGGLCVDSVLVYPKGFQPERVVRARK

SEQ ID NO: 35959 - protein, 172 aa, Zea mays subsp. mays
  peptide (1)..(172): Ceres Seq. ID no. 12443315
  misc_feature (1)..(172): NCBI GI NO: 37536186 NR Description: unknown protein
  misc_feature (1)..(165): NCBI GI NO: 38567911 NR Description: OSJNBa0088I22.7
  misc_feature (1)..(160): NCBI GI NO: 30695337 NR Description: F-box protein (lectin-related)
  misc_feature (1)..(160): NCBI GI NO: 23397334 NR Description: unknown protein [Arabidopsis thaliana]
  misc_feature (1)..(159): NCBI GI NO: 15221677 NR Description: unknown protein; protein id: At1g63090.1
  misc_feature (1)..(159): NCBI GI NO: 15222051 NR Description: hypothetical protein; protein id: At1g12710.1
  misc_feature (1)..(161): NCBI GI NO: 15231726 NR Description: putative protein; protein id: At3g53000.1
  misc_feature (1)..(159): NCBI GI NO: 15242282 NR Description: putative protein; protein id: At5g52120
  misc_feature (1)..(159): NCBI GI NO: 27754673 NR Description: unknown protein [Arabidopsis thaliana]
  misc_feature (1)..(104): NCBI GI NO: 15226908 NR Description: putative phloem-specific lectin
MALSSKALVITGIDDRRYWINMPTSESRFHSTAYLQQIWWFEVVGEVDFCFPAGTAYSLYFRLHLGKSSTRFGRRVCSSEQVHGWDKKPVRFQLSTSDGQHAVSQCYLDEPGRWILYHVGDFDAPPSSGQPTRLKFSLAQIDCTHTKGGLCVDSVLVYPKGFQPERVVRARK

SEQ ID NO: 35960 - protein, 151 aa, Zea mays subsp. mays
  peptide (1)..(151): Ceres Seq. ID no. 12443316
  misc_feature (1)..(151): NCBI GI NO: 37536186 NR Description: unknown protein
  misc_feature (1)..(144): NCBI GI NO: 38567911 NR Description: OSJNBa0088I22.7
  misc_feature (1)..(139): NCBI GI NO: 30695337 NR Description: F-box protein (lectin-related)
  misc_feature (1)..(139): NCBI GI NO: 23397334 NR Description: unknown protein [Arabidopsis thaliana]
  misc_feature (1)..(138): NCBI GI NO: 15221677 NR Description: unknown protein; protein id: At1g63090.1
  misc_feature (1)..(138): NCBI GI NO: 15222051 NR Description: hypothetical protein; protein id: At1g12710.1
  misc_feature (1)..(140): NCBI GI NO: 15231726 NR Description: putative protein; protein id: At3g53000.1
  misc_feature (1)..(138): NCBI GI NO: 15242282 NR Description: putative protein; protein id: At5g52120
  misc_feature (1)..(138): NCBI GI NO: 27754673 NR Description: unknown protein [Arabidopsis thaliana]
  misc_feature (1)..(83): NCBI GI NO: 15226908 NR Description: putative phloem-specific lectin
MPTSESRFHSTAYLQQIWWFEVVGEVDFCFPAGTAYSLYFRLHLGKSSTRFGRRVCSSEQVHGWDKKPVRFQLSTSDGQHAVSQCYLDEPGRWILYHVGDFDAPPSSGQPTRLKFSLAQIDCTHTKGGLCVDSVLVYPKGFQPERVVRARK

SEQ ID NO: 35961 - DNA, 2189 bp, Zea mays subsp. mays
  misc_feature (1)..(2189): Ceres Seq. ID no. 12454883
ggtggcttctcattcattgttgattgattgatcctccccgcctcactcctttgtctcctcgcctcgtgctcgctcgctcccctcgccctggcgaggagggcagcagaaaccctagcggctcaggccgggcgggggttagatgctccaaggttcgagagggaagggtaggttagtggtgcgccatcgactatgggctgcgtcttcggccgggcggctgcgtcgtcctctgcagcgccgaagaagaagtggggcaaggggaggtcgtccccgcagcccgaagcggggtcgccctccgcagtcgccgccaccgacggggacgggaggccgcggcggcggctcgggggccgcagggcgtcgggacccaggcagggttgcgtccccgcggctgccgcggcggagcagctcgccgccggttggccaccgtggctcgttgcagtcgctggggaggccctccgcggctgggcgccgcgccgcgccgacacgttcgagaagcttaataagataggatcgggcacgtacagcaacgtgtaccgggcgagggacaccgtctctggccggatcgtcgctcttaaaaaggtccgcttcgataacctcgagccagaaagcgtcaagtttatggcccgggaaatactgatcctaaggagactcgaccaccccaacatcatcaaattagagggcttggtcacctccaggatgtcatgcagcctttaccttgtcttcgagtacatggagcatgatcttgctggtcttgcggcaagttgtgatgtcaagttcacgttgcctcagataaaatgttacatacagcagctgttgtcagggcttgagcattgtcatgacaataatgtattgcaccgggatatcaaggggtcaaacttgttgttggataataatgggattcttaagattgcggattttgggctggcaacattctttgatccacgacataaacgaccaatgacgagccgagtggtcacgctatggtaccgtccaccagaattgttacttggtgccactgagtatagtgtaggtgttgatttgtggagtgctggatgcattcttgcagagctcctgtatggaaagcccataatgcctgggcgcactgaggtggaacagttgcacaagattttcaagctatgtggttccccttctgaggagtactggaagaagtctaaattgccacacgcaacaatattcaaacctcaacaaccctataaacgttgcatcagggagacatttaaagattttcctacatcggctctgccattggttgaaactctgcttgcaattgatccagctgagcgacaaactgcctcagctgcattacacagtgattttttttcaaccgagccttatgcttgtaacccttcaagtctgccaacatatccaccaagcaaggagatggatgccaagttaagagacgaggaggctagaagactacgagcggctgcaaaggccaagggagaacagaaaaggactcgaccacgtgatcgatctcggagggctggaccagcaccagaagctaatgcagagattcaagcaaacttagaccagaggcgacgaatgataactcatgcaaatgcaaagagtaaaagtgagaagtttcctcctccgcatcaggatggaggtacgggtaatccgcttggatcctatcatcatatggagcctatgttcgagcaccaggatgcttccttcagtacagtagtccccatagagaaggggacctcacaaacatggtccgggccgttgtttgatccagcagctctcgggcagtcgaggcggaagaagcaaactaccctagatgctaaggctgctgcttactcaaagcagctccaaaaggaaaagggagggatacgagcccgataacaaaatgtcgttttcatggcctacagatgaattttcttgttttgttcctctggtggttggaaacaggcaacaatgcgctgctgtagggtgaagtctcccggattgtgtacatgtcatgtggtagcgtttccaagtactgtttagatgcttctgaacaagctgccgtcacccggacgggactttaggggtttgagactcgtatttgtgctctttatggcaattcagttgcccatgtgtatatatggagcaattctttcttgtgtatgtaaagagacggcggtagctttgatttcttaataatgaatcaagtgtgatggcgaccttcc

SEQ ID NO: 35962 - protein, 557 aa, Zea mays subsp. mays
  peptide (1)..(557): Ceres Seq. ID no. 12454884
  misc_feature (99)..(383): Pfam Name: Pfam Description:  Protein kinase domain
  misc_feature (1)..(557): NCBI GI NO: 34914694 NR Description: putative CRK1 protein
  misc_feature (1)..(537): NCBI GI NO: 7671528 NR Description: CRK1 protein [Beta vulgaris]
  misc_feature (41)..(539): NCBI GI NO: 15221868 NR Description: CRK1 protein, putative; protein id: At1g54610
  misc_feature (43)..(545): NCBI GI NO: 15229881 NR Description: putative cyclin-dependent protein kinase
  misc_feature (75)..(531): NCBI GI NO: 15241289 NR Description: cyclin-dependent protein kinase-like
  misc_feature (75)..(531): NCBI GI NO: 26449319 NR Description: putative cyclin-dependent protein kinase
  misc_feature (45)..(544): NCBI GI NO: 15219169 NR Description: cell division-related protein, putative
  misc_feature (45)..(544): NCBI GI NO: 28393523 NR Description: putative cell division-related protein
  misc_feature (1)..(556): NCBI GI NO: 33146814 NR Description: putative cyclin-dependent kinase CDC2C
  misc_feature (71)..(473): NCBI GI NO: 15217565 NR Description: putative protein kinase; protein id: At1g09600.1
MGCVFGRAAASSSAAPKKKWGKGRSSPQPEAGSPSAVAATDGDGRPRRRLGGRRASGPRQGCVPAAAAAEQLAAGWPPWLVAVAGEALRGWAPRRADTFEKLNKIGSGTYSNVYRARDTVSGRIVALKKVRFDNLEPESVKFMAREILILRRLDHPNIIKLEGLVTSRMSCSLYLVFEYMEHDLAGLAASCDVKFTLPQIKCYIQQLLSGLEHCHDNNVLHRDIKGSNLLLDNNGILKIADFGLATFFDPRHKRPMTSRVVTLWYRPPELLLGATEYSVGVDLWSAGCILAELLYGKPIMPGRTEVEQLHKIFKLCGSPSEEYWKKSKLPHATIFKPQQPYKRCIRETFKDFPTSALPLVETLLAIDPAERQTASAALHSDFFSTEPYACNPSSLPTYPPSKEMDAKLRDEEARRLRAAAKAKGEQKRTRPRDRSRRAGPAPEANAEIQANLDQRRRMITHANAKSKSEKFPPPHQDGGTGNPLGSYHHMEPMFEHQDASFSTVVPIEKGTSQTWSGPLFDPAALGQSRRKKQTTLDAKAAAYSKQLQKEKGGIRAR

SEQ ID NO: 35963 - protein, 415 aa, Zea mays subsp. mays
  peptide (1)..(415): Ceres Seq. ID no. 12454885
  misc_feature (1)..(241): Pfam Name: Pfam Description:  Protein kinase domain
  misc_feature (1)..(415): NCBI GI NO: 34914694 NR Description: putative CRK1 protein
  misc_feature (1)..(395): NCBI GI NO: 7671528 NR Description: CRK1 protein [Beta vulgaris]
  misc_feature (1)..(397): NCBI GI NO: 15221868 NR Description: CRK1 protein, putative; protein id: At1g54610
  misc_feature (1)..(403): NCBI GI NO: 15229881 NR Description: putative cyclin-dependent protein kinase
  misc_feature (1)..(389): NCBI GI NO: 15241289 NR Description: cyclin-dependent protein kinase-like
  misc_feature (1)..(389): NCBI GI NO: 26449319 NR Description: putative cyclin-dependent protein kinase
  misc_feature (1)..(402): NCBI GI NO: 15219169 NR Description: cell division-related protein, putative
  misc_feature (1)..(402): NCBI GI NO: 28393523 NR Description: putative cell division-related protein
  misc_feature (1)..(414): NCBI GI NO: 33146814 NR Description: putative cyclin-dependent kinase CDC2C
  misc_feature (1)..(331): NCBI GI NO: 15217565 NR Description: putative protein kinase; protein id: At1g09600.1
MAREILILRRLDHPNIIKLEGLVTSRMSCSLYLVFEYMEHDLAGLAASCDVKFTLPQIKCYIQQLLSGLEHCHDNNVLHRDIKGSNLLLDNNGILKIADFGLATFFDPRHKRPMTSRVVTLWYRPPELLLGATEYSVGVDLWSAGCILAELLYGKPIMPGRTEVEQLHKIFKLCGSPSEEYWKKSKLPHATIFKPQQPYKRCIRETFKDFPTSALPLVETLLAIDPAERQTASAALHSDFFSTEPYACNPSSLPTYPPSKEMDAKLRDEEARRLRAAAKAKGEQKRTRPRDRSRRAGPAPEANAEIQANLDQRRRMITHANAKSKSEKFPPPHQDGGTGNPLGSYHHMEPMFEHQDASFSTVVPIEKGTSQTWSGPLFDPAALGQSRRKKQTTLDAKAAAYSKQLQKEKGGIRAR

SEQ ID NO: 35964 - protein, 389 aa, Zea mays subsp. mays
  peptide (1)..(389): Ceres Seq. ID no. 12454886
  misc_feature (1)..(215): Pfam Name: Pfam Description:  Protein kinase domain
  misc_feature (1)..(389): NCBI GI NO: 34914694 NR Description: putative CRK1 protein
  misc_feature (1)..(369): NCBI GI NO: 7671528 NR Description: CRK1 protein [Beta vulgaris]
  misc_feature (1)..(371): NCBI GI NO: 15221868 NR Description: CRK1 protein, putative; protein id: At1g54610
  misc_feature (1)..(377): NCBI GI NO: 15229881 NR Description: putative cyclin-dependent protein kinase
  misc_feature (1)..(363): NCBI GI NO: 15241289 NR Description: cyclin-dependent protein kinase-like
  misc_feature (1)..(363): NCBI GI NO: 26449319 NR Description: putative cyclin-dependent protein kinase
  misc_feature (1)..(376): NCBI GI NO: 15219169 NR Description: cell division-related protein, putative
  misc_feature (1)..(376): NCBI GI NO: 28393523 NR Description: putative cell division-related protein
  misc_feature (1)..(388): NCBI GI NO: 33146814 NR Description: putative cyclin-dependent kinase CDC2C
  misc_feature (1)..(305): NCBI GI NO: 15217565 NR Description: putative protein kinase; protein id: At1g09600.1
MSCSLYLVFEYMEHDLAGLAASCDVKFTLPQIKCYIQQLLSGLEHCHDNNVLHRDIKGSNLLLDNNGILKIADFGLATFFDPRHKRPMTSRVVTLWYRPPELLLGATEYSVGVDLWSAGCILAELLYGKPIMPGRTEVEQLHKIFKLCGSPSEEYWKKSKLPHATIFKPQQPYKRCIRETFKDFPTSALPLVETLLAIDPAERQTASAALHSDFFSTEPYACNPSSLPTYPPSKEMDAKLRDEEARRLRAAAKAKGEQKRTRPRDRSRRAGPAPEANAEIQANLDQRRRMITHANAKSKSEKFPPPHQDGGTGNPLGSYHHMEPMFEHQDASFSTVVPIEKGTSQTWSGPLFDPAALGQSRRKKQTTLDAKAAAYSKQLQKEKGGIRAR

SEQ ID NO: 35965 - DNA, 447 bp, Zea mays subsp. mays
  misc_feature (1)..(447): Ceres Seq. ID no. 3104735
gtctttcacgcttgaccagccctgctctgctcattgctggaggcaaaggaaggtttgcgctggaggggttcgtcagagatggacttcttcagtgaatacggcgatgcgaacagatacaaaatccaagaggtcattggcaaaggaagttatggcgttgtttgctcagctgttgaccaacataccagtgacaaggtggcaatcaagaaaatacacaatatctttgagcacttatctgatgctgcccggatcctacgtgagatcaaactgcttcggctattacgccatcctgatatagttgagatcaagcatataatgctgcctccatcaaggagggacttcaaagatatctatgttgtatttgagctgatggatacagacctccaccaagtcatcaaggcaaatgatgatttaacccgagagcatcatcagttctttctctatcagatg

SEQ ID NO: 35966 - protein, 123 aa, Zea mays subsp. mays
  peptide (1)..(123): Ceres Seq. ID no. 3104736
  misc_feature (13)..(122): Pfam Name: Pfam Description:  Protein kinase domain
  misc_feature (1)..(122): NCBI GI NO: 24412850 NR Description: putative mitogen-activated protein kinase wjumk1
  misc_feature (1)..(122): NCBI GI NO: 34910892 NR Description: putative mitogen-activated protein kinase
  misc_feature (1)..(122): NCBI GI NO: 34912932 NR Description: MAP kinase-like protein
  misc_feature (1)..(122): NCBI GI NO: 18406088 NR Description: putative MAP kinase; protein id: At2g42880
  misc_feature (1)..(122): NCBI GI NO: 25408817 NR Description: probable MAP kinase
  misc_feature (1)..(122): NCBI GI NO: 37594657 NR Description: mitogen activated protein kinase 6 [Zea mays]
  misc_feature (1)..(122): NCBI GI NO: 15220806 NR Description: MAP kinase ATMPK9, putative; protein id:At1g53510
  misc_feature (1)..(122): NCBI GI NO: 2104949 NR Description: MAP kinase-like protein [Selaginella lepidophylla]
  misc_feature (1)..(122): NCBI GI NO: 9294393 NR Description: mitogen-activated protein kinase
  misc_feature (1)..(122): NCBI GI NO: 4732123 NR Description: mitogen-activated protein kinase homologue
MDFFSEYGDANRYKIQEVIGKGSYGVVCSAVDQHTSDKVAIKKIHNIFEHLSDAARILREIKLLRLLRHPDIVEIKHIMLPPSRRDFKDIYVVFELMDTDLHQVIKANDDLTREHHQFFLYQM

SEQ ID NO: 35967 - protein, 97 aa, Zea mays subsp. mays
  peptide (1)..(97): Ceres Seq. ID no. 3104737
SFTLDQPCSAHCWRQRKVCAGGVRQRWTSSVNTAMRTDTKSKRSLAKEVMALFAQLLTNIPVTRWQSRKYTISLSTYLMLPGSYVRSNCFGYYAILI

SEQ ID NO: 35968 - protein, 63 aa, Zea mays subsp. mays
  peptide (1)..(63): Ceres Seq. ID no. 3104738
MRTDTKSKRSLAKEVMALFAQLLTNIPVTRWQSRKYTISLSTYLMLPGSYVRSNCFGYYAILI

SEQ ID NO: 35969 - DNA, 1679 bp, Zea mays subsp. mays
  misc_feature (1)..(1679): Ceres Seq. ID no. 12462479
actagcaaacattaataacgcaagcggcactgttgtcagtgtcagtgcacagtagatatactgctagctagcttacctggcagccagtgcaactgcactgcacgtctccaatgcgctgctattataacgacgcgaacgccgcgcaggccttccgtggtatacagcagcagaagcagcatcacgatcccggcccggcggcccgtacgtcgacgaggaggaggaggacgtacgtacgcagagcagctgctggcaccatggctcccgtgagcatcagcgctgttccgttcctcccgacggcggcggagggggagacgaacgtgcgcgcgtcgttcgtgcgcgaggaggacgagcgccccaaggtgccgcacgaccgcttcagcgacgaggtgccggtggtgtcgctcgagggcatcgacgggccgcgcaggcgggccgagatccgcggccgcgtggccgcggcctgcgaggactggggcatcttccaggtggtggaccacggcgtggacgccgcgctcgtggccgacatggcgcgcctcgcccgagacttcttcgcgctcccgcccgaggacaagctccgcttcgacatgtccggcgggaagaagggcggcttcatcgtctccagccacctccagggggaggcggtgcaggactggcgtgagatcgtgacctacttctcgtacccggtgaaggcccgcgactactcccggtggccggacaagccggcggcgtggcgggcggtggtggagcggtacagcgagcagctgatggcgctggcgtgcaggctcctgggcgtgctctccgaggccatgggcctggacacggaggcgctggccagggcctgcgtggacatggaccagaaggtggtggtcaacttctacccgaggtgcccgcagccggacctcacgctggggctcaagcgccacaccgaccccggcaccatcacgctgctgctgcaggacctggtcggcggcctccaggccacgcgcgacggcggccggacctggatcaccgtgcagcccgtggagggcgccttcgtcgtcaacctcggcgaccacggccacctcctgagcaacggcaggttcaagaacgcggaccaccaggcggtggtgaactcggagtgcagccgcctgtccatcgccacgttccagaacccggcgcccgacgcgacggtgtacccgctggccgtgcgcgacggggaggcgcccatactggaccatcccatcaccttcgccgagatgtaccgccgcaagatggcccgcgacatcgagctcgccaggctcaagaagcaggccaaggccgacaagaagcagcagcagcagagtgccaacaaggagttcgccgactccaagcctctcgacgccatttttgcctgatatggtagagggcgcgcgactaccgatccgttgttattgctgcgtgtgattaattttcatctataagaacatagctacgtgcgaccgcgcgtgtggtgattaattaaggtctgaataaaataatggctgcacaaaactaggaagcgatcgatcacccagataaatgtatgtgcgttcccttttcttctttcaagatgtgtaattttcaacgtgcggttccagatgcatggactggactggaccggagtgcattgtaattcttttgtttccccctgttgaatatgcgagaggtgtgcatgtctttgt

SEQ ID NO: 35970 - protein, 420 aa, Zea mays subsp. mays
  peptide (1)..(420): Ceres Seq. ID no. 12462480
  misc_feature (247)..(348): Pfam Name: II Pfam Description: 2OG-Fe
  misc_feature (49)..(420): NCBI GI NO: 7433183 NR Description: naringenin 3-dioxygenase (EC 1.14.11.9) - maize
  misc_feature (49)..(403): NCBI GI NO: 120229 NR Description: Naringenin,2-oxoglutarate 3-dioxygenase
  misc_feature (55)..(420): NCBI GI NO: 30230339 NR Description: putative flavonoid 3-hydroxylase
  misc_feature (62)..(420): NCBI GI NO: 4512593 NR Description: flavanone 3-hydroxyrase [Ipomoea batatas]
  misc_feature (62)..(420): NCBI GI NO: 4512591 NR Description: flavanone 3-hydroxyrase [Ipomoea batatas]
  misc_feature (62)..(420): NCBI GI NO: 4512589 NR Description: fravanone 3-hydroxyrase [Ipomoea batatas]
  misc_feature (62)..(420): NCBI GI NO: 2344781 NR Description: 2-oxogulutarate 3-dioxygenase
  misc_feature (54)..(401): NCBI GI NO: 1364117 NR Description: naringenin 3-dioxygenase (EC 1
  misc_feature (62)..(420): NCBI GI NO: 1786049 NR Description: flavanone 3-hydroxylase [Ipomoea purpurea]
  misc_feature (62)..(420): NCBI GI NO: 729505 NR Description: Naringenin,2-oxoglutarate 3-dioxygenase
MRCYYNDANAAQAFRGIQQQKQHHDPGPAARTSTRRRRTYVRRAAAGTMAPVSISAVPFLPTAAEGETNVRASFVREEDERPKVPHDRFSDEVPVVSLEGIDGPRRRAEIRGRVAAACEDWGIFQVVDHGVDAALVADMARLARDFFALPPEDKLRFDMSGGKKGGFIVSSHLQGEAVQDWREIVTYFSYPVKARDYSRWPDKPAAWRAVVERYSEQLMALACRLLGVLSEAMGLDTEALARACVDMDQKVVVNFYPRCPQPDLTLGLKRHTDPGTITLLLQDLVGGLQATRDGGRTWITVQPVEGAFVVNLGDHGHLLSNGRFKNADHQAVVNSECSRLSIATFQNPAPDATVYPLAVRDGEAPILDHPITFAEMYRRKMARDIELARLKKQAKADKKQQQQSANKEFADSKPLDAIFA

SEQ ID NO: 35971 - protein, 372 aa, Zea mays subsp. mays
  peptide (1)..(372): Ceres Seq. ID no. 12462481
  misc_feature (199)..(300): Pfam Name: II Pfam Description: 2OG-Fe
  misc_feature (1)..(372): NCBI GI NO: 7433183 NR Description: naringenin 3-dioxygenase (EC 1.14.11.9) - maize
  misc_feature (1)..(355): NCBI GI NO: 120229 NR Description: Naringenin,2-oxoglutarate 3-dioxygenase
  misc_feature (7)..(372): NCBI GI NO: 30230339 NR Description: putative flavonoid 3-hydroxylase
  misc_feature (14)..(372): NCBI GI NO: 4512593 NR Description: flavanone 3-hydroxyrase [Ipomoea batatas]
  misc_feature (14)..(372): NCBI GI NO: 4512591 NR Description: flavanone 3-hydroxyrase [Ipomoea batatas]
  misc_feature (14)..(372): NCBI GI NO: 4512589 NR Description: fravanone 3-hydroxyrase [Ipomoea batatas]
  misc_feature (14)..(372): NCBI GI NO: 2344781 NR Description: 2-oxogulutarate 3-dioxygenase
  misc_feature (6)..(353): NCBI GI NO: 1364117 NR Description: naringenin 3-dioxygenase (EC 1
  misc_feature (14)..(372): NCBI GI NO: 1786049 NR Description: flavanone 3-hydroxylase [Ipomoea purpurea]
  misc_feature (14)..(372): NCBI GI NO: 729505 NR Description: Naringenin,2-oxoglutarate 3-dioxygenase
MAPVSISAVPFLPTAAEGETNVRASFVREEDERPKVPHDRFSDEVPVVSLEGIDGPRRRAEIRGRVAAACEDWGIFQVVDHGVDAALVADMARLARDFFALPPEDKLRFDMSGGKKGGFIVSSHLQGEAVQDWREIVTYFSYPVKARDYSRWPDKPAAWRAVVERYSEQLMALACRLLGVLSEAMGLDTEALARACVDMDQKVVVNFYPRCPQPDLTLGLKRHTDPGTITLLLQDLVGGLQATRDGGRTWITVQPVEGAFVVNLGDHGHLLSNGRFKNADHQAVVNSECSRLSIATFQNPAPDATVYPLAVRDGEAPILDHPITFAEMYRRKMARDIELARLKKQAKADKKQQQQSANKEFADSKPLDAIFA

SEQ ID NO: 35972 - protein, 282 aa, Zea mays subsp. mays
  peptide (1)..(282): Ceres Seq. ID no. 12462482
  misc_feature (109)..(210): Pfam Name: II Pfam Description: 2OG-Fe
  misc_feature (1)..(282): NCBI GI NO: 7433183 NR Description: naringenin 3-dioxygenase (EC 1.14.11.9) - maize
  misc_feature (1)..(265): NCBI GI NO: 120229 NR Description: Naringenin,2-oxoglutarate 3-dioxygenase
  misc_feature (1)..(282): NCBI GI NO: 30230339 NR Description: putative flavonoid 3-hydroxylase
  misc_feature (1)..(282): NCBI GI NO: 4512593 NR Description: flavanone 3-hydroxyrase [Ipomoea batatas]
  misc_feature (1)..(282): NCBI GI NO: 4512591 NR Description: flavanone 3-hydroxyrase [Ipomoea batatas]
  misc_feature (1)..(282): NCBI GI NO: 4512589 NR Description: fravanone 3-hydroxyrase [Ipomoea batatas]
  misc_feature (1)..(282): NCBI GI NO: 2344781 NR Description: 2-oxogulutarate 3-dioxygenase
  misc_feature (1)..(263): NCBI GI NO: 1364117 NR Description: naringenin 3-dioxygenase (EC 1
  misc_feature (1)..(282): NCBI GI NO: 1786049 NR Description: flavanone 3-hydroxylase [Ipomoea purpurea]
  misc_feature (1)..(282): NCBI GI NO: 729505 NR Description: Naringenin,2-oxoglutarate 3-dioxygenase
MARLARDFFALPPEDKLRFDMSGGKKGGFIVSSHLQGEAVQDWREIVTYFSYPVKARDYSRWPDKPAAWRAVVERYSEQLMALACRLLGVLSEAMGLDTEALARACVDMDQKVVVNFYPRCPQPDLTLGLKRHTDPGTITLLLQDLVGGLQATRDGGRTWITVQPVEGAFVVNLGDHGHLLSNGRFKNADHQAVVNSECSRLSIATFQNPAPDATVYPLAVRDGEAPILDHPITFAEMYRRKMARDIELARLKKQAKADKKQQQQSANKEFADSKPLDAIFA

SEQ ID NO: 35973 - DNA, 1514 bp, Zea mays subsp. mays
  misc_feature (1)..(1514): Ceres Seq. ID no. 12590448
ccaccacaaccaccaaccaacgggcgtgcccaccacgcggcgccgttggggttggcgggcgccatgggggcgccgagcagccgcgcgctggcgctgggcgcggccttcctgctgctcctcgtcgcgctgccctccgccttcctctacctcacctcctccgcggccacccgcgccaccctcctcgacctcaagcccttctccgccaggtgcgcgcccgcagtcgcgccgctccgcgtcttcatgtacgacctgcctgcgcgcttccacgtcgccatgatgggggccgccgccggcgcggggttccccgcgtggccgccgtccgcgggcgggatcaggcgccagcacagcgtggagtactggatgatggcgtcgctccaggatgggggcgcgggaccggagcggggaagggaggccgtcagggtgcgggatcctgacgccgccgacgccttcttcgtgcccttcttctcctcgctcagcttcaacgtgcacggtcgcaacatgaccgaccctgacaccgaggccgaccgcctcctgcaggttgaacttgtggatattctctggaagtctaaatattggcaacgttctgcgggccgtgaccatgtcattcctatgcatcaccctaatgctttcagattcctgcgagcaatggtgaatgcatctattcttatagtttcagactttgggagatacacaaaggaactggcttccctgaggaaagatgttgtggcaccatatgtgcatgttgtgggttccttccttgatgacgatccacctgatccatttgaggctcgccatacactgcttttctttcgaggccgtactgtcaggaaagatgaagggaaaatccggtcaaaacttgagaagatattaaaaggcaaggaaggggtgcgctttgaggatagcattgccacgggcgacggcattaacatatctacagaaggtatgcggtcatcaaagttttgtctccaccctgctggggacactccttcctcatgccgcctgtttgatgccatagtcagtcattgtgttcctgtgatagtcagcagtcgaatcgagctcccttttgaagatgagattgattacagtgagttctcccttttcttctccgttgaagaggctctaagacctgattacttgctgaacgagctcagacaggtccccaaaaggaagtgggttgatatgtggttgaagcttaagaatgtctcccatcattatgaattccagtatccccccaggaagggcgacgcggtgaacatgatatggaggcaggtgaggcacaagatccccgcagttaaccttgctattcacaggaacagaagactgaaaattccagactggtggggataatgattggtggtgaatcgtgtacatattaccatatccactgttagtcctggttattttcggtgcgttatgatggaaacattgctcaccgtcctttgtgaaccaaagtgttcatcttaagatccaaggaccgagtccacaactatttgctgacaggaactgagattatc

SEQ ID NO: 35974 - protein, 448 aa, Zea mays subsp. mays
  peptide (1)..(448): Ceres Seq. ID no. 12590449
  misc_feature (79)..(398): Pfam Name: Pfam Description:  Exostosin family
  misc_feature (22)..(448): NCBI GI NO: 19386797 NR Description: OJ1485_B09.5
  misc_feature (36)..(447): NCBI GI NO: 22330483 NR Description: Exostosin family; protein id: At1g67410.1
  misc_feature (36)..(335): NCBI GI NO: 7487224 NR Description: hypothetical protein T1F15
  misc_feature (311)..(428): NCBI GI NO: 7487224 NR Description: hypothetical protein T1F15
  misc_feature (77)..(442): NCBI GI NO: 18410670 NR Description: Exostosin family; protein id: At1g74680
  misc_feature (77)..(442): NCBI GI NO: 25406363 NR Description: F25A4.34 [imported] - Arabidopsis thaliana
  misc_feature (31)..(440): NCBI GI NO: 15230692 NR Description: Exostosin family; protein id: At3g45400.1
  misc_feature (69)..(444): NCBI GI NO: 15228598 NR Description: Exostosin family; protein id: At3g03650.1
  misc_feature (29)..(441): NCBI GI NO: 34899802 NR Description: OJ1092_A07.9
  misc_feature (29)..(441): NCBI GI NO: 30686300 NR Description: Exostosin family [Arabidopsis thaliana]
PPQPPTNGRAHHAAPLGLAGAMGAPSSRALALGAAFLLLLVALPSAFLYLTSSAATRATLLDLKPFSARCAPAVAPLRVFMYDLPARFHVAMMGAAAGAGFPAWPPSAGGIRRQHSVEYWMMASLQDGGAGPERGREAVRVRDPDAADAFFVPFFSSLSFNVHGRNMTDPDTEADRLLQVELVDILWKSKYWQRSAGRDHVIPMHHPNAFRFLRAMVNASILIVSDFGRYTKELASLRKDVVAPYVHVVGSFLDDDPPDPFEARHTLLFFRGRTVRKDEGKIRSKLEKILKGKEGVRFEDSIATGDGINISTEGMRSSKFCLHPAGDTPSSCRLFDAIVSHCVPVIVSSRIELPFEDEIDYSEFSLFFSVEEALRPDYLLNELRQVPKRKWVDMWLKLKNVSHHYEFQYPPRKGDAVNMIWRQVRHKIPAVNLAIHRNRRLKIPDWWG

SEQ ID NO: 35975 - protein, 427 aa, Zea mays subsp. mays
  peptide (1)..(427): Ceres Seq. ID no. 12590450
  misc_feature (58)..(377): Pfam Name: Pfam Description:  Exostosin family
  misc_feature (1)..(427): NCBI GI NO: 19386797 NR Description: OJ1485_B09.5
  misc_feature (15)..(426): NCBI GI NO: 22330483 NR Description: Exostosin family; protein id: At1g67410.1
  misc_feature (15)..(314): NCBI GI NO: 7487224 NR Description: hypothetical protein T1F15
  misc_feature (290)..(407): NCBI GI NO: 7487224 NR Description: hypothetical protein T1F15
  misc_feature (56)..(421): NCBI GI NO: 18410670 NR Description: Exostosin family; protein id: At1g74680
  misc_feature (56)..(421): NCBI GI NO: 25406363 NR Description: F25A4.34 [imported] - Arabidopsis thaliana
  misc_feature (10)..(419): NCBI GI NO: 15230692 NR Description: Exostosin family; protein id: At3g45400.1
  misc_feature (48)..(423): NCBI GI NO: 15228598 NR Description: Exostosin family; protein id: At3g03650.1
  misc_feature (8)..(420): NCBI GI NO: 34899802 NR Description: OJ1092_A07.9
  misc_feature (8)..(420): NCBI GI NO: 30686300 NR Description: Exostosin family [Arabidopsis thaliana]
MGAPSSRALALGAAFLLLLVALPSAFLYLTSSAATRATLLDLKPFSARCAPAVAPLRVFMYDLPARFHVAMMGAAAGAGFPAWPPSAGGIRRQHSVEYWMMASLQDGGAGPERGREAVRVRDPDAADAFFVPFFSSLSFNVHGRNMTDPDTEADRLLQVELVDILWKSKYWQRSAGRDHVIPMHHPNAFRFLRAMVNASILIVSDFGRYTKELASLRKDVVAPYVHVVGSFLDDDPPDPFEARHTLLFFRGRTVRKDEGKIRSKLEKILKGKEGVRFEDSIATGDGINISTEGMRSSKFCLHPAGDTPSSCRLFDAIVSHCVPVIVSSRIELPFEDEIDYSEFSLFFSVEEALRPDYLLNELRQVPKRKWVDMWLKLKNVSHHYEFQYPPRKGDAVNMIWRQVRHKIPAVNLAIHRNRRLKIPDWWG

SEQ ID NO: 35976 - protein, 368 aa, Zea mays subsp. mays
  peptide (1)..(368): Ceres Seq. ID no. 12590451
  misc_feature (1)..(318): Pfam Name: Pfam Description:  Exostosin family
  misc_feature (1)..(368): NCBI GI NO: 19386797 NR Description: OJ1485_B09.5
  misc_feature (1)..(367): NCBI GI NO: 22330483 NR Description: Exostosin family; protein id: At1g67410.1
  misc_feature (1)..(255): NCBI GI NO: 7487224 NR Description: hypothetical protein T1F15
  misc_feature (231)..(348): NCBI GI NO: 7487224 NR Description: hypothetical protein T1F15
  misc_feature (1)..(362): NCBI GI NO: 18410670 NR Description: Exostosin family; protein id: At1g74680
  misc_feature (1)..(362): NCBI GI NO: 25406363 NR Description: F25A4.34 [imported] - Arabidopsis thaliana
  misc_feature (1)..(360): NCBI GI NO: 15230692 NR Description: Exostosin family; protein id: At3g45400.1
  misc_feature (1)..(364): NCBI GI NO: 15228598 NR Description: Exostosin family; protein id: At3g03650.1
  misc_feature (1)..(361): NCBI GI NO: 34899802 NR Description: OJ1092_A07.9
  misc_feature (1)..(361): NCBI GI NO: 30686300 NR Description: Exostosin family [Arabidopsis thaliana]
MYDLPARFHVAMMGAAAGAGFPAWPPSAGGIRRQHSVEYWMMASLQDGGAGPERGREAVRVRDPDAADAFFVPFFSSLSFNVHGRNMTDPDTEADRLLQVELVDILWKSKYWQRSAGRDHVIPMHHPNAFRFLRAMVNASILIVSDFGRYTKELASLRKDVVAPYVHVVGSFLDDDPPDPFEARHTLLFFRGRTVRKDEGKIRSKLEKILKGKEGVRFEDSIATGDGINISTEGMRSSKFCLHPAGDTPSSCRLFDAIVSHCVPVIVSSRIELPFEDEIDYSEFSLFFSVEEALRPDYLLNELRQVPKRKWVDMWLKLKNVSHHYEFQYPPRKGDAVNMIWRQVRHKIPAVNLAIHRNRRLKIPDWWG

SEQ ID NO: 35977 - DNA, 422 bp, Zea mays subsp. mays
  misc_feature (1)..(422): Ceres Seq. ID no. 5761283
cgaaaaatctaccgtgcggagggggaagagggagaggccaggagaggaaagcctgcagccaccatgcattccgacctctggatctcgcgtctcacggccgccaagcggcagtttgcgctgcagcgcgcgcagcgccagcacgccgccccggcatcccatcacgatcggatttgggtatgatgatatcgaacctgaggatgatttgcactcagacttcccatgcccttactgttatgaagatcatgatgttgcttctctctgcgcccatttggaggacgagcaccctttcgagtctaaaattgtgtcttgcccagtttgctcagctaggatttcgaaggacttggtggatcatataacccttcagcatggctacctatttaaaatatccttcttagatgattatatctttttagacatgtttt

SEQ ID NO: 35978 - protein, 140 aa, Zea mays subsp. mays
  peptide (1)..(140): Ceres Seq. ID no. 5761284
  misc_feature (31)..(128): Pfam Name: Di19 Pfam Description: Drought induced 19 protein
  misc_feature (31)..(128): NCBI GI NO: 18377875 NR Description: AT3g06760/F3E22_10 [Arabidopsis thaliana]
  misc_feature (58)..(128): NCBI GI NO: 25992529 NR Description: fiber protein Fb2 [Gossypium barbadense]
  misc_feature (58)..(131): NCBI GI NO: 7485240 NR Description: hypothetical protein A_IG002P16
  misc_feature (58)..(128): NCBI GI NO: 1076316 NR Description: drought-induced protein Di19
  misc_feature (58)..(128): NCBI GI NO: 15028023 NR Description: unknown protein [Arabidopsis thaliana]
  misc_feature (58)..(129): NCBI GI NO: 15240426 NR Description: drought-induced protein - like
  misc_feature (26)..(128): NCBI GI NO: 13937216 NR Description: AT5g49230/K21P3_11 [Arabidopsis thaliana]
  misc_feature (58)..(128): NCBI GI NO: 28393233 NR Description: unknown protein [Arabidopsis thaliana]
  misc_feature (26)..(128): NCBI GI NO: 15239827 NR Description: drought-induced protein Di19-like protein
  misc_feature (61)..(133): NCBI GI NO: 3377806 NR Description: contains similarity to Arabidopsis thalianadrought-induced protein Di19
EKSTVRRGKRERPGEESLQPPCIPTSGSRVSRPPSGSLRCSARSASTPPRHPITIGFGYDDIEPEDDLHSDFPCPYCYEDHDVASLCAHLEDEHPFESKIVSCPVCSARISKDLVDHITLQHGYLFKISFLDDYIFLDMF

SEQ ID NO: 35979 - protein, 117 aa, Zea mays subsp. mays
  peptide (1)..(117): Ceres Seq. ID no. 5761285
KNLPCGGGRGRGQERKACSHHAFRPLDLASHGRQAAVCAAARAAPARRPGIPSRSDLGMMISNLRMICTQTSHALTVMKIMMLLLSAPIWRTSTLSSLKLCLAQFAQLGFRRTWWII

SEQ ID NO: 35980 - DNA, 2939 bp, Zea mays subsp. mays
  misc_feature (1)..(2939): Ceres Seq. ID no. 12435700
ccaggacgacaactcccaggtcccgactcccccaaatttcccccttcccttccgcctcgcctccagccaccgcgtccgcctcgcctccagccaccgcgtccgcctccgatggcgtcggcggcggggtcctcgaacgtgatgctcgcgatcaacgagaagaaaacgatcaccactgacctctaccgcccgctgcgcctctacatcgcctccacctactcggaacgcgaggccgctgcggccgacgacgaccttagcgtggtgtgcgacctccgcgctgctgtcgagaagccctccctcccggatccgtcctccctcgagcagcgccgcgacgcgctcctcgcctacgcgcgggctctggcactcgtggagccccgcttccccatctcccccgatcgcgcccacgtccactccctcaccttcacctggcacgacgcattcaaggggaacaagaagtgcgccctcgcctccatccacctcgagaaggcatccgtgctctttaacctcggcgccgtctactcccagatcgcgctcgccgcggaccgctcgactgacgtcgggatcaggatcgcgtgcggcgccttccagagtgcggcgggggcgttcgcgtggctcagggagagcggggccgcggcgaaggctgtcgctgcggggaccaccaccgtggacatcacgcccgagtgcgccggcatgctggagaaactcatgctcgcgcaggcgcaagaatgcttcttcgagaaggtcataggtggagggaagccacccgcgctgtgctccaaggtggcgcggcaggttggcatactctatgaagaagcatacacagctctcagtgcatctcctctaagtcagcactttgataagacatgggtgtcccatgtccagcttaaagctgctcaattctacgccgatgcttgctacaggtattcactggatcttcatgagaaagaagaaattgctgaggaaattgcacgtttaaagattggtatgagtgccttggcagatgctaagaagactacgaagggagttgctgcccaacttctggattccgtcaacaagctggaaagtaacatgaaaaccaacttggaaagggctatgaaggagaatgatcgtgtttacttgatgcgggttccagctgctggttccttgggtgccctccctgcagcgtcccttgtaaaacctacctctttggctgaagttttagatgccagcaaggaaaggcttttttcatcacttgtgcctgatggcagcatgaaagcactttctaagtacacagagatggtagataatagtatccggacccaggctgagaaattgcagcaagctagtgagatcactagagtcaggctgaaggaaatggacttaccagattctattctttcattggaaggaaatataaccttgcccatggatctgaaggaagacgtagaggctgtgcagataagcggtggccctgctggcttagaatctgagttgcagcaacttagggatttgagcagggtcaatcaggaactacttgtccagactgaagagcttctacagaaggaggcgaatgaagacgctcaatttcgtacacaatttgggagtcgttggactagacctcaatcaagcaccctaacaaagaatattcaggatagattgaatctgtttgcttctaatttgaagagagctgctgatagtgattctctgattgaacgaggcgtgaaggagaactattcattgatgtctatccttgacaaaagaccgatagagtcttcacttccaagtatttccaggcctatcatgtccttggatggaaatgaagatgccattgttggagccctgaaacaaagcttgagacaactggagtctcttggcgcacaaagggcaggtcttgaagacatgctcaaagaaatgaaaagaaaggatgatatattgcctaagttgatggttggcgtgggatcacatgatgatcttttcaagaaggagattgctaagtatgatcctatatgtgctgatattgctgataacattgtggcacaggaacaattgttgctacaaatacaggcacaaaacgagcaatttgctgctgtattcaacctagaggattacaaagctgcccgtgagagatgttacaagcaaatcgctgctgctgttgtgaaataccaggagtttaaaaagaacatcaacgagggcctaaacttttatgtgactttacaggaagcaattggcaaaataaaacagcagtgcagcgacttcataatgacccgaaacattcagtgccgtgaaatgatggaagatgtgcagaggaagctacccggcttcagattctcgtcgtccagccgctcctctatgcagaggaatgctgcttctgtgccacctgacgagagcagcccatcaccgccaccgccgcatgcccaggctccctatgcctctccaccaggggtagactcgaggcatggatattctcaaccggaggcaagacctgcatactcgcagccataccccccatcctatggcgcgacaccgcaacagccgacgtatggtgcacaacaccccgggcagtaccagccgcctcctggccatgactgcggtcagccggcatatcctggatggcgcgggccatacccatactacaatgccccccagccgcagcaatctgtgccatgtccacaggcgccgtacaatgccactggggcttaccctccgcaccagagcaactattaccgacctcaataagtgctgcaactatttcttattattttgcttcttttttttccattgggtcttaccattctggtgtactactactgcatacgagagagttcgggtagtgtaatagcaggtatagctttgtatgatttagtggcggacccagaaagacccggaccgaagcgaccataaactataatatagtagcatataaaaaattgtacggttaaacaatgttgtcatagatgttaaag

SEQ ID NO: 35981 - protein, 903 aa, Zea mays subsp. mays
  peptide (1)..(903): Ceres Seq. ID no. 12435701
  misc_feature (46)..(208): Pfam Name: Pfam Description:  BRO1-like domain
  misc_feature (37)..(901): NCBI GI NO: 15218061 NR Description: unknown protein; protein id: At1g15130.1
  misc_feature (37)..(901): NCBI GI NO: 23297205 NR Description: At1g15130/F9L1_7 [Arabidopsis thaliana]
  misc_feature (293)..(901): NCBI GI NO: 25518358 NR Description: hypothetical protein F9L1.7
  misc_feature (37)..(271): NCBI GI NO: 25518358 NR Description: hypothetical protein F9L1.7
  misc_feature (47)..(860): NCBI GI NO: 19880054 NR Description: ALG-2 interacting protein X
  misc_feature (48)..(903): NCBI GI NO: 6424942 NR Description: ALG-2 interacting protein 1 [Homo sapiens]
  misc_feature (48)..(903): NCBI GI NO: 13375569 NR Description: HP95 [Homo sapiens]
  misc_feature (48)..(903): NCBI GI NO: 22027538 NR Description: programmed cell death 6 interacting protein
  misc_feature (53)..(903): NCBI GI NO: 26327159 NR Description: unnamed protein product [Mus musculus]
  misc_feature (53)..(903): NCBI GI NO: 6755002 NR Description: programmed cell death 6 interacting protein
PGRQLPGPDSPKFPPSLPPRLQPPRPPRLQPPRPPPMASAAGSSNVMLAINEKKTITTDLYRPLRLYIASTYSEREAAAADDDLSVVCDLRAAVEKPSLPDPSSLEQRRDALLAYARALALVEPRFPISPDRAHVHSLTFTWHDAFKGNKKCALASIHLEKASVLFNLGAVYSQIALAADRSTDVGIRIACGAFQSAAGAFAWLRESGAAAKAVAAGTTTVDITPECAGMLEKLMLAQAQECFFEKVIGGGKPPALCSKVARQVGILYEEAYTALSASPLSQHFDKTWVSHVQLKAAQFYADACYRYSLDLHEKEEIAEEIARLKIGMSALADAKKTTKGVAAQLLDSVNKLESNMKTNLERAMKENDRVYLMRVPAAGSLGALPAASLVKPTSLAEVLDASKERLFSSLVPDGSMKALSKYTEMVDNSIRTQAEKLQQASEITRVRLKEMDLPDSILSLEGNITLPMDLKEDVEAVQISGGPAGLESELQQLRDLSRVNQELLVQTEELLQKEANEDAQFRTQFGSRWTRPQSSTLTKNIQDRLNLFASNLKRAADSDSLIERGVKENYSLMSILDKRPIESSLPSISRPIMSLDGNEDAIVGALKQSLRQLESLGAQRAGLEDMLKEMKRKDDILPKLMVGVGSHDDLFKKEIAKYDPICADIADNIVAQEQLLLQIQAQNEQFAAVFNLEDYKAARERCYKQIAAAVVKYQEFKKNINEGLNFYVTLQEAIGKIKQQCSDFIMTRNIQCREMMEDVQRKLPGFRFSSSSRSSMQRNAASVPPDESSPSPPPPHAQAPYASPPGVDSRHGYSQPEARPAYSQPYPPSYGATPQQPTYGAQHPGQYQPPPGHDCGQPAYPGWRGPYPYYNAPQPQQSVPCPQAPYNATGAYPPHQSNYYRPQ

SEQ ID NO: 35982 - protein, 867 aa, Zea mays subsp. mays
  peptide (1)..(867): Ceres Seq. ID no. 12435702
  misc_feature (10)..(172): Pfam Name: Pfam Description:  BRO1-like domain
  misc_feature (1)..(865): NCBI GI NO: 15218061 NR Description: unknown protein; protein id: At1g15130.1
  misc_feature (1)..(865): NCBI GI NO: 23297205 NR Description: At1g15130/F9L1_7 [Arabidopsis thaliana]
  misc_feature (257)..(865): NCBI GI NO: 25518358 NR Description: hypothetical protein F9L1.7
  misc_feature (1)..(235): NCBI GI NO: 25518358 NR Description: hypothetical protein F9L1.7
  misc_feature (11)..(824): NCBI GI NO: 19880054 NR Description: ALG-2 interacting protein X
  misc_feature (12)..(867): NCBI GI NO: 6424942 NR Description: ALG-2 interacting protein 1 [Homo sapiens]
  misc_feature (12)..(867): NCBI GI NO: 13375569 NR Description: HP95 [Homo sapiens]
  misc_feature (12)..(867): NCBI GI NO: 22027538 NR Description: programmed cell death 6 interacting protein
  misc_feature (17)..(867): NCBI GI NO: 26327159 NR Description: unnamed protein product [Mus musculus]
  misc_feature (17)..(867): NCBI GI NO: 6755002 NR Description: programmed cell death 6 interacting protein
MASAAGSSNVMLAINEKKTITTDLYRPLRLYIASTYSEREAAAADDDLSVVCDLRAAVEKPSLPDPSSLEQRRDALLAYARALALVEPRFPISPDRAHVHSLTFTWHDAFKGNKKCALASIHLEKASVLFNLGAVYSQIALAADRSTDVGIRIACGAFQSAAGAFAWLRESGAAAKAVAAGTTTVDITPECAGMLEKLMLAQAQECFFEKVIGGGKPPALCSKVARQVGILYEEAYTALSASPLSQHFDKTWVSHVQLKAAQFYADACYRYSLDLHEKEEIAEEIARLKIGMSALADAKKTTKGVAAQLLDSVNKLESNMKTNLERAMKENDRVYLMRVPAAGSLGALPAASLVKPTSLAEVLDASKERLFSSLVPDGSMKALSKYTEMVDNSIRTQAEKLQQASEITRVRLKEMDLPDSILSLEGNITLPMDLKEDVEAVQISGGPAGLESELQQLRDLSRVNQELLVQTEELLQKEANEDAQFRTQFGSRWTRPQSSTLTKNIQDRLNLFASNLKRAADSDSLIERGVKENYSLMSILDKRPIESSLPSISRPIMSLDGNEDAIVGALKQSLRQLESLGAQRAGLEDMLKEMKRKDDILPKLMVGVGSHDDLFKKEIAKYDPICADIADNIVAQEQLLLQIQAQNEQFAAVFNLEDYKAARERCYKQIAAAVVKYQEFKKNINEGLNFYVTLQEAIGKIKQQCSDFIMTRNIQCREMMEDVQRKLPGFRFSSSSRSSMQRNAASVPPDESSPSPPPPHAQAPYASPPGVDSRHGYSQPEARPAYSQPYPPSYGATPQQPTYGAQHPGQYQPPPGHDCGQPAYPGWRGPYPYYNAPQPQQSVPCPQAPYNATGAYPPHQSNYYRPQ

SEQ ID NO: 35983 - protein, 857 aa, Zea mays subsp. mays
  peptide (1)..(857): Ceres Seq. ID no. 12435703
  misc_feature (1)..(162): Pfam Name: Pfam Description:  BRO1-like domain
  misc_feature (1)..(855): NCBI GI NO: 15218061 NR Description: unknown protein; protein id: At1g15130.1
  misc_feature (1)..(855): NCBI GI NO: 23297205 NR Description: At1g15130/F9L1_7 [Arabidopsis thaliana]
  misc_feature (247)..(855): NCBI GI NO: 25518358 NR Description: hypothetical protein F9L1.7
  misc_feature (1)..(225): NCBI GI NO: 25518358 NR Description: hypothetical protein F9L1.7
  misc_feature (1)..(814): NCBI GI NO: 19880054 NR Description: ALG-2 interacting protein X
  misc_feature (2)..(857): NCBI GI NO: 6424942 NR Description: ALG-2 interacting protein 1 [Homo sapiens]
  misc_feature (2)..(857): NCBI GI NO: 13375569 NR Description: HP95 [Homo sapiens]
  misc_feature (2)..(857): NCBI GI NO: 22027538 NR Description: programmed cell death 6 interacting protein
  misc_feature (7)..(857): NCBI GI NO: 26327159 NR Description: unnamed protein product [Mus musculus]
  misc_feature (7)..(857): NCBI GI NO: 6755002 NR Description: programmed cell death 6 interacting protein
MLAINEKKTITTDLYRPLRLYIASTYSEREAAAADDDLSVVCDLRAAVEKPSLPDPSSLEQRRDALLAYARALALVEPRFPISPDRAHVHSLTFTWHDAFKGNKKCALASIHLEKASVLFNLGAVYSQIALAADRSTDVGIRIACGAFQSAAGAFAWLRESGAAAKAVAAGTTTVDITPECAGMLEKLMLAQAQECFFEKVIGGGKPPALCSKVARQVGILYEEAYTALSASPLSQHFDKTWVSHVQLKAAQFYADACYRYSLDLHEKEEIAEEIARLKIGMSALADAKKTTKGVAAQLLDSVNKLESNMKTNLERAMKENDRVYLMRVPAAGSLGALPAASLVKPTSLAEVLDASKERLFSSLVPDGSMKALSKYTEMVDNSIRTQAEKLQQASEITRVRLKEMDLPDSILSLEGNITLPMDLKEDVEAVQISGGPAGLESELQQLRDLSRVNQELLVQTEELLQKEANEDAQFRTQFGSRWTRPQSSTLTKNIQDRLNLFASNLKRAADSDSLIERGVKENYSLMSILDKRPIESSLPSISRPIMSLDGNEDAIVGALKQSLRQLESLGAQRAGLEDMLKEMKRKDDILPKLMVGVGSHDDLFKKEIAKYDPICADIADNIVAQEQLLLQIQAQNEQFAAVFNLEDYKAARERCYKQIAAAVVKYQEFKKNINEGLNFYVTLQEAIGKIKQQCSDFIMTRNIQCREMMEDVQRKLPGFRFSSSSRSSMQRNAASVPPDESSPSPPPPHAQAPYASPPGVDSRHGYSQPEARPAYSQPYPPSYGATPQQPTYGAQHPGQYQPPPGHDCGQPAYPGWRGPYPYYNAPQPQQSVPCPQAPYNATGAYPPHQSNYYRPQ

SEQ ID NO: 35984 - DNA, 1329 bp, Zea mays subsp. mays
  misc_feature (1)..(1329): Ceres Seq. ID no. 13503166
gctttaaatccgcctcctcccagcgtctccctcctcccggcctgtcccctcacctccctccccctatctctccaccgccgcagctagctgcgacgtcatgcactcgccggcgccaccgccaccgcatactatctacaattagccagccgtaggcttacctatcctgtgtcaagcaagcctctcgcaagcaacaaggaaggaagctagctagttttatagctgctgtcggcggcggcggctgaagcgacgtgcctgagctaggatttaggttgagatcaggagagggagaaggcggcggcgatggggcgcgggaaggtgcagctgaagcggatcgagaacaagatcaaccgccaggtgacattctccaagcgccgctcggggctactcaagaaggcgcacgagatctccgtgctctgcgacgccgaggtcgcgctcatcatcttctccaccaagggcaagctctacgagtactctaccgattcatgtatggacaaaattcttgaacggtatgagcgctactcctatgcagaaaaggttctcatttccgcagaatatgaaactcagggcaattggtgccatgaatatagaaaactaaaggcgaaggtcgagacaatacagaaatgtcaaaagcacctcatgggagaggatcttgaaactttgaatctcaaagagcttcagcaactagagcagcagctggagagttcactgaaacatatcagaacaaggaagagccagcttatggtcgagtcaatttcagcgctccaacggaaggagaagtcactgcaggaggagaacaaggttctgcagaaggagctcgcggagaagcagaaagaccagcggcagcaagtgcaacgggaccaaactcaacagcagaccagttcgtcttccacgtccttcatgttaagggaagctgccccaacaacaaatgtcagcatcttccctgtggcagcaggcgggagggtggtggaaggggcagcagcgcagccgcaggctcgcgttggactgccaccatggatgcttagccatctgagctgctgaaggtttgccctcaccgtcgcgatgtgatagcccaaaatccagcaagtcttccccggaccccggactgtccccgcttctccgcctggtgcagtatcgtcgtgatcgcgagaagcagcagcagcggtttgccgtattttttaccactgtgtataagtagcatatctgcaatgtgtatattttgttcaccgttcctgctggggcggccgcacggtactttacgcatgtaatatatgtgcttcatcaaatcactttcactaccatagcatgtgccggtttgtggtagtttcatgt

SEQ ID NO: 35985 - protein, 245 aa, Zea mays subsp. mays
  peptide (1)..(245): Ceres Seq. ID no. 13503167
  misc_feature (75)..(174): Pfam Name: Pfam Description:  K-box region
  misc_feature (1)..(245): NCBI GI NO: 29372764 NR Description: m4 [Zea mays]
  misc_feature (1)..(244): NCBI GI NO: 29372748 NR Description: putative MADS-domain transcription factor
  misc_feature (1)..(244): NCBI GI NO: 21070923 NR Description: AP1-like MADS-box protein
  misc_feature (1)..(244): NCBI GI NO: 6606070 NR Description: MADS14 protein [Oryza sativa]
  misc_feature (1)..(244): NCBI GI NO: 12019658 NR Description: FDRMADS6 [Oryza sativa]
  misc_feature (1)..(244): NCBI GI NO: 7592642 NR Description: AP1-like MADS box protein [Oryza sativa]
  misc_feature (1)..(244): NCBI GI NO: 30090030 NR Description: MADS box transcription factor AP1
  misc_feature (1)..(244): NCBI GI NO: 4204232 NR Description: MADS-box protein 1 [Lolium temulentum]
  misc_feature (1)..(244): NCBI GI NO: 30721847 NR Description: MADS-box protein TaVRT-1 [Triticum aestivum]
  misc_feature (1)..(244): NCBI GI NO: 28630953 NR Description: MADS1 [Lolium perenne]
MGRGKVQLKRIENKINRQVTFSKRRSGLLKKAHEISVLCDAEVALIIFSTKGKLYEYSTDSCMDKILERYERYSYAEKVLISAEYETQGNWCHEYRKLKAKVETIQKCQKHLMGEDLETLNLKELQQLEQQLESSLKHIRTRKSQLMVESISALQRKEKSLQEENKVLQKELAEKQKDQRQQVQRDQTQQQTSSSSTSFMLREAAPTTNVSIFPVAAGGRVVEGAAAQPQARVGLPPWMLSHLSC

SEQ ID NO: 35986 - protein, 183 aa, Zea mays subsp. mays
  peptide (1)..(183): Ceres Seq. ID no. 13503168
  misc_feature (13)..(112): Pfam Name: Pfam Description:  K-box region
  misc_feature (1)..(183): NCBI GI NO: 29372764 NR Description: m4 [Zea mays]
  misc_feature (1)..(182): NCBI GI NO: 29372748 NR Description: putative MADS-domain transcription factor
  misc_feature (1)..(182): NCBI GI NO: 21070923 NR Description: AP1-like MADS-box protein
  misc_feature (1)..(182): NCBI GI NO: 6606070 NR Description: MADS14 protein [Oryza sativa]
  misc_feature (1)..(182): NCBI GI NO: 12019658 NR Description: FDRMADS6 [Oryza sativa]
  misc_feature (1)..(182): NCBI GI NO: 7592642 NR Description: AP1-like MADS box protein [Oryza sativa]
  misc_feature (1)..(182): NCBI GI NO: 30090030 NR Description: MADS box transcription factor AP1
  misc_feature (1)..(182): NCBI GI NO: 4204232 NR Description: MADS-box protein 1 [Lolium temulentum]
  misc_feature (1)..(182): NCBI GI NO: 30721847 NR Description: MADS-box protein TaVRT-1 [Triticum aestivum]
  misc_feature (1)..(182): NCBI GI NO: 28630953 NR Description: MADS1 [Lolium perenne]
MDKILERYERYSYAEKVLISAEYETQGNWCHEYRKLKAKVETIQKCQKHLMGEDLETLNLKELQQLEQQLESSLKHIRTRKSQLMVESISALQRKEKSLQEENKVLQKELAEKQKDQRQQVQRDQTQQQTSSSSTSFMLREAAPTTNVSIFPVAAGGRVVEGAAAQPQARVGLPPWMLSHLSC

SEQ ID NO: 35987 - protein, 133 aa, Zea mays subsp. mays
  peptide (1)..(133): Ceres Seq. ID no. 13503169
  misc_feature (1)..(62): Pfam Name: Pfam Description:  K-box region
  misc_feature (1)..(133): NCBI GI NO: 29372764 NR Description: m4 [Zea mays]
  misc_feature (1)..(132): NCBI GI NO: 29372748 NR Description: putative MADS-domain transcription factor
  misc_feature (1)..(132): NCBI GI NO: 21070923 NR Description: AP1-like MADS-box protein
  misc_feature (1)..(132): NCBI GI NO: 6606070 NR Description: MADS14 protein [Oryza sativa]
  misc_feature (1)..(132): NCBI GI NO: 12019658 NR Description: FDRMADS6 [Oryza sativa]
  misc_feature (1)..(132): NCBI GI NO: 7592642 NR Description: AP1-like MADS box protein [Oryza sativa]
  misc_feature (1)..(132): NCBI GI NO: 30090030 NR Description: MADS box transcription factor AP1
  misc_feature (1)..(132): NCBI GI NO: 4204232 NR Description: MADS-box protein 1 [Lolium temulentum]
  misc_feature (1)..(132): NCBI GI NO: 30721847 NR Description: MADS-box protein TaVRT-1 [Triticum aestivum]
  misc_feature (1)..(132): NCBI GI NO: 28630953 NR Description: MADS1 [Lolium perenne]
MGEDLETLNLKELQQLEQQLESSLKHIRTRKSQLMVESISALQRKEKSLQEENKVLQKELAEKQKDQRQQVQRDQTQQQTSSSSTSFMLREAAPTTNVSIFPVAAGGRVVEGAAAQPQARVGLPPWMLSHLSC

SEQ ID NO: 35988 - DNA, 2088 bp, Zea mays subsp. mays
  misc_feature (1)..(2088): Ceres Seq. ID no. 12435689
  misc_feature (1156)..(1156): n is a, c, t, g, unknown, or other
tacaaaaaagtgctgcgcatatgcacacaaagggcaggaggaggaacggcacgcgcgccaggaccgcaggagcacacacctcagtgcgccagcgttctgcacctcgctagctcgtcgtgtcttgcctgcgctgtcgtcgctgacccttgagatctgcagactccatggaggctgcagcagcgacgacggcggcggcgcttcttcctcccgctcggaaggtgttcatcctgcccttgcttctcctcctggctgcatcacgagcttcgtctgatggagtgcaatatgattatagagcttacactgagtgcaaacctcaccctgagcctgctctgtacaacggtggcgtcctccgctgggcgagcaaaataacggacttcagaacggaggacgaaggcaactactccccggcatttgtgctctacaacatgtcggcggcgactgcgtacagcttctcttgctgggtgaaaatcgacgggccagaaagcgcacatgtgaaggcgaagatactgaccgtggagaacgcagcgtcgcagtgcgtcggcaccgctatcgcgcgcaacgactgctggtcttttctcaagggtggctttactctcaactccacgtctcaaacctcggtgctctatttgcagactgcgagcccaaatgcttcgacgatctcaatcagaagcccctccttgcagccattctcacccgatgagtggaatcagcacagggaggagcgtatccaacagattcggaagcgtttcgtgaacctgcatgtctccgacggcaacggcagccgcgtggtcggggcggacgtggccgtgcaccagatcaccagagacttccccttcggctccgccatcagcaagagcatcctcgggaacaggccgtaccaggactggttcaacgcgcggttcaacgcggcggtgttcgagaacgagctcaagtggtacgcgacggagccgtcgcctgggaaggaggagtacgcggcggcggaccagctgctgcggttcgtgcagtccaacgacgtgacggcgcgcgggcacaacatcttctgggaggaccccaggtacacgccggcgtgggtgaagaacctgacgggcccgcagctgcgcgccgcggtggcaggccgcgtccagagcctgctgtcgcggtacaagggcgacttcgngcactgggacgtgagcaacgagatgctgcacttcgacttctacgaggaccggctgggcggcaacgccacggccgacttcttcagcacggccaggcgcgccgacccgctggccacgctcttcctcaacgacttcaacgtggtggaggcgtgcgacgacctcagctccagcgccgactcctacgtgtccaggcttcgccagctcgccgacgacgccggggtcaccttcgagggcatcgggctggagggccacttcgccaagcccaacgtcccctacgtgcgcgccgtgctcgacaagctgggcacgctccgcctgcccgtctggctcaccgaggtcgacgtcagcgccgccttcgaccacgccacgcaggccgcgtacctagaggacgtcctccgcgaaggcttcgcgcacccggccgtcgacggcatcgtgctgtggacggccatgggcgccaacgccacctgctaccagatgtgcctcacggacgccgacttcaccaacctcccggccggagacgtcgtcgacaggctgctgggggagtggcagaccaaggaggtgctgggagccaccgatgaccgcggctccttcaacttcagcgccttccacggcgagtacaggctctccgtcacctatctcaaccgcactgccgacgccaccttctcgctgcctcgcagcgacgacaccaagcacatcaacatccgcctaccgcctggacctgcagcctgatctcattattagaaatgtactactagaatttaagaactaaatatactgtggtgcatcagctgtgttaattggtacgtgtccgtggattgatacaactactactatacgcgcgcaactatctcgacctcttatgatgaaactagtacaatgagtgtgttgtgatggtacacaaattacgcatagtatctttaaaaactctattgtagtt

SEQ ID NO: 35989 - protein, 571 aa, Zea mays subsp. mays
  peptide (1)..(571): Ceres Seq. ID no. 12435690
  misc_feature (213)..(508): Pfam Name: Pfam Description:  Glycosyl hydrolase family 10
  misc_feature (19)..(565): NCBI GI NO: 28416709 NR Description: At4g38650 [Arabidopsis thaliana]
  misc_feature (146)..(565): NCBI GI NO: 15233983 NR Description: glycosyl hydrolase family 10; protein id:At4g38650
  misc_feature (94)..(558): NCBI GI NO: 30689830 NR Description: glycosyl hydrolase family 10
  misc_feature (24)..(62): NCBI GI NO: 30689830 NR Description: glycosyl hydrolase family 10
  misc_feature (73)..(557): NCBI GI NO: 23429644 NR Description: endoxylanase [Carica papaya]
  misc_feature (94)..(552): NCBI GI NO: 15235134 NR Description: glycosyl hydrolase family 10; protein id:At4g33860
  misc_feature (94)..(558): NCBI GI NO: 7485619 NR Description: hypothetical protein F17I5
  misc_feature (94)..(560): NCBI GI NO: 15235131 NR Description: glycosyl hydrolase family 10; protein id:At4g33830
  misc_feature (92)..(549): NCBI GI NO: 37533262 NR Description: putative 1,4-beta-xylanase
  misc_feature (66)..(565): NCBI GI NO: 37533260 NR Description: putative 1,4-beta-xylanase
  misc_feature (331)..(331): Xaa is any aa, unknown or other
MEAAAATTAAALLPPARKVFILPLLLLLAASRASSDGVQYDYRAYTECKPHPEPALYNGGVLRWASKITDFRTEDEGNYSPAFVLYNMSAATAYSFSCWVKIDGPESAHVKAKILTVENAASQCVGTAIARNDCWSFLKGGFTLNSTSQTSVLYLQTASPNASTISIRSPSLQPFSPDEWNQHREERIQQIRKRFVNLHVSDGNGSRVVGADVAVHQITRDFPFGSAISKSILGNRPYQDWFNARFNAAVFENELKWYATEPSPGKEEYAAADQLLRFVQSNDVTARGHNIFWEDPRYTPAWVKNLTGPQLRAAVAGRVQSLLSRYKGDFXHWDVSNEMLHFDFYEDRLGGNATADFFSTARRADPLATLFLNDFNVVEACDDLSSSADSYVSRLRQLADDAGVTFEGIGLEGHFAKPNVPYVRAVLDKLGTLRLPVWLTEVDVSAAFDHATQAAYLEDVLREGFAHPAVDGIVLWTAMGANATCYQMCLTDADFTNLPAGDVVDRLLGEWQTKEVLGATDDRGSFNFSAFHGEYRLSVTYLNRTADATFSLPRSDDTKHINIRLPPGPAA

SEQ ID NO: 35990 - protein, 484 aa, Zea mays subsp. mays
  peptide (1)..(484): Ceres Seq. ID no. 12435691
  misc_feature (126)..(421): Pfam Name: Pfam Description:  Glycosyl hydrolase family 10
  misc_feature (1)..(478): NCBI GI NO: 28416709 NR Description: At4g38650 [Arabidopsis thaliana]
  misc_feature (59)..(478): NCBI GI NO: 15233983 NR Description: glycosyl hydrolase family 10; protein id:At4g38650
  misc_feature (7)..(471): NCBI GI NO: 30689830 NR Description: glycosyl hydrolase family 10
  misc_feature (1)..(470): NCBI GI NO: 23429644 NR Description: endoxylanase [Carica papaya]
  misc_feature (7)..(465): NCBI GI NO: 15235134 NR Description: glycosyl hydrolase family 10; protein id:At4g33860
  misc_feature (7)..(471): NCBI GI NO: 7485619 NR Description: hypothetical protein F17I5
  misc_feature (7)..(473): NCBI GI NO: 15235131 NR Description: glycosyl hydrolase family 10; protein id:At4g33830
  misc_feature (5)..(462): NCBI GI NO: 37533262 NR Description: putative 1,4-beta-xylanase
  misc_feature (1)..(478): NCBI GI NO: 37533260 NR Description: putative 1,4-beta-xylanase
  misc_feature (1)..(478): NCBI GI NO: 40363757 NR Description: putative 1,4-beta-xylanase [Triticum aestivum]
  misc_feature (244)..(244): Xaa is any aa, unknown or other
MSAATAYSFSCWVKIDGPESAHVKAKILTVENAASQCVGTAIARNDCWSFLKGGFTLNSTSQTSVLYLQTASPNASTISIRSPSLQPFSPDEWNQHREERIQQIRKRFVNLHVSDGNGSRVVGADVAVHQITRDFPFGSAISKSILGNRPYQDWFNARFNAAVFENELKWYATEPSPGKEEYAAADQLLRFVQSNDVTARGHNIFWEDPRYTPAWVKNLTGPQLRAAVAGRVQSLLSRYKGDFXHWDVSNEMLHFDFYEDRLGGNATADFFSTARRADPLATLFLNDFNVVEACDDLSSSADSYVSRLRQLADDAGVTFEGIGLEGHFAKPNVPYVRAVLDKLGTLRLPVWLTEVDVSAAFDHATQAAYLEDVLREGFAHPAVDGIVLWTAMGANATCYQMCLTDADFTNLPAGDVVDRLLGEWQTKEVLGATDDRGSFNFSAFHGEYRLSVTYLNRTADATFSLPRSDDTKHINIRLPPGPAA

SEQ ID NO: 35991 - DNA, 555 bp, Zea mays subsp. mays
  misc_feature (1)..(555): Ceres Seq. ID no. 3315214
gctcattcacggcaaattaagcgagcgccggccgaggcagacacaaccagcagcaacttgcatcggcacggacgaccgattgagagcctcggcgttcgtacgccacgccaccaagagactctgtgcaaaggagcaagaatgtatccggccaagcccgccgcctccgccagcgagccggtggtcggcatccccatcagcagccccggcgcggttgcggtcgggccggtcgtcggcaagtggtcctccggcctctgcgcctgctccgacgactgcggcctctgctgcctgacgtgctggtgcccgtgcatcacgttcggccgcgtcgcggagatcgtggaccgcggcgcgacgtcgttcggcgtggcggggaccatctacacgctgctggcctgcttcacgggctgccactggatctactcctgcacgtaccgctccaggatgcgcgcgcagctcggcctccccgaagcctgctgctgcgactgctgcgtccacttctgctgcgagccctgcgcgctctcccagcagtacagggagctcaaggcccgcggattcgac

SEQ ID NO: 35992 - protein, 185 aa, Zea mays subsp. mays
  peptide (1)..(185): Ceres Seq. ID no. 3315215
  misc_feature (78)..(180): Pfam Name: Pfam Description:  Protein of unknown function, DUF614
  misc_feature (50)..(184): NCBI GI NO: 34897274 NR Description: hypothetical protein
  misc_feature (50)..(184): NCBI GI NO: 34897270 NR Description: hypothetical protein
  misc_feature (75)..(184): NCBI GI NO: 34897268 NR Description: unknown protein
  misc_feature (78)..(184): NCBI GI NO: 15223920 NR Description: unknown protein; protein id: At1g14870
  misc_feature (47)..(139): NCBI GI NO: 31249752 NR Description: hypothetical protein
  misc_feature (65)..(180): NCBI GI NO: 15221456 NR Description: hypothetical protein; protein id: At1g68610.1
  misc_feature (47)..(184): NCBI GI NO: 37530512 NR Description: unknown protein
  misc_feature (80)..(184): NCBI GI NO: 4105794 NR Description: PGPS/D12 [Petunia x hybrida]
  misc_feature (78)..(184): NCBI GI NO: 15223921 NR Description: unknown protein; protein id: At1g14880.1
  misc_feature (64)..(184): NCBI GI NO: 8272626 NR Description: ORFX [Lycopersicon esculentum]
AHSRQIKRAPAEADTTSSNLHRHGRPIESLGVRTPRHQETLCKGARMYPAKPAASASEPVVGIPISSPGAVAVGPVVGKWSSGLCACSDDCGLCCLTCWCPCITFGRVAEIVDRGATSFGVAGTIYTLLACFTGCHWIYSCTYRSRMRAQLGLPEACCCDCCVHFCCEPCALSQQYRELKARGFD

SEQ ID NO: 35993 - protein, 139 aa, Zea mays subsp. mays
  peptide (1)..(139): Ceres Seq. ID no. 3315216
  misc_feature (32)..(134): Pfam Name: Pfam Description:  Protein of unknown function, DUF614
  misc_feature (4)..(138): NCBI GI NO: 34897274 NR Description: hypothetical protein
  misc_feature (4)..(138): NCBI GI NO: 34897270 NR Description: hypothetical protein
  misc_feature (29)..(138): NCBI GI NO: 34897268 NR Description: unknown protein
  misc_feature (32)..(138): NCBI GI NO: 15223920 NR Description: unknown protein; protein id: At1g14870
  misc_feature (1)..(93): NCBI GI NO: 31249752 NR Description: hypothetical protein
  misc_feature (19)..(134): NCBI GI NO: 15221456 NR Description: hypothetical protein; protein id: At1g68610.1
  misc_feature (1)..(138): NCBI GI NO: 37530512 NR Description: unknown protein
  misc_feature (34)..(138): NCBI GI NO: 4105794 NR Description: PGPS/D12 [Petunia x hybrida]
  misc_feature (32)..(138): NCBI GI NO: 15223921 NR Description: unknown protein; protein id: At1g14880.1
  misc_feature (18)..(138): NCBI GI NO: 8272626 NR Description: ORFX [Lycopersicon esculentum]
MYPAKPAASASEPVVGIPISSPGAVAVGPVVGKWSSGLCACSDDCGLCCLTCWCPCITFGRVAEIVDRGATSFGVAGTIYTLLACFTGCHWIYSCTYRSRMRAQLGLPEACCCDCCVHFCCEPCALSQQYRELKARGFD

SEQ ID NO: 35994 - protein, 95 aa, Zea mays subsp. mays
  peptide (1)..(95): Ceres Seq. ID no. 3315217
  misc_feature (4)..(95): NCBI GI NO: 26986938 NR Description: alginate regulatory protein AlgP
  misc_feature (22)..(95): NCBI GI NO: 15600253 NR Description: polyhydroxyalkanoate synthesis protein PhaF
  misc_feature (38)..(95): NCBI GI NO: 94816 NR Description: regulatory protein algR3 - Pseudomonas aeruginosa
  misc_feature (38)..(95): NCBI GI NO: 151046 NR Description: alginate regulatory protein AlgR3
  misc_feature (28)..(95): NCBI GI NO: 26986938 NR Description: alginate regulatory protein AlgP
  misc_feature (36)..(95): NCBI GI NO: 13592175 NR Description: ppg3 [Leishmania major]
  misc_feature (38)..(95): NCBI GI NO: 151002 NR Description: transcription regulatory protein
  misc_feature (51)..(95): NCBI GI NO: 11359723 NR Description: proteophosphoglycan, membrane-associated
  misc_feature (8)..(95): NCBI GI NO: 26986938 NR Description: alginate regulatory protein AlgP
  misc_feature (51)..(95): NCBI GI NO: 25143299 NR Description: pre-mRNA splicing SR protein related RSR-1 (68
LIHGKLSERRPRQTQPAATCIGTDDRLRASAFVRHATKRLCAKEQECIRPSPPPPPASRWSASPSAAPARLRSGRSSASGPPASAPAPTTAASAA

SEQ ID NO: 35995 - DNA, 642 bp, Zea mays subsp. mays
  misc_feature (1)..(642): Ceres Seq. ID no. 14306056
aatgcctcaccacgccggttatgtgaacgggcactaagagagcttccaaagaagactggtgaacagttagttatcctatctcaggttctaatggatgatatcaatgtcggttatgaaaggcttgctgaactacaggtaaagaaggtaaatgatgtggaggttgaaaacctgaagcacctgtgcagcctcgtggaaggctgcaccgaagaaaacttaaggtttgacttggacgatgaaagagtcattgtcctgaagtaccagaacgcaaggcttgccacatcccgggtcctcaaacggcacaggataccgtcagccatatcgagcgaccttgtcgaagatcaagtaactgatggcgaggttgagacgtcatgcaccagctaatgctagactcttttttagacctaattgggagttccctgctgtagctcagctcaagaagcgagctgcattgttggcgaggcaagcgcacctgcctgcctgcctgcctggagtacatggtatcacttcctccctttagggcggctttagttttgacataaggaggagtgtctttagaaaataagattatgagctccggggcttttcagtctgaatgtaacggtaacataaccattctttactagaacatttattttttccgtc

SEQ ID NO: 35996 - protein, 126 aa, Zea mays subsp. mays
  peptide (1)..(126): Ceres Seq. ID no. 14306057
  misc_feature (1)..(126): NCBI GI NO: 18421592 NR Description: DegP protease [Arabidopsis thaliana]
  misc_feature (9)..(114): NCBI GI NO: 18408327 NR Description: DegP protease [Arabidopsis thaliana]
  misc_feature (14)..(114): NCBI GI NO: 2190559 NR Description: F5I14.16 [Arabidopsis thaliana]
  misc_feature (20)..(116): NCBI GI NO: 18421999 NR Description: DegP protease [Arabidopsis thaliana]
  misc_feature (20)..(116): NCBI GI NO: 9758082 NR Description: contains similarity to serineprotease~gene_id:MNF13
  misc_feature (7)..(109): NCBI GI NO: 18408329 NR Description: DegP protease [Arabidopsis thaliana]
  misc_feature (17)..(109): NCBI GI NO: 18401169 NR Description: DegP protease [Arabidopsis thaliana]
  misc_feature (17)..(109): NCBI GI NO: 9279654 NR Description: contains similarity to serineprotease~gene_id:MDC8
  misc_feature (3)..(114): NCBI GI NO: 18421957 NR Description: DegP protease [Arabidopsis thaliana]
  misc_feature (28)..(117): NCBI GI NO: 18401167 NR Description: DegP protease [Arabidopsis thaliana]
NASPRRLCERALRELPKKTGEQLVILSQVLMDDINVGYERLAELQVKKVNDVEVENLKHLCSLVEGCTEENLRFDLDDERVIVLKYQNARLATSRVLKRHRIPSAISSDLVEDQVTDGEVETSCTS

SEQ ID NO: 35997 - protein, 96 aa, Zea mays subsp. mays
  peptide (1)..(96): Ceres Seq. ID no. 14306058
  misc_feature (1)..(96): NCBI GI NO: 18421592 NR Description: DegP protease [Arabidopsis thaliana]
  misc_feature (1)..(84): NCBI GI NO: 18408327 NR Description: DegP protease [Arabidopsis thaliana]
  misc_feature (1)..(84): NCBI GI NO: 2190559 NR Description: F5I14.16 [Arabidopsis thaliana]
  misc_feature (1)..(86): NCBI GI NO: 18421999 NR Description: DegP protease [Arabidopsis thaliana]
  misc_feature (1)..(86): NCBI GI NO: 9758082 NR Description: contains similarity to serineprotease~gene_id:MNF13
  misc_feature (1)..(79): NCBI GI NO: 18408329 NR Description: DegP protease [Arabidopsis thaliana]
  misc_feature (1)..(79): NCBI GI NO: 18401169 NR Description: DegP protease [Arabidopsis thaliana]
  misc_feature (1)..(79): NCBI GI NO: 9279654 NR Description: contains similarity to serineprotease~gene_id:MDC8
  misc_feature (1)..(84): NCBI GI NO: 18421957 NR Description: DegP protease [Arabidopsis thaliana]
  misc_feature (1)..(87): NCBI GI NO: 18401167 NR Description: DegP protease [Arabidopsis thaliana]
MDDINVGYERLAELQVKKVNDVEVENLKHLCSLVEGCTEENLRFDLDDERVIVLKYQNARLATSRVLKRHRIPSAISSDLVEDQVTDGEVETSCTS

SEQ ID NO: 35998 - DNA, 958 bp, Zea mays subsp. mays
  misc_feature (1)..(958): Ceres Seq. ID no. 15180611
atcccgcacatgcacgtgatgcatgtattgttaagagccaccttctatgcttctttgtaccatttggatgcggttcagtggtgcatattgtttgagctgtttctgttttgaactactgatacgctgtgaactttaatgttcgtggttctcagataaactagaaaacctatgctaacgaaacatctagcacatcttggatcagccctgcgatctcaaatggttaatgtatttccggcagctagaaacaccccaaactctgttctctgatttaacaaaaaaaaaccagttacccaccacccagcatgagcggacatgtgcatttgttggcatttgagctctcgtccaatgattgttgcgcaggtgacggagaacgggaagcaggagcggcatctagtggcgacggtggggaagtacagcgtggtgtggaacttcctgcaggtgaagaacagccaccacgagtgctaccagtaccaggaggggctgaagagctgctattgctacaaggtgatccccaaggacgagtccatcgtggccagccgcttcatgcacgacaagtactcggtcagcgactccccggaggctccactggtggtggccacgcccatgaaggtcacctccttcagcatatccagcaggcactaactagcctccttgctccgccccgcaacttcgctgccggccgacgcgttccccttggctcctcggcctccggtgatctggtaacattttgttaagcaattgtttgtgcgacggttgcctgttccattgccttctaagttggttcaaattaattagtgatttgctgtgttgagtcgatacgcaacgttgaagaggggatggtagtgtctgttgggttagctacatattgctgaacaatctgatttagctgtgaggaagtggctaatggttgtaagaaagctgaaagttgtttgattaaaataattgttaactaaaaaag

SEQ ID NO: 35999 - protein, 143 aa, Zea mays subsp. mays
  peptide (1)..(143): Ceres Seq. ID no. 15180612
MSGHVHLLAFELSSNDCCAGDGEREAGAASSGDGGEVQRGVELPAGEEQPPRVLPVPGGAEELLLLQGDPQGRVHRGQPLHARQVLGQRLPGGSTGGGHAHEGHLLQHIQQALTSLLAPPRNFAAGRRVPLGSSASGDLVTFC

SEQ ID NO: 36000 - protein, 109 aa, Zea mays subsp. mays
  peptide (1)..(109): Ceres Seq. ID no. 15180613
  misc_feature (17)..(108): NCBI GI NO: 7488984 NR Description: dem protein - tomato
  misc_feature (17)..(108): NCBI GI NO: 37223342 NR Description: DEM2 [Lycopersicon esculentum]
  misc_feature (17)..(108): NCBI GI NO: 37223344 NR Description: DEM2 [Lycopersicon esculentum]
  misc_feature (17)..(108): NCBI GI NO: 15234174 NR Description: Dem -related protein [Arabidopsis thaliana]
  misc_feature (17)..(106): NCBI GI NO: 729273 NR Description: CYPRO4 PROTEIN
  misc_feature (17)..(108): NCBI GI NO: 15230321 NR Description: dem-related protein [Arabidopsis thaliana]
MCICWHLSSRPMIVAQVTENGKQERHLVATVGKYSVVWNFLQVKNSHHECYQYQEGLKSCYCYKVIPKDESIVASRFMHDKYSVSDSPEAPLVVATPMKVTSFSISSRH

SEQ ID NO: 36001 - protein, 98 aa, Zea mays subsp. mays
  peptide (1)..(98): Ceres Seq. ID no. 15180614
  misc_feature (6)..(97): NCBI GI NO: 7488984 NR Description: dem protein - tomato
  misc_feature (6)..(97): NCBI GI NO: 37223342 NR Description: DEM2 [Lycopersicon esculentum]
  misc_feature (6)..(97): NCBI GI NO: 37223344 NR Description: DEM2 [Lycopersicon esculentum]
  misc_feature (6)..(97): NCBI GI NO: 15234174 NR Description: Dem -related protein [Arabidopsis thaliana]
  misc_feature (6)..(95): NCBI GI NO: 729273 NR Description: CYPRO4 PROTEIN
  misc_feature (6)..(97): NCBI GI NO: 15230321 NR Description: dem-related protein [Arabidopsis thaliana]
MIVAQVTENGKQERHLVATVGKYSVVWNFLQVKNSHHECYQYQEGLKSCYCYKVIPKDESIVASRFMHDKYSVSDSPEAPLVVATPMKVTSFSISSRH

SEQ ID NO: 36002 - DNA, 543 bp, Zea mays subsp. mays
  misc_feature (1)..(543): Ceres Seq. ID no. 3424909
tgtccatgctgctgctcatccgcaggtccgtactactgggtgragwrcaagcctgacaagcccataccagttagtcagccgaaccaagggagcgtgcgagggaggaaggagaagaagcggatcaagcagcacgaggactttatcatggatgagaagaagaagcgcatagctcagtattctgctgctgttaagataaaggaggtagaacaaacagaaaggaagatggctgttgtggcaagagagcgagcatgggcagcaaggttgatagagctaaaatagcttgaggaagaaattaaagctgtaatggcataagggcctgctctggaaaatggcaaggcgtctaacctgtttctgctactctattttctcctcctttgttcctacatagtttaaattgtcacaattcttgtgatggaatggaagaccagtaccacttctttcaacagtaatatcaaatgctggaactgttttttaatacaagactctcattagaccatgtttggaggttccgtttacttttgatgtaatttaraacaagtgatg

SEQ ID NO: 36003 - protein, 92 aa, Zea mays subsp. mays
  peptide (1)..(92): Ceres Seq. ID no. 3424910
  misc_feature (9)..(92): NCBI GI NO: 18409234 NR Description: expressed protein; protein id: At3g51010
  misc_feature (9)..(92): NCBI GI NO: 21553452 NR Description: unknown [Arabidopsis thaliana]
  misc_feature (15)..(15): Xaa is any aa, unknown or other
  misc_feature (16)..(16): Xaa is any aa, unknown or other
CPCCCSSAGPYYWVXXKPDKPIPVSQPNQGSVRGRKEKKRIKQHEDFIMDEKKKRIAQYSAAVKIKEVEQTERKMAVVARERAWAARLIELK

SEQ ID NO: 36004 - protein, 55 aa, Zea mays subsp. mays
  peptide (1)..(55): Ceres Seq. ID no. 3424911
  misc_feature (14)..(14): Xaa is any aa, unknown or other
  misc_feature (15)..(15): Xaa is any aa, unknown or other
  misc_feature (16)..(16): Xaa is any aa, unknown or other
VHAAAHPQVRTTGXXXSLTSPYQLVSRTKGACEGGRRRSGSSSTRTLSWMRRRSA

SEQ ID NO: 36005 - protein, 44 aa, Zea mays subsp. mays
  peptide (1)..(44): Ceres Seq. ID no. 4910235
  misc_feature (1)..(44): NCBI GI NO: 18409234 NR Description: expressed protein; protein id: At3g51010
  misc_feature (1)..(44): NCBI GI NO: 21553452 NR Description: unknown [Arabidopsis thaliana]
MDEKKKRIAQYSAAVKIKEVEQTERKMAVVARERAWAARLIELK

SEQ ID NO: 36006 - DNA, 741 bp, Zea mays subsp. mays
  misc_feature (1)..(741): Ceres Seq. ID no. 12468867
  misc_feature (692)..(692): n is a, c, t, g, unknown, or other
  misc_feature (730)..(730): n is a, c, t, g, unknown, or other
  misc_feature (608)..(608): n is a, c, t, g, unknown, or other
tgacttgcttattggcaccccagattcggcatccaagaactatgtggagcagcagtacgagtactgtgtgaaggtggtcagatggttggagcatgaagggcacatggacaatgacttccgtgtgaagttcctcacttggttcagtctgaaggcaacagcgcaggacaggcgaatcgttggcgccttagtagatgttcttatcggtgatcctgcaagcttggttgcccaactggttgatgcattcaaggatatcatctacaccaaggagaagccctttcaaacacaacagaaggatgcacgctgcaagatttggcactagaaaccttcataactgctctgtgtcgctgtgtgacatcatttttctggtaattttctggcgactgaatgatgaactactgaagttatatcacctagcagattgcgtgcggattctgttgagatggatattgtgcactctcttaaaggttataagatgctgtagatgcttcatttggcattcaggtccatcagatctctcatttgttcattcaaattcagtcggtaggcagactattaatccatgaagacaatcatggtggaaccatgtgctggtaatcatgaatcggttntgagtttaggtttcgactagtaagtagttgaagcttgttagcagacaagcaactgtattcatatgtggaatgctatggtggatntgcaagctaactattgtgaattcatatcatgacttaanagatgtttatt

SEQ ID NO: 36007 - protein, 123 aa, Zea mays subsp. mays
  peptide (1)..(123): Ceres Seq. ID no. 12468868
MFLSVILQAWLPNWLMHSRISSTPRRSPFKHNRRMHAARFGTRNLHNCSVSLCDIIFLVIFWRLNDELLKLYHLADCVRILLRWILCTLLKVIRCCRCFIWHSGPSDLSFVHSNSVGRQTINP

SEQ ID NO: 36008 - protein, 108 aa, Zea mays subsp. mays
  peptide (1)..(108): Ceres Seq. ID no. 12468869
MHSRISSTPRRSPFKHNRRMHAARFGTRNLHNCSVSLCDIIFLVIFWRLNDELLKLYHLADCVRILLRWILCTLLKVIRCCRCFIWHSGPSDLSFVHSNSVGRQTINP

SEQ ID NO: 36009 - protein, 105 aa, Zea mays subsp. mays
  peptide (1)..(105): Ceres Seq. ID no. 12468870
  misc_feature (1)..(105): NCBI GI NO: 38637254 NR Description: putative coiled-coil protein
  misc_feature (8)..(88): NCBI GI NO: 15230113 NR Description: hypothetical protein; protein id: At3g24440.1
  misc_feature (8)..(105): NCBI GI NO: 30688585 NR Description: coiled-coil protein [Arabidopsis thaliana]
  misc_feature (8)..(105): NCBI GI NO: 15234667 NR Description: putative protein; protein id: At4g30200
  misc_feature (7)..(88): NCBI GI NO: 30680490 NR Description: hypothetical protein [Arabidopsis thaliana]
  misc_feature (7)..(88): NCBI GI NO: 7485789 NR Description: hypothetical protein At2g18870
  misc_feature (8)..(105): NCBI GI NO: 15242117 NR Description: putative protein; protein id: At5g57380.1
  misc_feature (19)..(91): NCBI GI NO: 15224250 NR Description: hypothetical protein; protein id: At2g18880.1
  misc_feature (19)..(91): NCBI GI NO: 30350861 NR Description: hypothetical protein At2g18880
DLLIGTPDSASKNYVEQQYEYCVKVVRWLEHEGHMDNDFRVKFLTWFSLKATAQDRRIVGALVDVLIGDPASLVAQLVDAFKDIIYTKEKPFQTQQKDARCKIWH

SEQ ID NO: 36010 - DNA, 482 bp, Zea mays subsp. mays
  misc_feature (1)..(482): Ceres Seq. ID no. 12468860
taagtgcatttgcaccacaaacaaaagaggatgggcttctgcatactgcctgtggaactccaaactatgtagcgcctgaggtgctcgctgataaaggctatgatggtatggctgcagatgtatggtcctgtggcataatcttgtttgttcttatggccggatacttacccttcgatgatgccaatctgatgagactgtacaaactgatctgccatgcaactttttcttgcccaccatggttttcttctggagcaaggaagtttattaagcgcattctcgatcctaaccctgataccaggataaaaattgcagaaattttggaagatgaatggttcaaaaaaggctataaaccaccacattttgaacaaggcgaagatgttaaccttgacgacgttgatgctgcattcaatgattcagaggaccgtcttgtagcagagaaaagagaaaagccagaatcaatgaatgcatttgctcttatttcg

SEQ ID NO: 36011 - protein, 160 aa, Zea mays subsp. mays
  peptide (1)..(160): Ceres Seq. ID no. 12468861
  misc_feature (1)..(111): Pfam Name: Pfam Description:  Protein kinase domain
  misc_feature (1)..(159): NCBI GI NO: 34902248 NR Description: Putative serine/threonine kinase
  misc_feature (1)..(159): NCBI GI NO: 14423524 NR Description: similar to wpk4 protein kinase
  misc_feature (1)..(159): NCBI GI NO: 15223317 NR Description: serine threonine kinase, putative
  misc_feature (1)..(159): NCBI GI NO: 30677901 NR Description: CBL-interacting protein kinase 9
  misc_feature (1)..(159): NCBI GI NO: 25387057 NR Description: protein T25K16.13
  misc_feature (1)..(159): NCBI GI NO: 30677898 NR Description: CBL-interacting protein kinase 9
  misc_feature (1)..(159): NCBI GI NO: 30683328 NR Description: CBL-interacting protein kinase 3
  misc_feature (1)..(159): NCBI GI NO: 30683336 NR Description: CBL-interacting protein kinase 3
  misc_feature (1)..(159): NCBI GI NO: 30683332 NR Description: CBL-interacting protein kinase 3
  misc_feature (1)..(159): NCBI GI NO: 34393400 NR Description: putative CBL-interacting protein kinase 23
SAFAPQTKEDGLLHTACGTPNYVAPEVLADKGYDGMAADVWSCGIILFVLMAGYLPFDDANLMRLYKLICHATFSCPPWFSSGARKFIKRILDPNPDTRIKIAEILEDEWFKKGYKPPHFEQGEDVNLDDVDAAFNDSEDRLVAEKREKPESMNAFALIS

SEQ ID NO: 36012 - protein, 125 aa, Zea mays subsp. mays
  peptide (1)..(125): Ceres Seq. ID no. 12468862
  misc_feature (1)..(76): Pfam Name: Pfam Description:  Protein kinase domain
  misc_feature (1)..(124): NCBI GI NO: 34902248 NR Description: Putative serine/threonine kinase
  misc_feature (1)..(124): NCBI GI NO: 14423524 NR Description: similar to wpk4 protein kinase
  misc_feature (1)..(124): NCBI GI NO: 15223317 NR Description: serine threonine kinase, putative
  misc_feature (1)..(124): NCBI GI NO: 30677901 NR Description: CBL-interacting protein kinase 9
  misc_feature (1)..(124): NCBI GI NO: 25387057 NR Description: protein T25K16.13
  misc_feature (1)..(124): NCBI GI NO: 30677898 NR Description: CBL-interacting protein kinase 9
  misc_feature (1)..(124): NCBI GI NO: 30683328 NR Description: CBL-interacting protein kinase 3
  misc_feature (1)..(124): NCBI GI NO: 30683332 NR Description: CBL-interacting protein kinase 3
  misc_feature (1)..(124): NCBI GI NO: 30683336 NR Description: CBL-interacting protein kinase 3
  misc_feature (1)..(124): NCBI GI NO: 34393400 NR Description: putative CBL-interacting protein kinase 23
MAADVWSCGIILFVLMAGYLPFDDANLMRLYKLICHATFSCPPWFSSGARKFIKRILDPNPDTRIKIAEILEDEWFKKGYKPPHFEQGEDVNLDDVDAAFNDSEDRLVAEKREKPESMNAFALIS

SEQ ID NO: 36013 - protein, 110 aa, Zea mays subsp. mays
  peptide (1)..(110): Ceres Seq. ID no. 12468863
  misc_feature (1)..(61): Pfam Name: Pfam Description:  Protein kinase domain
  misc_feature (1)..(109): NCBI GI NO: 34902248 NR Description: Putative serine/threonine kinase
  misc_feature (1)..(109): NCBI GI NO: 14423524 NR Description: similar to wpk4 protein kinase
  misc_feature (1)..(109): NCBI GI NO: 15223317 NR Description: serine threonine kinase, putative
  misc_feature (1)..(109): NCBI GI NO: 30677901 NR Description: CBL-interacting protein kinase 9
  misc_feature (1)..(109): NCBI GI NO: 25387057 NR Description: protein T25K16.13
  misc_feature (1)..(109): NCBI GI NO: 30677898 NR Description: CBL-interacting protein kinase 9
  misc_feature (1)..(109): NCBI GI NO: 30683328 NR Description: CBL-interacting protein kinase 3
  misc_feature (1)..(109): NCBI GI NO: 30683332 NR Description: CBL-interacting protein kinase 3
  misc_feature (1)..(109): NCBI GI NO: 30683336 NR Description: CBL-interacting protein kinase 3
  misc_feature (1)..(109): NCBI GI NO: 34393400 NR Description: putative CBL-interacting protein kinase 23
MAGYLPFDDANLMRLYKLICHATFSCPPWFSSGARKFIKRILDPNPDTRIKIAEILEDEWFKKGYKPPHFEQGEDVNLDDVDAAFNDSEDRLVAEKREKPESMNAFALIS

SEQ ID NO: 36014 - DNA, 828 bp, Zea mays subsp. mays
  misc_feature (1)..(828): Ceres Seq. ID no. 12468845
  misc_feature (26)..(26): n is a, c, t, g, unknown, or other
gaagaaccatgccatcttccgttttngcgcaattccccagataatggcaattggaacatgtgctctttgctacaataacgtgcatgtctttagaggagttgtaaagatgagacgtggtctcacggcacgaataattgacgagacaaattcaatgtcagacgtctataccgctttctatgagttttcttcattgatagagtcaaagattgatgacaatgatccaaatgctgctctaacacggagacacgtgaattcaataaagcaaacttgcaagtcatctggtttggtaaagaggagggggtaccatttggacacatcaccttacaggcctatgctggtgagtaacccgtaatcaggaaattcatgttagcactcttctatataatttgtcgatattcttctgtgatcccctcagatcatgattgtcctcctgctggtggctatccttttcggggcactgtataccaagtgatgcacttgtagctggcctttttcccctatggagacgagacaaactctgccaatctgatccttttcgtactctgtagtccccaatggctgcaggaagttcgaaattactggctgtagaagtgtagatcatacggcagcatgctactgcttccatgactccgttactgctctcgattcgtttcttcattatgttttctcgcgcgttgtatcgtttgaagctgttttaagcaacggaaaaaaataccatgtgacacgtgtatcctacgaacatgggtttctgtttagttagcagtgggcgcactgtattatgttgtcttgttgacatgtcatgttttcaaagctgacgtgtttgtgttt

SEQ ID NO: 36015 - protein, 116 aa, Zea mays subsp. mays
  peptide (1)..(116): Ceres Seq. ID no. 12468846
  misc_feature (1)..(54): Pfam Name: Pfam Description:  Squalene/phytoene synthase
  misc_feature (1)..(113): NCBI GI NO: 7434086 NR Description: farnesyl-diphosphate farnesyltransferase (EC2
  misc_feature (1)..(113): NCBI GI NO: 2463565 NR Description: squalene synthase
  misc_feature (1)..(113): NCBI GI NO: 34394799 NR Description: putative squalene synthase
  misc_feature (4)..(114): NCBI GI NO: 2780361 NR Description: squalene synthase [Panax ginseng]
  misc_feature (1)..(113): NCBI GI NO: 5360655 NR Description: squalene synthase [Solanum tuberosum]
  misc_feature (5)..(113): NCBI GI NO: 7434084 NR Description: farnesyl-diphosphate farnesyltransferase (EC2
  misc_feature (1)..(113): NCBI GI NO: 4426953 NR Description: squalene synthase [Capsicum annuum]
  misc_feature (4)..(99): NCBI GI NO: 2144187 NR Description: farnesyl-diphosphate farnesyltransferase (EC2
  misc_feature (1)..(113): NCBI GI NO: 1552717 NR Description: squalene synthase [Nicotiana tabacum]
  misc_feature (1)..(113): NCBI GI NO: 7434085 NR Description: farnesyl-diphosphate farnesyltransferase (EC2
  misc_feature (9)..(9): Xaa is any aa, unknown or other
KNHAIFRFXAIPQIMAIGTCALCYNNVHVFRGVVKMRRGLTARIIDETNSMSDVYTAFYEFSSLIESKIDDNDPNAALTRRHVNSIKQTCKSSGLVKRRGYHLDTSPYRPMLVSNP

SEQ ID NO: 36016 - protein, 102 aa, Zea mays subsp. mays
  peptide (1)..(102): Ceres Seq. ID no. 12468847
  misc_feature (1)..(99): NCBI GI NO: 7434086 NR Description: farnesyl-diphosphate farnesyltransferase (EC2
  misc_feature (1)..(99): NCBI GI NO: 2463565 NR Description: squalene synthase
  misc_feature (1)..(99): NCBI GI NO: 34394799 NR Description: putative squalene synthase
  misc_feature (1)..(100): NCBI GI NO: 2780361 NR Description: squalene synthase [Panax ginseng]
  misc_feature (1)..(99): NCBI GI NO: 5360655 NR Description: squalene synthase [Solanum tuberosum]
  misc_feature (1)..(99): NCBI GI NO: 7434084 NR Description: farnesyl-diphosphate farnesyltransferase (EC2
  misc_feature (1)..(99): NCBI GI NO: 4426953 NR Description: squalene synthase [Capsicum annuum]
  misc_feature (1)..(85): NCBI GI NO: 2144187 NR Description: farnesyl-diphosphate farnesyltransferase (EC2
  misc_feature (1)..(99): NCBI GI NO: 1552717 NR Description: squalene synthase [Nicotiana tabacum]
  misc_feature (1)..(99): NCBI GI NO: 7434085 NR Description: farnesyl-diphosphate farnesyltransferase (EC2
MAIGTCALCYNNVHVFRGVVKMRRGLTARIIDETNSMSDVYTAFYEFSSLIESKIDDNDPNAALTRRHVNSIKQTCKSSGLVKRRGYHLDTSPYRPMLVSNP

SEQ ID NO: 36017 - protein, 81 aa, Zea mays subsp. mays
  peptide (1)..(81): Ceres Seq. ID no. 12468848
  misc_feature (1)..(78): NCBI GI NO: 7434086 NR Description: farnesyl-diphosphate farnesyltransferase (EC2
  misc_feature (1)..(78): NCBI GI NO: 2463565 NR Description: squalene synthase
  misc_feature (1)..(78): NCBI GI NO: 34394799 NR Description: putative squalene synthase
  misc_feature (1)..(79): NCBI GI NO: 2780361 NR Description: squalene synthase [Panax ginseng]
  misc_feature (1)..(78): NCBI GI NO: 5360655 NR Description: squalene synthase [Solanum tuberosum]
  misc_feature (1)..(78): NCBI GI NO: 7434084 NR Description: farnesyl-diphosphate farnesyltransferase (EC2
  misc_feature (1)..(78): NCBI GI NO: 4426953 NR Description: squalene synthase [Capsicum annuum]
  misc_feature (1)..(64): NCBI GI NO: 2144187 NR Description: farnesyl-diphosphate farnesyltransferase (EC2
  misc_feature (1)..(78): NCBI GI NO: 1552717 NR Description: squalene synthase [Nicotiana tabacum]
  misc_feature (1)..(78): NCBI GI NO: 7434085 NR Description: farnesyl-diphosphate farnesyltransferase (EC2
MRRGLTARIIDETNSMSDVYTAFYEFSSLIESKIDDNDPNAALTRRHVNSIKQTCKSSGLVKRRGYHLDTSPYRPMLVSNP

SEQ ID NO: 36018 - DNA, 1749 bp, Zea mays subsp. mays; identical to SEQ ID NO: 32775
  misc_feature (1)..(1749): Ceres Seq. ID no. 12390530

SEQ ID NO: 36019 - protein, 174 aa, Zea mays subsp. mays; identical to SEQ ID NO: 32776
  peptide (1)..(174): Ceres Seq. ID no. 12390531
  misc_feature (1)..(173): NCBI GI NO: 15144509 NR Description: unknown [Lycopersicon esculentum]
  misc_feature (73)..(173): NCBI GI NO: 15809848 NR Description: AT4g38060/F20D10_180 [Arabidopsis thaliana]
  misc_feature (1)..(171): NCBI GI NO: 15238477 NR Description: putative protein; protein id: At5g65480

SEQ ID NO: 36020 - protein, 172 aa, Zea mays subsp. mays; identical to SEQ ID NO: 32777
  peptide (1)..(172): Ceres Seq. ID no. 12390532
  misc_feature (1)..(171): NCBI GI NO: 15144509 NR Description: unknown [Lycopersicon esculentum]
  misc_feature (71)..(171): NCBI GI NO: 15809848 NR Description: AT4g38060/F20D10_180 [Arabidopsis thaliana]
  misc_feature (1)..(169): NCBI GI NO: 15238477 NR Description: putative protein; protein id: At5g65480

SEQ ID NO: 36021 - protein, 94 aa, Zea mays subsp. mays; identical to SEQ ID NO: 32778
  peptide (1)..(94): Ceres Seq. ID no. 12390533
  misc_feature (1)..(93): NCBI GI NO: 15144509 NR Description: unknown [Lycopersicon esculentum]
  misc_feature (1)..(93): NCBI GI NO: 15809848 NR Description: AT4g38060/F20D10_180 [Arabidopsis thaliana]
  misc_feature (1)..(91): NCBI GI NO: 15238477 NR Description: putative protein; protein id: At5g65480

SEQ ID NO: 36022 - DNA, 667 bp, Zea mays subsp. mays
  misc_feature (1)..(667): Ceres Seq. ID no. 12468824
  misc_feature (627)..(627): n is a, c, t, g, unknown, or other
  misc_feature (468)..(468): n is a, c, t, g, unknown, or other
  misc_feature (616)..(616): n is a, c, t, g, unknown, or other
  misc_feature (547)..(547): n is a, c, t, g, unknown, or other
  misc_feature (581)..(581): n is a, c, t, g, unknown, or other
  misc_feature (664)..(664): n is a, c, t, g, unknown, or other
  misc_feature (573)..(573): n is a, c, t, g, unknown, or other
gttcaccgagaccttggactactattcggccatgttcgagtcaatcgacacgaacctgccacgggacaacaaggagcggatcaacgtggagcagcactgtcttgccaaggacatcgtgaacatcatcgcctgcgaggggaaggaccgggtggagcgtcacgagctcctgggcaaatggcggtcgaggctgaccatggccgggttcagaccatacccgctgagctcgtacgtgaactcggtgatcaggaagctccttgcctgctactcggacaagtacaccctggaagagaaggatggcgcgatgctgctcggctggaagaacaggaagttgatatctgcttctgcttggcactgacagtaacgttttcagaagaccggaagtacacgtcaactcttacatatatatatgtatgtatgcataatgaattacctggtctgctttccgcaaaaaaggacgccctttgttgnacatgtacatgatgctgtacccttagttttcctgaagtgcagaccagagaagagaacattgacattagattgtagctgntaagctgtatggtaattacagttttnttttgctntcatgtattcacccctgtcatggacttttccaagngtatttttagntaatcagcatgcatacatgctgagatgctttttagtnttc

SEQ ID NO: 36023 - protein, 159 aa, Zea mays subsp. mays
  peptide (1)..(159): Ceres Seq. ID no. 12468825
  misc_feature (156)..(156): Xaa is any aa, unknown or other
VHRDLGLLFGHVRVNRHEPATGQQGADQRGAALSCQGHREHHRLRGEGPGGASRAPGQMAVEADHGRVQTIPAELVRELGDQEAPCLLLGQVHPGREGWRDAARLEEQEVDICFCLALTVTFSEDRKYTSTLTYIYVCMHNELPGLLSAKKDALCXTCT

SEQ ID NO: 36024 - protein, 117 aa, Zea mays subsp. mays
  peptide (1)..(117): Ceres Seq. ID no. 12468826
  misc_feature (36)..(117): NCBI GI NO: 25989332 NR Description: chitin-inducible gibberellin-responsive protein
  misc_feature (1)..(116): NCBI GI NO: 15238903 NR Description: SCARECROW gene regulator-like
  misc_feature (1)..(116): NCBI GI NO: 26450054 NR Description: putative SCARECROW gene regulator
  misc_feature (1)..(117): NCBI GI NO: 25989334 NR Description: chitin-inducible gibberellin-responsive protein
  misc_feature (1)..(116): NCBI GI NO: 11358827 NR Description: scarecrow-like protein 5
  misc_feature (1)..(116): NCBI GI NO: 23397333 NR Description: putative scarecrow protein [Arabidopsis thaliana]
  misc_feature (1)..(116): NCBI GI NO: 25405382 NR Description: scarecrow-like protein
  misc_feature (1)..(116): NCBI GI NO: 30694805 NR Description: scarecrow-like transcription factor 5 (SCL5)
  misc_feature (1)..(116): NCBI GI NO: 14517552 NR Description: F17J6.12/F17J6.12 [Arabidopsis thaliana]
  misc_feature (1)..(116): NCBI GI NO: 37533564 NR Description: putative SCARECROW gene regulator-like
FTETLDYYSAMFESIDTNLPRDNKERINVEQHCLAKDIVNIIACEGKDRVERHELLGKWRSRLTMAGFRPYPLSSYVNSVIRKLLACYSDKYTLEEKDGAMLLGWKNRKLISASAWH

SEQ ID NO: 36025 - protein, 107 aa, Zea mays subsp. mays
  peptide (1)..(107): Ceres Seq. ID no. 12468827
  misc_feature (26)..(107): NCBI GI NO: 25989332 NR Description: chitin-inducible gibberellin-responsive protein
  misc_feature (1)..(106): NCBI GI NO: 15238903 NR Description: SCARECROW gene regulator-like
  misc_feature (1)..(106): NCBI GI NO: 26450054 NR Description: putative SCARECROW gene regulator
  misc_feature (1)..(107): NCBI GI NO: 25989334 NR Description: chitin-inducible gibberellin-responsive protein
  misc_feature (1)..(106): NCBI GI NO: 11358827 NR Description: scarecrow-like protein 5
  misc_feature (1)..(106): NCBI GI NO: 23397333 NR Description: putative scarecrow protein [Arabidopsis thaliana]
  misc_feature (1)..(106): NCBI GI NO: 25405382 NR Description: scarecrow-like protein
  misc_feature (1)..(106): NCBI GI NO: 30694805 NR Description: scarecrow-like transcription factor 5 (SCL5)
  misc_feature (1)..(106): NCBI GI NO: 14517552 NR Description: F17J6.12/F17J6.12 [Arabidopsis thaliana]
  misc_feature (1)..(106): NCBI GI NO: 37533564 NR Description: putative SCARECROW gene regulator-like
MFESIDTNLPRDNKERINVEQHCLAKDIVNIIACEGKDRVERHELLGKWRSRLTMAGFRPYPLSSYVNSVIRKLLACYSDKYTLEEKDGAMLLGWKNRKLISASAWH

SEQ ID NO: 36026 - DNA, 383 bp, Zea mays subsp. mays
  misc_feature (1)..(383): Ceres Seq. ID no. 3477243
tttttataacatatacaatggktgatggttgggctggggtasctggtgagatattgagattgaagccactagtgatcttccacctgaaaaactttttcttggtcaagactgagaaagacagggaagaggcaatggaccctggaagtattggttttgactcaagcgaacctcaaattcagctgtatttcttacttggtcttgtctatgcggcagtgacaccatttttgctcccttttgtattgatattctttgggtttgcgtacgttgtataccgccaccagataataaatgtgtataatcaagaatacgagagtgcagcagcattttggccaagtgttcatggacgcataatcacagcgttgattgtatcacagctgcttctc

SEQ ID NO: 36027 - protein, 127 aa, Zea mays subsp. mays
  peptide (1)..(127): Ceres Seq. ID no. 3477244
  misc_feature (1)..(126): Pfam Name: Pfam Description:  Domain of unknown function DUF221
  misc_feature (1)..(126): NCBI GI NO: 34913548 NR Description: OJ1029_F04.25
  misc_feature (1)..(126): NCBI GI NO: 15233100 NR Description: unknown protein; protein id: At3g21620.1
  misc_feature (1)..(126): NCBI GI NO: 15233476 NR Description: unknown protein; protein id: At4g04340
  misc_feature (1)..(126): NCBI GI NO: 15810533 NR Description: unknown protein [Arabidopsis thaliana]
  misc_feature (1)..(126): NCBI GI NO: 15234725 NR Description: putative protein; protein id: At4g22120.1
  misc_feature (1)..(126): NCBI GI NO: 7486105 NR Description: hypothetical protein F24O1
  misc_feature (1)..(126): NCBI GI NO: 25404887 NR Description: protein F24O1.4 [imported] - Arabidopsis thaliana
  misc_feature (1)..(126): NCBI GI NO: 17381104 NR Description: unknown protein [Arabidopsis thaliana]
  misc_feature (1)..(126): NCBI GI NO: 22328665 NR Description: hypothetical protein; protein id: At4g15430
  misc_feature (1)..(126): NCBI GI NO: 25402694 NR Description: hypothetical protein
  misc_feature (7)..(7): Xaa is any aa, unknown or other
  misc_feature (14)..(14): Xaa is any aa, unknown or other
FITYTMXDGWAGVXGEILRLKPLVIFHLKNFFLVKTEKDREEAMDPGSIGFDSSEPQIQLYFLLGLVYAAVTPFLLPFVLIFFGFAYVVYRHQIINVYNQEYESAAAFWPSVHGRIITALIVSQLLL

SEQ ID NO: 36028 - protein, 122 aa, Zea mays subsp. mays
  peptide (1)..(122): Ceres Seq. ID no. 3477245
  misc_feature (1)..(121): Pfam Name: Pfam Description:  Domain of unknown function DUF221
  misc_feature (1)..(121): NCBI GI NO: 34913548 NR Description: OJ1029_F04.25
  misc_feature (1)..(121): NCBI GI NO: 15233100 NR Description: unknown protein; protein id: At3g21620.1
  misc_feature (1)..(121): NCBI GI NO: 15233476 NR Description: unknown protein; protein id: At4g04340
  misc_feature (1)..(121): NCBI GI NO: 15810533 NR Description: unknown protein [Arabidopsis thaliana]
  misc_feature (1)..(121): NCBI GI NO: 15234725 NR Description: putative protein; protein id: At4g22120.1
  misc_feature (1)..(121): NCBI GI NO: 7486105 NR Description: hypothetical protein F24O1
  misc_feature (1)..(121): NCBI GI NO: 25404887 NR Description: protein F24O1.4 [imported] - Arabidopsis thaliana
  misc_feature (1)..(121): NCBI GI NO: 17381104 NR Description: unknown protein [Arabidopsis thaliana]
  misc_feature (1)..(121): NCBI GI NO: 22328665 NR Description: hypothetical protein; protein id: At4g15430
  misc_feature (1)..(121): NCBI GI NO: 25402694 NR Description: hypothetical protein
  misc_feature (2)..(2): Xaa is any aa, unknown or other
  misc_feature (9)..(9): Xaa is any aa, unknown or other
MXDGWAGVXGEILRLKPLVIFHLKNFFLVKTEKDREEAMDPGSIGFDSSEPQIQLYFLLGLVYAAVTPFLLPFVLIFFGFAYVVYRHQIINVYNQEYESAAAFWPSVHGRIITALIVSQLLL

SEQ ID NO: 36029 - protein, 84 aa, Zea mays subsp. mays
  peptide (1)..(84): Ceres Seq. ID no. 3477246
  misc_feature (1)..(83): Pfam Name: Pfam Description:  Domain of unknown function DUF221
  misc_feature (1)..(83): NCBI GI NO: 34913548 NR Description: OJ1029_F04.25
  misc_feature (1)..(83): NCBI GI NO: 15233100 NR Description: unknown protein; protein id: At3g21620.1
  misc_feature (1)..(83): NCBI GI NO: 15233476 NR Description: unknown protein; protein id: At4g04340
  misc_feature (1)..(83): NCBI GI NO: 15810533 NR Description: unknown protein [Arabidopsis thaliana]
  misc_feature (1)..(83): NCBI GI NO: 15234725 NR Description: putative protein; protein id: At4g22120.1
  misc_feature (1)..(83): NCBI GI NO: 7486105 NR Description: hypothetical protein F24O1
  misc_feature (1)..(83): NCBI GI NO: 25404887 NR Description: protein F24O1.4 [imported] - Arabidopsis thaliana
  misc_feature (1)..(83): NCBI GI NO: 17381104 NR Description: unknown protein [Arabidopsis thaliana]
  misc_feature (1)..(83): NCBI GI NO: 22328665 NR Description: hypothetical protein; protein id: At4g15430
  misc_feature (1)..(83): NCBI GI NO: 25402694 NR Description: hypothetical protein
MDPGSIGFDSSEPQIQLYFLLGLVYAAVTPFLLPFVLIFFGFAYVVYRHQIINVYNQEYESAAAFWPSVHGRIITALIVSQLLL

SEQ ID NO: 36030 - DNA, 566 bp, Zea mays subsp. mays
  misc_feature (1)..(566): Ceres Seq. ID no. 13564026
agcagaggcggtggagctgttctggaggatgagaaaggcgagggttaaggatgacgcagtgactatggttgccctgctataaaagcctgtgcggagctgggtgacctagaacttgggcggtgggtgcatgcacgagtggacttggaagggtggcagcggaggactgtgttgctggacaatgctctcatccatatgtatgtgaagtgtggtgctgtggaagatgcacatcgcttgtttgggatgatgccaaggcggagctccgtttcttggactactatgatctcgggtcttgcaatgcatggtcacccccaggaggcgctggacttgttccagagaatgcaggatcggcctgatggtgccacgctgctggcagttctgcgggcatgcagtctggcagggaggattgatgatgcacggtggtactttgaaagtatggaaagagtttacgggataaatccagagatacaacactatggatgcatggttgacatgctctgttgctggagacggttgaatgaarcacttgagcttgkggagaaaatgccattccagccaaacgagggtgc

SEQ ID NO: 36031 - protein, 124 aa, Zea mays subsp. mays
  peptide (1)..(124): Ceres Seq. ID no. 13564027
  misc_feature (1)..(27): Pfam Name: Pfam Description:  PPR repeat
  misc_feature (1)..(123): NCBI GI NO: 34910594 NR Description: putative selenium-binding protein
  misc_feature (1)..(122): NCBI GI NO: 15225375 NR Description: pentatricopeptide (PPR) repeat-containing protein
  misc_feature (1)..(123): NCBI GI NO: 7487134 NR Description: hypothetical protein T18B16
  misc_feature (1)..(122): NCBI GI NO: 15227724 NR Description: pentatricopeptide (PPR) repeat-containing protein
  misc_feature (1)..(122): NCBI GI NO: 28392910 NR Description: putative selenium-binding protein
  misc_feature (1)..(122): NCBI GI NO: 38345581 NR Description: OSJNBa0027H06.17
  misc_feature (1)..(122): NCBI GI NO: 9759241 NR Description: gene_id:MNC17
  misc_feature (1)..(122): NCBI GI NO: 15228653 NR Description: pentatricopeptide (PPR) repeat-containing protein
  misc_feature (1)..(122): NCBI GI NO: 15237835 NR Description: pentatricopeptide (PPR) repeat-containing protein
  misc_feature (1)..(121): NCBI GI NO: 22773237 NR Description: Hypothetical protein
  misc_feature (110)..(110): Xaa is any aa, unknown or other
  misc_feature (114)..(114): Xaa is any aa, unknown or other
MYVKCGAVEDAHRLFGMMPRRSSVSWTTMISGLAMHGHPQEALDLFQRMQDRPDGATLLAVLRACSLAGRIDDARWYFESMERVYGINPEIQHYGCMVDMLCCWRRLNEXLELXEKMPFQPNEG

SEQ ID NO: 36032 - protein, 108 aa, Zea mays subsp. mays
  peptide (1)..(108): Ceres Seq. ID no. 13564028
  misc_feature (1)..(107): NCBI GI NO: 34910594 NR Description: putative selenium-binding protein
  misc_feature (1)..(106): NCBI GI NO: 15225375 NR Description: pentatricopeptide (PPR) repeat-containing protein
  misc_feature (1)..(107): NCBI GI NO: 7487134 NR Description: hypothetical protein T18B16
  misc_feature (1)..(106): NCBI GI NO: 15227724 NR Description: pentatricopeptide (PPR) repeat-containing protein
  misc_feature (1)..(106): NCBI GI NO: 28392910 NR Description: putative selenium-binding protein
  misc_feature (1)..(106): NCBI GI NO: 38345581 NR Description: OSJNBa0027H06.17
  misc_feature (1)..(106): NCBI GI NO: 9759241 NR Description: gene_id:MNC17
  misc_feature (1)..(106): NCBI GI NO: 15228653 NR Description: pentatricopeptide (PPR) repeat-containing protein
  misc_feature (1)..(106): NCBI GI NO: 15237835 NR Description: pentatricopeptide (PPR) repeat-containing protein
  misc_feature (1)..(105): NCBI GI NO: 22773237 NR Description: Hypothetical protein
  misc_feature (94)..(94): Xaa is any aa, unknown or other
  misc_feature (98)..(98): Xaa is any aa, unknown or other
MMPRRSSVSWTTMISGLAMHGHPQEALDLFQRMQDRPDGATLLAVLRACSLAGRIDDARWYFESMERVYGINPEIQHYGCMVDMLCCWRRLNEXLELXEKMPFQPNEG

SEQ ID NO: 36033 - protein, 107 aa, Zea mays subsp. mays
  peptide (1)..(107): Ceres Seq. ID no. 13564029
  misc_feature (1)..(106): NCBI GI NO: 34910594 NR Description: putative selenium-binding protein
  misc_feature (1)..(105): NCBI GI NO: 15225375 NR Description: pentatricopeptide (PPR) repeat-containing protein
  misc_feature (1)..(106): NCBI GI NO: 7487134 NR Description: hypothetical protein T18B16
  misc_feature (1)..(105): NCBI GI NO: 15227724 NR Description: pentatricopeptide (PPR) repeat-containing protein
  misc_feature (1)..(105): NCBI GI NO: 28392910 NR Description: putative selenium-binding protein
  misc_feature (1)..(105): NCBI GI NO: 38345581 NR Description: OSJNBa0027H06.17
  misc_feature (1)..(105): NCBI GI NO: 9759241 NR Description: gene_id:MNC17
  misc_feature (1)..(105): NCBI GI NO: 15228653 NR Description: pentatricopeptide (PPR) repeat-containing protein
  misc_feature (1)..(105): NCBI GI NO: 15237835 NR Description: pentatricopeptide (PPR) repeat-containing protein
  misc_feature (1)..(104): NCBI GI NO: 22773237 NR Description: Hypothetical protein
  misc_feature (93)..(93): Xaa is any aa, unknown or other
  misc_feature (97)..(97): Xaa is any aa, unknown or other
MPRRSSVSWTTMISGLAMHGHPQEALDLFQRMQDRPDGATLLAVLRACSLAGRIDDARWYFESMERVYGINPEIQHYGCMVDMLCCWRRLNEXLELXEKMPFQPNEG

SEQ ID NO: 36034 - DNA, 496 bp, Zea mays subsp. mays
  misc_feature (1)..(496): Ceres Seq. ID no. 3477512
  misc_feature (484)..(484): n is a, c, t, g, unknown, or other
agcgtcgccctcgtcgacgaggtcaccgtmrtccgcgacagggtcaccagggtctcgcgaggctgctgcttcgtgatctgcccatcaagggaggaggctgataaggctgtgactacataccacaacaagcgcacactacctggggcctcaagtccattgcaagtaaaatatgccgatggggagttggaaagattggagcacaagctcttcgttggaatgctccccaaaaatgtaacacatgctgaaatgacggatttattttcaaaatatggaaatataaaggatttacagattctgagaggctctcagcaaacgagcaaagctggttgtgcctttctaaaatatgaaacaaaagagcaagctgtggctgctatagaagctctaaatggaacacacaaaatagagggttcaagtgttcccttggttgtcaaatgggctgacactgaaaaggaaaggcaggctcgaaaagcacaaaaagctcaanttccagtcttct

SEQ ID NO: 36035 - protein, 165 aa, Zea mays subsp. mays
  peptide (1)..(165): Ceres Seq. ID no. 3477513
  misc_feature (69)..(141): Pfam Name: a.k.a. RRM, RBD, or RNP domain Pfam Description: RNA recognition motif.
  misc_feature (2)..(161): NCBI GI NO: 34907248 NR Description: putative ribonucleoprotein
  misc_feature (3)..(164): NCBI GI NO: 7488303 NR Description: ribonucleoprotein homolog T4I9
  misc_feature (3)..(164): NCBI GI NO: 18412143 NR Description: RNA-binding CELF protein, putative
  misc_feature (3)..(164): NCBI GI NO: 30679366 NR Description: RNA-binding protein, putative
  misc_feature (3)..(164): NCBI GI NO: 22329313 NR Description: RNA-binding CELF protein, putative
  misc_feature (3)..(164): NCBI GI NO: 7488302 NR Description: ribonucleoprotein homolog F21B7
  misc_feature (3)..(164): NCBI GI NO: 25386552 NR Description: protein F21B7.8 [imported] - Arabidopsis thaliana
  misc_feature (1)..(161): NCBI GI NO: 33354192 NR Description: putative CUG triplet repeat RNA-binding protein 1
  misc_feature (1)..(161): NCBI GI NO: 33354193 NR Description: flowering time control protein FCA-like protein
  misc_feature (66)..(161): NCBI GI NO: 34899186 NR Description: CUG triplet repeat RNA-binding protein 1
  misc_feature (10)..(10): Xaa is any aa, unknown or other
  misc_feature (11)..(11): Xaa is any aa, unknown or other
  misc_feature (162)..(162): Xaa is any aa, unknown or other
SVALVDEVTXXRDRVTRVSRGCCFVICPSREEADKAVTTYHNKRTLPGASSPLQVKYADGELERLEHKLFVGMLPKNVTHAEMTDLFSKYGNIKDLQILRGSQQTSKAGCAFLKYETKEQAVAAIEALNGTHKIEGSSVPLVVKWADTEKERQARKAQKAQXPVF

SEQ ID NO: 36036 - protein, 93 aa, Zea mays subsp. mays
  peptide (1)..(93): Ceres Seq. ID no. 3477514
  misc_feature (1)..(69): Pfam Name: a.k.a. RRM, RBD, or RNP domain Pfam Description: RNA recognition motif.
  misc_feature (1)..(89): NCBI GI NO: 34907248 NR Description: putative ribonucleoprotein
  misc_feature (1)..(92): NCBI GI NO: 7488303 NR Description: ribonucleoprotein homolog T4I9
  misc_feature (1)..(92): NCBI GI NO: 18412143 NR Description: RNA-binding CELF protein, putative
  misc_feature (1)..(92): NCBI GI NO: 30679366 NR Description: RNA-binding protein, putative
  misc_feature (1)..(92): NCBI GI NO: 22329313 NR Description: RNA-binding CELF protein, putative
  misc_feature (1)..(92): NCBI GI NO: 7488302 NR Description: ribonucleoprotein homolog F21B7
  misc_feature (1)..(92): NCBI GI NO: 25386552 NR Description: protein F21B7.8 [imported] - Arabidopsis thaliana
  misc_feature (1)..(89): NCBI GI NO: 33354192 NR Description: putative CUG triplet repeat RNA-binding protein 1
  misc_feature (1)..(89): NCBI GI NO: 33354193 NR Description: flowering time control protein FCA-like protein
  misc_feature (1)..(89): NCBI GI NO: 34899186 NR Description: CUG triplet repeat RNA-binding protein 1
  misc_feature (90)..(90): Xaa is any aa, unknown or other
MLPKNVTHAEMTDLFSKYGNIKDLQILRGSQQTSKAGCAFLKYETKEQAVAAIEALNGTHKIEGSSVPLVVKWADTEKERQARKAQKAQXPVF

SEQ ID NO: 36037 - protein, 83 aa, Zea mays subsp. mays
  peptide (1)..(83): Ceres Seq. ID no. 3477515
  misc_feature (1)..(59): Pfam Name: a.k.a. RRM, RBD, or RNP domain Pfam Description: RNA recognition motif.
  misc_feature (1)..(79): NCBI GI NO: 34907248 NR Description: putative ribonucleoprotein
  misc_feature (1)..(82): NCBI GI NO: 7488303 NR Description: ribonucleoprotein homolog T4I9
  misc_feature (1)..(82): NCBI GI NO: 18412143 NR Description: RNA-binding CELF protein, putative
  misc_feature (1)..(82): NCBI GI NO: 30679366 NR Description: RNA-binding protein, putative
  misc_feature (1)..(82): NCBI GI NO: 22329313 NR Description: RNA-binding CELF protein, putative
  misc_feature (1)..(82): NCBI GI NO: 7488302 NR Description: ribonucleoprotein homolog F21B7
  misc_feature (1)..(82): NCBI GI NO: 25386552 NR Description: protein F21B7.8 [imported] - Arabidopsis thaliana
  misc_feature (1)..(79): NCBI GI NO: 33354192 NR Description: putative CUG triplet repeat RNA-binding protein 1
  misc_feature (1)..(79): NCBI GI NO: 33354193 NR Description: flowering time control protein FCA-like protein
  misc_feature (1)..(79): NCBI GI NO: 34899186 NR Description: CUG triplet repeat RNA-binding protein 1
  misc_feature (80)..(80): Xaa is any aa, unknown or other
MTDLFSKYGNIKDLQILRGSQQTSKAGCAFLKYETKEQAVAAIEALNGTHKIEGSSVPLVVKWADTEKERQARKAQKAQXPVF

SEQ ID NO: 36038 - DNA, 1144 bp, Zea mays subsp. mays; identical to SEQ ID NO: 35687
  misc_feature (1)..(1144): Ceres Seq. ID no. 13598993

SEQ ID NO: 36039 - protein, 238 aa, Zea mays subsp. mays; identical to SEQ ID NO: 35688
  peptide (1)..(238): Ceres Seq. ID no. 13598994
  misc_feature (71)..(153): Pfam Name: Pfam Description:  mttA/Hcf106 family
  misc_feature (1)..(238): NCBI GI NO: 7542514 NR Description: HCF106C precursor protein [Zea mays]
  misc_feature (1)..(238): NCBI GI NO: 7489747 NR Description: HCF106 protein precursor, chloroplast - maize
  misc_feature (4)..(197): NCBI GI NO: 15277532 NR Description: HCF106 [Pisum sativum]
  misc_feature (2)..(228): NCBI GI NO: 15237156 NR Description: HCF106 (gb|AAD32652.1) [Arabidopsis thaliana]
  misc_feature (67)..(127): NCBI GI NO: 22298928 NR Description: ORF_ID:tsl1385~hypothetical protein
  misc_feature (68)..(162): NCBI GI NO: 37522572 NR Description: hypothetical protein gsr3003
  misc_feature (67)..(149): NCBI GI NO: 16329622 NR Description: hypothetical protein [Synechocystis sp. PCC 6803]
  misc_feature (67)..(159): NCBI GI NO: 33864103 NR Description: mttA/Hcf106 family
  misc_feature (68)..(217): NCBI GI NO: 22960273 NR Description: hypothetical protein [Rhodobacter sphaeroides]
  misc_feature (65)..(155): NCBI GI NO: 4877984 NR Description: THA4 [Zea mays]

SEQ ID NO: 36040 - protein, 190 aa, Zea mays subsp. mays; identical to SEQ ID NO: 35689
  peptide (1)..(190): Ceres Seq. ID no. 13598995
  misc_feature (23)..(105): Pfam Name: Pfam Description:  mttA/Hcf106 family
  misc_feature (1)..(190): NCBI GI NO: 7542514 NR Description: HCF106C precursor protein [Zea mays]
  misc_feature (1)..(190): NCBI GI NO: 7489747 NR Description: HCF106 protein precursor, chloroplast - maize
  misc_feature (1)..(149): NCBI GI NO: 15277532 NR Description: HCF106 [Pisum sativum]
  misc_feature (1)..(180): NCBI GI NO: 15237156 NR Description: HCF106 (gb|AAD32652.1) [Arabidopsis thaliana]
  misc_feature (19)..(79): NCBI GI NO: 22298928 NR Description: ORF_ID:tsl1385~hypothetical protein
  misc_feature (20)..(114): NCBI GI NO: 37522572 NR Description: hypothetical protein gsr3003
  misc_feature (19)..(101): NCBI GI NO: 16329622 NR Description: hypothetical protein [Synechocystis sp. PCC 6803]
  misc_feature (19)..(111): NCBI GI NO: 33864103 NR Description: mttA/Hcf106 family
  misc_feature (20)..(169): NCBI GI NO: 22960273 NR Description: hypothetical protein [Rhodobacter sphaeroides]
  misc_feature (17)..(107): NCBI GI NO: 4877984 NR Description: THA4 [Zea mays]

SEQ ID NO: 36041 - protein, 133 aa, Zea mays subsp. mays; identical to SEQ ID NO: 35690
  peptide (1)..(133): Ceres Seq. ID no. 13598996

SEQ ID NO: 36042 - DNA, 1094 bp, Zea mays subsp. mays
  misc_feature (1)..(1094): Ceres Seq. ID no. 13504098
  misc_feature (485)..(485): n is a, c, t, g, unknown, or other
cccagctccgcgccgtgtacgggcacaccttctcgtactgcctggtggagcacggcagcgacgccggcagcaaggtggtgttcggggaggactacttggtgctggcgcatccgcagctcaagtacacggcgttcgcgcccacgtcgtcgccggcggacacattctattacgtgaagctcaagggcgtgctggtgggcggcgacctgctgaacatcagctcggacacgtgggacgtgggcaaggacgggtccggcggcacgatcatcgactccggcacgacgctgagctacttcgtggagccggcgtaccaggtgatccggcaagcgttcgtcgatcgcatgagcaggctgtaccctctgatcccggacttcccggtgctgaacccgtgctacaacgtctctggcgtggagcgacccgaggtgccggagatgtcgctgctgttcgccgacggtgccgtgtgggacttccccgcggagaactacttngtccggctggacccggacggcatcatgtgcctggcggtccggggcaccccgcgcaccggcatgtccatcatcggtaacttccagcagcagaactttcacgtcgtgtacgacctgcagaacaaccggctgggcttcgcgccgcggcggtgcgccgaggtgtagtgtatagccgccggcgaggcctcctgagactgagaggacgaacaattcgaactcagtcctcgcttgattgattggattgggaggcaaattgggtgtagaaatttttggttgggaaggacggtggcacgtacgcaagctctaatacatagttttttttgttgcatttatctccaaggagagaaggttagggatattttattaaggaccgttcaggtgggttgtaacgggaaaatactgattttgttcccatgtacaatacctgtttcttcactcaaattttagaaattgtaagttgtagattaagaatgagagtgcacacaatcttttttttaagtaattgctcatgaagatatgattacaactacggaatagattccatcttttagaatatcatgcacaaattattcttattctatcaaatgctatgtaaggccctatttcaatgtc

SEQ ID NO: 36043 - protein, 214 aa, Zea mays subsp. mays
  peptide (1)..(214): Ceres Seq. ID no. 13504099
  misc_feature (1)..(208): Pfam Name: Pfam Description:  Eukaryotic aspartyl protease
  misc_feature (1)..(214): NCBI GI NO: 15231625 NR Description: expressed protein [Arabidopsis thaliana]
  misc_feature (1)..(214): NCBI GI NO: 15228044 NR Description: chloroplast nucleoid DNA binding protein -related
  misc_feature (1)..(214): NCBI GI NO: 25408826 NR Description: hypothetical protein At2g42980
  misc_feature (6)..(212): NCBI GI NO: 15223368 NR Description: chloroplast nucleoid DNA binding protein -related
  misc_feature (1)..(212): NCBI GI NO: 15230868 NR Description: expressed protein [Arabidopsis thaliana]
  misc_feature (6)..(212): NCBI GI NO: 21594980 NR Description: chloroplast nucleoid DNA binding protein, putative
  misc_feature (1)..(211): NCBI GI NO: 15228618 NR Description: expressed protein [Arabidopsis thaliana]
  misc_feature (1)..(211): NCBI GI NO: 15290061 NR Description: nucleoid DNA-binding protein cnd41-like protein
  misc_feature (1)..(211): NCBI GI NO: 15231010 NR Description: expressed protein [Arabidopsis thaliana]
  misc_feature (1)..(211): NCBI GI NO: 28392860 NR Description: unknown protein [Arabidopsis thaliana]
  misc_feature (161)..(161): Xaa is any aa, unknown or other
QLRAVYGHTFSYCLVEHGSDAGSKVVFGEDYLVLAHPQLKYTAFAPTSSPADTFYYVKLKGVLVGGDLLNISSDTWDVGKDGSGGTIIDSGTTLSYFVEPAYQVIRQAFVDRMSRLYPLIPDFPVLNPCYNVSGVERPEVPEMSLLFADGAVWDFPAENYXVRLDPDGIMCLAVRGTPRTGMSIIGNFQQQNFHVVYDLQNNRLGFAPRRCAEV

SEQ ID NO: 36044 - protein, 186 aa, Zea mays subsp. mays
  peptide (1)..(186): Ceres Seq. ID no. 13504100
  misc_feature (162)..(162): Xaa is any aa, unknown or other
PAPRRVRAHLLVLPGGARQRRRQQGGVRGGLLGAGASAAQVHGVRAHVVAGGHILLREAQGRAGGRRPAEHQLGHVGRGQGRVRRHDHRLRHDAELLRGAGVPGDPASVRRSHEQAVPSDPGLPGAEPVLQRLWRGATRGAGDVAAVRRRCRVGLPRGELLXPAGPGRHHVPGGPGHPAHRHVHHR

SEQ ID NO: 36045 - DNA, 503 bp, Zea mays subsp. mays
  misc_feature (1)..(503): Ceres Seq. ID no. 3477685
actttgttgatcctgagagaattgagcatggtagcccattaaggttacctggccacccagtgaatggtcagccgatggatctggagggctggtcagggattcaaacagaggcttctcagcatatgggggttctacaagcatcatcaatgggctggaatggtgctcctgtacttgctgccactcctgttgtcaagaaagtcatgaggctggatgttccagtagacaagtatcctaactacaactttgttggtcgtttattggggccgcgaggtaactccctgaaaagggttgaagcttcaacccaatgtagagtttacattcgaggacggggttctgtgaaagactctgttaaggaagacaagctgagggataaacctgggtatgaacaccttaatgaacaactgcatgtgcttgtggaagcagagtttccagcagatatggttgatgtgcgtcttaatcaagctgtgtccatcctaraggatcttcttaaaccaattgacgag

SEQ ID NO: 36046 - protein, 167 aa, Zea mays subsp. mays
  peptide (1)..(167): Ceres Seq. ID no. 3477686
  misc_feature (68)..(122): Pfam Name: Pfam Description:  KH domain
  misc_feature (1)..(166): NCBI GI NO: 34907446 NR Description: P0434C04.5
  misc_feature (1)..(166): NCBI GI NO: 16930473 NR Description: At1g09660/F21M12_5 [Arabidopsis thaliana]
  misc_feature (1)..(166): NCBI GI NO: 22329449 NR Description: KH domain quaking protein, putative
  misc_feature (1)..(166): NCBI GI NO: 12322716 NR Description: unknown protein; 28504-31237
  misc_feature (1)..(166): NCBI GI NO: 30680583 NR Description: KH domain protein [Arabidopsis thaliana]
  misc_feature (1)..(166): NCBI GI NO: 15224909 NR Description: KH domain protein; protein id: At2g38610
  misc_feature (6)..(166): NCBI GI NO: 15236738 NR Description: KH domain protein; protein id: At4g26480.1
  misc_feature (6)..(166): NCBI GI NO: 20268733 NR Description: unknown protein [Arabidopsis thaliana]
  misc_feature (3)..(166): NCBI GI NO: 34900448 NR Description: contains EST C27129
  misc_feature (5)..(166): NCBI GI NO: 40645104 NR Description: hypothetical protein [Nicotiana tabacum]
  misc_feature (159)..(159): Xaa is any aa, unknown or other
FVDPERIEHGSPLRLPGHPVNGQPMDLEGWSGIQTEASQHMGVLQASSMGWNGAPVLAATPVVKKVMRLDVPVDKYPNYNFVGRLLGPRGNSLKRVEASTQCRVYIRGRGSVKDSVKEDKLRDKPGYEHLNEQLHVLVEAEFPADMVDVRLNQAVSILXDLLKPIDE

SEQ ID NO: 36047 - protein, 143 aa, Zea mays subsp. mays
  peptide (1)..(143): Ceres Seq. ID no. 3477687
  misc_feature (44)..(98): Pfam Name: Pfam Description:  KH domain
  misc_feature (1)..(142): NCBI GI NO: 34907446 NR Description: P0434C04.5
  misc_feature (1)..(142): NCBI GI NO: 16930473 NR Description: At1g09660/F21M12_5 [Arabidopsis thaliana]
  misc_feature (1)..(142): NCBI GI NO: 22329449 NR Description: KH domain quaking protein, putative
  misc_feature (1)..(142): NCBI GI NO: 12322716 NR Description: unknown protein; 28504-31237
  misc_feature (1)..(142): NCBI GI NO: 30680583 NR Description: KH domain protein [Arabidopsis thaliana]
  misc_feature (1)..(142): NCBI GI NO: 15224909 NR Description: KH domain protein; protein id: At2g38610
  misc_feature (1)..(142): NCBI GI NO: 15236738 NR Description: KH domain protein; protein id: At4g26480.1
  misc_feature (1)..(142): NCBI GI NO: 20268733 NR Description: unknown protein [Arabidopsis thaliana]
  misc_feature (1)..(142): NCBI GI NO: 34900448 NR Description: contains EST C27129
  misc_feature (1)..(142): NCBI GI NO: 40645104 NR Description: hypothetical protein [Nicotiana tabacum]
  misc_feature (135)..(135): Xaa is any aa, unknown or other
MDLEGWSGIQTEASQHMGVLQASSMGWNGAPVLAATPVVKKVMRLDVPVDKYPNYNFVGRLLGPRGNSLKRVEASTQCRVYIRGRGSVKDSVKEDKLRDKPGYEHLNEQLHVLVEAEFPADMVDVRLNQAVSILXDLLKPIDE

SEQ ID NO: 36048 - protein, 127 aa, Zea mays subsp. mays
  peptide (1)..(127): Ceres Seq. ID no. 3477688
  misc_feature (28)..(82): Pfam Name: Pfam Description:  KH domain
  misc_feature (1)..(126): NCBI GI NO: 34907446 NR Description: P0434C04.5
  misc_feature (1)..(126): NCBI GI NO: 16930473 NR Description: At1g09660/F21M12_5 [Arabidopsis thaliana]
  misc_feature (1)..(126): NCBI GI NO: 22329449 NR Description: KH domain quaking protein, putative
  misc_feature (1)..(126): NCBI GI NO: 12322716 NR Description: unknown protein; 28504-31237
  misc_feature (1)..(126): NCBI GI NO: 30680583 NR Description: KH domain protein [Arabidopsis thaliana]
  misc_feature (1)..(126): NCBI GI NO: 15224909 NR Description: KH domain protein; protein id: At2g38610
  misc_feature (1)..(126): NCBI GI NO: 15236738 NR Description: KH domain protein; protein id: At4g26480.1
  misc_feature (1)..(126): NCBI GI NO: 20268733 NR Description: unknown protein [Arabidopsis thaliana]
  misc_feature (1)..(126): NCBI GI NO: 34900448 NR Description: contains EST C27129
  misc_feature (1)..(126): NCBI GI NO: 40645104 NR Description: hypothetical protein [Nicotiana tabacum]
  misc_feature (119)..(119): Xaa is any aa, unknown or other
MGVLQASSMGWNGAPVLAATPVVKKVMRLDVPVDKYPNYNFVGRLLGPRGNSLKRVEASTQCRVYIRGRGSVKDSVKEDKLRDKPGYEHLNEQLHVLVEAEFPADMVDVRLNQAVSILXDLLKPIDE

SEQ ID NO: 36049 - DNA, 520 bp, Zea mays subsp. mays
  misc_feature (1)..(520): Ceres Seq. ID no. 3477628
gacctgaccggcgggatcaagttctgctctaagttacctgtccagaagaagcagcagcagcagcaggctgcctgccagaagctgatcataaagcacggcgccctgaagaagctcagcctgtggggctgttcagcgatcgacgccttgtacgtgaactgcccggagctggtcgatctgaacctcaacgcgtgcacgaaccttcatccagagcggctgctgatccagtgccccaagctgaaggacgtgcacgtcagcgggtgccgcgacatgctgatcggcgccgtcaggaaccaggtcctgaacgagttcgcggccgccgagccccggctgccctgcaagcggctggccgacgggtcgaagcgcgtgcacgtgccccacttcatgatcgagcagctggaggagcaggagaaatggggcgggccgcggaagagccagtgcaccgtccacctcacataggcagataggctaggccggccgctgggcgctggcgagtgctactgstggcctgtgaagtgaggcc

SEQ ID NO: 36050 - protein, 151 aa, Zea mays subsp. mays
  peptide (1)..(151): Ceres Seq. ID no. 3477629
  misc_feature (26)..(148): NCBI GI NO: 18087570 NR Description: AT3g54650/T5N23_10 [Arabidopsis thaliana]
  misc_feature (26)..(100): NCBI GI NO: 18410106 NR Description: F-box protein family, AtFBL17
DLTGGIKFCSKLPVQKKQQQQQAACQKLIIKHGALKKLSLWGCSAIDALYVNCPELVDLNLNACTNLHPERLLIQCPKLKDVHVSGCRDMLIGAVRNQVLNEFAAAEPRLPCKRLADGSKRVHVPHFMIEQLEEQEKWGGPRKSQCTVHLT

SEQ ID NO: 36051 - DNA, 583 bp, Zea mays subsp. mays
  misc_feature (1)..(583): Ceres Seq. ID no. 3477594
attatatcttgcaatctttcagagccaaaaagaggattactatgaggaacaaacaggctgcattaagtggctcaatgattttgctgagtaccataataagatgcttcaggaggagttggagaaactcaggaatcttcaccctgatgtgaccatcatttatgctgattactatggtgctgcattgaacatattccgtgccccactccagtttggtttcacagtcccattgaatgcgtgttgtggaagtgatgccccatacaactgttccccttcaatattgtgcgggcgtcctggatctacagtgtgtcctgacccatcaaaatacatctcatgggacggcttacacttcactgaggcgagttacaaagttgtcattcaaggagtacttggggggtatgccaagcctcccctttcaraaacctgcaagggtgcggaattcaaagtttctcagcttcaccaatgtacagataatccaacaaacactgtgtcatacgatgctttgagctcttttatttgatctgctcgtaaaagaagtgcatttagagttacagtgggcagcataratgatgttgcaggaccgaac

SEQ ID NO: 36052 - protein, 171 aa, Zea mays subsp. mays
  peptide (1)..(171): Ceres Seq. ID no. 3477595
  misc_feature (1)..(128): Pfam Name: Pfam Description:  GDSL-like Lipase/Acylhydrolase
  misc_feature (1)..(137): NCBI GI NO: 34911800 NR Description: lipase-like protein
  misc_feature (1)..(152): NCBI GI NO: 15218731 NR Description: lipase, putative; protein id: At1g28600
  misc_feature (1)..(152): NCBI GI NO: 21593234 NR Description: lipase, putative [Arabidopsis thaliana]
  misc_feature (1)..(155): NCBI GI NO: 10764858 NR Description: F1K23.17 [Arabidopsis thaliana]
  misc_feature (2)..(152): NCBI GI NO: 15225872 NR Description: putative lipase; protein id: At2g27360.1
  misc_feature (2)..(145): NCBI GI NO: 15218728 NR Description: lipase, putative; protein id: At1g28590.1
  misc_feature (2)..(145): NCBI GI NO: 19347801 NR Description: putative lipase [Arabidopsis thaliana]
  misc_feature (2)..(138): NCBI GI NO: 34911804 NR Description: lipase-like protein
  misc_feature (2)..(145): NCBI GI NO: 10764858 NR Description: F1K23.17 [Arabidopsis thaliana]
  misc_feature (2)..(151): NCBI GI NO: 12597843 NR Description: lipase, putative [Arabidopsis thaliana]
  misc_feature (139)..(139): Xaa is any aa, unknown or other
LYLAIFQSQKEDYYEEQTGCIKWLNDFAEYHNKMLQEELEKLRNLHPDVTIIYADYYGAALNIFRAPLQFGFTVPLNACCGSDAPYNCSPSILCGRPGSTVCPDPSKYISWDGLHFTEASYKVVIQGVLGGYAKPPLSXTCKGAEFKVSQLHQCTDNPTNTVSYDALSSFI

SEQ ID NO: 36053 - protein, 138 aa, Zea mays subsp. mays
  peptide (1)..(138): Ceres Seq. ID no. 3477596
  misc_feature (1)..(95): Pfam Name: Pfam Description:  GDSL-like Lipase/Acylhydrolase
  misc_feature (1)..(104): NCBI GI NO: 34911800 NR Description: lipase-like protein
  misc_feature (1)..(119): NCBI GI NO: 15218731 NR Description: lipase, putative; protein id: At1g28600
  misc_feature (1)..(119): NCBI GI NO: 21593234 NR Description: lipase, putative [Arabidopsis thaliana]
  misc_feature (1)..(122): NCBI GI NO: 10764858 NR Description: F1K23.17 [Arabidopsis thaliana]
  misc_feature (1)..(119): NCBI GI NO: 15225872 NR Description: putative lipase; protein id: At2g27360.1
  misc_feature (1)..(112): NCBI GI NO: 15218728 NR Description: lipase, putative; protein id: At1g28590.1
  misc_feature (1)..(112): NCBI GI NO: 19347801 NR Description: putative lipase [Arabidopsis thaliana]
  misc_feature (1)..(105): NCBI GI NO: 34911804 NR Description: lipase-like protein
  misc_feature (1)..(112): NCBI GI NO: 10764858 NR Description: F1K23.17 [Arabidopsis thaliana]
  misc_feature (1)..(118): NCBI GI NO: 12597843 NR Description: lipase, putative [Arabidopsis thaliana]
  misc_feature (106)..(106): Xaa is any aa, unknown or other
MLQEELEKLRNLHPDVTIIYADYYGAALNIFRAPLQFGFTVPLNACCGSDAPYNCSPSILCGRPGSTVCPDPSKYISWDGLHFTEASYKVVIQGVLGGYAKPPLSXTCKGAEFKVSQLHQCTDNPTNTVSYDALSSFI

SEQ ID NO: 36054 - protein, 90 aa, Zea mays subsp. mays
  peptide (1)..(90): Ceres Seq. ID no. 3477597
  misc_feature (62)..(62): Xaa is any aa, unknown or other
MRVVEVMPHTTVPLQYCAGVLDLQCVLTHQNTSHGTAYTSLRRVTKLSFKEYLGGMPSLPFXKPARVRNSKFLSFTNVQIIQQTLCHTML

SEQ ID NO: 36055 - DNA, 1127 bp, Zea mays subsp. mays
  misc_feature (1)..(1127): Ceres Seq. ID no. 14305770
gaaaaaccacgatcccaagtggtggctaggggagccgctctgggccaccgctgccgcccagggggtcctgcctgccacattcttctggccgggttcggaggttacgaagggttcctggaactgccccgacaagtactgccgccactacaatggctcggtgccgtttgaggagagggtcgacaccatccttggctattttgatctcccgcctaaccaaatgccacagttcctgacgctgtactttgaggatcctgatcaccaggggcaccaggtgggtcctgacgatccttcaatcaccgatgcggtcgtacatatcgatgagatgctcgggaggctcattgctggtttggaggctaggggaatgtttgaggatgtgaacattatattggtaggtgaccatggtatggttgggacctgcgataggaagcttgtgtttctcgaagagttggctccatggatcgagttgaagtcagattgggttctgtcaatgactccattgctggcaatcaggccgccagatggtgtgtcgccagctgaggttgtggccaagatgaatgaggggcttggatctgggaaggtgaagaatggggaatatttgaagatgtacttaaaagaggatttgcctactcgcctgcattattcagagagttacaggatcccgccaatcatcgggctggttggggaagggtataagatcgagatgaagcgctccaagagaaatgagtgtggaggagcccatgggtacgacaatgccttcttctcaatgaggaccatattcgccgcacatggacctcgttttcagggtggtagaactgtgccctcatttgagaatgtggagatatacaatgtcatggcttccattctcaatttgaagcctgctccaaacaatggttcagcttctttccctggcacgattctgttgccgaacaaatgatgttggattggttttgtaggagtaagggcacatggatgtatgatggtgttctcatttggttattgtattgtacctcttaaattagacttctgccacatcactgtatctgagcaaaaatgctgctagtagagagttgcttctctctagtgacaacatttggaaacatgttccacatcaaacgtttggctgctcg

SEQ ID NO: 36056 - protein, 310 aa, Zea mays subsp. mays
  peptide (1)..(310): Ceres Seq. ID no. 14305771
  misc_feature (2)..(290): Pfam Name: Pfam Description:  Type I phosphodiesterase / nucleotide pyrophosphatase
  misc_feature (2)..(310): NCBI GI NO: 34903578 NR Description: nucleotide pyrophosphatase homolog
  misc_feature (2)..(308): NCBI GI NO: 15233659 NR Description: nucleotide pyrophosphatase - like protein
  misc_feature (2)..(309): NCBI GI NO: 12081942 NR Description: nucleotide pyrophosphatase-like protein
  misc_feature (1)..(308): NCBI GI NO: 15233662 NR Description: nucleotide pyrophosphatase - like protein
  misc_feature (1)..(308): NCBI GI NO: 27808612 NR Description: At4g29690 [Arabidopsis thaliana]
  misc_feature (1)..(309): NCBI GI NO: 15233665 NR Description: nucleotide pyrophosphatase -related protein
  misc_feature (77)..(308): NCBI GI NO: 13877571 NR Description: nucleotide pyrophosphatase-like protein
  misc_feature (1)..(298): NCBI GI NO: 4159883 NR Description: phosphodiesterase I beta [Homo sapiens]
  misc_feature (4)..(298): NCBI GI NO: 9453796 NR Description: dJ131F15
  misc_feature (4)..(298): NCBI GI NO: 13324677 NR Description: ectonucleotide pyrophosphatase/phosphodiesterase 1
KNHDPKWWLGEPLWATAAAQGVLPATFFWPGSEVTKGSWNCPDKYCRHYNGSVPFEERVDTILGYFDLPPNQMPQFLTLYFEDPDHQGHQVGPDDPSITDAVVHIDEMLGRLIAGLEARGMFEDVNIILVGDHGMVGTCDRKLVFLEELAPWIELKSDWVLSMTPLLAIRPPDGVSPAEVVAKMNEGLGSGKVKNGEYLKMYLKEDLPTRLHYSESYRIPPIIGLVGEGYKIEMKRSKRNECGGAHGYDNAFFSMRTIFAAHGPRFQGGRTVPSFENVEIYNVMASILNLKPAPNNGSASFPGTILLPNK

SEQ ID NO: 36057 - protein, 238 aa, Zea mays subsp. mays
  peptide (1)..(238): Ceres Seq. ID no. 14305772
  misc_feature (1)..(218): Pfam Name: Pfam Description:  Type I phosphodiesterase / nucleotide pyrophosphatase
  misc_feature (1)..(238): NCBI GI NO: 34903578 NR Description: nucleotide pyrophosphatase homolog
  misc_feature (1)..(236): NCBI GI NO: 15233659 NR Description: nucleotide pyrophosphatase - like protein
  misc_feature (1)..(237): NCBI GI NO: 12081942 NR Description: nucleotide pyrophosphatase-like protein
  misc_feature (1)..(236): NCBI GI NO: 15233662 NR Description: nucleotide pyrophosphatase - like protein
  misc_feature (1)..(236): NCBI GI NO: 27808612 NR Description: At4g29690 [Arabidopsis thaliana]
  misc_feature (1)..(237): NCBI GI NO: 15233665 NR Description: nucleotide pyrophosphatase -related protein
  misc_feature (5)..(236): NCBI GI NO: 13877571 NR Description: nucleotide pyrophosphatase-like protein
  misc_feature (1)..(226): NCBI GI NO: 4159883 NR Description: phosphodiesterase I beta [Homo sapiens]
  misc_feature (1)..(226): NCBI GI NO: 9453796 NR Description: dJ131F15
  misc_feature (1)..(226): NCBI GI NO: 13324677 NR Description: ectonucleotide pyrophosphatase/phosphodiesterase 1
MPQFLTLYFEDPDHQGHQVGPDDPSITDAVVHIDEMLGRLIAGLEARGMFEDVNIILVGDHGMVGTCDRKLVFLEELAPWIELKSDWVLSMTPLLAIRPPDGVSPAEVVAKMNEGLGSGKVKNGEYLKMYLKEDLPTRLHYSESYRIPPIIGLVGEGYKIEMKRSKRNECGGAHGYDNAFFSMRTIFAAHGPRFQGGRTVPSFENVEIYNVMASILNLKPAPNNGSASFPGTILLPNK

SEQ ID NO: 36058 - protein, 203 aa, Zea mays subsp. mays
  peptide (1)..(203): Ceres Seq. ID no. 14305773
  misc_feature (1)..(183): Pfam Name: Pfam Description:  Type I phosphodiesterase / nucleotide pyrophosphatase
  misc_feature (1)..(203): NCBI GI NO: 34903578 NR Description: nucleotide pyrophosphatase homolog
  misc_feature (1)..(201): NCBI GI NO: 15233659 NR Description: nucleotide pyrophosphatase - like protein
  misc_feature (1)..(202): NCBI GI NO: 12081942 NR Description: nucleotide pyrophosphatase-like protein
  misc_feature (1)..(201): NCBI GI NO: 15233662 NR Description: nucleotide pyrophosphatase - like protein
  misc_feature (1)..(201): NCBI GI NO: 27808612 NR Description: At4g29690 [Arabidopsis thaliana]
  misc_feature (1)..(202): NCBI GI NO: 15233665 NR Description: nucleotide pyrophosphatase -related protein
  misc_feature (1)..(201): NCBI GI NO: 13877571 NR Description: nucleotide pyrophosphatase-like protein
  misc_feature (1)..(191): NCBI GI NO: 4159883 NR Description: phosphodiesterase I beta [Homo sapiens]
  misc_feature (1)..(191): NCBI GI NO: 9453796 NR Description: dJ131F15
  misc_feature (1)..(191): NCBI GI NO: 13324677 NR Description: ectonucleotide pyrophosphatase/phosphodiesterase 1
MLGRLIAGLEARGMFEDVNIILVGDHGMVGTCDRKLVFLEELAPWIELKSDWVLSMTPLLAIRPPDGVSPAEVVAKMNEGLGSGKVKNGEYLKMYLKEDLPTRLHYSESYRIPPIIGLVGEGYKIEMKRSKRNECGGAHGYDNAFFSMRTIFAAHGPRFQGGRTVPSFENVEIYNVMASILNLKPAPNNGSASFPGTILLPNK

SEQ ID NO: 36059 - DNA, 763 bp, Zea mays subsp. mays
  misc_feature (1)..(763): Ceres Seq. ID no. 15169969
atcacaagcgcttagtgatcagttaatactaagggcaggcacacctctgcttcgcgctagtgatcaagcaagtgctttctgtactctgcagcaatggcaggcaaggcctcggtcgcgctgttcctcgccgtgaacctggtggtgttcgccatggccagcgcctgcggtggcaactgccccacgccgaccccgtccaccccgtcgacgccgaccccgacgccggcctcgttcggcaagtgcccccgcgacgcgctcaagctgggcgtgtgcgccaacgtgctgggactgatcaaggccaaggtgggcgtgccgcccacggagccatgctgcccgctgctgaagggactcgtcgacctcgaggccgccgtgtgcctctgcaccgccatcaagggcgaggtcctcggaatcaagctcaacctgcccgtcgacctcagcctcatcctcaaccactgcggcaagaccgtgcccaccggattcaaatgcctctaagctagccgcgagcatgcggatatatatgtgttcttttggttgccattcgcctgcagacttcttgtcgtttgctacttattaagcgagtgctagctctgcatgcatgactacgtcctttgcatgttgatgagcaactttcgatacttttgggtgtttgttttatgtaagtgcttcgtcctttacatcgacagtgtcccagaactatttgtactgttattcttttatttgtacccagcaatctgctcgatgaaataaagcttattatatttattgg

SEQ ID NO: 36060 - protein, 131 aa, Zea mays subsp. mays
  peptide (1)..(131): Ceres Seq. ID no. 15169970
  misc_feature (49)..(130): Pfam Name: Pfam Description:  Protease inhibitor/seed storage/LTP family
  misc_feature (1)..(130): NCBI GI NO: 38345484 NR Description: OSJNBa0010H02.22
  misc_feature (1)..(130): NCBI GI NO: 38345485 NR Description: OSJNBa0010H02.23
  misc_feature (1)..(130): NCBI GI NO: 1084461 NR Description: root-specific protein RCc3 - rice
  misc_feature (1)..(130): NCBI GI NO: 7484770 NR Description: extensin like protein - black poplar
  misc_feature (1)..(131): NCBI GI NO: 37536722 NR Description: putative lipid transfer protein
  misc_feature (1)..(130): NCBI GI NO: 37536718 NR Description: putative lipid transfer protein
  misc_feature (1)..(130): NCBI GI NO: 39748092 NR Description: lipid transfer protein-like protein
  misc_feature (5)..(131): NCBI GI NO: 21360370 NR Description: extensin-like protein [Citrus junos]
  misc_feature (29)..(130): NCBI GI NO: 7488729 NR Description: CIC protein, cold-inducible - alfalfa
  misc_feature (29)..(130): NCBI GI NO: 15235390 NR Description: protease inhibitor/seed storage/lipid transfer
MAGKASVALFLAVNLVVFAMASACGGNCPTPTPSTPSTPTPTPASFGKCPRDALKLGVCANVLGLIKAKVGVPPTEPCCPLLKGLVDLEAAVCLCTAIKGEVLGIKLNLPVDLSLILNHCGKTVPTGFKCL

SEQ ID NO: 36061 - protein, 112 aa, Zea mays subsp. mays
  peptide (1)..(112): Ceres Seq. ID no. 15169971
  misc_feature (30)..(111): Pfam Name: Pfam Description:  Protease inhibitor/seed storage/LTP family
  misc_feature (1)..(111): NCBI GI NO: 38345484 NR Description: OSJNBa0010H02.22
  misc_feature (1)..(111): NCBI GI NO: 38345485 NR Description: OSJNBa0010H02.23
  misc_feature (1)..(111): NCBI GI NO: 1084461 NR Description: root-specific protein RCc3 - rice
  misc_feature (1)..(111): NCBI GI NO: 7484770 NR Description: extensin like protein - black poplar
  misc_feature (1)..(112): NCBI GI NO: 37536722 NR Description: putative lipid transfer protein
  misc_feature (1)..(111): NCBI GI NO: 37536718 NR Description: putative lipid transfer protein
  misc_feature (1)..(111): NCBI GI NO: 39748092 NR Description: lipid transfer protein-like protein
  misc_feature (1)..(112): NCBI GI NO: 21360370 NR Description: extensin-like protein [Citrus junos]
  misc_feature (10)..(111): NCBI GI NO: 7488729 NR Description: CIC protein, cold-inducible - alfalfa
  misc_feature (10)..(111): NCBI GI NO: 15235390 NR Description: protease inhibitor/seed storage/lipid transfer
MASACGGNCPTPTPSTPSTPTPTPASFGKCPRDALKLGVCANVLGLIKAKVGVPPTEPCCPLLKGLVDLEAAVCLCTAIKGEVLGIKLNLPVDLSLILNHCGKTVPTGFKCL

SEQ ID NO: 36062 - DNA, 437 bp, Zea mays subsp. mays
  misc_feature (1)..(437): Ceres Seq. ID no. 3477340
gtggctctcaacttggatttcgatcaagtcaaggagtttgtcaaggascggctgggggttgaggttgagatgggtggctgcaaggctccaatcacgaccttcatcgtcgagccatttgtgccacatgatcaagagtactacctttcgattgtctcagagaggttgggcagcaccatcagcttctcagagtgtggagggattgagatcgaggagaactgggacaaggttaagactattttccttcctactgagaagccaatgacgtctgattcatgtgctcctttgattgcaacccttccattggaggcacscggaaaaawtggtgacttcattaaaggagtgtttgccgtcttcctagacttggatttctcattttyttgaratgaatccgttcaccatggtcaatggggagccatatcctctggacatgagaggag

SEQ ID NO: 36063 - protein, 126 aa, Zea mays subsp. mays
  peptide (1)..(126): Ceres Seq. ID no. 3477341
  misc_feature (1)..(125): NCBI GI NO: 15217510 NR Description: unknown protein; protein id: At1g09430.1
  misc_feature (1)..(125): NCBI GI NO: 15220186 NR Description: ATP citrate-lyase, putative; protein id:At1g10670
  misc_feature (1)..(125): NCBI GI NO: 21593129 NR Description: ATP citrate-lyase, putative [Arabidopsis thaliana]
  misc_feature (1)..(125): NCBI GI NO: 15919089 NR Description: ATP citrate lyase b-subunit [Lupinus albus]
  misc_feature (1)..(125): NCBI GI NO: 15219818 NR Description: ATP citrate-lyase, putative; protein id:At1g60810
  misc_feature (1)..(125): NCBI GI NO: 19698853 NR Description: similar to ATP-citrate-lyase
  misc_feature (3)..(125): NCBI GI NO: 19114158 NR Description: putative ATP-citrate (pro-S-) lyase (EC 4.1.3.8)
  misc_feature (1)..(125): NCBI GI NO: 29293809 NR Description: ATP citrate lyase [Mus musculus]
  misc_feature (1)..(125): NCBI GI NO: 7159697 NR Description: ATP-citrat-lyase [Gibberella pulicaris]
  misc_feature (1)..(125): NCBI GI NO: 8392839 NR Description: ATP citrate lyase [Rattus norvegicus]
  misc_feature (16)..(16): Xaa is any aa, unknown or other
  misc_feature (104)..(104): Xaa is any aa, unknown or other
  misc_feature (107)..(107): Xaa is any aa, unknown or other
  misc_feature (126)..(126): Xaa is any aa, unknown or other
VALNLDFDQVKEFVKXRLGVEVEMGGCKAPITTFIVEPFVPHDQEYYLSIVSERLGSTISFSECGGIEIEENWDKVKTIFLPTEKPMTSDSCAPLIATLPLEAXGKXGDFIKGVFAVFLDLDFSFX

SEQ ID NO: 36064 - protein, 103 aa, Zea mays subsp. mays
  peptide (1)..(103): Ceres Seq. ID no. 3477342
  misc_feature (1)..(102): NCBI GI NO: 15217510 NR Description: unknown protein; protein id: At1g09430.1
  misc_feature (1)..(102): NCBI GI NO: 15220186 NR Description: ATP citrate-lyase, putative; protein id:At1g10670
  misc_feature (1)..(102): NCBI GI NO: 21593129 NR Description: ATP citrate-lyase, putative [Arabidopsis thaliana]
  misc_feature (1)..(102): NCBI GI NO: 15919089 NR Description: ATP citrate lyase b-subunit [Lupinus albus]
  misc_feature (1)..(102): NCBI GI NO: 15219818 NR Description: ATP citrate-lyase, putative; protein id:At1g60810
  misc_feature (1)..(102): NCBI GI NO: 19698853 NR Description: similar to ATP-citrate-lyase
  misc_feature (1)..(102): NCBI GI NO: 19114158 NR Description: putative ATP-citrate (pro-S-) lyase (EC 4.1.3.8)
  misc_feature (1)..(102): NCBI GI NO: 29293809 NR Description: ATP citrate lyase [Mus musculus]
  misc_feature (1)..(102): NCBI GI NO: 7159697 NR Description: ATP-citrat-lyase [Gibberella pulicaris]
  misc_feature (1)..(102): NCBI GI NO: 8392839 NR Description: ATP citrate lyase [Rattus norvegicus]
  misc_feature (81)..(81): Xaa is any aa, unknown or other
  misc_feature (84)..(84): Xaa is any aa, unknown or other
  misc_feature (103)..(103): Xaa is any aa, unknown or other
MGGCKAPITTFIVEPFVPHDQEYYLSIVSERLGSTISFSECGGIEIEENWDKVKTIFLPTEKPMTSDSCAPLIATLPLEAXGKXGDFIKGVFAVFLDLDFSFX

SEQ ID NO: 36065 - protein, 86 aa, Zea mays subsp. mays
  peptide (1)..(86): Ceres Seq. ID no. 3477343
  misc_feature (16)..(16): Xaa is any aa, unknown or other
WLSTWISIKSRSLSRXGWGLRLRWVAARLQSRPSSSSHLCHMIKSTTFRLSQRGWAAPSASQSVEGLRSRRTGTRLRLFSFLLRSQ

SEQ ID NO: 36066 - DNA, 1080 bp, Zea mays subsp. mays
  misc_feature (1)..(1080): Ceres Seq. ID no. 12634491
actcaattatcaaaaccaaactagggacattcaaatggttggcttactttttgctacagagttgcctcttcgcatggctgatttcggagtgcttcatagaaatgagcttagtggtgcacttactggtttgacacgggttagaagattccagcaggatgatgctcatatcttctgcagagaggaccaaatcaaggacgaggttaaggctgttttggaattcatcaattatgtttacgagatatttggcttcaaatatgagttggagttgtctacgagaccagagaagtatctaggtgaagttgaaacttggaacaaagctgaacaacaattgacagaagctttaaatgagtttgggaagccatggaagattaatgaaggggatggtgctttctacggcccaaaaattgatattggtgtgtttgatgcccttaagaggaaatttcagtgtgcaaccctacagctggattttcagctgcccattcggttcaagctggcttattctgctgaggatgaagccaaaattgaaaggcctgtgatgatacacagggcaatcctaggttcggttgaaaggatgcttgccattcttttggagcattacaatggtaaatggcccttatggctaagccctcgccaggccattgtttgctcggtatcttctggttcagtggaatatgcgaaacaggttcttgccactctacatgaagctggttttcatgttgatattgacgcgagtgacaggacaatacaaaagaaggtacgggaagctcaactggcccaattcaactacattcttgtcgtaggtgcacaagaggccgagactggaaatatatgcgttagggtaagagacaatgctgacctggtcacaacgagtgtagatggcttcatcacacgtttgagggacgaaatcgcagccttcaaatgattttgatgctgcataatttcctactactcgtttgtgattttgacgagtttttagtgaccagcatcgagttcctcgtgttactgttcttgtttgtatgaagctaaaaggttgtctttttgttattaattacagatgcgaagttaaatactgccgctagt

SEQ ID NO: 36067 - protein, 306 aa, Zea mays subsp. mays
  peptide (1)..(306): Ceres Seq. ID no. 12634492
  misc_feature (20)..(85): Pfam Name: G, H, P, S and T Pfam Description: tRNA synthetase class II core domain
  misc_feature (20)..(306): NCBI GI NO: 38175524 NR Description: putative threonyl-tRNA synthetase
  misc_feature (20)..(306): NCBI GI NO: 20429011 NR Description: threonyl-tRNA synthetase
  misc_feature (20)..(305): NCBI GI NO: 11271129 NR Description: threonine-tRNA ligase (EC 6.1.1.3)
  misc_feature (20)..(305): NCBI GI NO: 15081626 NR Description: AT5g26830/F2P16_90 [Arabidopsis thaliana]
  misc_feature (20)..(305): NCBI GI NO: 30690426 NR Description: threonyl-tRNA synthetase [Arabidopsis thaliana]
  misc_feature (20)..(305): NCBI GI NO: 7437517 NR Description: threonine-tRNA ligase (EC 6
  misc_feature (20)..(304): NCBI GI NO: 21428938 NR Description: GH20022p [Drosophila melanogaster]
  misc_feature (20)..(304): NCBI GI NO: 24583839 NR Description: Threonyl-tRNA synthetase CG5353-PA
  misc_feature (20)..(304): NCBI GI NO: 24583842 NR Description: Threonyl-tRNA synthetase CG5353-PC
  misc_feature (20)..(304): NCBI GI NO: 25013040 NR Description: RH56418p [Drosophila melanogaster]
LNYQNQTRDIQMVGLLFATELPLRMADFGVLHRNELSGALTGLTRVRRFQQDDAHIFCREDQIKDEVKAVLEFINYVYEIFGFKYELELSTRPEKYLGEVETWNKAEQQLTEALNEFGKPWKINEGDGAFYGPKIDIGVFDALKRKFQCATLQLDFQLPIRFKLAYSAEDEAKIERPVMIHRAILGSVERMLAILLEHYNGKWPLWLSPRQAIVCSVSSGSVEYAKQVLATLHEAGFHVDIDASDRTIQKKVREAQLAQFNYILVVGAQEAETGNICVRVRDNADLVTTSVDGFITRLRDEIAAFK

SEQ ID NO: 36068 - protein, 295 aa, Zea mays subsp. mays
  peptide (1)..(295): Ceres Seq. ID no. 12634493
  misc_feature (9)..(74): Pfam Name: G, H, P, S and T Pfam Description: tRNA synthetase class II core domain
  misc_feature (9)..(295): NCBI GI NO: 38175524 NR Description: putative threonyl-tRNA synthetase
  misc_feature (9)..(295): NCBI GI NO: 20429011 NR Description: threonyl-tRNA synthetase
  misc_feature (9)..(294): NCBI GI NO: 11271129 NR Description: threonine-tRNA ligase (EC 6.1.1.3)
  misc_feature (9)..(294): NCBI GI NO: 15081626 NR Description: AT5g26830/F2P16_90 [Arabidopsis thaliana]
  misc_feature (9)..(294): NCBI GI NO: 30690426 NR Description: threonyl-tRNA synthetase [Arabidopsis thaliana]
  misc_feature (9)..(294): NCBI GI NO: 7437517 NR Description: threonine-tRNA ligase (EC 6
  misc_feature (9)..(293): NCBI GI NO: 21428938 NR Description: GH20022p [Drosophila melanogaster]
  misc_feature (9)..(293): NCBI GI NO: 25013040 NR Description: RH56418p [Drosophila melanogaster]
  misc_feature (9)..(293): NCBI GI NO: 24583842 NR Description: Threonyl-tRNA synthetase CG5353-PC
  misc_feature (9)..(293): NCBI GI NO: 24583839 NR Description: Threonyl-tRNA synthetase CG5353-PA
MVGLLFATELPLRMADFGVLHRNELSGALTGLTRVRRFQQDDAHIFCREDQIKDEVKAVLEFINYVYEIFGFKYELELSTRPEKYLGEVETWNKAEQQLTEALNEFGKPWKINEGDGAFYGPKIDIGVFDALKRKFQCATLQLDFQLPIRFKLAYSAEDEAKIERPVMIHRAILGSVERMLAILLEHYNGKWPLWLSPRQAIVCSVSSGSVEYAKQVLATLHEAGFHVDIDASDRTIQKKVREAQLAQFNYILVVGAQEAETGNICVRVRDNADLVTTSVDGFITRLRDEIAAFK

SEQ ID NO: 36069 - protein, 282 aa, Zea mays subsp. mays
  peptide (1)..(282): Ceres Seq. ID no. 12634494
  misc_feature (1)..(61): Pfam Name: G, H, P, S and T Pfam Description: tRNA synthetase class II core domain
  misc_feature (1)..(282): NCBI GI NO: 38175524 NR Description: putative threonyl-tRNA synthetase
  misc_feature (1)..(282): NCBI GI NO: 20429011 NR Description: threonyl-tRNA synthetase
  misc_feature (1)..(281): NCBI GI NO: 11271129 NR Description: threonine-tRNA ligase (EC 6.1.1.3)
  misc_feature (1)..(281): NCBI GI NO: 15081626 NR Description: AT5g26830/F2P16_90 [Arabidopsis thaliana]
  misc_feature (1)..(281): NCBI GI NO: 30690426 NR Description: threonyl-tRNA synthetase [Arabidopsis thaliana]
  misc_feature (1)..(281): NCBI GI NO: 7437517 NR Description: threonine-tRNA ligase (EC 6
  misc_feature (1)..(280): NCBI GI NO: 21428938 NR Description: GH20022p [Drosophila melanogaster]
  misc_feature (1)..(280): NCBI GI NO: 24583839 NR Description: Threonyl-tRNA synthetase CG5353-PA
  misc_feature (1)..(280): NCBI GI NO: 24583842 NR Description: Threonyl-tRNA synthetase CG5353-PC
  misc_feature (1)..(280): NCBI GI NO: 25013040 NR Description: RH56418p [Drosophila melanogaster]
MADFGVLHRNELSGALTGLTRVRRFQQDDAHIFCREDQIKDEVKAVLEFINYVYEIFGFKYELELSTRPEKYLGEVETWNKAEQQLTEALNEFGKPWKINEGDGAFYGPKIDIGVFDALKRKFQCATLQLDFQLPIRFKLAYSAEDEAKIERPVMIHRAILGSVERMLAILLEHYNGKWPLWLSPRQAIVCSVSSGSVEYAKQVLATLHEAGFHVDIDASDRTIQKKVREAQLAQFNYILVVGAQEAETGNICVRVRDNADLVTTSVDGFITRLRDEIAAFK

SEQ ID NO: 36070 - DNA, 480 bp, Zea mays subsp. mays
  misc_feature (1)..(480): Ceres Seq. ID no. 13571785
tttactgaactgcactgaccactattcagcattaggtttccgtcsmtatgagaacatagatgtatcatctcttaagagagaatacaagaaaaaggctatgttagtccatcctgataagaatatgggcaatgataaagctgctgatgcatttaaaaagcttcaaaatgcatatgagattcttcttgattcactgaaacgcaagacatatgatgatgagttgaggagggaagacctcttgaactacttcaggcagagtgtttctcaaaagaatggaagaaacagtactttccaacatgggttcagcccttcagaaggtgttgatgaaggtccttatggtctttccagaagaatagcttgtaaaaagtgcagcgactttcatctttggatttatactggaagagctaaatcacaagcgagatggtgtcaggactgcaaggagttccatcaagctaaagatggcgatggatgggtcgaacagtc

SEQ ID NO: 36071 - protein, 159 aa, Zea mays subsp. mays
  peptide (1)..(159): Ceres Seq. ID no. 13571786
  misc_feature (6)..(73): Pfam Name: Pfam Description:  DnaJ domain
  misc_feature (1)..(158): NCBI GI NO: 15240510 NR Description: DnaJ protein family [Arabidopsis thaliana]
  misc_feature (59)..(158): NCBI GI NO: 29371958 NR Description: DNAJ-like protein
  misc_feature (1)..(158): NCBI GI NO: 6069485 NR Description: S-locus protein 5 [Brassica rapa]
  misc_feature (1)..(158): NCBI GI NO: 15219309 NR Description: S-locus protein, putative [Arabidopsis thaliana]
  misc_feature (1)..(158): NCBI GI NO: 25518299 NR Description: hypothetical protein F19K19
  misc_feature (1)..(158): NCBI GI NO: 7487909 NR Description: hypothetical protein YUP8H12R
  misc_feature (1)..(77): NCBI GI NO: 30699386 NR Description: S-locus protein, putative [Arabidopsis thaliana]
  misc_feature (6)..(101): NCBI GI NO: 27904644 NR Description: chaperone protein DnaJ
  misc_feature (1)..(158): NCBI GI NO: 15291559 NR Description: GH27269p [Drosophila melanogaster]
  misc_feature (1)..(158): NCBI GI NO: 24643995 NR Description: CG14650-PA [Drosophila melanogaster]
  misc_feature (15)..(15): Xaa is any aa, unknown or other
LLNCTDHYSALGFRXYENIDVSSLKREYKKKAMLVHPDKNMGNDKAADAFKKLQNAYEILLDSLKRKTYDDELRREDLLNYFRQSVSQKNGRNSTFQHGFSPSEGVDEGPYGLSRRIACKKCSDFHLWIYTGRAKSQARWCQDCKEFHQAKDGDGWVEQ

SEQ ID NO: 36072 - protein, 127 aa, Zea mays subsp. mays
  peptide (1)..(127): Ceres Seq. ID no. 13571787
  misc_feature (1)..(126): NCBI GI NO: 15240510 NR Description: DnaJ protein family [Arabidopsis thaliana]
  misc_feature (27)..(126): NCBI GI NO: 29371958 NR Description: DNAJ-like protein
  misc_feature (1)..(126): NCBI GI NO: 6069485 NR Description: S-locus protein 5 [Brassica rapa]
  misc_feature (1)..(126): NCBI GI NO: 15219309 NR Description: S-locus protein, putative [Arabidopsis thaliana]
  misc_feature (1)..(126): NCBI GI NO: 25518299 NR Description: hypothetical protein F19K19
  misc_feature (1)..(126): NCBI GI NO: 7487909 NR Description: hypothetical protein YUP8H12R
  misc_feature (1)..(45): NCBI GI NO: 30699386 NR Description: S-locus protein, putative [Arabidopsis thaliana]
  misc_feature (1)..(69): NCBI GI NO: 27904644 NR Description: chaperone protein DnaJ
  misc_feature (1)..(126): NCBI GI NO: 15291559 NR Description: GH27269p [Drosophila melanogaster]
  misc_feature (1)..(126): NCBI GI NO: 24643995 NR Description: CG14650-PA [Drosophila melanogaster]
MLVHPDKNMGNDKAADAFKKLQNAYEILLDSLKRKTYDDELRREDLLNYFRQSVSQKNGRNSTFQHGFSPSEGVDEGPYGLSRRIACKKCSDFHLWIYTGRAKSQARWCQDCKEFHQAKDGDGWVEQ

SEQ ID NO: 36073 - protein, 119 aa, Zea mays subsp. mays
  peptide (1)..(119): Ceres Seq. ID no. 13571788
  misc_feature (1)..(118): NCBI GI NO: 15240510 NR Description: DnaJ protein family [Arabidopsis thaliana]
  misc_feature (19)..(118): NCBI GI NO: 29371958 NR Description: DNAJ-like protein
  misc_feature (1)..(118): NCBI GI NO: 6069485 NR Description: S-locus protein 5 [Brassica rapa]
  misc_feature (1)..(118): NCBI GI NO: 15219309 NR Description: S-locus protein, putative [Arabidopsis thaliana]
  misc_feature (1)..(118): NCBI GI NO: 25518299 NR Description: hypothetical protein F19K19
  misc_feature (1)..(118): NCBI GI NO: 7487909 NR Description: hypothetical protein YUP8H12R
  misc_feature (1)..(37): NCBI GI NO: 30699386 NR Description: S-locus protein, putative [Arabidopsis thaliana]
  misc_feature (1)..(61): NCBI GI NO: 27904644 NR Description: chaperone protein DnaJ
  misc_feature (1)..(118): NCBI GI NO: 15291559 NR Description: GH27269p [Drosophila melanogaster]
  misc_feature (1)..(118): NCBI GI NO: 24643995 NR Description: CG14650-PA [Drosophila melanogaster]
MGNDKAADAFKKLQNAYEILLDSLKRKTYDDELRREDLLNYFRQSVSQKNGRNSTFQHGFSPSEGVDEGPYGLSRRIACKKCSDFHLWIYTGRAKSQARWCQDCKEFHQAKDGDGWVEQ

SEQ ID NO: 36074 - DNA, 1458 bp, Zea mays subsp. mays
  misc_feature (1)..(1458): Ceres Seq. ID no. 13586374
aaaaaacaacaactacttcctagtataaagtgacagtagcgggggagaagggaacgaaccaagcaacccaatccaaaccagacaagcaaggaatcccccgatggctcatcgcgttctcctcctcctctctctcgcgtcggccgccgcggttgccgccgccgtcgacgcggaggacccgctgatccggcaggtggttcccggtggagatgacaacgatctggagctgaacgcggagtcccacttcctgagcttcgtgcagcggttcggcaagtcctacaaggacgccgacgagcacgcgtaccggctgtccgttttcaaggacaacctgcgccgcgcgcgccggcaccagctgctggacccgtcggcggagcacggcgtcactaagttctccgacctcacgccggcagagttccgccggacctacctcggcctccgcaagtcccggcgcgctctcctcagagaactcggggagtcggcgcacgaggcgcccgtgctccccaccgatggtctccccgacgatttcgactggagggaccacggtgccgtcggccccgtcaagaaccagggttcgtgcgggtcgtgctggtcgttcagcgcgtctggagcgctggagggtgcgcactacctcgcaactggcaagctggaggtgctttcggagcagcagttcgtcgactgtgaccacgagtgtgattcatcggagcctgattcatgtgattcgggttgcaatggtgggctaatgacgacggcattcagttatctccagaaggccggtggccttgagagtgagaaggattacccttacactgggagtgatggcaaatgcaagtttgacaagtccaagattgttgcttcagttcagaacttcagtgttgtgtctgtggacgaggctcaaatttctgctaacctcatcaaacatgggccattggcaatcggcatcaatgctgcctacatgcagacatacatcggaggcgtgtcatgcccatacatctgtggcaggcaccttgaccatggtgttctccttgttggatatggtgcttctggtttcgcccccattcgcctgaaggacaagccttactggatcatcaagaactcgtggggcgagaactggggggagaacggatactacaagatatgcaggggttccaacgttcgcaacaagtgcggcgtcgattccatggtctctaccgtgtccgcagtccacgcctcgaaggagtagactctggtcagcggtgataatcgtgattccatatattgtagaactataatccctgctagtaatccatttgtgctgtttatgtatcgaaggcagcaaagatgtgtgaaagcggcaatgggatgcttgctgtaaggtaatatgtttggcttgctaggcatgctacacgctatttggatgtagcaacgttatcaccagctgtatacgctttttaatcgacaacatttgaataatatgtacataac
